United States Patent Application Publication US 2010/0120628 A1 - sequence listing, part 6

SEQ ID NO: 10135 - DNA, 2775 bp, Homo sapiens
actccttaaatagagccggcagcgcgctccgctcggcatttcccgaagagccagatcgcggccggcgccagcgccaccgtccggtccacccgccagcccgcacagccgcgccgccgccgagcgtttcgtgagcggcgctccgaggatcaggaatggggcttcgggcgctgggcgcgctccgaacccggcgcacgtaagagcctgggagcgcccgagccgcccggctgcccggagccccatcgcctaggaccgggagatgctggaaatgcaaccgcctgttccccgaggagccgctgcccccgggaccccctggcactgtgcgcaccctggtcagcagcccccggagaagacggcgcccccaacgcccgacccgcgtggccgtggcagcgccacgcgagccctctaggcgaccgcagggccacagcagctcagccgccggtgccccctcggaaaccatgacccccggcgcgggcccatggagccatggcctatagggtcctgggccgcgcggggccacctcagccgcggagggcgcgcaggctgctcttcgccttcacgctctcgctctcctgcacttacctgtgttacagcttcctgtgctgctgcgacgacctgggtcggagccgcctcctcggcgcgcctcgctgcctccgcggccccagcgcgggcggccagaaacttctccagaagtcccgcccctgtgatccctccgggccgacgcccagcgagcccagcgctcccagcgcgcccgccgccgccgtgcccgcccctcgcctctccggttccaaccactccggctcacccaagctgggtaccaagcggttgccccaagccctcattgtgggcgtgaagaaggggggcacccgggccgtgctggagtttatccgagtacacccggacgtgcgggccttgggcacggaaccccacttctttgacaggaactacggccgcgggctggattggtacaggagcctgatgcccaggaccctcgagagccagatcacgctggagaagacgcccagctactttgtcactcaagaggctcctcgacgcatcttcaacatgtcccgagacaccaagctgatcgtggttgtgcggaaccctgtgacccgtgccatctctgattacacgcagacactctccaagaagcccgacatcccgacctttgagggcctctccttccgcaaccgcaccctgggcctggtggacgtgtcatggaacgccatccgcatcggcatgtacgtgctgcacctggagagctggctgcagtacttcccgctagctcagattcacttcgtcagtggcgagcgactcatcactgacccggccggcgagatggggcgagtccaggacttcctgggcattaagagattcatcacggacaagcacttctatttcaacaagaccaaaggattcccttgcttgaaaaaaacagaatcgagcctcctgcctcgatgcttgggcaaatcaaaagggagaactcatgtacagattgatcctgaagtgatagaccagctccgagaattttatagaccgtataatatcaaattttatgaaaccgttgggcaggacttcaggtgggaataagcccacgaaaggaaagggctctcaagggctcttctgctcatctcttccgtgagatttgctcccagaccctctgatctccctccaacaaaccctggctccagccccctttcccaacttgagttgcatcatcttggaaccaggaagcccagctaaagccaagagaccagagagtccctgccactagttttcatcagtctgttcaagcaaagttgatctgctcctggcacgtccagtaaattccagaatcattctcctttctgcccataaagggccttggagaattgctttaagaagagtgaatgttccaatgatgatagatattataagcgatgatggttctgttgctatgaacacagcagtcggtccctgtcattgtccacccaggagtggccttgttaattccaagtggcatgtatcttccctctgagcttcatttcttcaagatgctctgggtggtgggatgggagaccatcctcagccctcctcagaccttatcaattcattgagagattgcaaagctgaaagcacctccggccactcctgggagacagaccctttggtgatgaaataaaccagtgacttcagagcctatggtctcaactgtgcttgaaaaacactgtctctgaaaacaactttgtgattctccctgctccctgtggacaaaagcacataattctgctgttacgggtactttgctcatacgagctttcatgttcagcatgcaatggaatcatgcttgtccatgtgaaataaatatggctctctcgtgtccttaatgctgggcttttctctgtaagctggttctgcagcacaattcattaattaaacttctcccagtgcaagaaggcagctggtgctgggggtggtctggggggtcagggaggagggcaaggactacatggggcagaggcaaggcggtggtggagatgaggaaagaagttcttcttggcagaagctggggcagaaagatcacatgagatctgtggggacaccctctatctgaaacataagtctgtgttcattctctgcttagaaattttagatctgaagtgctacactgaaggtccgaaggttgatggggcatcagatatctttttggttggccagcatgatattttgaaataactgtcaacagttagaaactgggagcattcatatgtaaaaaatatggattttcagcttcttctt

SEQ ID NO: 10136 - protein, 367 aa, Homo sapiens; identical to SEQ ID NO: 1578

SEQ ID NO: 10137 - DNA, 2625 bp, Homo sapiens
ggcatttcccgaagagccagatcgcggccggcgccagcgccaccgtccggtccacccgccagcccgcacagccgcgccgccgccgagcgtttcgtgagcggcgctccgaggatcaggaatggggcttcgggcgctgggcgcgctccgaacccggcgcacgtaagagcctgggagcgcccgagccgcccggctgcccggagccccatcgcctaggaccgggagatgctggaaatgcaaccgcctgttccccgaggagccgctgcccccgggaccccctggcactgtgcgcaccctggtcagcagcccccggagaagacggcgcccccaacgcccgacccgcgtggccgtggcagcgccacgcgagccctctaggcgaccgcagggccacagcagctcagccgccggtgccccctcggaaaccatgacccccggcgcgggcccatggagccatggcctatagggtcctgggccgcgcggggccacctcagccgcggagggcgcgcaggctgctcttcgccttcacgctctcgctctcctgcacttacctgtgttacagcttcctgtgctgctgcgacgacctgggtcggagccgcctcctcggcgcgcctcgctgcctccgcggccccagcgcgggcggccagaaacttctccagaagtcccgcccctgtgatccctccgggccgacgcccagcgagcccagcgctcccagcgcgcccgccgccgccgtgcccgcccctcgcctctccggttccaaccactccggctcacccaagctgggtaccaagcggttgccccaagccctcattgtgggcgtgaagaaggggggcacccgggccgtgctggagtttatccgagtacacccggacgtgcgggccttgggcacggaaccccacttctttgacaggaactacggccgcgggctggattggtacaggtgactcagacactacctgtgtggttgtcggtgcacacacttgggtgattgtgctgaagctacctggactggagacaagaatgtgtgtcttgctaaactgtggatgataattaaattcatggaagcagcagcaatgacccaggagcacgtatagctggagaagaaggtcagagggtctcactctgtcattcaagcttgggtgcagtggaatgatcatagctcacttcaacctcaaactcctgggctcaagcggtcctcccacctcagcttcccaaggagctgacactacaggagcctgatgcccaggaccctcgagagccagatcacgctggagaagacgcccagctactttgtcactcaagaggctcctcgacgcatcttcaacatgtcccgagacaccaagctgatcgtggttgtgcggaaccctgtgacccgtgccatctctgattacacgcagacactctccaagaagcccgacatcccgacctttgagggcctctccttccgcaaccgcaccctgggcctggtggacgtgtcatggaacgccatccgcatcggcatgtacgtgctgcacctggagagctggctgcagtacttcccgctagctcagattcacttcgtcagtggcgagcgactcatcactgacccggccggcgagatggggcgagtccaggacttcctgggcattaagagattcatcacggacaagcacttctatttcaacaagaccaaaggattcccttgcttgaaaaaaacagaatcgagcctcctgcctcgatgcttgggcaaatcaaaagggagaactcatgtacagattgatcctgaagtgatagaccagctccgagaattttatagaccgtataatatcaaattttatgaaaccgttgggcaggacttcaggtgggaataagcccacgaaaggaaagggctctcaagggctcttctgctcatctcttccgtgagatttgctcccagaccctctgatctccctccaacaaaccctggctccagccccctttcccaacttgagttgcatcatcttggaaccaggaagcccagctaaagccaagagaccagagagtccctgccactagttttcatcagtctgttcaagcaaagttgatctgctcctggcacgtccagtaaattccagaatcattctcctttctgcccataaagggccttggagaattgctttaagaagagtgaatgttccaatgatgatagatattataagcgatgatggttctgttgctatgaacacagcagtcggtccctgtcattgtccacccaggagtggccttgttaattccaagtggcatgtatcttccctctgagcttcatttcttcaagatgctctgggtggtgggatgggagaccatcctcagccctcctcagaccttatcaattcattgagagattgcaaagctgaaagcacctccggccactcctgggagacagaccctttggtgatgaaataaaccagtgacttcagagcctatggtctcaactgtgcttgaaaaacactgtctctgaaaacaactttgtgattctccctgctccctgtggacaaaagcacataattctgctgttacgggtactttgctcatacgagctttcatgttcagcatgcaatggaatcatgcttgtccatgtgaaataaatatggctctctcgtgtccttaatgctg

SEQ ID NO: 10138 - protein, 162 aa, Homo sapiens
MAYRVLGRAGPPQPRRARRLLFAFTLSLSCTYLCYSFLCCCDDLGRSRLLGAPRCLRGPSAGGQKLLQKSRPCDPSGPTPSEPSAPSAPAAAVPAPRLSGSNHSGSPKLGTKRLPQALIVGVKKGGTRAVLEFIRVHPDVRALGTEPHFFDRNYGRGLDWYR

SEQ ID NO: 10139 - DNA, 313 bp, Homo sapiens
ctgtttggggctcagtcttagcttaggaaactgtttgccagtttcacccatcctctgccatggatgctaggaggactgatttctgtaggctgcatctcagatttccatgtcacttcattcccagtttggttcagccagtgggagatccttgaaggtgtctgagttggggccattccaccgcaacctgcccctgctggactcatctgtggttgcactcatcatgaaagcaaagtctttctgtctctcggccttcctttcctcccttgcaagaagtcaaacctgacagaggtcggcaggcgggtggatgagtgag

SEQ ID NO: 10140 - protein, 58 aa, Homo sapiens
MSLHSQFGSASGRSLKVSELGPFHRNLPLLDSSVVALIMKAKSFCLSAFLSSLARSQT

SEQ ID NO: 10141 - DNA, 1670 bp, Homo sapiens
tgatgtttgagccagcatgtcgcggaggaagcaagcgaagcctcaacatttccaatccgaccccgaagtggcctcgctcccccggcgagatggtacacatgggcactcacatgtggaatagcacccctgcacgacggggtcggcggctctctgtggatggccccatgacatttctaggaggcaatcccgtcaagttcccagaaatgttccagaaggatttggcggcaagatcaggaagtggggatccttccagcttctggaatcagtatgcagcagcgctctccaacgggctggcgatgaaggccaacgagatctccgtcattcagaacggtggcatccctccaattcctggaagcctcggcagtgggaacagctcacctgttagtgggctgacgggaaacctggagaggctccagaactcagagcccaatgctcccctggccggcctggagaaaatggcaagcagtgagaacggaaccaacttccgcttcacccgcttcgtggaggacagcaaggagatcgtcacgagttaaagcagctcgggctggagacatagcattcattcctgttcagaatgcgacctatggtggcctcctactccttgccccccaccccgccccgccccttccttctgttccccagatctatgaactacaacattatgaagacattcttttgtaccttgttcaactttagagttctaagaaagcttatttattagcgatataaccttgctttgcaaacagaatgcaagcgttaactttggtcttctgtattttggactaaatactaattgactagagtgctgtaaacttgctgtaacatttatggcaattgcaagttgccctgctaggcagttgtaatctggcattaacttattttctatatccagtttaatatgaatctggtgttgatgcaatgcctcagtgatgcattagatctctaataaagtctgtatatacatgtacactttgatcctgctggaaaattttatcagcaaacacattgtctaatctttcaaaacagatttaaggaaaggactgaaagtacagactgaacagtgtggttctttgaaaggtttggttttttaatttttattctaaaattcaacctttttttttgtcgatttaaccatttccattttgaactgctatttgtattgtgctttttacttgagtcgtcttcaatgttaataagtttctgtacagtaataagcacgcagaattctttagagaaaaagaaaacaagcgttgttttggtagttgaaactgagacgtaacattttgccttgtaggtatattcacgatagaaaatgtgtgctggaatttcacaatgctgctaagtatagcatcttgaacaaccttcagtggagaaaatgtagatgctcttgtatatacaataagaaatatcactttcattcaaatgtacatatgttccttacaagagcaaatgcttcttcttgatcaagagagcaggtatagtgtttgtttattttgtcttaggtatggaagaaaaaaattggactgttacatgcactttcttggaaagttgaaaggaaagggggggtccaatttctttaacatttaatacttactaacaacagagatactgtaattttactcaagtaatcaaatacattttttttgcaacagataaaacaaaatactgtg

SEQ ID NO: 10142 - protein, 176 aa, Homo sapiens
MFEPACRGGSKRSLNISNPTPKWPRSPGEMVHMGTHMWNSTPARRGRRLSVDGPMTFLGGNPVKFPEMFQKDLAARSGSGDPSSFWNQYAAALSNGLAMKANEISVIQNGGIPPIPGSLGSGNSSPVSGLTGNLERLQNSEPNAPLAGLEKMASSENGTNFRFTRFVEDSKEIVTS

SEQ ID NO: 10143 - DNA, 5143 bp, Homo sapiens; identical to SEQ ID NO: 1580

SEQ ID NO: 10144 - protein, 1324 aa, Homo sapiens; identical to SEQ ID NO: 1581

SEQ ID NO: 10145 - DNA, 407 bp, Homo sapiens
gggagggggcgggcgggccggcgggcggggggagccgccgccgccgccgccgctcgatttccgtaattttgagaagatttttttttagtaattttttattctgccccagctgatgtttgagccagcatgtcgcggaggaagcaagcgaagcctcaacatttccaatccgaccccgaagtggcctcgctcccccggcgagatgccttcgtagatgaccacacaccatttgtacaacagaagttggtgttccccatgctgggcaaacaatgggaagccatcctgtctttgaataggatgttagcttggagttagagatttttctgtttaatttacaaatggatcttagtgagaagacatctgagcaaccaatggaaacaaacatgaaataaagggatttttataataaa

SEQ ID NO: 10146 - protein, 61 aa, Homo sapiens
MSRRKQAKPQHFQSDPEVASLPRRDAFVDDHTPFVQQKLVFPMLGKQWEAILSLNRMLAWS

SEQ ID NO: 10147 - DNA, 487 bp, Homo sapiens
tttctcctcgaaggccgagactttttttttttaaatgtagaaaaccagtacaaatttacaaaacacactatataatgctctcttatctctagtttgcttttttgtgtacaaactgttaacctgaacagttttccggtgcaaaaggtctcaccagaaactttaggaaagatgagtgtgactgcgggaagcagaagaaactaagctgagaaaacccggaaaaatactcggcgcagctgctgcggccttgggtcatctcacctccatctaccccgcgtgctcgctttcgcttggggtggaaagcggggttcaggggctcttttcagcggactgagaaatcgcagaggccgtggggaccccaagtcaggattcccctttcccgacatcaggggtaaagggagcgggggtcccttcgcttcactgtgccccagctctaccgagaggcaggcctctgggaaacgagccggggacctgggggcccgggcggccg

SEQ ID NO: 10148 - protein, 94 aa, Homo sapiens
AEKTRKNTRRSCCGLGSSHLHLPRVLAFAWGGKRGSGALFSGLRNRRGRGDPKSGFPFPDIRGKGSGGPFASLCPSSTERQASGKRAGDLGARA

SEQ ID NO: 10149 - DNA, 544 bp, Homo sapiens
gtgagtgtttcttcgtttctttaagagctaccagaaagcagcccacccccacccccattaaaaaaaaaaataagcgagtggggaagagccagccccacgccggtccgcctcccgcccacggctcggcctccctcccgcctggctcggcgctcctccgccccgagttctccatcccctggatcccgggctcgcgggggcgcggagaagaggatccaggaaaggggcaaacatgggacccaggcctggcccactggaccatcccttggccacgatgattggcttaggggaggtcatgtgatccaacttaagccagtgaaactcagctctggagcttctgttgaaactatagctgaaagaccagcttgtcagtcctggtagccgtttttgccatatttgctatcctgagaggggaatttgcatgagaatgaagttgttccagaagaaagcatacatgagagatggagaagttgagaaatctgcccctgcataattcagttaatgagaagaactgttattttgtccattttgtggatgaagaaaccag

SEQ ID NO: 10150 - protein, 117 aa, Homo sapiens
ELPESSPPPPPLKKKISEWGRASPTPVRLPPTARPPSRLARRSSAPSSPSPGSRARGGAEKRIQERGKHGTQAWPTGPSLGHDDWLRGGHVIQLKPVKLSSGASVETIAERPACQSW

SEQ ID NO: 10151 - DNA, 371 bp, Homo sapiens
atggataaagtatggtggagcaaagaacactggaccagaagttggggaggtcgccttagctccaccactgtgtctcaccgttaaattcatctacagggatcctggaatctcgggaggtgacagaccagtgcacgtattgcaaccaattgaggtgtaagagacaatatgaaattgctatgagcaagttgattcagtcactcaacaagtattcacaggcactgtgtgaactctaaaagcaaattacttctctctgaggcaggcgaggcaaggtcacagaagctttatggaactgagcatttgggctggtgtttgaagaagaggttaaaatttgtcaggcagagcagaagggaggcaggtgtgacaaaggtcat

SEQ ID NO: 10152 - protein, 51 aa, Homo sapiens
WIKYGGAKNTGPEVGEVALAPPLCLTVKFIYRDPGISGGDRPVHVLQPIEV

SEQ ID NO: 10153 - DNA, 1714 bp, Homo sapiens
cagatgtaattggttaagataagatcatactggatgtggatgggtcctagatctgactgctgatatccttataagaagaagaaaggacacgcggagactacagtgatgttgccacaagccaagaaatgccaagaatttcgggagccaccagaagatggaagaggcagggaaaaatcctcccctaaagccttcagagagagcatagctctgccaacaccttgattctggacatctagcctcttaaacttcctcaggtgtctcatttcttctgtctcagaagtcatggatgtcaatgaagatatggaattcacttattcattcttataaatattacttagtgtccttgtgcttggcactgtgcttggtcattgagatctactgttcaaaagcaagataacatacaggctggaatagcgagatgcaagaatcccaagccttcaaagccagctcctgcagaagagagagggcctggcagctgagctggatgcttcaggagcagaggatctatcaactgcagaccaagcacagggagacgcaggcaaacctggaacagtaacccagccagctccaattgctccgacagtacttggtggccagagagtcggcagcagaaagcatgccccgggccgtgaagcaggaaatcgactctgactcaatccttgaggtctgtattacatctgggagtacaacttgaagggccccacactcttgtttctcagcacctcataaatctaagcccacgtgaagtgaacagagcatcccttcttcaagagaatggaaaaagaaaggatgctgaggaggaactgttgggggcagagcccttgaagccagctggcaagactgagaccactgatcaatgctttgcccactgaaaggacaaccttataaagaattggaaccattaagctttaatttttagaaatttggatgctagagggaatggtctttagggaccgctgcggtccctaaacccatcatctgctctggtgccaggatacaaatctgttcgccctgaatccttcatctgcttggatgtccaggatacaatcttttcagtttgggaacttctgactgtttttctcaggtgtctgccttgcttcaatgcttatatcttgaacattgtgtctttacgtgtctgccttcggcaggtttcattaatttgtaatttatgcctacaaaattgtttaagcacttctggatcttacactggtcaagggtgtgtattagtgggtgtgtgtgcactatacagactgtggggcagaatctactgggttttgtttttcctgattttaaaatgtttagtcattctgatccatacgtgtgagttaataagtgtgtgtctctgtatcttggtgcaagtgtctgtactcgggaagcagtgaacacaagcagtttagaatagtattccacatttctctaccatttgcattaactgtgtctttccaaaatgcatattcagcttcattttttttttttattcagaggtggtagttttcaaactcaaatctagctcatttgtctcttttagcacatgattgaggattagggactattctaactggcagtcaagggtcagtattttggactccatttggcttagataatttatatagaataaaagtctaacaggtataatcacaatagccttggcttaataattttccaagcatacttgaagttgaaaaacacttcaaactaaaattggaagaatgtt

SEQ ID NO: 10154 - protein, 45 aa, Homo sapiens
MQESQAFKASSCRRERAWQLSWMLQEQRIYQLQTKHRETQANLEQ

SEQ ID NO: 10155 - DNA, 887 bp, Homo sapiens
tgtccgcgagttgccgaatgaagctgagcgtctcagtggaaccagggatctcagggaggggaaggtataaaattttcaaatggaggagtatacctgaacctaatcatggatgtgattttatgtaagtaatatgtgagatacagataagctgattctaaaacttacaagaatggcaaagaaacaagaagagcttaaactgcaatcatcaacagagaagctttctgcaaccaaagtgaagactgaagccttaggctatggcagaagttgggcgcctgaagtacacgtggaaatatgccaactgaacattggactaccacgtcaagggtctcctacccctgggccatggatcaataccagtctgtgacctgttaggaaccggtagcaggagcgcctgcccctggctcagcgcccggtgccaacagaacacctttcaggatccacagcaacgcagacaacattttaaagcacctgatggatttggaaaatatttaatgaagacaatgatgctgacatctcaagttaaaaggttctacagagaaggcaaagattttgaaggcacaggagactatcatagatattcacaacggcatctccctaaaggatttgaaagctttgcatcaaccaaaggaaaagcaccagtgagagtcaagatacagttccagacagatgtaattggttaagataagatcatactggatgtggatgggtcctagatctgactgctgatatccttataagaagaagaaaggacacgcggagactacagtgatgttgccacaagccaagaaatgccaagaatttcgggagccaccagaagatggaagaggcagggaaaaatcctcccctaaagccttcagagagagcatagctctgccaacaccttgatt

SEQ ID NO: 10156 - protein, 64 aa, Homo sapiens
MAKKQEELKLQSSTEKLSATKVKTEALGYGRSWAPEVHVEICQLNIGLPRQGSPTPGPWINTSL

SEQ ID NO: 10157 - DNA, 614 bp, Homo sapiens
gggagacgtttgagacccagcgtctctagatctcgtatttgaatttgtggcgcttggtgtccgcgagttgccgaatgaagctgagcgtctcagtggaaccagggatctcagggagacagggtctggctttgttgccctggtcttgaactcctggcttcaagtgattttcctgcctcagcctcctgaagtgctggaattacaggcatgagctgccacacctgcgcctgcccctggctcagcgcccggtgccaacagaacacctttcaggatccacagcaacgcagacaacgtaagtaccagccgttccctgaaacccttttgcagattttttaaaaacaaccacctaaaacatagagagagagagacaagcctctttccccttcttctcccctgcgttatgccaccagtgtttcctcagtagccccttccaaatcgctctgccttcaagtttgtgcatgtctgtgtggcatccctcctcctccttcactcccatagtggatcttgtaaaagggcttcagatcggccccattcatctccctggtgatagcagtgaatgtagataaatctctggctgcctgcttgctgctggagtatgatttttattttgtcttctg

SEQ ID NO: 10158 - protein, 42 aa, Homo sapiens
MSCHTCACPWLSARCQQNTFQDPQQRRQRKYQPFPETLLQIF

SEQ ID NO: 10159 - DNA, 525 bp, Homo sapiens
ctctagatctcgtatttgaatttgtggcgcttggtgtccgcgagttgccgaatgaagctgagcgtctcagtggaaccagggatctcagggcaatcatcaacagagaagctttctgcaaccaaagtgaagactgaagccttaggctatggcagaagttgggcgcctgaagtacacgtggaaatatgccaactgaacattggactaccacgtcaagggtctcctacccctgggccatggatcaataccagtctgtgacctgttaggaaccggtagcaggaggagtgcgttgccagggtaacggaatgtaagcaggggaacagcaccttgcagatcacaaaggcaaatctctggaaagaaatttcactgagtttctcttttccttaccagtgtaataacaactcgtattttccctgcactatttaatagtctcacataaacattctttcccatttcccttttctgtatctgtttaaacatggacaatagcataaatctgaaactgtcaagctcagtgagctaagcaaa

SEQ ID NO: 10160 - protein, 67 aa, Homo sapiens; identical to SEQ ID NO: 1584

SEQ ID NO: 10161 - DNA, 831 bp, Homo sapiens
actctgggagacgtttgagacccagcgtctctagatctcgtatttgaatttgtggcgcttggtgtccgcgagttgccgaatgaagctgagcgtctcagtggaaccagggatctcagggaggggaaggtataaaattttcaaatggaggagtatacctgaacctaatcatggatgtgattttatgtaagtaatatgtgagatacagataagctgattctaaaacttacaagaatggcaaagaaacaagaagagcttaaactgtgaagactgaagccttaggctatggcagaagttgggcgcctgaagtacacgtggaaatatgccaactgaacattggactaccacgtcaagggtctcctacccctgggccatggatcaataccagtctgtgacctgttaggaaccggtagcaggaggtgagtagcagcctagcgagcactactgcctaagctccacctcctgtcagatcagtagtgacatgagattttcataggagcagaaaccctattgtgaactccaaacacaagggatctaggttatgcactacttatgagaatctaatgcctgatgatctgaggtggaacagtttcatcctgaaaccaccgcccccatgtgtggaaaaattgtcttccacaaaactggtccctggtaccaaaaaggtcagggaccactgctgtaggtaaacctgcactggtacaaaatgacagaaatatacacagtcatttattatagcattgttatattgttatattgttattatagcattgttgcatgaatacaggattggaaataaatcaaggatctagtaataagggactggttgaataaacc

SEQ ID NO: 10162 - protein, 35 aa, Homo sapiens
MKLSVSVEPGISGRGRYKIFKWRSIPEPNHGCDFM

SEQ ID NO: 10163 - DNA, 297 bp, Homo sapiens
gtatttgaatttgtggcgcttggtgtccgcgagttgccgaatgaagctgagcgtctcagtggaaccagggatctcagggatacagataagctgattctaaaacttacaagaatggcaaagaaacaagaagagcttaaactgcaatcatcaacagagaagctttctgcaaccaaagtgaagactgaagccttaggctatggcagaagttgggcgcctgaagtacacgtggaaatatgccaactgaacattggactaccacgtgagtccaaactaagctttcattgtgttaaaccactg

SEQ ID NO: 10164 - protein, 61 aa, Homo sapiens
MAKKQEELKLQSSTEKLSATKVKTEALGYGRSWAPEVHVEICQLNIGLPRESKLSFHCVKP

SEQ ID NO: 10165 - DNA, 380 bp, Homo sapiens
actttaaacgttttttattgtactttgtgatgagtaaaagctcttgattttaatgtagtccaatttattaatctttttaaatagttaatgctttcagtcttttgtgtaagaaatcctttcctgctgtcgtattataaaaattctgttataaattgtgttttactgtttttacagaagaaaaatagtacagtatgtctcttacatttaggaatgtgctccacctggcagtgatttggtgtgaaagagttctcttggttctcagttgctgtactactaccactatgtctttatcttggctcccaaagtcctgagattactggcatgagccaccttgcctgcccagaattttcattcttacacatgtttttatatttctacta

SEQ ID NO: 10166 - protein, 39 aa, Homo sapiens [sequence omitted]

SEQ ID NO: 10167 - DNA, 873 bp, Homo sapiens
aaaactccctgctagagagactaggagatttggggctgcggccgtttcctccggagcacccacgggactgtgtgctggggtccctccaccggctgtgtcctttattcttctttctcacccaacgatttacctgaacggttataaagtgcacgttatttccctaagcactttgagtatattggcccactgcattctggacttcaaaatttctgatgcgaaatatgctgatacttttgttgaagaaatctgggctttgagcatctgtaagatatttgttggaaggttttgtctggtccttcttactgatgtgttgctcttcttcatggctcgtgaaaactattagagtcatccaagggtgggaagagagatcagcaacgttaactgggtgtcaagaaaacataccgagattgaagccatccacttctgcaggaacaccgaaaagaaagcttacaatctgaaggtgtccgttcctacactggtcagaccactgtccttggggcagctggggtctttgggaccctccaccgggctcgccggtccgtcggacttttggctgagatccgtgtcagactcctccgaatagtcgtctgttggcatcgagggctgaacccctgaggtgctgcatgaacttgaggtaaccgttgaagatgaggagagaggaggaaaagaagggggcttcgctgccgaagcccgggagaccacttgcggccaagacttcctggaggcgtggggggaagcggaggagggggcggcggccgacgggggaggggggctgtcgtttgagtgagcggcagactgcgaggtagatgcggtgctaggatcggggaagcaggcagagtgaggtaataaactagggtgctctttggcgtttct

SEQ ID NO: 10168 - protein, 50 aa, Homo sapiens
MCCSSSWLVKTIRVIQGWEERSATLTGCQENIPRLKPSTSAGTPKRKLTI

SEQ ID NO: 10169 - DNA, 807 bp, Homo sapiens
aaactccctgctagagagactaggagatttggggctgcggccgtttcctccggagcacccacgggactgtgtgctggggtccctccaccggctgtgtcctttattcttctttctcacccaacgatttacctgaacggttataaagtgcacgttatttccctaaggtccttcttactgatgtgttgctcttcttcatggctcgtgaaaactattagagtcatccaaggtttggagacagaaaggagcaccgccaagtgaggcagagcagtctcagaaacataggaaaatggtgggaagagagatcagcaacgttaactgggtgtcaagaaaacataccgagattgaagccatccacttctgcaggaacaccgaaaagaaagcttacaatctgaaggtgtccgttcctacactggtcagaccactgtccttggggcagctggggtctttgggaccctccaccgggctcgccggtccgtcggacttttggctgagatccgtgtcagactcctccgaatagtcgtctgttggcatcgagggctgaacccctgaggtgctgcatgaacttgaggtaaccgttgaagatgaggagagaggaggaaaagaagggggcttcgctgccgaagcccgggagaccacttgcggccaagacttcctggaggcgtggggggaagcggaggagggggcggcggccgacgggggaggggggctgtcgtttgagtgagcggcagactgcgaggtagatgcggtgctaggatcggggaagcaggcagagtgaggtaataaactagggtgctctttggcgtttct

SEQ ID NO: 10170 - protein, 76 aa, Homo sapiens
MVGREISNVNWVSRKHTEIEAIHFCRNTEKKAYNLKVSVPTLVRPLSLGQLGSLGPSTGLAGPSDFWLRSVSDSSE

SEQ ID NO: 10171 - DNA, 322 bp, Homo sapiens
tgatgcgaaatatgctgatacttttgttgaagaaatctggtccttcttactgatgtgttgctcttcttcatggctcgtgaaaactattagagtcatccaaggtcctgacatccactgccttcactcaaacccttctggccagttccatcctacagattctaagttcctgactcagaatcttactgttgtgaacctttacacccaggtttggagacagaaaggagcaccgccaagtgaggcagagcagtctcagaaacataggaaaatcttctagcagagatggaataatagagaccagatgtaccctcccagctgaaacaac

SEQ ID NO: 10172 - protein, 73 aa, Homo sapiens
MCCSSSWLVKTIRVIQGPDIHCLHSNPSGQFHPTDSKFLTQNLTVVNLYTQVWRQKGAPPSEAEQSQKHRKIF

SEQ ID NO: 10173 - DNA, 6017 bp, Homo sapiens
gctcccgggcctcaacagcccctccttgccaggctttactccatccaacacagctttaacgtctcctaagccgaacttgatgggtctgcccagcacaactgttccttcccctggcctccccacttctggattaccaaataaaccgtcctcagcgtcgctgagctccccaaccccagcacaagccacgatggcgatgggccctcagcaacccccccagcagcagcagcagcagcagcaaccacaggtgcagcagcctcccccgccgccagcagcccagccgccacccacaccacagctcccactgcaacagcagcagcaacgcaaggacaaagacagtgagaaagtaaaggagaaggaaaaggcacacaaagggaaaggggaacccctgcctgtccccaagaaggagaaaggagaggcccccacggcaactgcagccacgatctcagccccgctgcccaccatggagtatgcggtagaccctgcacagctgcaggccctgcaggccgcgttgacttcggaccccacagcattgctcacaagccagttccttccttactttgtaccaggcttttctccttattatgctccccagatccctggcgccctgcagagcgggtacctgcagcctatgtatggcatggaaggcctgttcccctacagccctgcactgtcgcaggccctgatggggctgtccccaggctccctactgcagcagtaccagcaataccagcagagtctgcaggaggcaattcagcagcagcagcagcggcaactacagcagcagcagcagcaaaaagtgcagcagcagcagcccaaagcaagccaaaccccagtcccccccggggctccttccccagacaaagaccctgccaaagaatcccccaaaccagaagaacagaaaaacaccccccgtgaggtgtcccccctcctgccgaaactccctgaagagccagaagcagaaagcaaaagtgcggactccctctacgaccccttcattgttccaaaggtgcagtacaagttggtctgccgcaagtgccaggcgggcttcagcgacgaggaggcagcgaggagccacctgaagtccctctgcttcttcggccagtctgtggtgaacctgcaagagatggtgcttcacgtccccaccggcggcggcggcggtggcagtggcggcggcggcggcggtggcggcggcggcggcggcggcggctcgtaccactgcctggcgtgcgagagcgcgctctgtggggaggaagctctgagtcaacatctcgagtcggccttgcacaaacacagaacaatcacgagagcagcaagaaacgccaaagagcaccctagtttattacctcactctgcctgcttccccgatcctagcaccgcatctacctcgcagtctgccgctcactcaaacgacagcccccctcccccgtcggccgccgccccctcctccgcttccccccacgcctccaggaagtcttggccgcaagtggtctcccgggcttcggcagcgaagcccccttcttttcctcctctctcctcatcttcaacggttacctcaagttcatgcagcacctcaggggttcagccctcgatgccaacagacgactattcggaggagtctgacacggatctcagccaaaagtccgacggaccggcgagcccggtggagggtcccaaagaccccagctgccccaaggacagtggtctgaccagtgtaggaacggacaccttcagattgtaagctttgaagatgaacaatacaaacaaatgaatttaaatacaaaaattaataacaaaccaatttcaaaaatagactaactgcaattccaaagcttctaaccaaaaaacaaaaaaaaaaaaaaaaagaaaaaaaagaaaaagcgtgggttgttttcccatatacctatctatgccggtgattttacattcttgtctttttcttttcttttaatattaaaaaaaaaaaaaaagccctaaccctgttacattgtgtccttttgaaggtactattggtctgggaaacagaagtccgcagggcctccctaatgtctttggagcttaaaccccttgtatatttgccccttttcaataaacgccccacgctgatagcacagaggagcccggcatgcactgtatgggaaagcagtccaccttgttacagttttaaatttcttgctatcttagcattcagataccaatggcttgctaaaagaaaaaaagaaatgtaatgtctttttattctcaggtcaatcgctcacactttgttttcagaatcattgttttatatattattgttttttcagtttttttttttttttttgttccagaaaagattttttgttttgttaacttaaaaatgggcagaaagtattcaagaaaaacaatgtgaactgctttagctttctggggatttttaaggatagcttttctgctgaagccaatttcaaggggaaaagttaagcactcccactttcaaaaaaaaaaaaaaataataacccacacacacaaagagtgttgaggacttgtagcttaaaaaaaataagttttaaaaactgactttctgtatttatgatagatatgaccatttttggtgttgagtagattgttgcattggaaatgaactgaagcagtatggtagatttaaaaggaaaaaaaaaaaaaaaccttttgtgtacatttagctttttgtatggtccagctgacagctcctcatttgatgttgtcttgttcattcctagcagatgatagattgcaatccgttgattcgcctaagcttttctccccttgtcccttaattccactttctctttcttgtcccttaattccactttctctttccttctcccacctcccgtcctataatctcccacttaaggtagctgccttcatttcttagagggagctgcagaattattttataaaactaaagaaagaatttcaagggattctaggggtcattaggatcctcacagattatttttggttggggagttgaaactttttaaaggcatataattctagttacctgtgtctgttagctttgtgcatttattttttatttatccttcttttggcttttttttctttgtaccccttcttttcctccttgtttggtaggagcttcaaatattctttttttttctatactaaaggatttgtttccatttgtgtaattggctgtgtacttttcttttctaaaaaaagtttttggttagggatttggtttttggttttgtgtttgttttttctttcctctctcagaaaaaaaaatttcatgctttaaataaaatccaaagacacaccctttcactgctgatgcagaaaaaagggaaagggttcttgttacttgagaatttgtttctgatttaaacaaacaagacttagtttaataaaagaaagagaaaaacaaaagattcccaggttgttatgtgcttcttctgcaagcagagaggcaaatgttaatgacaattccatataccaaaagacacattttttacttcaaagttttgtccttgtgttaggcagtctgagcagcgagtgatccagagcgcagccaacaaagcagcagatagcagtgtacagaaagcaaaaaaggaactgtatgtgaggcacttgtttctgttaatatccatattcctgttaacacacaccctttctcatgtaaaaagaaaaataaataaatggtctgaactttgaaaactttgtgctgctaaaacatagattttggagacaaataaatagatgctttgctgtttcactttcatagctaaacatcaacagaaaccatctccccttgcccccaaagtgtgaaatccttcttcccttcgttttcttccttatgtttcaaaagggaactttgaagactgtgaatacaggttccattggtcacctttcgggcttctttccccagtgctgaagccactcatcgactttgcaaaagactggagcattccaagatctgaaaatggattttttttctttttttcttttttagccgggactattttatttttatgaatttgtttttagtttaatgaaatagtagatcctgaaatgttgtacatatttctaactaggctgatgcacagtgcaaattccttttttaattgttttttttaagtagaaatactaaagaaagaataccatctaactattcataccagtatccagttgtagcataaggtgtcaaaagcaagtacgcaaaacatttactgttttaacaagctatttccttttaacaagaaatcttgtatttcttcctgtgtttgagatgaacatttttaaattttaaagttgtacagttttttgttttccattattttatcttgtttgtaactctatgaaatatatatatatatattttttgccatttaactgttgtatgttactctgtgtctgtaccatatagaaaaaaaattgtttttgtttttggttctctatgtgatatcagttaacaatgtaacactagctttacctgtcaaattctgctaggtcttctctgaaaacgttgtttttaaaaatgatattgcttggtaatagtgcaatttctatccttttccctcccccctcaacttttaagttcttttctttataattttgctgccccctccctgatggtttgggtttttgtttttgtttttgtttttttttttcatggagctactatgccatcctccctctgtgaggcagagtgactgtcagtgttttgttatgccatgccttgagctgtgggtgtttggcgacaataaggtggttgaatagattggctgagcacacttccacccacctagtgttctcagaggggttatgtgattgtttcaacctggagtgggttgcacccttaatgctttcctctgcaactaaaccgcccacatatatgttcattgaaaaaagtaagaataattctcagcactaacccagaagtagcaaagcagtcagtgatggtgaacattagaggtcaaacatgagttagatgtttgtgggctgacagccatcgtggctatgaccagtactatttacaaagcatgaattcactacaatgctcaactgtttgtttagctttatctcacttggggaatttattcctgtctgctgcattgtaggtagctgggtaggatatatttccacttgctttttaaattagttcttcacctccattgacactcgttttttggttttctccctatagtgtgggttggtgctagacaccagtctgacccacagaatgggagttatttcatccatctttcctccatccttccaaaaaccacatatctacacaaggaaaaatttaatacatctaggaattttttttttaattacaagctatttaaagagatgaatgtggccaaagttttacacaattgaaaataaagtaaaacagacggcatgtgtttaaacctgagtttatcaggcatggcaggaagttgcaggagagagaggcagtgacccaagccagtgcacttgatgttcatggacatatattttttttaaataataaattaaaacattttaaatagaagcataaattgagttgtttgttggcgctgagatactgcccactgtgaaacaaagctttgactagttttttgtttgtttactttcttcaggggggaggggggcaagtttgggtaggaaagaaagcataaatgaacgtgaccctgaggtgaagaggtatatgaacagcctttgcaatgtacaaaaagaaaaaaaaacaaaaaacaacaaaaaaaatagagcaagtgaaaccaaaaatgatgttcttggtgtttttctataatgtagtcttgttagcttttttgttactgtaacaatgctgatctcgaactgtaccaaaatacatggagactaacaaacagaaccacatggaactttcaaactgaaaaaaaaatttgtcacaaaaactttgttgtcatagttaagttgattgtagatggtaattgaatatactcctttgaaaatatttcatcaagtatgtttcctgctcattgtgatacattaaaaaaaaaatatgagcaaaa

SEQ ID NO: 10174 - protein, 552 aa, Homo sapiens [sequence omitted]

SEQ ID NO: 10175 - DNA, 4922 bp, Homo sapiens
cactcatcagctcccacttccagcgcgtcccctccgaccgctgcagccgccaccgccgccgcctcctcctcctcctcctcccggcggtggcggcggcggcggcggcggcggctcgtaccactgcctggcgtgcgagagcgcgctctgtggggaggaagctctgagtcaacatctcgagtcggccttgcacaaacacagaacaatcacgagagcagcaagaaacgccaaagagcaccctagtttattacctcactctgcctgcttccccgatcctagcaccgcatctacctcgcagtctgccgctcactcaaacgacagcccccctcccccgtcggccgccgccccctcctccgcttccccccacgcctccaggaagtcttggccgcaagtggtctcccgggcttcggcagcgaagcccccttcttttcctcctctctcctcatcttcaacggttacctcaagttcatgcagcacctcaggggttcagccctcgatgccaacagacgactattcggaggagtctgacacggatctcagccaaaagtccgacggaccggcgagcccggtggagggtcccaaagaccccagctgccccaaggacagtggtctgaccagtgtaggaacggacaccttcagattgtaagctttgaagatgaacaatacaaacaaatgaatttaaatacaaaaattaataacaaaccaatttcaaaaatagactaactgcaattccaaagcttctaaccaaaaaacaaaaaaaaaaaaaaaaagaaaaaaaagaaaaagcgtgggttgttttcccatatacctatctatgccggtgattttacattcttgtctttttcttttcttttaatattaaaaaaaaaaaaaaagccctaaccctgttacattgtgtccttttgaaggtactattggtctgggaaacagaagtccgcagggcctccctaatgtctttggagcttaaaccccttgtatatttgccccttttcaataaacgccccacgctgatagcacagaggagcccggcatgcactgtatgggaaagcagtccaccttgttacagttttaaatttcttgctatcttagcattcagataccaatggcttgctaaaagaaaaaaagaaatgtaatgtctttttattctcaggtcaatcgctcacactttgttttcagaatcattgttttatatattattgttttttcagtttttttttttttttttgttccagaaaagattttttgttttgttaacttaaaaatgggcagaaagtattcaagaaaaacaatgtgaactgctttagctttctggggatttttaaggatagcttttctgctgaagccaatttcaaggggaaaagttaagcactcccactttcaaaaaaaaaaaaaaataataacccacacacacaaagagtgttgaggacttgtagcttaaaaaaaataagttttaaaaactgactttctgtatttatgatagatatgaccatttttggtgttgagtagattgttgcattggaaatgaactgaagcagtatggtagatttaaaaggaaaaaaaaaaaaaaaccttttgtgtacatttagctttttgtatggtccagctgacagctcctcatttgatgttgtcttgttcattcctagcagatgatagattgcaatccgttgattcgcctaagcttttctccccttgtcccttaattccactttctctttcttgtcccttaattccactttctctttccttctcccacctcccgtcctataatctcccacttaaggtagctgccttcatttcttagagggagctgcagaattattttataaaactaaagaaagaatttcaagggattctaggggtcattaggatcctcacagattatttttggttggggagttgaaactttttaaaggcatataattctagttacctgtgtctgttagctttgtgcatttattttttatttatccttcttttggcttttttttctttgtaccccttcttttcctccttgtttggtaggagcttcaaatattctttttttttctatactaaaggatttgtttccatttgtgtaattggctgtgtacttttcttttctaaaaaaagtttttggttagggatttggtttttggttttgtgtttgttttttctttcctctctcagaaaaaaaaatttcatgctttaaataaaatccaaagacacaccctttcactgctgatgcagaaaaaagggaaagggttcttgttacttgagaatttgtttctgatttaaacaaacaagacttagtttaataaaagaaagagaaaaacaaaagattcccaggttgttatgtgcttcttctgcaagcagagaggcaaatgttaatgacaattccatataccaaaagacacattttttacttcaaagttttgtccttgtgttaggcagtctgagcagcgagtgatccagagcgcagccaacaaagcagcagatagcagtgtacagaaagcaaaaaaggaactgtatgtgaggcacttgtttctgttaatatccatattcctgttaacacacaccctttctcatgtaaaaagaaaaataaataaatggtctgaactttgaaaactttgtgctgctaaaacatagattttggagacaaataaatagatgctttgctgtttcactttcatagctaaacatcaacagaaaccatctccccttgcccccaaagtgtgaaatccttcttcccttcgttttcttccttatgtttcaaaagggaactttgaagactgtgaatacaggttccattggtcacctttcgggcttctttccccagtgctgaagccactcatcgactttgcaaaagactggagcattccaagatctgaaaatggattttttttctttttttcttttttagccgggactattttatttttatgaatttgtttttagtttaatgaaatagtagatcctgaaatgttgtacatatttctaactaggctgatgcacagtgcaaattccttttttaattgttttttttaagtagaaatactaaagaaagaataccatctaactattcataccagtatccagttgtagcataaggtgtcaaaagcaagtacgcaaaacatttactgttttaacaagctatttccttttaacaagaaatcttgtatttcttcctgtgtttgagatgaacatttttaaattttaaagttgtacagttttttgttttccattattttatcttgtttgtaactctatgaaatatatatatatatattttttgccatttaactgttgtatgttactctgtgtctgtaccatatagaaaaaaaattgtttttgtttttggttctctatgtgatatcagttaacaatgtaacactagctttacctgtcaaattctgctaggtcttctctgaaaacgttgtttttaaaaatgatattgcttggtaatagtgcaatttctatccttttccctcccccctcaacttttaagttcttttctttataattttgctgccccctccctgatggtttgggtttttgtttttgtttttgtttttttttttcatggagctactatgccatcctccctctgtgaggcagagtgactgtcagtgttttgttatgccatgccttgagctgtgggtgtttggcgacaataaggtggttgaatagattggctgagcacacttccacccacctagtgttctcagaggggttatgtgattgtttcaacctggagtgggttgcacccttaatgctttcctctgcaactaaaccgcccacatatatgttcattgaaaaaagtaagaataattctcagcactaacccagaagtagcaaagcagtcagtgatggtgaacattagaggtcaaacatgagttagatgtttgtgggctgacagccatcgtggctatgaccagtactatttacaaagcatgaattcactacaatgctcaactgtttgtttagctttatctcacttggggaatttattcctgtctgctgcattgtaggtagctgggtaggatatatttccacttgctttttaaattagttcttcacctccattgacactcgttttttggttttctccctatagtgtgggttggtgctagacaccagtctgacccacagaatgggagttatttcatccatctttcctccatccttccaaaaaccacatatctacacaaggaaaaatttaatacatctaggaattttttttttaattacaagctatttaaagagatgaatgtggccaaagttttacacaattgaaaataaagtaaaacagacggcatgtgtttaaacctgagtttatcaggcatggcaggaagttgcaggagagagaggcagtgacccaagccagtgcacttgatgttcatggacatatattttttttaaataataaattaaaacattttaaatagaagcataaattgagttgtttgttggcgctgagatactgcccactgtgaaacaaagctttgactagttttttgtttgtttactttcttcaggggggaggggggcaagtttgggtaggaaagaaagcataaatgaacgtgaccctgaggtgaagaggtatatgaacagcctttgcaatgtacaaaaagaaaaaaaaacaaaaaacaacaaaaaaaatagagcaagtgaaaccaaaaatgatgttcttggtgtttttctataatgtagtcttgttagcttttttgttactgtaacaatgctgatctcgaactgtaccaaaatacatggagactaacaaacagaaccacatggaactttcaaactgaaaaaaaaatttgtcacaaaaactttgttgtcatagttaagttgattgtagatggtaattgaatatactcctttgaaaatatttcatcaagtatgtttcctgctcattgtgatacattaaaaaaaaaatatgagcaaaa

SEQ ID NO: 10176 - protein, 68 aa, Homo sapiens
MVQLTAPHLMLSCSFLADDRLQSVDSPKLFSPCPLIPLSLSCPLIPLSLSFSHLPSYNLPLKVAAFIS

SEQ ID NO: 10177 - DNA, 319 bp, Homo sapiens
gcacaaacgctggcccaggcccaggctcaagttcaagctcacctgcagcaggagctgcagcaacaggctgccctgatccagtctcagctgtttaaccccaccctccttcctcacttccccagtgctgagttccagcttaaccccgaggtgagcttgccagtgaccagtggggcactgacactgactgggacaggcccaggcctgctggaagatctgaaggctcaggttcaggtcccacagcagagccatcagcagatcttgccgcagcagcagcagaaccaactctctatagcccagagtcactctgccctccttcagc

SEQ ID NO: 10178 - protein, 105 aa, Homo sapiens
AQTLAQAQAQVQAHLQQELQQQAALIQSQLFNPTLLPHFPSAEFQLNPEVSLPVTSGALTLTGTGPGLLEDLKAQVQVPQQSHQQILPQQQQNQLSIAQSHSALL

SEQ ID NO: 10179 - DNA, 680 bp, Homo sapiens
gtaccagtgtccctactgcaagtacagtaatgccgatgtcaaccggctccgggtgcatgccatgacgcagcactcggtgcaacccatgcttcgctgccccctgtgccaggacatgctcaacaacaagatccacctccagctgcacctcacccacctccacagcgtggcacctgactgcgtggagaagctcattatgacggtgaccacccctgagatggtgatgccaagcagcatgttcctcccagcagctgttccagatcgagatgggaattccaatttggaagaggcaggaaagcagcctgaaacctcagaggatctgggaaagaacatcttgccatccgcaagcacagagcaaagcggagatttgaaaccatcccctgctgacccaggctctgtgagagaagactcaggcttcatctgctggaagaaggggtgcaaccaggttttcaaaacttctgctgcccttcagacgcattttaatgaagtgcatgccaagaggcctcagctgccggtgtcagatcgccatgtgtacaagtaccgctgtaatcagtgtagcctggccttcaagaccattgaaaagttgcagctccattctcagtaccatgtgatcagagctgccaccatgtgctgtctttgtcagcgcagtttccgaactttccaggctctgaagaagcaccttg

SEQ ID NO: 10180 - protein, 205 aa, Homo sapiens
MTQHSVQPMLRCPLCQDMLNNKIHLQLHLTHLHSVAPDCVEKLIMTVTTPEMVMPSSMFLPAAVPDRDGNSNLEEAGKQPETSEDLGKNILPSASTEQSGDLKPSPADPGSVREDSGFICWKKGCNQVFKTSAALQTHFNEVHAKRPQLPVSDRHVYKYRCNQCSLAFKTIEKLQLHSQYHVIRAATMCCLCQRSFRTFQALKKH

SEQ ID NO: 10181 - DNA, 116 bp, Homo sapiens
ctacatgaatgttaacacggccctacagtattttcttttgagcttgatgtatttaaaaattgaatgaactaccatacagaagcagttttagaaaggaaacaagactgtaaagtggg

SEQ ID NO: 10182 - DNA, 800 bp, Homo sapiens
atcaagccgagcgcgaacgccgtgtctggggctcccactcccgggacacacacgcgggctggcttacacatgctcttgctctctcgcgctctgggagagcgcttatatgggcttcatgaggctaagtaataaacactttgtcttcaccctgctatttatgggttgcttggggcatcctgtgctctccactgcccttacctgaacagacggctcatgcagacccggagtttaatagggacaacagtaaatctgagaggctgtgtgtgtcccacgcgctcctgttttcccagccacccatgctagttgcagagaaaagccaacctgtatcccttcgtttatgctctgtgtgcccttcctggagagatcccttcattcttcagcaatggatcaaagaactctgaaaacaagaacaaccccgacagctgcaaaccacgagccctcacctccagcagaggttttcgggaaactctggacgaccacgcgcatgcagagggctctcagagcttccaggtcctgtaagaagagatggagtcatagctgcgccctgtccactctcgggctgtcacacaagcctggagcccagccatttctcggccttgtcttcatcttgggctaaccggtcgtctcctgcaaacagacagcacggagaaggatgagtgaactcggcctctccccacagaatacagttcgccattacagcgctgattaaatacaggacattatctcaccataatgccctcctggcggcgttcccaggaaaattctaactaatcataaaaatagaaagaaaaacgcaacct

SEQ ID NO: 10183 - protein, 92 aa, Homo sapiens
MLCVPFLERSLHSSAMDQRTLKTRTTPTAANHEPSPPAEVFGKLWTTTRMQRALRASRSCKKRWSHSCALSTLGLSHKPGAQPFLGLVFILG

SEQ ID NO: 10184 - DNA, 1216 bp, Homo sapiens
ggatttgtaaagatattgattccagataatgtttgcctttctaactctctcttccttagacttgatggataggttcagggctacatctcggcagccaactcaccgcagctacccagggaaagaggaatggaaaacgagctcggaagatataagttacaacccccagaagtctagcctagcgctattggatggtgtccagctttgccggaattagagagcaccagctcaggcacaaagcggcagttgcatagagtgctccgtggtcagtggctgtcctcaagtgccccagtcagctcggctgagcccaaagcctcccatctctgcattcaggggctctcttcttcccccatccatcaccagggaccagtgatcttgcctgtcgatgcccggctctcgcttgatgtctcagttccggaacagagatgctccagctactacctgggaaggctctggccccaaaaatatttagttagcagccattcagttaagtggaattgactttttatcggctttcctctgtacggctgccaccagcgaaggctgtttccttcttccctcttctctgcctgtcagtttcctccacattcctatcggcagcctttagctctgatcgatactaaccgctgtgtaacagctcacgcacgactgctctggtttgcatcgatcagacccttcttccaacaggtagtcagctatttgaggcaatgacttgagataaacacctacttttacttcaggctaattcatttcaggtggatttcaaggaggccctgcaccccgtctcttagacaagctgaaattggagagtcaagatccacgcactgcatgcttgagatcctaggagacctttcttcctctcccgttttctttttctttcccttgtattttgtaagtgccacttataaacaagataccaggactcaggacgttgaaaatgccacttcagaaaatgtgtcggccatccatccctctgtccttttaatgagatgcatccgggactgcaggaaaccaagactgctgcggaggcaggattgtcgctgggcaaccaagcatccttccagctgccccagaaagaatctcacaatgtcctgcaatccctggtcttctcaccacctcagggggcggtccttgaatccacccccatccttgttccaggctcacaagtgaaatttaccaggagctgatattgcaaaatagattgctatttcgcaactga

SEQ ID NO: 10185 - protein, 61 aa, Homo sapiens
MFAFLTLSSLDLMDRFRATSRQPTHRSYPGKEEWKTSSEDISYNPQKSSLALLDGVQLCRN

SEQ ID NO: 10186 - DNA, 825 bp, Homo sapiens
ggatcttcgccaccgccgtcatttgtgggcggagaaagggctggagaaaggcgggaatcgcccctcgtccctcgccgtgcgtttccctggacttaagggccgaagggacaccggcgacttgacctcctgattgcagggagaggctcctccgtgctcctgagaggccgaacacagggtcgccagcacagcttactgctcggtgtctcctgagccacagaggaagacgtggcaggagcacctggtgctaatatatattcatgtctatggcaatgccgaccatctggctggtctgaaccaggataaaagtgaagaattcctctgtgaagacccagctctttctttggctccttttttgaagccatctttgctctgctctcctctgctgcccaggccttggtttagccaaaaaaccagcgtcttgtatctgctaagaagaccatgactaccaacaggcctgcgcttgccaagagtcaccaccagcctctgacccctcagaaagccaaccccactaatttactgatgccctaaggggaagtcggccccagaagataagaaaaggaccctgaggtccagagagcttgggttctagaatgcctttaaatcttacctgatgttaatttttctccatcacccctatgggaggtattcattcacagaacaaatgttgatactgaatgcccaccgtatgctaggtacattgttcccgatagggaccaagacatagtcaataccctccagcccatgcctttccatctagtagactatacaggtgattgagggggcagttaacatacataaagctgagaattcccctgagatagttca

SEQ ID NO: 10187 - protein, 37 aa, Homo sapiens
MLIFLHHPYGRYSFTEQMLILNAHRMLGTLFPIGTKT

SEQ ID NO: 10188 - DNA, 1008 bp, Homo sapiens
gggagcggaagaaggaggccgcgcgagggctgacgaaccggaagaagaggaactgggcctgaaagggtaccggtgaccgctactgctgccggtgtttgcgtgtggcagggagccaggcctggcgagcggggtgtgtcgcgatgccggagctggcagtgcagaaggtggtggtccaccccctggtgctgctcagtgtggtggatcatttcaaccgaatcggcaaggttggaaaccagaagcgtgttgttggtgtgcttttggggtcatggcaaaagaaagtacttgatgtatcgaacagttttgcagttccttttgatgaagatgacaaagacgattctgtatggtttttagaccatgattatttggaaaacatgtatggaatgtttaagaaagtcaatgccagggaaagaatagttggctggtaccacacaggccctaaactacacaagaatgacattgccatcaacgaactcatgaaaagatactgtcctaattccgtattggtcatcattgatgtgaagccgaaggacctagggctgcctacagaagcgtacatttcagtggaagaagtccatgatgatggaactccaacctcgaaaacatttgaacacgtgaccagtgaaattggagcagaggaagctgaggaagttggagttgaacacttgttacgctgcaggacgtcttcaacctgctgccagatgtcagcctgcaggagttcgtcaaggccttttacctgaagaccaatgaccagatggtggtagtgtacttggcctcgctgatccgttccgtggtcgccctgcacaacctcatcaacaacaagattgccaaccgggatgcagagaagaaagaagggcaggagaaagaagagagcaaaaaggataggaaagaggacaaggagaaagataaagataaggaaaagagtgatgtaaagaaagaggagaaaaaggagaaaaagtaaaacatgtattaaatagcttttttaatttgtaaattaaaatcttacaaact

SEQ ID NO: 10189 - protein, 198 aa, Homo sapiens
MPELAVQKVVVHPLVLLSVVDHFNRIGKVGNQKRVVGVLLGSWQKKVLDVSNSFAVPFDEDDKDDSVWFLDHDYLENMYGMFKKVNARERIVGWYHTGPKLHKNDIAINELMKRYCPNSVLVIIDVKPKDLGLPTEAYISVEEVHDDGTPTSKTFEHVTSEIGAEEAEEVGVEHLLRCRTSSTCCQMSACRSSSRPFT

SEQ ID NO: 10190 - DNA, 1165 bp, Homo sapiens
gggagcggaagaaggaggccgcgcgagggctgacgaaccggaagaagaggaactgggcctgaaagggtaccggtgaccgctactgctgccggtgtttgcgtgtggcagggagccaggcctggcgagcggggtgtgtcgcgatgccggagctggcagtgcagaaggtggtggtccaccccctggtgctgctcagtgtggtggatcatttcaaccgaatcggcaaggttggaaaccagaagcgtgttgttggtgtgcttttggggtcatggcaaaagaaagtacttgatgtatcgaacagttttgcagttccttttgatgaagatgacaaagacgattctgtatggtttttagaccatgattatttggaaaacatgtatggaatgtttaagaaagtcaatgccagggaaagaatagttggctggtaccacacaggccctaaactacacaagaatgacattgccatcaacgaactcatgaaaagatactgtcctaattccgtattggtcatcattgatgtgaagccgaaggacctagggctgcctacagaagcgtacatttcagtggaagaagtccatgatgatggaactccaacctcgaaaacatttgaacacgtgaccagtgaaattggagcagaggaagctgaggaagttggagttgaacacttgttacgagatatcaaagacacgacggtgggcactctgtcccagcggatcacaaaccaggtccatggtttgaagggactgaactccaagcttctggatatcaggagctacctggaaaaagtcgccacaggcaagctgcccatcaaccaccagatcatctaccagctgcaggacgtcttcaacctgctgccagatgtcagcctgcaggagttcgtcaaggccttttacctgaagaccaatgaccagatggtggtagtgtacttggcctcgctgatccgttccgtggtcgccctgcacaacctcatcaacaacaagattgccaaccgggatgcagagaagaaagaagggcaggagaaagaagagagcaaaaaggataggaaagaggacaaggagaaagataaagataaggaaaagagtgatgtaaagaaagaggagaaaaaggagaaaaagtaaaacatgtattaaatagcttttttaatttgtaaattaaaatcttacaaact

SEQ ID NO: 10191 - protein, 324 aa, Homo sapiens; identical to SEQ ID NO: 1589

SEQ ID NO: 10192 - DNA, 1546 bp, Homo sapiens
gggagcggaagaaggaggccgcgcgagggctgacgaaccggaagaagaggaactgggcctgaaagggtaccggtgaccgctactgctgccggtgtttgcgtgtggcagggagccaggcctggcgagcggggtgtgtcgcgatgccggagctggcagtgcagaaggtggtggtccaccccctggtgctgctcagtgtggtggatcatttcaaccgaatcggcaaggttggaaaccagaagcgtgttgttggtgtgcttttggggtcatggcaaaagaaagtacttgatgtatcgaacagttttgcagttccttttgatgaagatgacaaagacgattctgtatggtttttagaccatgattatttggaaaacatgtatggaatgtttaagaaagtcaatgccagggaaagaatagttggctggtaccacacaggccctaaactacacaagaatgacattgccatcaacgaactcatgaaaagatactgtcctaattccgtattggtcatcattgatgtgaagccgaaggacctagggctgcctacagaagcgtacatttcagtggaagaagtccatgatgatggaactccaacctcgaaaacatttgaacacgtgaccagtgaaattggagcagaggaagctgaggaagttggagttgaacacttgttacgagatatcaaagacacgacggtgggcactctgtcccagcggatcacaaaccaggtccatggtttgaagggactgaactccaagcttctggatatcaggagctacctggaaaaagtcgccacaggcaagctgcccatcaaccaccagatcatctaccagctgcaggacgtcttcaacctgctgccagatgtcagcctgcaggagttcgtcaaggccttttacctgaagaccaatgaccagatggtggtagtgtacttggcctcgctgatccgttccgtggtcgccctgcacaacctcatcaacaacaagattgccaaccgggatgcacatgtattaaatagcttttttaatttgtaaattaaaatcttacaaactaaatcagtgtgctgctagagggttctttttcacttgacatgcttattagaaagctgacccaacaagagctctctgcctccggtcactcttgctgtggtgctacgtggaagtgaatggagactgatctcaaatctgaactgcagctttcgctgctgtgagttggggatatgatagtcagctcaggcttcagattgtatgagaaaaatgaagagaagtcaacaaatattttggtactcttcattcatttatctctaaaaccaggagttgaattttcctcatcttgaaagactcttggggtctgtttctggtattttacaaaattgctaagtggaatgcatgaattgcattatgttctctggtaacacgtagagttcagacccttctgaactctgttgataataccacaccatgttctggacccatagctctggcatcctcaggggttgtgatccagctccatatattgtttaccttcaaagatacaattaaatggcttgattttt

SEQ ID NO: 10193 - protein, 294 aa, Homo sapiens
MPELAVQKVVVHPLVLLSVVDHFNRIGKVGNQKRVVGVLLGSWQKKVLDVSNSFAVPFDEDDKDDSVWFLDHDYLENMYGMFKKVNARERIVGWYHTGPKLHKNDIAINELMKRYCPNSVLVIIDVKPKDLGLPTEAYISVEEVHDDGTPTSKTFEHVTSEIGAEEAEEVGVEHLLRDIKDTTVGTLSQRITNQVHGLKGLNSKLLDIRSYLEKVATGKLPINHQIIYQLQDVFNLLPDVSLQEFVKAFYLKTNDQMVVVYLASLIRSVVALHNLINNKIANRDAHVLNSFFNL

SEQ ID NO: 10194 - DNA, 1668 bp, Homo sapiens
gggagcggaagaaggaggccgcgcgagggctgacgaaccggaagaagaggaactgggcctgaaagggtaccggtgaccgctactgctgccggtgtttgcgtgtggcagggagccaggcctggcgagcggggtgtgtcgcgatgccggagctggcagtgcagaaggtggtggtccaccccctggtgctgctcagtgtggtggatcatttcaaccgaatcggcaaggttggaaaccagaagcgtgttgttggtgtgcttttggggtcatggcaaaagaaagtacttgatgtatcgaacagttttgcagttccttttgatgaagatgacaaagacgattctgtatggtttttagaccatgattatttggaaaacatgtatggaatgtttaagaaagtcaatgccagggaaagaatagttggctggtaccacacaggccctaaactacacaagaatgacattgccatcaacgaactcatgaaaagatactgtcctaattccgtattggtcatcattgatgtgaagccgaaggacctagggctgcctacagaagcgtacatttcagtggaagaagtccatgatgatggaactccaacctcgaaaacatttgaacacgtgaccagtgaaattggagcagaggaagctgaggaagttggagttgaacacttgttacgagatatcaaagacacgacggtgggcactctgtcccagcggatcacaaaccaggtccatggtttgaagggactgaactccaagcttctggatatcaggagctacctggaaaaagtcgccacaggcaagctgcccatcaaccaccagatcatctaccagctgcaggacgtcttcaacctgctgccagatgtcagcctgcaggagttcgtcaaggccttttacctgaagaccaatgaccagatggtggtagtgtacttggcctcgctgatccgttccgtggtcgccctgcacaacctcatcaacaacaagattgccaaccgggatgcagagaagaaagaagggcaggagaaagaagagagcaaaaaggataggaaagaggacaaggagaaagataaagataaggaaaagagtgatgtaaagaaagaggagaaaaaggagaaaaagtaaaacatgtattaaatagcttttttaatttgtaaattaaaatcttacaaactaaatcagtgtgctgctagagggttctttttcacttgacatgcttattagaaagctgacccaacaagagctctctgcctccggtcactcttgctgtggtgctacgtggaagtgaatggagactgatctcaaatctgaactgcagctttcgctgctgtgagttggggatatgatagtcagctcaggcttcagattgtatgagaaaaatgaagagaagtcaacaaatattttggtactcttcattcatttatctctaaaaccaggagttgaattttcctcatcttgaaagactcttggggtctgtttctggtattttacaaaattgctaagtggaatgcatgaattgcattatgttctctggtaacacgtagagttcagacccttctgaactctgttgataataccacaccatgttctggacccatagctctggcatcctcaggggttgtgatccagctccatatattgtttaccttcaaagatacaattaaatggcttgattttt

SEQ ID NO: 10195 - protein, 324 aa, Homo sapiens; identical to SEQ ID NO: 1589

SEQ ID NO: 10196 - DNA, 1511 bp, Homo sapiens
gggagcggaagaaggaggccgcgcgagggctgacgaaccggaagaagaggaactgggcctgaaagggtaccggtgaccgctactgctgccggtgtttgcgtgtggcagggagccaggcctggcgagcggggtgtgtcgcgatgccggagctggcagtgcagaaggtggtggtccaccccctggtgctgctcagtgtggtggatcatttcaaccgaatcggcaaggttggaaaccagaagcgtgttgttggtgtgcttttggggtcatggcaaaagaaagtacttgatgtatcgaacagttttgcagttccttttgatgaagatgacaaagacgattctgtatggtttttagaccatgattatttggaaaacatgtatggaatgtttaagaaagtcaatgccagggaaagaatagttggctggtaccacacaggccctaaactacacaagaatgacattgccatcaacgaactcatgaaaagatactgtcctaattccgtattggtcatcattgatgtgaagccgaaggacctagggctgcctacagaagcgtacatttcagtggaagaagtccatgatgatggaactccaacctcgaaaacatttgaacacgtgaccagtgaaattggagcagaggaagctgaggaagttggagttgaacacttgttacgctgcaggacgtcttcaacctgctgccagatgtcagcctgcaggagttcgtcaaggccttttacctgaagaccaatgaccagatggtggtagtgtacttggcctcgctgatccgttccgtggtcgccctgcacaacctcatcaacaacaagattgccaaccgggatgcagagaagaaagaagggcaggagaaagaagagagcaaaaaggataggaaagaggacaaggagaaagataaagataaggaaaagagtgatgtaaagaaagaggagaaaaaggagaaaaagtaaaacatgtattaaatagcttttttaatttgtaaattaaaatcttacaaactaaatcagtgtgctgctagagggttctttttcacttgacatgcttattagaaagctgacccaacaagagctctctgcctccggtcactcttgctgtggtgctacgtggaagtgaatggagactgatctcaaatctgaactgcagctttcgctgctgtgagttggggatatgatagtcagctcaggcttcagattgtatgagaaaaatgaagagaagtcaacaaatattttggtactcttcattcatttatctctaaaaccaggagttgaattttcctcatcttgaaagactcttggggtctgtttctggtattttacaaaattgctaagtggaatgcatgaattgcattatgttctctggtaacacgtagagttcagacccttctgaactctgttgataataccacaccatgttctggacccatagctctggcatcctcaggggttgtgatccagctccatatattgtttaccttcaaagatacaattaaatggcttgattttt

SEQ ID NO: 10197 - protein, 198 aa, Homo sapiens; identical to SEQ ID NO: 10189

SEQ ID NO: 10198 - DNA, 2162 bp, Homo sapiens
gggagcggaagaaggaggccgcgcgagggctgacgaaccggaagaagaggaactgggcctgaaagggtaccggtgaccgctactgctgccggtgtttgcgtgtggcagggagccaggcctggcgagcggggtgtgtcgcgatgccggagctggcagtgcagaaggtggtggtccaccccctggtgctgctcagtgtggtggatcatttcaaccgaatcggcaaggttggaaaccagaagcgtgttgttggtgtgcttttggggtcatggcaaaagaaagtacttgatgtatcgaacagttttgcagttccttttgatgaagatgacaaagacgattctgtatggtttttagaccatgattatttggaaaacatgtatggaatgtttaagaaagtcaatgccagggaaagaatagttggctggtaccacacaggccctaaactacacaagaatgacattgccatcaacgaactcatgaaaagatactgtcctaattccgtattggtcatcattgatgtgaagccgaaggacctagggctgcctacagaagcgtacatttcagtggaagaagtccatgatgatggaactccaacctcgaaaacatttgaacacgtgaccagtgaaattggagcagaggaagctgaggaagttggagttgaacacttgttacgagatatcaaagacacgacggtgggcactctgtcccagcggatcacaaaccaggtccatggtttgaagggactgaactccaagcttctggatatcaggagctacctggaaaaagtcgccacaggcaagctgcccatcaaccaccagatcatctaccagctgcaggacgtcttcaacctgctgccagatgtcagcctgcaggagttcgtcaaggccttttacctgaagaccaatgaccagatggtggtagtgtacttggcctcgctgatccgttccgtggtcgccctgcacaacctcatcaacaacaagattgccaaccgggatgcagagaagaaagaagggcaggagaaagaagagagcaaaaaggataggaaagaggacaaggagaaagataaagataaggaaaagagtgatgtaaagaaagaggagaaaaaggagaaaaagtaaaacatgtattaaatagcttttttaatttgtaaattaaaatcttacaaactaaatcagtgtgctgctagagggttctttttcacttgacatgcttattagaaagctgacccaacaagagctctctgcctccggtcactcttgctgtggtgctacgtggaagtgaatggagactgatctcaaatctgaactgcagctttcgctgctgtgagttggggatatgatagtcagctcaggcttcagattgtatgagaaaaatgaagagaagtcaacaaatattttggtactcttcattcatttatctctaaaaccaggagttgaattttcctcatcttgaaagactcttggggtctgtttctggtattttacaaaattgctaagtggaatgcatgaattgcattatgttctctggtaacacgtagagttcagacccttctgaactctgttgataataccacaccatgttctggacccatagctctggcatcctcaggggttgtgatccagctccatatattgtttaccttcaaagatacaattaaatggcttgatttttaagctgtgttctagtcgtttttgacttcgggagtagtgatctgtagtttccagaagcagccaagacagtcttcgattggagctgccttaagttctcttgcacttggtatcatttatgaaagagcatctcattcccctaaatggaaacaggcagtctgctgtagtgaggagagttctctgagcccagaagacccgggttccagtttgtacctcagatccctcatttatgaggtggtaggttgcagtccgtcatctctgaagtccccagaacagtgtttcaaaagggacacatttaccacactgcagcaagttgtaagtacctcagaccacaggccaaacaggcatgttactaagaatggaacaatgtttcccccaagataagtgcacaggactcctagaggaacaaattaaataaggcactaaatcatttgacatacagtagtcacggatattaaatttcctctcttgaacagatagaacctctcaaatgcacta

SEQ ID NO: 10199 - protein, 324 aa, Homo sapiens; identical to SEQ ID NO: 1589

SEQ ID NO: 10200 - DNA, 2005 bp, Homo sapiens
gggagcggaagaaggaggccgcgcgagggctgacgaaccggaagaagaggaactgggcctgaaagggtaccggtgaccgctactgctgccggtgtttgcgtgtggcagggagccaggcctggcgagcggggtgtgtcgcgatgccggagctggcagtgcagaaggtggtggtccaccccctggtgctgctcagtgtggtggatcatttcaaccgaatcggcaaggttggaaaccagaagcgtgttgttggtgtgcttttggggtcatggcaaaagaaagtacttgatgtatcgaacagttttgcagttccttttgatgaagatgacaaagacgattctgtatggtttttagaccatgattatttggaaaacatgtatggaatgtttaagaaagtcaatgccagggaaagaatagttggctggtaccacacaggccctaaactacacaagaatgacattgccatcaacgaactcatgaaaagatactgtcctaattccgtattggtcatcattgatgtgaagccgaaggacctagggctgcctacagaagcgtacatttcagtggaagaagtccatgatgatggaactccaacctcgaaaacatttgaacacgtgaccagtgaaattggagcagaggaagctgaggaagttggagttgaacacttgttacgctgcaggacgtcttcaacctgctgccagatgtcagcctgcaggagttcgtcaaggccttttacctgaagaccaatgaccagatggtggtagtgtacttggcctcgctgatccgttccgtggtcgccctgcacaacctcatcaacaacaagattgccaaccgggatgcagagaagaaagaagggcaggagaaagaagagagcaaaaaggataggaaagaggacaaggagaaagataaagataaggaaaagagtgatgtaaagaaagaggagaaaaaggagaaaaagtaaaacatgtattaaatagcttttttaatttgtaaattaaaatcttacaaactaaatcagtgtgctgctagagggttctttttcacttgacatgcttattagaaagctgacccaacaagagctctctgcctccggtcactcttgctgtggtgctacgtggaagtgaatggagactgatctcaaatctgaactgcagctttcgctgctgtgagttggggatatgatagtcagctcaggcttcagattgtatgagaaaaatgaagagaagtcaacaaatattttggtactcttcattcatttatctctaaaaccaggagttgaattttcctcatcttgaaagactcttggggtctgtttctggtattttacaaaattgctaagtggaatgcatgaattgcattatgttctctggtaacacgtagagttcagacccttctgaactctgttgataataccacaccatgttctggacccatagctctggcatcctcaggggttgtgatccagctccatatattgtttaccttcaaagatacaattaaatggcttgatttttaagctgtgttctagtcgtttttgacttcgggagtagtgatctgtagtttccagaagcagccaagacagtcttcgattggagctgccttaagttctcttgcacttggtatcatttatgaaagagcatctcattcccctaaatggaaacaggcagtctgctgtagtgaggagagttctctgagcccagaagacccgggttccagtttgtacctcagatccctcatttatgaggtggtaggttgcagtccgtcatctctgaagtccccagaacagtgtttcaaaagggacacatttaccacactgcagcaagttgtaagtacctcagaccacaggccaaacaggcatgttactaagaatggaacaatgtttcccccaagataagtgcacaggactcctagaggaacaaattaaataaggcactaaatcatttgacatacagtagtcacggatattaaatttcctctcttgaacagatagaacctctcaaatgcacta

SEQ ID NO: 10201 - protein, 198 aa, Homo sapiens; identical to SEQ ID NO: 10189

SEQ ID NO: 10202 - DNA, 2040 bp, Homo sapiens
gggagcggaagaaggaggccgcgcgagggctgacgaaccggaagaagaggaactgggcctgaaagggtaccggtgaccgctactgctgccggtgtttgcgtgtggcagggagccaggcctggcgagcggggtgtgtcgcgatgccggagctggcagtgcagaaggtggtggtccaccccctggtgctgctcagtgtggtggatcatttcaaccgaatcggcaaggttggaaaccagaagcgtgttgttggtgtgcttttggggtcatggcaaaagaaagtacttgatgtatcgaacagttttgcagttccttttgatgaagatgacaaagacgattctgtatggtttttagaccatgattatttggaaaacatgtatggaatgtttaagaaagtcaatgccagggaaagaatagttggctggtaccacacaggccctaaactacacaagaatgacattgccatcaacgaactcatgaaaagatactgtcctaattccgtattggtcatcattgatgtgaagccgaaggacctagggctgcctacagaagcgtacatttcagtggaagaagtccatgatgatggaactccaacctcgaaaacatttgaacacgtgaccagtgaaattggagcagaggaagctgaggaagttggagttgaacacttgttacgagatatcaaagacacgacggtgggcactctgtcccagcggatcacaaaccaggtccatggtttgaagggactgaactccaagcttctggatatcaggagctacctggaaaaagtcgccacaggcaagctgcccatcaaccaccagatcatctaccagctgcaggacgtcttcaacctgctgccagatgtcagcctgcaggagttcgtcaaggccttttacctgaagaccaatgaccagatggtggtagtgtacttggcctcgctgatccgttccgtggtcgccctgcacaacctcatcaacaacaagattgccaaccgggatgcacatgtattaaatagcttttttaatttgtaaattaaaatcttacaaactaaatcagtgtgctgctagagggttctttttcacttgacatgcttattagaaagctgacccaacaagagctctctgcctccggtcactcttgctgtggtgctacgtggaagtgaatggagactgatctcaaatctgaactgcagctttcgctgctgtgagttggggatatgatagtcagctcaggcttcagattgtatgagaaaaatgaagagaagtcaacaaatattttggtactcttcattcatttatctctaaaaccaggagttgaattttcctcatcttgaaagactcttggggtctgtttctggtattttacaaaattgctaagtggaatgcatgaattgcattatgttctctggtaacacgtagagttcagacccttctgaactctgttgataataccacaccatgttctggacccatagctctggcatcctcaggggttgtgatccagctccatatattgtttaccttcaaagatacaattaaatggcttgatttttaagctgtgttctagtcgtttttgacttcgggagtagtgatctgtagtttccagaagcagccaagacagtcttcgattggagctgccttaagttctcttgcacttggtatcatttatgaaagagcatctcattcccctaaatggaaacaggcagtctgctgtagtgaggagagttctctgagcccagaagacccgggttccagtttgtacctcagatccctcatttatgaggtggtaggttgcagtccgtcatctctgaagtccccagaacagtgtttcaaaagggacacatttaccacactgcagcaagttgtaagtacctcagaccacaggccaaacaggcatgttactaagaatggaacaatgtttcccccaagataagtgcacaggactcctagaggaacaaattaaataaggcactaaatcatttgacatacagtagtcacggatattaaatttcctctcttgaacagatagaacctctcaaatgcacta

SEQ ID NO: 10203 - protein, 294 aa, Homo sapiens; identical to SEQ ID NO: 10193

SEQ ID NO: 10204 - DNA, 2051 bp, Homo sapiens
aagaaggaggccgcgcgagggctgacgaaccggaagaagaggaactgggcctgaaagggtaccggtgaccgctactgctgccggtgtttgcgtgtggcagggagccaggcctggcgagcggggtgtgtcgcgatgccggagctggcagtgcagaaggtggtggtccaccccctggtgctgctcagtgtggtggatcatttcaaccgaatcggcaaggttggaaaccagaagcgtgttgttggtgtgcttttggggtcatggcaaaagaaagtacttgatgtatcgaacagttttgcagttccttttgatgaagatgacaaagacgattctgtatggtttttagaccatgattatttggaaaacatgtatggaatgtttaagaaagtcaatgccagggaaagaatagttggctggtaccacacaggccctaaactacacaagaatgacattgccatcaacgaactcatgaaaagatactgtcctaattccgtattggtcatcattgatgtgaagccgaaggacctagggctgcctacagaagcgtacatttcagtggaagaagtccatgatgatggaactccaacctcgaaaacatttgaacacgtgaccagtgaaattggagcagaggaagctgaggaagttggagttgaacacttgttacggtgagaccctagtacagcatcaaaatcattcactgcccgagaggtcacacagtgtaaggaagaggtctgtgtcgggaatatggagacctggggtctcgtcctggccgtccactaacaagtctgccattctgagcaaatcacagtccctttccagacctttgttttattgtctgtaaattgaagtgtttgaactacatcaactgtaaaatgtcttgagttacaatttatgactttgtggatagcataccttgtctggaaactataatgttgactgacgggaagagaggtatgaaataaatgcaggcctgcactctccactaggtgtccttctcaacaaatgtagcccattttctggagagaatcttcatcttggagtagcttttgttttaaaatcctatatctattataatccttatttgaaaaaggttatagttttatcagtcaatgaggttccttctagttctaaaaattaccatcttagttaagcttctcaatattctggagatgcatgtagagaaaatgccatccttttaggaacaggaaagctgagagagacagcttcagtacaaggttacccagaaagttattggtagatctgaactgttgacctaagcaatttttttttccttaagtggaaatggttttattttagctcccttttataattgttttttgaaaaatgtcctgtgatgagaaagataaaatgtgttccaaatgataacgaaattaaggtaattgataacgaaatctttatcaaatggggaagtgacatttttcttttaaaaacttgcctcacccaacaaagctaggaattttcttagaatgtaagaacttgcctgataacatggtaccctgatgccttttcctgccctttttaactgtgggttattacagagatatcaaagacacgacggtgggcactctgtcccagcggatcacaaaccaggtccatggtttgaagggactgaactccaagcttctggatatcaggagctacctggaaaaagtcgccacaggcaagctgcccatcaaccaccagatcatctaccagctgcaggacgtcttcaacctgctgccagatgtcagcctgcaggagttcgtcaaggccttttacctgaagaccaatgaccagatggtggtagtgtacttggcctcgctgatccgttccgtggtcgccctgcacaacctcatcaacaacaagattgccaaccgggatgcagagaagaaagaagggcaggagaaagaagagagcaaaaaggataggaaagaggacaaggagaaagataaagataaggaaaagagtgatgtaaagaaagaggagaaaaaggagaaaaagtaaaacatgtattaaatagcttttttaatttgtaaattaaaatcttacaaact

SEQ ID NO: 10205 - protein, 177 aa, Homo sapiens
MPELAVQKVVVHPLVLLSVVDHFNRIGKVGNQKRVVGVLLGSWQKKVLDVSNSFAVPFDEDDKDDSVWFLDHDYLENMYGMFKKVNARERIVGWYHTGPKLHKNDIAINELMKRYCPNSVLVIIDVKPKDLGLPTEAYISVEEVHDDGTPTSKTFEHVTSEIGAEEAEEVGVEHLLR

SEQ ID NO: 10206 - DNA, 1290 bp, Homo sapiens
aagaaggaggccgcgcgagggctgacgaaccggaagaagaggaactgggcctgaaagggtaccggtgaccgctactgctgccggtgtttgcgtgtggcagggagccaggcctggcgagcggggtgtgtcgcgatgccggagctggcagtgcagaaggtggtggtccaccccctggtgctgctcagtgtggtggatcatttcaaccgaatcggcaaggttggaaaccagaagcgtgttgttggtgtgcttttggggtcatggcaaaagaaagtacttgatgtatcgaacagttttgcagttccttttgatgaagatgacaaagacgattctgtatggtttttagaccatgattatttggaaaacatgtatggaatgtttaagaaagtcaatgccagggaaagaatagttggctggtaccacacaggccctaaactacacaagaatgacattgccatcaacgaactcatgaaaagatactgtcctaattccgtattggtcatcattgatgtgaagccgaaggacctagggctgcctacagaagcgtacatttcagtggaagaagtccatgatgatggaactccaacctcatcaacaacaagattgccaaccgggatgcagagaagaaagaagggcaggagaaagaagagagcaaaaaggataggaaagaggacaaggagaaagataaagataaggaaaagagtgatgtaaagaaagaggagaaaaaggagaaaaagtaaaacatgtattaaatagcttttttaatttgtaaattaaaatcttacaaactaaatcagtgtgctgctagagggttctttttcacttgacatgcttattagaaagctgacccaacaagagctctctgcctccggtcactcttgctgtggtgctacgtggaagtgaatggagactgatctcaaatctgaactgcagctttcgctgctgtgagttggggatatgatagtcagctcaggcttcagattgtatgagaaaaatgaagagaagtcaacaaatattttggtactcttcattcatttatctctaaaaccaggagttgaattttcctcatcttgaaagactcttggggtctgtttctggtattttacaaaattgctaagtggaatgcatgaattgcattatgttctctggtaacacgtagagttcagacccttctgaactctgttgataataccacaccatgttctggacccatagctctggcatcctcaggggttgtgatccagctccatatattgtttaccttcaaagatacaattaaatggcttgattttt

SEQ ID NO: 10207 - protein, 191 aa, Homo sapiens
MPELAVQKVVVHPLVLLSVVDHFNRIGKVGNQKRVVGVLLGSWQKKVLDVSNSFAVPFDEDDKDDSVWFLDHDYLENMYGMFKKVNARERIVGWYHTGPKLHKNDIAINELMKRYCPNSVLVIIDVKPKDLGLPTEAYISVEEVHDDGTPTSSTTRLPTGMQRRKKGRRKKRAKRIGKRTRRKIKIRKRVM

SEQ ID NO: 10208 - DNA, 2554 bp, Homo sapiens
aagaaggaggccgcgcgagggctgacgaaccggaagaagaggaactgggcctgaaagggtaccggtgaccgctactgctgccggtgtttgcgtgtggcagggagccaggcctggcgagcggggtgtgtcgcgatgccggagctggcagtgcagaaggtggtggtccaccccctggtgctgctcagtgtggtggatcatttcaaccgaatcggcaaggttggaaaccagaagcgtgttgttggtgtgcttttggggtcatggcaaaagaaagtacttgatgtatcgaacagttttgcagttccttttgatgaagatgacaaagacgattctgtatggtttttagaccatgattatttggaaaacatgtatggaatgtttaagaaagtcaatgccagggaaagaatagttggctggtaccacacaggccctaaactacacaagaatgacattgccatcaacgaactcatgaaaagatactgtcctaattccgtattggtcatcattgatgtgaagccgaaggacctagggctgcctacagaagcgtacatttcagtggaagaagtccatgatgatggaactccaacctcgaaaacatttgaacacgtgaccagtgaaattggagcagaggaagctgaggaagttggagttgaacacttgttacggtgagaccctagtacagcatcaaaatcattcactgcccgagaggtcacacagtgtaaggaagaggtctgtgtcgggaatatggagacctggggtctcgtcctggccgtccactaacaagtctgccattctgagcaaatcacagtccctttccagacctttgttttattgtctgtaaattgaagtgtttgaactacatcaactgtaaaatgtcttgagttacaatttatgactttgtggatagcataccttgtctggaaactataatgttgactgacgggaagagaggtatgaaataaatgcaggcctgcactctccactaggtgtccttctcaacaaatgtagcccattttctggagagaatcttcatcttggagtagcttttgttttaaaatcctatatctattataatccttatttgaaaaaggttatagttttatcagtcaatgaggttccttctagttctaaaaattaccatcttagttaagcttctcaatattctggagatgcatgtagagaaaatgccatccttttaggaacaggaaagctgagagagacagcttcagtacaaggttacccagaaagttattggtagatctgaactgttgacctaagcaatttttttttccttaagtggaaatggttttattttagctcccttttataattgttttttgaaaaatgtcctgtgatgagaaagataaaatgtgttccaaatgataacgaaattaaggtaattgataacgaaatctttatcaaatggggaagtgacatttttcttttaaaaacttgcctcacccaacaaagctaggaattttcttagaatgtaagaacttgcctgataacatggtaccctgatgccttttcctgccctttttaactgtgggttattacagagatatcaaagacacgacggtgggcactctgtcccagcggatcacaaaccaggtccatggtttgaagggactgaactccaagcttctggatatcaggagctacctggaaaaagtcgccacaggcaagctgcccatcaaccaccagatcatctaccagctgcaggacgtcttcaacctgctgccagatgtcagcctgcaggagttcgtcaaggccttttacctgaagaccaatgaccagatggtggtagtgtacttggcctcgctgatccgttccgtggtcgccctgcacaacctcatcaacaacaagattgccaaccgggatgcagagaagaaagaagggcaggagaaagaagagagcaaaaaggataggaaagaggacaaggagaaagataaagataaggaaaagagtgatgtaaagaaagaggagaaaaaggagaaaaagtaaaacatgtattaaatagcttttttaatttgtaaattaaaatcttacaaactaaatcagtgtgctgctagagggttctttttcacttgacatgcttattagaaagctgacccaacaagagctctctgcctccggtcactcttgctgtggtgctacgtggaagtgaatggagactgatctcaaatctgaactgcagctttcgctgctgtgagttggggatatgatagtcagctcaggcttcagattgtatgagaaaaatgaagagaagtcaacaaatattttggtactcttcattcatttatctctaaaaccaggagttgaattttcctcatcttgaaagactcttggggtctgtttctggtattttacaaaattgctaagtggaatgcatgaattgcattatgttctctggtaacacgtagagttcagacccttctgaactctgttgataataccacaccatgttctggacccatagctctggcatcctcaggggttgtgatccagctccatatattgtttaccttcaaagatacaattaaatggcttgattttt

SEQ ID NO: 10209 - protein, 177 aa, Homo sapiens; identical to SEQ ID NO: 10205

SEQ ID NO: 10210 - DNA, 1784 bp, Homo sapiens
aagaaggaggccgcgcgagggctgacgaaccggaagaagaggaactgggcctgaaagggtaccggtgaccgctactgctgccggtgtttgcgtgtggcagggagccaggcctggcgagcggggtgtgtcgcgatgccggagctggcagtgcagaaggtggtggtccaccccctggtgctgctcagtgtggtggatcatttcaaccgaatcggcaaggttggaaaccagaagcgtgttgttggtgtgcttttggggtcatggcaaaagaaagtacttgatgtatcgaacagttttgcagttccttttgatgaagatgacaaagacgattctgtatggtttttagaccatgattatttggaaaacatgtatggaatgtttaagaaagtcaatgccagggaaagaatagttggctggtaccacacaggccctaaactacacaagaatgacattgccatcaacgaactcatgaaaagatactgtcctaattccgtattggtcatcattgatgtgaagccgaaggacctagggctgcctacagaagcgtacatttcagtggaagaagtccatgatgatggaactccaacctcatcaacaacaagattgccaaccgggatgcagagaagaaagaagggcaggagaaagaagagagcaaaaaggataggaaagaggacaaggagaaagataaagataaggaaaagagtgatgtaaagaaagaggagaaaaaggagaaaaagtaaaacatgtattaaatagcttttttaatttgtaaattaaaatcttacaaactaaatcagtgtgctgctagagggttctttttcacttgacatgcttattagaaagctgacccaacaagagctctctgcctccggtcactcttgctgtggtgctacgtggaagtgaatggagactgatctcaaatctgaactgcagctttcgctgctgtgagttggggatatgatagtcagctcaggcttcagattgtatgagaaaaatgaagagaagtcaacaaatattttggtactcttcattcatttatctctaaaaccaggagttgaattttcctcatcttgaaagactcttggggtctgtttctggtattttacaaaattgctaagtggaatgcatgaattgcattatgttctctggtaacacgtagagttcagacccttctgaactctgttgataataccacaccatgttctggacccatagctctggcatcctcaggggttgtgatccagctccatatattgtttaccttcaaagatacaattaaatggcttgatttttaagctgtgttctagtcgtttttgacttcgggagtagtgatctgtagtttccagaagcagccaagacagtcttcgattggagctgccttaagttctcttgcacttggtatcatttatgaaagagcatctcattcccctaaatggaaacaggcagtctgctgtagtgaggagagttctctgagcccagaagacccgggttccagtttgtacctcagatccctcatttatgaggtggtaggttgcagtccgtcatctctgaagtccccagaacagtgtttcaaaagggacacatttaccacactgcagcaagttgtaagtacctcagaccacaggccaaacaggcatgttactaagaatggaacaatgtttcccccaagataagtgcacaggactcctagaggaacaaattaaataaggcactaaatcatttgacatacagtagtcacggatattaaatttcctctcttgaacagatagaacctctcaaatgcacta

SEQ ID NO: 10211 - protein, 191 aa, Homo sapiens; identical to SEQ ID NO: 10207

SEQ ID NO: 10212 - DNA, 3048 bp, Homo sapiens
aagaaggaggccgcgcgagggctgacgaaccggaagaagaggaactgggcctgaaagggtaccggtgaccgctactgctgccggtgtttgcgtgtggcagggagccaggcctggcgagcggggtgtgtcgcgatgccggagctggcagtgcagaaggtggtggtccaccccctggtgctgctcagtgtggtggatcatttcaaccgaatcggcaaggttggaaaccagaagcgtgttgttggtgtgcttttggggtcatggcaaaagaaagtacttgatgtatcgaacagttttgcagttccttttgatgaagatgacaaagacgattctgtatggtttttagaccatgattatttggaaaacatgtatggaatgtttaagaaagtcaatgccagggaaagaatagttggctggtaccacacaggccctaaactacacaagaatgacattgccatcaacgaactcatgaaaagatactgtcctaattccgtattggtcatcattgatgtgaagccgaaggacctagggctgcctacagaagcgtacatttcagtggaagaagtccatgatgatggaactccaacctcgaaaacatttgaacacgtgaccagtgaaattggagcagaggaagctgaggaagttggagttgaacacttgttacggtgagaccctagtacagcatcaaaatcattcactgcccgagaggtcacacagtgtaaggaagaggtctgtgtcgggaatatggagacctggggtctcgtcctggccgtccactaacaagtctgccattctgagcaaatcacagtccctttccagacctttgttttattgtctgtaaattgaagtgtttgaactacatcaactgtaaaatgtcttgagttacaatttatgactttgtggatagcataccttgtctggaaactataatgttgactgacgggaagagaggtatgaaataaatgcaggcctgcactctccactaggtgtccttctcaacaaatgtagcccattttctggagagaatcttcatcttggagtagcttttgttttaaaatcctatatctattataatccttatttgaaaaaggttatagttttatcagtcaatgaggttccttctagttctaaaaattaccatcttagttaagcttctcaatattctggagatgcatgtagagaaaatgccatccttttaggaacaggaaagctgagagagacagcttcagtacaaggttacccagaaagttattggtagatctgaactgttgacctaagcaatttttttttccttaagtggaaatggttttattttagctcccttttataattgttttttgaaaaatgtcctgtgatgagaaagataaaatgtgttccaaatgataacgaaattaaggtaattgataacgaaatctttatcaaatggggaagtgacatttttcttttaaaaacttgcctcacccaacaaagctaggaattttcttagaatgtaagaacttgcctgataacatggtaccctgatgccttttcctgccctttttaactgtgggttattacagagatatcaaagacacgacggtgggcactctgtcccagcggatcacaaaccaggtccatggtttgaagggactgaactccaagcttctggatatcaggagctacctggaaaaagtcgccacaggcaagctgcccatcaaccaccagatcatctaccagctgcaggacgtcttcaacctgctgccagatgtcagcctgcaggagttcgtcaaggccttttacctgaagaccaatgaccagatggtggtagtgtacttggcctcgctgatccgttccgtggtcgccctgcacaacctcatcaacaacaagattgccaaccgggatgcagagaagaaagaagggcaggagaaagaagagagcaaaaaggataggaaagaggacaaggagaaagataaagataaggaaaagagtgatgtaaagaaagaggagaaaaaggagaaaaagtaaaacatgtattaaatagcttttttaatttgtaaattaaaatcttacaaactaaatcagtgtgctgctagagggttctttttcacttgacatgcttattagaaagctgacccaacaagagctctctgcctccggtcactcttgctgtggtgctacgtggaagtgaatggagactgatctcaaatctgaactgcagctttcgctgctgtgagttggggatatgatagtcagctcaggcttcagattgtatgagaaaaatgaagagaagtcaacaaatattttggtactcttcattcatttatctctaaaaccaggagttgaattttcctcatcttgaaagactcttggggtctgtttctggtattttacaaaattgctaagtggaatgcatgaattgcattatgttctctggtaacacgtagagttcagacccttctgaactctgttgataataccacaccatgttctggacccatagctctggcatcctcaggggttgtgatccagctccatatattgtttaccttcaaagatacaattaaatggcttgatttttaagctgtgttctagtcgtttttgacttcgggagtagtgatctgtagtttccagaagcagccaagacagtcttcgattggagctgccttaagttctcttgcacttggtatcatttatgaaagagcatctcattcccctaaatggaaacaggcagtctgctgtagtgaggagagttctctgagcccagaagacccgggttccagtttgtacctcagatccctcatttatgaggtggtaggttgcagtccgtcatctctgaagtccccagaacagtgtttcaaaagggacacatttaccacactgcagcaagttgtaagtacctcagaccacaggccaaacaggcatgttactaagaatggaacaatgtttcccccaagataagtgcacaggactcctagaggaacaaattaaataaggcactaaatcatttgacatacagtagtcacggatattaaatttcctctcttgaacagatagaacctctcaaatgcacta

SEQ ID NO: 10213 - protein, 177 aa, Homo sapiens; identical to SEQ ID NO: 10205

SEQ ID NO: 10214 - DNA, 1060 bp, Homo sapiens
ggaagaagaggaactgggcctgaaagggtaccggtgaccgctactgctgccggtgtttgcgtgtggcagggagccaggcctggcgagcggggtgtgtcgcgatgccggagctggcagtgcagaaggtggtggtccaccccctggtgctgctcagtgtggtggatcatttcaaccgaatcggcaaggttggaaaccagaagcgtgttgttggtgtgcttttggggtcatggcaaaagaaagtacttgatgtatcgaacagttttgcagttccttttgatgaagatgacaaagacgattctgtatggtttttagaccatgattatttggaaaacatgtatggaatgtttaagaaagtcaatgccagggaaagaatatttacaaaattgctaagtggaatgcatgaattgcattatgttctctggtaacacgtagagttcagacccttctgaactctgttgataataccacaccatgttctggacccatagctctggcatcctcaggggttgtgatccagctccatatattgtttaccttcaaagatacaattaaatggcttgatttttaagctgtgttctagtcgtttttgacttcgggagtagtgatctgtagtttccagaagcagccaagacagtcttcgattggagctgccttaagttctcttgcacttggtatcatttatgaaagagcatctcattcccctaaatggaaacaggcagtctgctgtagtgaggagagttctctgagcccagaagacccgggttccagtttgtacctcagatccctcatttatgaggtggtaggttgcagtccgtcatctctgaagtccccagaacagtgtttcaaaagggacacatttaccacactgcagcaagttgtaagtacctcagaccacaggccaaacaggcatgttactaagaatggaacaatgtttcccccaagataagtgcacaggactcctagaggaacaaattaaataaggcactaaatcatttgacatacagtagtcacggatattaaatttcctctcttgaacagatagaacctctcaaatgcacta

SEQ ID NO: 10215 - protein, 107 aa, Homo sapiens
MPELAVQKVVVHPLVLLSVVDHFNRIGKVGNQKRVVGVLLGSWQKKVLDVSNSFAVPFDEDDKDDSVWFLDHDYLENMYGMFKKVNARERIFTKLLSGMHELHYVLW

SEQ ID NO: 10216 - DNA, 827 bp, Homo sapiens
gaagaagaggaactgggcctgaaagggtaccggtgaccgctactgctgccggtgtttgcgtgtggcagggagccaggcctggcgagcggggtgtgtcgcgatgccggagctggcagtgcagaaggtggtggtccaccccctggtgctgctcagtgtggtggatcatttcaaccgaatcggcaaggttggaaaccagaagcgtgttgttggtgtgcttttggggtcatggcaaaagaaagtacttgatgtatcgaacagttttgcaggtaaaagacaaattttatgtttttccgagcatgattaaaatgtcagtttaccctttaaaaatataaacctttgttaccgcttttgactacaacccagagattgtcttaaaattgctgaagtatagaaaagagaacctgaagattgcacactagaccagacagtaaatattttaaacttgcaggccatgtggtctccactgcacctgctcctctctgccattatagtgcaagagctgctatagacaacatgtaaacaaacaaaagtggcagtattccagcaaacctctataaaaacaggcagctggcacagtttgtcagcccctgcactaaactgtttaaccacgcttcttataggtacagtaaggagagagatggggaactttacccctttatgtgaatccttacaagaacgtacccatgtattactttaatgattaaaggaacaacaataaagaagatgatactggatgacctctggagtagagatcactaactctagtgtctaaaatgaccagctagtcatgtcatttgccaaattgaaaaatatcaggaagtaactgg

SEQ ID NO: 10217 - protein, 67 aa, Homo sapiens
MPELAVQKVVVHPLVLLSVVDHFNRIGKVGNQKRVVGVLLGSWQKKVLDVSNSFAGKRQILCFSEHD

SEQ ID NO: 10218 - DNA, 1220 bp, Homo sapiens
gttgactgacgggaagagaggtatgaaataaatgcaggcctgcactctccactaggtgtccttctcaacaaatgtagcccattttctggagagaatcttcatcttggagtagcttttgttttaaaatcctatatctattataatccttatttgaaaaaggttatagttttatcagtcaatgaggttccttctagttctaaaaattaccatcttagttaagcttctcaatattctggagatgcatgtagagaaaatgccatccttttaggaacaggaaagctgagagagacagcttcagtacaaggttacccagaaagttattggtagatctgaactgttgacctaagcaatttttttttccttaagtggaaatggttttattttagctcccttttataattgttttttgaaaaatgtcctgtgatgagaaagataaaatgtgttccaaatgataacgaaattaaggtaattgataacgaaatctttatcaaatggggaagtgacatttttcttttaaaaacttgcctcacccaacaaagctaggaattttcttagaatgtaagaacttgcctgataacatggtaccctgatgccttttcctgccctttttaactgtgggttattacagagatatcaaagacacgacggtgggcactctgtcccagcggatcacaaaccaggtccatggtttgaagggactgaactccaagcttctggatatcaggagctacctggaaaaagtcgccacaggcaagctgcccatcaaccaccagatcatctaccagctgcaggacgtcttcaacctgctgccagatgtcagcctgcaggagttcgtcaaggccttttacctgaagaccaatgaccagatggtggtagtgtacttggcctcgctgatccgttccgtggtcgccctcagctcatctcttggcaagagaaaaatttgattcccagttgggcatagatttgggaatctcccccaattacttcctgccatttctgctttcagctgaagccacccaggcaaaattttgaaggaacttgaagaggctatgggtgcaaaaagactgggttaagcatccacacctccacccttactgtcctcttgcacactgctgctgggggatgaatacattaatacaagcagatagtatgtgcttcgatttcccttactgctggtattactcttctaattttttttttttcctcgagactgggtcttg

SEQ ID NO: 10219 - protein, 90 aa, Homo sapiens
MPFPALFNCGLLQRYQRHDGGHSVPADHKPGPWFEGTELQASGYQELPGKSRHRQAAHQPPDHLPAAGRLQPAARCQPAGVRQGLLPEDQ

SEQ ID NO: 10220 - DNA, 4873 bp, Homo sapiens
ctgtctctataaaaaagttaaaaattacctgggcgtggtggctcgtgcctgcctcagcctcccgagtagctgggattacaggctcccatcaccatgcccagctaattgttgtatttttagtagagatggtgtttctccatattggccaggctggtctcgaactcctaaccgtgtgatccgcccgcctcggcctcccaattacaggtgtgagccactgtgcctggccaaaaaacaggctttagtttttaaaaaaagatctcaattttgcactgctaccaggcaaaaatcggtaatgccaagagttgaatggcataggaatgtacacaggtattatgtgtaataatttgcagtacatttgcttagggaagttgtaaacattttctcttgtgggccatataaatcaaatgtttctctgccttcccacatgtcctgtatccaccgcattttcccagacagggcagatgaaagtggttttgttagcatgttatagtctaacaaacaatcctaactcattctcaagttttattctgcttaatggaaaatggtagaagaaaaagcctttgcataactacccagtgaatgggagatttcattcttttccataagttgagggctatttcctgttttctttttcatttttttttgagaaaactaacccttcattgagatatttttaagtcgaatatctagtataaaaagtttgcattgtttcagcttgttttcatttaaacctgtggttgtctttcatctgcttctggcaattttttttttttttttttttgagacagagtctcgctctgttgcccaggctggagtgcagtggcacaatctcggctcactgcaacttccacatccccagttcaagcgattctcctgcctcaacctcccaggtagctgggattacaggtgcacaccaccacgcccagctaatttttgtatttttagtagagatggggttttaccatgttggccaggctggtcttgaactcctgacctcaagtaatccaccagcctcgacctcccaaagtgctaggattacaggcatgagccaccacactccgcctacttctccattgaagtgctctagttttggtaaaatcttctccttgacttcaggaccctctccacatttatccccagtctataactcgcatatttcgtgttttcaaacagaaaaccgtaattcaggagtgaacagcatcctctgtaaggtgtcacaggagcagcctgaaatccattaggcagtcattctgaagctgtggtgaaatcgaagggaagctaatgttgcagctaggaagatgagatccaggctgaggatcacactttttccagaatacttttttagtgtttccaaagccagcaaaagccgtttagaagtctcatctccagaatgccagaatacacaaatgtaaggctttattttaggggtgggccctgggttttgcagtcaagtcagccgctatttgtatgagcaagacttcatcggtagcactactgggctccccctcttctacatgatggcagcaatttggccttagaaaatatgcctaagtgactccacaggctataagctattttcttcataagtagaaatggaagatttctgttaggaaggtagaagtcagttttgtccgtatgtgggccaaactattaaaaataataaggcctggggattcctatgttcttagatgctcaataaacatttcagttcatcaaactatgaccaacttacaagtctgtggcattgtgctagttcactggaccctgggaaagtcttttaaatccaaatgatactttttgttttttaaagagacaggattttgctctgttgcctaggctggagtgcagtggcatgtgatcacagctcactgtaaccttgagctcctgggctccagtgtcctacctcagcctcttcagtagctaggactaaggcacatcccaccacacccaggcaattttagaattttttgtagatggctcttactatgttgttcaggctggtctcttactcctggcctcaagtgatcctcctgcctcagcctcccagtgttgggactacaagcaccagccactgcccccaaccctgcattatgttcttaaaggcagacctgaatcctgtgcggtgtcaattcaggtgtgcactggcccctgagccttacatacaggacccgttccttaggatgacgttgcgttcccttgcttagagcctcagcaccatggcacctggctctcccccgatgcctgggtcttgctcttgcccatttcctagccagggtttgtggtccaggcaacctgtcacatcagtgtgttccaaacatggcacccagatctcaaaagcttcttcaacgctcccatggtttgggatacacctcaagttttaacttacgtacttcaagtttcttttattcaattagatacaaaccgtctgacttttggcttctgaaacaggaaagtcaattttgttgttttcactgtaccatgcttttttatctcagaatcttgatgaactctgaaatgacccctgatgggggcatgcctctatttatgctgaataagagccattttacattttactacaggttgagtgcccctaatccaaaaatttgaaatgctccaaaatctgaaactttttgagcacttacatggtattgaaaggaaatgctcattggaacatttcctattaggcatgctcagccgttaagcataatgcaaatattaaaaaaaaaaatttcctaaatcttttaatacttctggttccaagcatttcagataagggatactcaagctctacctattcccaaattcccactaactagctctttggcaggtctatggaataaaaatcgatgcttctgattactttaaggcattataacctcatgaagtggtttctgagatgcaactgagtttttgtgctattttattgtattcttatatctttgaagatgaataatccacgtagtgcatttgagaggttctatctgttcaagagaggaaatttaatatccgtgactactgtatgtcaaatgatttagtgccttatttaatttgttcctctaggagtcctgtgcacttatcttgggggaaacattgttccattcttagtaacatgcctgtttggcctgtggtctgaggtacttacaacttgctgcagtgtggtaaatgtgtcccttttgaaacactgttctggggacttcagagatgacggactgcaacctaccacctcataaatgagggatctgaggtacaaactggaacccgggtcttctgggctcagagaactctcctcactacagcagactgcctgtttccatttaggggaatgagatgctctttcataaatgataccaagtgcaagagaacttaaggcagctccaatcgaagactgtcttggctgcttctggaaactacagatcactactcccgaagtcaaaaacgactagaacacagcttaaaaatcaagccatttaattgtatctttgaaggtaaacaatatatggagctggatcacaacccctgaggatgccagagctatgggtccagaacatggtgtggtattatcaacagagttcagaagggtctgaactctacgtgttaccagagaacataatgcaattcatgcattccacttagcaattttgtaaaataccagaaacagaccccaagagtctttcaagatgaggaaaattcaactcctggttttagagataaatgaatgaagagtaccaaaatatttgttgacttctcttcatttttctcatacaatctgaagcctgagctgactatcatatccccaactcacagcagcgaaagctgcagttcagatttgagatcagtctccattcacttccacgtagcaccacagcaagagtgaccggaggcagagagctcttgttgggtcagctttctaataagcatgtcaagtgaaaaagaaccctctagcagcacactgatttagtttgtaagattttaatttacaaattaaaaaagctatttaatacatgttttactttttctcctttttctcctctttctttacatcactcttttccttatctttatctttctccttgtcctctttcctatcctttttgctctcttctttctcctgcccttctttcttctctgcatcccggttggcaatcttgttgttgatgaggttgtgcagggcgaccacggaacggatcagcgaggccaagtacactaccaccatctggtcattggtcttcaggtaaaaggccttgacgaactcctgcaggctgacatctggcagcaggttgaagacgtcctgcagctggtagatgatctggtggttgatgggcagcttgcctgtggcgactttttccaggtagctcctgatatccagaagcttggagttcagtcccttcaaaccatggacctggtttgtgatccgctgggacagagtgcccaccgtcgtgtctttgatatctctgtaataacccacagttaaaaagggcaggaaaaggcatcagggtaccatgttatcaggcaagttcttacattctaagaaaattcctagctttgttgggtgaggcaagtttttaaaagaaaaatgtcacttccccatttgataaagatttcgttatcaattaccttaatttcgttatcatttggaacacattttatctttctcatcacaggacatttttcaaaaaacaattataaaagggagctaaaataaaaccatttccacttaaggaaaaaaaaattgcttaggtcaacagttcagatctaccaataactttctgggtaaccttgtactgaagctgtctctctcagctttcctgttcctaaaaggatggcattttctctacatgcatctccagaatattgagaagcttaactaagatgg

SEQ ID NO: 10221 - protein, 96 aa, Homo sapiens
MAPRSQKLLQRSHGLGYTSSFNLRTSSFFYSIRYKPSDFWLLKQESQFCCFHCTMLFYLRILMNSEMTPDGGMPLFMLNKSHFTFYYRLSAPNPKI

SEQ ID NO: 10222 - DNA, 1162 bp, Homo sapiens
ataggcagtgctccattctcggtgcctcaggacctggaagttaaccacttttgggatgaaattcttgccttgacgtctgtctccctcaacagtaaacagagggtgcagcactaatgaaaggtttccccaggcgtccctcccttgacaagcaatgtgagtgcccaggctgactgctgcctttgtccctgcaggagatgagcgtgggctatgcaaatgggatccgggtgatgagcatgacgcacacaggagagccaggattcatgctctacatccccatagaggggaatgagatgctctttcataaatgataccaagtgcaagagaacttaaggcagctccaatcgaagactgtcttggctgcttctggaaactacagatcactactcccgaagtcaaaaacgactagaacacagcttaaaaatcaagccatttaattgtatctttgaaggttgtgcagggcgaccacggaacggatcagcgaggccaagtacactaccaccatctggtcattggtcttcaggtaaaaggccttgacgaactcctgcaggctgacatctggcagcaggttgaagacgtcctgcagctggtagatgatctggtggttgatgggcagcttgcctgtggcgactttttccaggtagctcctgatatccagaagcttggagttcagtcccttcaaaccatggacctggtttgtgatccgctgggacagagtgcccaccgtcgtgtctttgatatctctgtaataacccacagttaaaaagggcaggaaaaggcatcagggtaccatgttatcaggcaagttcttacattctaagaaaattcctagctttgttgggtgaggcaagtttttaaaagaaaaatgtcacttccccatttgataaagatttcgttatcaattaccttaatttcgttatcatttggaacacattttatctttctcatcacaggacatttttcaaaaaacaattataaaagggagctaaaataaaaccatttccacttaaggaaaaaaaaattgcttaggtcaacagttcagatctaccaataactttctgggtaaccttgtactgaagctgtctctctcagctttcctgttcctaaaaggatggcattttctctacatgcatctccagaatattgagaagcttaactaagatgg

SEQ ID NO: 10223 - protein, 37 aa, Homo sapiens
MSVGYANGIRVMSMTHTGEPGFMLYIPIEGNEMLFHK

SEQ ID NO: 10224 - DNA, 4612 bp, Homo sapiens
ctgtctctataaaaaagttaaaaattacctgggcgtggtggctcgtgcctgcctcagcctcccgagtagctgggattacaggctcccatcaccatgcccagctaattgttgtatttttagtagagatggtgtttctccatattggccaggctggtctcgaactcctaaccgtgtgatccgcccgcctcggcctcccaattacaggtgtgagccactgtgcctggccaaaaaacaggctttagtttttaaaaaaagatctcaattttgcactgctaccaggcaaaaatcggtaatgccaagagttgaatggcataggaatgtacacaggtattatgtgtaataatttgcagtacatttgcttagggaagttgtaaacattttctcttgtgggccatataaatcaaatgtttctctgccttcccacatgtcctgtatccaccgcattttcccagacagggcagatgaaagtggttttgttagcatgttatagtctaacaaacaatcctaactcattctcaagttttattctgcttaatggaaaatggtagaagaaaaagcctttgcataactacccagtgaatgggagatttcattcttttccataagttgagggctatttcctgttttctttttcatttttttttgagaaaactaacccttcattgagatatttttaagtcgaatatctagtataaaaagtttgcattgtttcagcttgttttcatttaaacctgtggttgtctttcatctgcttctggcaattttttttttttttttttttgagacagagtctcgctctgttgcccaggctggagtgcagtggcacaatctcggctcactgcaacttccacatccccagttcaagcgattctcctgcctcaacctcccaggtagctgggattacaggtgcacaccaccacgcccagctaatttttgtatttttagtagagatggggttttaccatgttggccaggctggtcttgaactcctgacctcaagtaatccaccagcctcgacctcccaaagtgctaggattacaggcatgagccaccacactccgcctacttctccattgaagtgctctagttttggtaaaatcttctccttgacttcaggaccctctccacatttatccccagtctataactcgcatatttcgtgttttcaaacagaaaaccgtaattcaggagtgaacagcatcctctgtaaggtgtcacaggagcagcctgaaatccattaggcagtcattctgaagctgtggtgaaatcgaagggaagctaatgttgcagctaggaagatgagatccaggctgaggatcacactttttccagaatacttttttagtgtttccaaagccagcaaaagccgtttagaagtctcatctccagaatgccagaatacacaaatgtaaggctttattttaggggtgggccctgggttttgcagtcaagtcagccgctatttgtatgagcaagacttcatcggtagcactactgggctccccctcttctacatgatggcagcaatttggccttagaaaatatgcctaagtgactccacaggctataagctattttcttcataagtagaaatggaagatttctgttaggaaggtagaagtcagttttgtccgtatgtgggccaaactattaaaaataataaggcctggggattcctatgttcttagatgctcaataaacatttcagttcatcaaactatgaccaacttacaagtctgtggcattgtgctagttcactggaccctgggaaagtcttttaaatccaaatgatactttttgttttttaaagagacaggattttgctctgttgcctaggctggagtgcagtggcatgtgatcacagctcactgtaaccttgagctcctgggctccagtgtcctacctcagcctcttcagtagctaggactaaggcacatcccaccacacccaggcaattttagaattttttgtagatggctcttactatgttgttcaggctggtctcttactcctggcctcaagtgatcctcctgcctcagcctcccagtgttgggactacaagcaccagccactgcccccaaccctgcattatgttcttaaaggcagacctgaatcctgtgcggtgtcaattcaggtgtgcactggcccctgagccttacatacaggacccgttccttaggatgacgttgcgttcccttgcttagagcctcagcaccatggcacctggctctcccccgatgcctgggtcttgctcttgcccatttcctagccagggtttgtggtccaggcaacctgtcacatcagtgtgttccaaacatggcacccagatctcaaaagcttcttcaacgctcccatggtttgggatacacctcaagttttaacttacgtacttcaagtttcttttattcaattagatacaaaccgtctgacttttggcttctgaaacaggaaagtcaattttgttgttttcactgtaccatgcttttttatctcagaatcttgatgaactctgaaatgacccctgatgggggcatgcctctatttatgctgaataagagccattttacattttactacaggttgagtgcccctaatccaaaaatttgaaatgctccaaaatctgaaactttttgagcacttacatggtattgaaaggaaatgctcattggaacatttcctattaggcatgctcagccgttaagcataatgcaaatattaaaaaaaaaaatttcctaaatcttttaatacttctggttccaagcatttcagataagggatactcaagctctacctattcccaaattcccactaactagctctttggcaggtctatggaataaaaatcgatgcttctgattactttaaggcattataacctcatgaagtggtttctgagatgcaactgagtttttgtgctattttattgtattcttatatctttgaagatgaataatccacgtagtgcatttgagaggttctatctgttcaagagaggaaatttaatatccgtgactactgtatgtcaaatgatttagtgccttatttaatttgttcctctaggagtcctgtgcacttatcttgggggaaacattgttccattcttagtaacatgcctgtttggcctgtggtctgaggtacttacaacttgctgcagtgtggtaaatgtgtcccttttgaaacactgttctggggacttcagagatgacggactgcaacctaccacctcataaatgagggatctgaggtacaaactggaacccgggtcttctgggctcagagaactctcctcactacagcagactgcctgtttccatttaggggaatgagatgctctttcataaatgataccaagtgcaagagaacttaaggcagctccaatcgaagactgtcttggctgcttctggaaactacagatcactactcccgaagtcaaaaacgactagaacacagcttaaaaatcaagccatttaattgtatctttgaaggtaaacaatatatggagctggatcacaacccctgaggatgccagagctatgggtccagaacatggtgtggtattatcaacagagttcagaagggtctgaactctacgtgttaccagagaacataatgcaattcatgcattccacttagcaattttgtaaaataccagaaacagaccccaagagtctttcaagatgaggaaaattcaactcctggttttagagataaatgaatgaagagtaccaaaatatttgttgacttctcttcatttttctcatacaatctgaagcctgagctgactatcatatccccaactcacagcagcgaaagctgcagttcagatttgagatcagtctccattcacttccacgtagcaccacagcaagagtgaccggaggcagagagctcttgttgggtcagctttctaataagcatgtcaagtgaaaaagaaccctctagcagcacactgatttagtttgtaagattttaatttacaaattaaaaaagctatttaatacatgttttactttttctcctttttctcctctttctttacatcactcttttccttatctttatctttctccttgtcctctttcctatcctttttgctctcttctttctcctgcccttctttcttctctgcatcccggttggcaatcttgttgttgatgaggttgtgcagggcgaccacggaacggatcagcgaggccaagtacactaccaccatctggtcattggtcttcaggtaaaaggccttgacgaactcctgcaggctgacatctggcagcaggttgaagacgtcctgcagctggtagatgatctggtggttgatgggcagcttgcctgtggcgactttttccaggtagctcctgatatccagaagcttggagttcagtcccttcaaaccatggacctggtttgtgatccgctgggacagagtgcccaccgtcgtgtctttgatatctctgtaataacccacagttaaaaagggcaggaaaaggcatcagggtaccatgttatcaggcaagttcttacattctaagaaaattcctagctttgttgggtgaggcaagtttttaaaagaaaaatgtcacttccccatttgataaagatttcgttatcaatt

SEQ ID NO: 10225 - protein, 96 aa, Homo sapiens; identical to SEQ ID NO: 10221

SEQ ID NO: 10226 - DNA, 745 bp, Homo sapiens
ataggcagtgctccattctcggtgcctcaggacctggaagttaaccacttttgggatgaaattcttgccttgacgtctgtctccctcaacagtaaacagagggtgcagcactaatgaaaggtttccccaggcgtccctcccttgacaagcaatgtgagtgcccaggctgactgctgcctttgtccctgcaggagatgagcgtgggctatgcaaatgggatccgggtgatgagcatgacgcacacaggagagccaggattcatgctctacatccccatagagatggggcttcaccatgttgtccacgcttgtctccaactcctgacctcaagtggtccacacacctcagcctcccaaagtgctgggattacaggcatgagccactgtgcctggccccaggctgctggagtgcagtggcaagatctcggctcaccacaacctccgcctcccaggttcaagcaattctgcctcagcctcctgagtagctgggataacaggcatgcgccaccgtgcctggctaattttgtatttttagtagagacgaggtttcactatggtggtcattggtcaggctggtctcgaactcctgacctcaggtgatccacccacctcagcctcccaaagtgctgggattacaggcgtgagccacggcgcctggcccctcctgtgtttcaaaagctcagcccaagaccaccatcatcccacagtggagcctttccttccccaagagaatggcccctttgggg

SEQ ID NO: 10227 - protein, 134 aa, Homo sapiens
MSVGYANGIRVMSMTHTGEPGFMLYIPIEMGLHHVVHACLQLLTSSGPHTSASQSAGITGMSHCAWPQAAGVQWQDLGSPQPPPPRFKQFCLSLLSSWDNRHAPPCLANFVFLVETRFHYGGHWSGWSRTPDLR

SEQ ID NO: 10228 - DNA, 2408 bp, Homo sapiens
gtgcccgggggccgtaaagcgcggaaggtcgcggtctcggcttccccggaactttttgctcgcttcgccccgcccccttcccatccccgaaccccgctttccggcccgcggcgaccgccggcaactgttgtggctgccgcattgctcccgccgggctgtagctgagcgcggagcccgtgggggccggtgagtttgagttcctgagatctagttggtgagagacatgatgttctactggttgctgtcgattgttggaagacaaagagccagcccaggatggcagaactggtcctctgcaagaaacagcgcatcagctgccgaggcgcgttccatggccctgcccacccaggcacaggtggtcgtctgtggaggtggaatcacgggcacttctgtggcccatcaccaatccaaaatggggtggaaggatattgtccttttggagcagggcaggctggctgctggctctaccaggttctgtgctggcatcctgagcactgccaggcacttgaccattgagcagaagatggcagactactcaaacaaactctaccatcagttagagcaagaaacagggatccgaacaggttacacaaggacaggctcaatctttctggcccaaactcaggaccgactgatctccctgaagcgcatcaacgcagggctgaagtacgtaagagtctagaagcgtgtcctgactttaccacactggcctctgccaaagagcctgtgaatgtcattgtcccttgtgttctgtggcagtgttataggtatcccttctgagatcatctcccccaagaaagtggccgagcttcaccatctcctcaacgtgcacgacctggtgggggccatgcatgttcctgaggatgcagtggtgtcttccgctgacgtggctcttgccctggcaagtgctgcctcccaaaatggtgttcagatctatgaccggacatctgttcttcaagtaatgggcaaaaaaggtcaagttactggagtggagaccgataaaggacagattgaatgccagtattttgtcaactgtgctggccagctattgtggatgctgatggaagaatttatattcggaactggcagggtggcatcctgtctgggggctttgagaagaacccaaaaccaattttcactgagggcaagaaccagctggagattcagaatctacaggggactgggatcactttgagcctctgttgagttcccttctgaggaggatgccagaattagagactctggagatcatgaagttggtgaactgcccagagaccttcgcatcagacatgaggtgcatcatgggcgagtctcctgcagtgtagggctactttgtcctggcaggaatgaactctgctggcctttcatttggtggaggagccggaaagtaccttgccgaatggatggtacatggttatccctcagaaaacgtttgggaattggacctgaaacgttttggagccctccagagcagccgcacctttctgcgccaccgggtcatggaagtcatgcctttgatgtatgatctgaaggttccccactgggacttccagaccggtaggcagttacgcacctctcctctctacgaccggctggatgcacagggagccaggtggatggagaaacatggatttgagaggccaaagtactttgttccccctgacaaggacctcctggcattggagcagagcaagactttctataagccagattggtttgacatcgtggagtctgaagtcaagtgctgtaaggaagctgtgtgtgtcattgacatgtcctctttcacagagtttgagataacaaccactggggatcaggcattagaagttctacagtacctcttctccaatgacctggatgtgcctgtgggccacattgtgcatactggcatgctcaacgagggtggagggtatgaaaatgactgcagcatagcacgactgaacaagcgcagtttcttcatgatctctccaaccgaccagcaggtccactgttgggcctggcttaagaaacacatgccgaaagacagcaacctgctcctggaggacgtcacctggaagtacacagccctcaatctgattggccctcgagctgtggatgtgctgtctgagttgtcctatgcccctatgactccagaccacttcccaagcctcttttgcaaggagatgagcgtgggctatgcaaatgggatccgggtgatgagcatgacgcacacaggagagccaggattcatgctctacatccccatagaggtgagagggccccctcccctcccctcccctcccctcccccactgtggggtgccagtgctcccagcagcgcgttcaccagcactggcaggtttggagagctgtatctgattgggccttgggaactgaggtaggctgcattgaagagatttgaccattttt

SEQ ID NO: 10229 - protein, 336 aa, Homo sapiens
MNSAGLSFGGGAGKYLAEWMVHGYPSENVWELDLKRFGALQSSRTFLRHRVMEVMPLMYDLKVPHWDFQTGRQLRTSPLYDRLDAQGARWMEKHGFERPKYFVPPDKDLLALEQSKTFYKPDWFDIVESEVKCCKEAVCVIDMSSFTEFEITTTGDQALEVLQYLFSNDLDVPVGHIVHTGMLNEGGGYENDCSIARLNKRSFFMISPTDQQVHCWAWLKKHMPKDSNLLLEDVTWKYTALNLIGPRAVDVLSELSYAPMTPDHFPSLFCKEMSVGYANGIRVMSMTHTGEPGFMLYIPIEVRGPPPLPSPPLPHCGVPVLPAARSPALAGLESCI

SEQ ID NO: 10230 - DNA, 2370 bp, Homo sapiens
gtgcccgggggccgtaaagcgcggaaggtcgcggtctcggcttccccggaactttttgctcgcttcgccccgcccccttcccatccccgaaccccgctttccggcccgcggcgaccgccggcaactgttgtggctgccgcattgctcccgccgggctgtagctgagcgcggagcccgtgggggccggtgagtttgagttcctgagatctagttggtgagagacatgatgttctactggttgctgtcgattgttggaagacaaagagccagcccaggatggcagaactggtcctctgcaagaaacagcgcatcagctgccgaggcgcgttccatggccctgcccacccaggcacaggtggtcgtctgtggaggtggaatcacgggcacttctgtggcccatcaccaatccaaaatggggtggaaggatattgtccttttggagcagggcaggctggctgctggctctaccaggttctgtgctggcatcctgagcactgccaggcacttgaccattgagcagaagatggcagactactcaaacaaactctaccatcagttagagcaagaaacagggatccgaacaggttacacaaggacaggctcaatctttctggcccaaactcaggaccgactgatctccctgaagcgcatcaacgcagggctgaatgttataggtatcccttctgagatcatctcccccaagaaagtggccgagcttcaccatctcctcaacgtgcacgacctggtgggggccatgcatgttcctgaggatgcagtggtgtcttccgctgacgtggctcttgccctggcaagtgctgcctcccaaaatggtgttcagatctatgaccggacatctgttcttcaagtaatgggcaaaaaaggtcaagttactggagtggagaccgataaaggacagattgaatgccagtattttgtcaactgtgctggccagctattgtggatgctgatggaagaatttatattcggaactggcagggtggcatcctgtctgggggctttgagaagaacccaaaaccaattttcactgagggcaagaaccagctggagattcagaatctacaggggactgggatcactttgagcctctgttgagttcccttctgaggaggatgccagaattagagactctggagatcatgaagttggtgaactgcccagagaccttcgcatcagacatgaggtgcatcatgggcgagtctcctgcagtgtagggctactttgtcctggcaggaatgaactctgctggcctttcatttggtggaggagccggaaagtaccttgccgaatggatggtacatggttatccctcagaaaacgtttgggaattggacctgaaacgttttggagccctccagagcagccgcacctttctgcgccaccgggtcatggaagtcatgcctttgatgtatgatctgaaggttccccactgggacttccagaccggtaggcagttacgcacctctcctctctacgaccggctggatgcacagggagccaggtggatggagaaacatggatttgagaggccaaagtactttgttccccctgacaagggtaagaagtcacattctcatttttgctcctttttttttttgtcctgggaattaataaaacgtattttcaaatgcataggctagaatgtgttcacagaagaaaaagaaccacgtggactacactaaactctacagggccttgtgatttttccattccgtagacctcctggcattggagcagagcaagactttctataagccagattggtttgacatcgtggagtctgaagtcaagtgctgtaaggaagctgtgtgtgtcattgacatgtcctctttcacagagtttgagataacagtaagtatttgggaaccaaagtaatagattaggaaactttgcatatttattgaatgccttttgtttttcatcttcaaaactgattcctgactgggtgcagtgggtcatgcctgtattcccagcactttgggaggccaaggggggcgtggatcacctgaagtcaggagttccagaccagcctggccaagatggtaaaaccccgtttctactaaaaatacaaaaattaaggccaggagtggtggctcatgcctgtaatcccagcagtttgggaggccgagacgggtagatcacctgagatcaggagttcaagaccagcctggccaacatggcgaaaccatctctaccaaaaatacaaaaaattaaccaggcatggtggcgggcacttgtaatcccagctactcgggaggcaggagaatcgcatgaactcatgaggtggaggttgcagtgagctgagattgcgccactgcactcagcctgggcaacagagtgagactccatctc

SEQ ID NO: 10231 - protein, 292 aa, Homo sapiens
MMFYWLLSIVGRQRASPGWQNWSSARNSASAAEARSMALPTQAQVVVCGGGITGTSVAHHQSKMGWKDIVLLEQGRLAAGSTRFCAGILSTARHLTIEQKMADYSNKLYHQLEQETGIRTGYTRTGSIFLAQTQDRLISLKRINAGLNVIGIPSEIISPKKVAELHHLLNVHDLVGAMHVPEDAVVSSADVALALASAASQNGVQIYDRTSVLQVMGKKGQVTGVETDKGQIECQYFVNCAGQLLWMLMEEFIFGTGRVASCLGALRRTQNQFSLRARTSWRFRIYRGLGSL

SEQ ID NO: 10232 - DNA, 593 bp, Homo sapiens
ggtctcgaacacctgacctcgttatccactcgccgcggcctcccaaagtgctgggattatagatgtgagccactgcgcccagcctaattttttgtgtttttagtagagacggggtttcactgtgttagccaggatggtctcgatctcctgacctcgtgatccgcccgcctcggcctcccagagtgctgggattacaggtgtgaggcaccgcgcccggccaccctcaaatatttgctgaatgaatggctatcgttctttgtcaaatccctttctcattaatcccatgcactgagttgaatggcatgaaatatgtttggtttctctgtctagtttgagttcctgagatctagttggtgagagacatgatgttctactggttgctgtcgattgttggaagacaaagagccagcccaggatggcagaactggtcctctgcaagaaacagcgcatcagctgccgaggcgcgttccatggccctgcccacccaggcacaggtggtcgtctgtggaggtggaatcacgggcacttctgtggcccatcaccaatccaaaatggggtggaaggatattgtccttttggagcagggcaggtaa

SEQ ID NO: 10233 - protein, 76 aa, Homo sapiens [sequence omitted]

SEQ ID NO: 10234 - DNA, 1811 bp, Homo sapiens
gcggcgaccgccggcaactgttgtggctgccgcattgctcccgccgggctgtagctgagcgcggagcccgtgggggccggtgagatggaactgttttcccgcgttgagacgtgcggtccgcttgtgctttcagaactagtaagactgctgcagagtccggaggaagaagtcacctagaaaagtctgggacagggcagtaagcttccttcttaatgtttgacctttgggggccgatgtgtgatacctcggatttgaatcaagaatctccaagcccattttccgcatgcatgtaaacgtgatgtaccgggatgggggctggtggtggaggaggagccagcccaacggatatgcgtttccagtggcagggacttgtgttaatttcttttttcttttttctttttttttcttttttccgagacggagtctcactctgtcgcccaggcgggagtgcagtggcgcgatctcggctcactgcaacctctgcctcctgggttcaagcaattctcctgcctcagcctcccaagtagctgggaatacaggtgtgcgccaccacgcccggctaatttttgtgtttttagtagagacggggtttcactatgttggccaggctggtctggaactcctgacctcgtgattcgcccgcctcagcctcccaaagtgctgggattacaggcgtgagccactgcgcccggccaacttgtgctaatttcttaaacttgcgtgatcacctggtgtacttgttgaaaaatacagctccctggcgtggcaggatcagaatctgccgaggtggaccgtgggaatctgtcatttttaaacaagtgtcccaggtggttcttttgctgaggcaagtgtgggaaatgtgtgaacccacgctcatccagtcttccttgtgaccggcagtccactgtgcgcaacgctgcagccatacagagggactactcgaagttagaactagcaccttggtcttgttggaataagcagatctgagtagagccagctgcagtcttatggttgtttagcagaagttattcttcttagcagagaatattatacggtcattttccagaactgtaaaaactctatcatttgttttaaaccagatgatgtgcttcatttctgtctttgacgtcttcagtttcttctcccctggctttacctcctttgctatcagtttgtgctttggttttgctgccaaccttataggcttaggtttggcggcaaaggcactagactctggtgccttcttttccttcgttgtcttaagcccttcttttcctctgccctcatgccctcaccacttcactcttttgaaggtcataatgaacacaaggtcagagatcccttttttggcgccaagcaccctgggcttttttgagatggagtctcactgtgtcacccaggcagtggcgcgactctgcgcactgcagcctccatctccctggttgaagcaattttcctgtctcagcctcctgagtagctgggactacaggtgcaagccacgacacctggctaatttttctgtttttagtagagacggggtttcaccatgctgatcaggctggtctcaaactcctgacctcaaatgatccacccaccttggcctcccaaagtgctaggattacaggtgtgagcccctgcgcctggcctttttttgttttgttttgtttaagacagagtctcactgtgtcacccaggcaggagtgcagtagcataatctcggctcactgcaacctctgtctcccaggctcaagcgatcctcctacctcaggagttcaggaccagcctgggcaacatagtgagcccatctctac

SEQ ID NO: 10235 - protein, 30 aa, Homo sapiens
MELFSRVETCGPLVLSELVRLLQSPEEEVT

SEQ ID NO: 10236 - DNA, 1869 bp, Homo sapiens
gtgcccgggggccgtaaagcgcggaaggtcgcggtctcggcttccccggaactttttgctcgcttcgccccgcccccttcccatccccgaaccccgctttccggcccgcggcgaccgccggcaactgttgtggctgccgcattgctcccgccgggctgtagctgagcgcggagcccgtgggggccggtgagaactagtaagactgctgcagagtccggaggaagaagtcacctagaaaagtctgggacagggcagtaagcttccttcttaatgtttgacctttgggggccgatgtgtgatacctcggatttgaatcaagaatctccaagcccattttccgcatgcatgtaaacgtgatgtaccgggatgggggctggtggtggaggaggagccagcccaacggatatgcgtttccagtggcagggacttgtgttaatttcttttttcttttttctttttttttcttttttccgagacggagtctcactctgtcgcccaggcgggagtgcagtggcgcgatctcggctcactgcaacctctgcctcctgggttcaagcaattctcctgcctcagcctcccaagtagctgggaatacaggtgtgcgccaccacgcccggctaatttttgtgtttttagtagagacggggtttcactatgttggccaggctggtctggaactcctgacctcgtgattcgcccgcctcagcctcccaaagtgctgggattacaggcgtgagccactgcgcccggccaacttgtgctaatttcttaaacttgcgtgatcacctggtgtacttgttgaaaaatacagctccctggcgtggcaggatcagaatctgccgaggtggaccgtgggaatctgtcatttttaaacaagtgtcccaggtggttcttttgctgaggcaagtgtgggaaatgtgtgaacccacgctcatccagtcttccttgtgaccggcagtccactgtgcgcaacgctgcagccatacagagggactactcgaagttagaactagcaccttggtcttgttggaataagcagatctgagtagagccagctgcagtcttatggttgtttagcagaagttattcttcttagcagagaatattatacggtcattttccagaactgtaaaaactctatcatttgttttaaaccagatgatgtgcttcatttctgtctttgacgtcttcagtttcttctcccctggctttacctcctttgctatcagtttgtgctttggttttgctgccaaccttataggcttaggtttggcggcaaaggcactagactctggtgccttcttttccttcgttgtcttaagcccttcttttcctctgccctcatgccctcaccacttcactcttttgaaggtcataatgaacacaaggtcagagatcccttttttggcgccaagcaccctgggcttttttgagatggagtctcactgtgtcacccaggcagtggcgcgactctgcgcactgcagcctccatctccctggttgaagcaattttcctgtctcagcctcctgagtagctgggactacaggtgcaagccacgacacctggctaatttttctgtttttagtagagacggggtttcaccatgctgatcaggctggtctcaaactcctgacctcaaatgatccacccaccttggcctcccaaagtgctaggattacaggtgtgagcccctgcgcctggcctttttttgttttgttttgtttaagacagagtctcactgtgtcacccaggcaggagtgcagtagcataatctcggctcactgcaacctctgtctcccaggctcaagcgatcctcctacctcaggagttcaggaccagcctgggcaacatagtgagcccatctctac

SEQ ID NO: 10237 - protein, 150 aa, Homo sapiens [sequence omitted]

SEQ ID NO: 10238 - DNA, 3868 bp, Homo sapiens
gtagagatgggctcactatgttgcccaggctggtcctgaactcctgaggtaggaggatcgcttgagcctgggagacagaggttgcagtgagccgagattatgctactgcactcctgcctgggtgacacagtgagactctgtcttaaacaaaacaaaacaaaaaaaggccaggcgcaggggctcacacctgtaatcctagcactttgggaggccaaggtgggtggatcatttgaggtcaggagtttgagaccagcctgatcagcatggtgaaaccccgtctctactaaaaacagaaaaattagccaggtgtcgtggcttgcacctgtagtcccagctactcaggaggctgagacaggaaaattgcttcaaccagggagatggaggctgcagtgcgcagagtcgcgccactgcctgggtgacacagtgagactccatctcaaaaaagcccagggtgcttggcgccaaaaaagggatctctgaccttgtgttcattatgaccttcaaaagagtgaagtggtgagggcatgagggcagaggaaaagaagggcttaagacaacgaaggaaaagaaggcaccagagtctagtgcctttgccgccaaacctaagcctataaggttggcagcaaaaccaaagcacaaactgatagcaaaggaggtaaagccaggggagaagaaactgaagacgtcaaagacagaaatgaagcacatcatctggtttaaaacaaatgatagagtttttacagttctggaaaatgaccgtataatattctctgctaagaagaataacttctgctaaacaaccataagactgcagctggctctactcagatctgcttattccaacaagaccaaggtgctagttctaacttcgagtagtccctctgtatggctgcagcgttgcgcacagtggactgccggtcacaaggaagactggatgagcgtgggttcacacatttcccacacttgcctcagcaaaagaaccacctgggacacttgtttaaaaatgacagattcccacggtccacctcggcagattctgatcctgccacgccagggagctgtatttttcaacaagtacaccaggtgatcacgcaagtttaagaaattagcacaagttggccgggcgcagtggctcacgcctgtaatcccagcactttgggaggctgaggcgggcgaatcacgaggtcaggagttccagaccagcctggccaacatagtgaaaccccgtctctactaaaaacacaaaaattagccgggcgtggtggcgcacacctgtattcccagctacttgggaggctgaggcaggagaattgcttgaacccaggaggcagaggttgcagtgagccgagatcgcgccactgcactcccgcctgggcgacagagtgagactccgtctcggaaaaaagaaaaaaaaagaaaaaagaaaaaagaaattaacacaagtccctgccactggaaacgcatatccgttgggctggctcctcctccaccaccagcccccatcccggtacatcacgtttacatgcatgcggaaaatgggcttggagattcttgattcaaatccgaggtatcacacatcggcccccaaaggtcaaacattaagaaggaagcttactgccctgtcccagacttttctaggtgacttcttcctccggactctgcagcagtcttactagttctgaaagcacaagcggaccgcacgtctcaacgcgggaaaacagttccatctgcagggatggaggaccgggctagacaagctggagttggctctgcgccgcaggggtgtgcaagcccaagactggggagcccgaggtcaccccggccgccctggcatcggggctgaggtgcaggctcctggaggagcggtgcgcaggcccaggggtagccgaggacacaagccaaggcacgagcggacaaccttacggggacgagtactaccgcccggacgcgacttcgcgagaggccaggcggaacccactggaagcgtgagctagcggggaccacccccgggcgaaaccaaaggagaaagaggggaacccaggggtcccggggcgcttaggcccgcgcggacggggaggccagagttgccccgaagctatctccttacctcaccggcccccacgggctccgcgctcagctacagcccggcgggagcaatgcggcagccacaacagttgccggcggtcgccgcgggccggaaagcggggttcggggatgggaagggggcggggcgaagcgagcaaaaagttccggggaagccgagaccgcgaccttccgcgctttacggcccccgggcacgggtaccgccggcgcgtgacctcagccgcgcccgagcgcgccgtgacgccctcgcggagccccgcccctgccacgtgggcttgtttgggtctcgcgaggcaccgcccccgcggcctctttgccaccctcagaggcgagctgtggaagccttgactcttagggccgttttagaacccgggcctcggaccggcggggtttctgcacgtggaaccggaacatctgagatgatcgcaggccctgtggagtgtggggagcgcgggggttctttcttccctcgaggcccgtgccagggcttactccaaagccagtgggtccccagtcctaagccaagcagtcccgggggaaaacgcttctcatcgccgtgggagcgcggatcttggaagtggctctgggctttcttgggcgaggctctcacagagtagatcggaaatccattctgctggcccgccccacctcggaggacggactaacggacctgagttcccggccctatcttactcttctcagcttctcagcttggctcagctcagaggaagaggaatcactgaagtctcagagaagtctccactcatcccttcctcaccgtcacatcagccttttctttccttctagaagtcatcactgactcaaggatataagtttgatgactgtcttttccactggtgtgacacgatctctgtcgacagaaccttagtcttatgcatagctttattctcagcacccagaacagtgcctggcacctcttccactgaatattatatgcataagggtctcatgctgcagccaccattgcatcttgggccacactatccagttcccgtttgttggattcaatactgtctcaccacacaaaccaatcttgtgttttattaattaaaaaaaattttttttttttttgtagagataggctcactgtgttgcccaggctgggcctgaactcctggcttcaagtgatccttccatctcagcctcccaaagtcctgggattacaggcgtgagccactgtgcctgccccaatcttgtgttttattgctggccacctgtagccaggcactgtgcaggatgatgggatccagcagtgtacaagaaagaggcggtttctgctcttagggagtggcagtcaagttccagggacccctctgtcacaaggccaggccacagcctacatagtttataccccatttactggccagtcaaatcacacaaagacagcccagatgaggtctgccagacagtggactgaaactatgccataggctcctgtgctagataaatacttccatattttagctaggattgaatgcttggggacacctacctgtctaaaaaaagagaaaacggctgaccaatttgagacattctcggggaaggctttcctgatgcccagatgtggcaatttcatgaaaaatatcacaggttttcctcatgaaccatttggttcaagccatttccaggcacatgaatttgggagaaacctggttgtctgcaggagatggtggatgaaatcaagtgaaatacttaatgtgttgatttcattctgtttacgtgcagtaaatagcaaacaaatggt

SEQ ID NO: 10239 - protein, 187 aa, Homo sapiens [sequence omitted]

SEQ ID NO: 10240 - DNA, 809 bp, Homo sapiens
ggaaaatgtttcaacgtgcgcaagagttgcggcggcgggcagaggactaccacaaatgcaaaatccccccttctgcaagaaagcctctttgcaactgggtcagaatggcggcagcggagcatcgtcattcttcaggattgccctgctggccctacctcacagctgaagctttaaaaaacaggatgggccgccagccacctcctccaactcaacaacattctataactgataactccctgagcctcaagacacctcccgaatgtctccttcatccccttccaccctcagtggatgataatatcaaggagtgtcctcttgctcctcttccaccctcagtggatgataatctgaaggagtatctcctggtccctcttccaccctctcctcttccaccctcagtggatgataatctgaaggactgtctctttgtccctcttccaccctctcctcttccaccctcagtggatgataatctcaagactcctcccttagctactcaggaggccgaggcggaaaaaccacccaaacccaagaggtggagggtggatgaggtggaacaatcaccgaaacccaagaggcggagggcggatgaggtggaacaatcgcccaagcccaagaggcagagggaggccgaggcacaacaattacccaaacccaagaggcggaggttgagtaagctgagaacacgccattgcactcaagcctgggcaataagaataaatccgtgggtcgaaaaaaagaaaaaaatcaaaaaacaaaacaaaacccacgctccaaaaacaaactaacgaagaataaataaataatat

SEQ ID NO: 10241 - protein, 260 aa, Homo sapiens
MFQRAQELRRRAEDYHKCKIPPSARKPLCNWVRMAAAEHRHSSGLPCWPYLTAEALKNRMGRQPPPPTQQHSITDNSLSLKTPPECLLHPLPPSVDDNIKECPLAPLPPSVDDNLKEYLLVPLPPSPLPPSVDDNLKDCLFVPLPPSPLPPSVDDNLKTPPLATQEAEAEKPPKPKRWRVDEVEQSPKPKRRRADEVEQSPKPKRQREAEAQQLPKPKRRRLSKLRTRHCTQAWAIRINPWVEKKKKIKKQNKTHAPKTN

SEQ ID NO: 10242 - DNA, 1019 bp, Homo sapiens
ggtgcaagaaacatgctctggtgatggctgtgagggaggaatgaggatagacatagacactcctgtgtctcaaacatgcctctttattactctgttatgactctgtcttccctggggcaggaccccagcctgcctacatttgcagacagacacagtggcatgtggagacaacagtgtgtcccaatgacttttctttactccccagctgtcggcagtactcagtggaagggtgatatcatgacactgatactgctattttgaaacctggaggatggaaaggtgcaaaaatctatcaccagcaacagaaggtcagaatggcggcagcggagcatcgtcattcttcaggattgccctgctggccctacctcacagctgaagctttaaaaaacaggatgggccgccagccacctcctccaactcaacaacattctataactgataactccctgagcctcaagacacctcccgaatgtctccttcatccccttccaccctcagtggatgataatatcaaggagtgtcctcttgctcctcttccaccctcagtggatgataatctgaaggagtatctcctggtccctcttccaccctctcctcttccaccctcagtggatgataatctgaaggactgtctctttgtccctcttccaccctctcctcttccaccctcagtggatgataatctcaagactcctcccttagctactcaggaggccgaggcggaaaaaccacccaaacccaagaggtggagggtggatgaggtggaacaatcaccgaaacccaagaggcggagggcggatgaggtggaacaatcgcccaagcccaagaggcagagggaggccgaggcacaacaattacccaaacccaagaggcggaggttgagtaagctgagaacacgccattgcactcaagcctgggcaataagaataaatccgtgggtcgaaaaaaagaaaaaaatcaaaaaacaaaacaaaacccacgctccaaaaacaaactaacgaagaataaataaataatat

SEQ ID NO: 10243 - protein, 34 aa, Homo sapiens
MERCKNLSPATEGQNGGSGASSFFRIALLALPHS

SEQ ID NO: 10244 - DNA, 1270 bp, Homo sapiens
cactgtgcaggtgaaacagaacctcctcaggggccagaccttgcctgggcttgtgggctgctggtcgcgcccctgtgcacagggagaagagaagcagacgggagcagaagggacccctgctcttggaagggaggctgtgcgggctgggggtgatgatagcccggccagcacacacacgtggcatcttaggccatgggcaggggtggcaggaaggggcagcctgggctctgggagacttgcctgtgtgacccagggtggggttacagaggaaaggcggggtgctggcccagatcaagagccagaaagtgcaggacatcctcgccttctatctgggccgcctggagaccaccaacgaggtgattgacagtgacttcgagaccaggaacttctggatcggtgagtgcccagctgattgggggtatggcgagtaaggggttgtgatgccccaccctgctgcaggaaccctgggccatggcggctgccagcagatggcaagggtgtgttgagggcctggagcccagagcggggccagctgctcaccccctttcccggggagggcccaggtagggagcacatgggggctgccagcgctgggaagaggggccagaaaggcagctggcagcagactccagggtctgagtgggccaaccttgactaccccggcccagggctcacctacaagaccgccaaggactccttccgctgggccacaggggagcaccaggccttcaccagttttgcctttgggcagcctgacaaccacgggtttggcaactgcgtggagctgcaggcttcagctgccttcaactggaacgaccagcgctgcaaaacccgaaaccgttacatctgccagtttgcccaggagcacatctcccggtggggcccagggtcctgaggcctgaccacatggctccctcgcctgccctgggagcaccggctctgcttacctgtctgcccacctgtctggaacaagggccaggttaagaccacatgcctcatgtccaaagaggtctcagaccttgcacaatgccagaagttgggcagagagaggcagggaggccagtgagggccagggagtgagtgttagaagaagctggggcccttcgcctgcttttgattgggaagatgggcttcaattagatggcgaaggagaggacaccgccagtggtccaaaaaggctgctctcttccacctggcccagaccctgtggggcagcggagcttccctgtggcatgaaccccacggggtattaaattatgaatcagctgaa

SEQ ID NO: 10245 - protein, 106 aa, Homo sapiens
MGAASAGKRGQKGSWQQTPGSEWANLDYPGPGLTYKTAKDSFRWATGEHQAFTSFAFGQPDNHGFGNCVELQASAAFNWNDQRCKTRNRYICQFAQEHISRWGPGS

SEQ ID NO: 10246 - DNA, 2006 bp, Homo sapiens
agccgaggtcctcctcccagggcccggggctggggagcggaagccatcagtgggctcggaggacactgtcccagccaggacacggccatcggtcactaatctgcagcaccggaatgtccccaggccaatcagcgggcccccctcttttgtccaccagcccagcctgactcctggagattgtgaatagctccatccagcctgagaaacaagccgggtggctgagccaggctgtgcacggagcgcctgacgggcccaacagacccatgctgcatccagagacctcccctggccgggggcatctcctggctgtgctcctggccctccttggcaccacctgggcagaggtgtggccaccccagctgcaggagcaggctccgatggccggagccctgaacaggaaggagagtttcttgctcctctccctgcacaaccgcctgcgcagctgggtccagccccctgcggctgacatgcggaggctggactggagtgacagcctggcccaactggctcaagccagggcagccctctgtggaatcccaaccccgagcctggcgtccggcctgtggcgcaccctgcaagtgggctggaacatgcagctgctgcccgcgggcttggcgtcctttgttgaagtggtcagcctgtggtttgcagaggggcagcggtacagccacgcggcaggagagtgtgctcgcaacgccacctgcacccactacacgcagctcgtgtgggccacctcaagccagctgggctgtgggcggcacctgtgctctgcaggccagacagcgatagaagcctttgtctgtgcctactcccccggaggcaactgggaggtcaacgggaagacaatcatcccctataagaagggtgcctggtgttcgctctgcacagccagtgtctcaggctgcttcaaagcctgggaccatgcaggggggctctgtgaggtccccaggaatccttgtcgcatgagctgccagaaccatggacgtctcaacatcagcacctgccactgccactgtccccctggctacacgggcagatactgccaagtgaggtgcagcctgcagtgtgtgcacggccggttccgggaggaggagtgctcgtgcgtctgtgacatcggctacgggggagcccagtgtgccaccaaggtgcattttcccttccacacctgtgacctgaggatcgacggagactgcttcatggtgtcttcagaggcagacacctattacagagccaggatgaaatgtcagaggaaaggcggggtgctggcccagatcaagagccagaaagtgcaggacatcctcgccttctatctgggccgcctggagaccaccaacgaggtgattgacagtgacttcgagaccaggaacttctggatcgggctcacctacaagaccgccaaggactccttccgctgggccacaggggagcaccaggccttcaccagttttgcctttgggcagcctgacaaccacgggctggtgtggctgagtgctgccatggggtttggcaactgcgtggagctgcaggcttcagctgccttcaactggaacgaccagcgctgcaaaacccgaaaccgttacatctgccagtttgcccaggagcacatctcccggtggggcccagggtcctgaggcctgaccacatggctccctcgcctgccctgggagcaccggctctgcttacctgtctgcccacctgtctggaacaagggccaggttaagaccacatgcctcatgtccaaagaggtctcagaccttgcacaatgccagaagttgggcagagagaggcagggaggccagtgagggccagggagtgagtgttagaagaagctggggcccttcgcctgcttttgattgggaagatgggcttcaattagatggcgaaggagaggacaccgccagtggtccaaaaaggctgctctcttccacctggcccagaccctgtggggcagcggagcttccctgtggcatgaaccccacggggtattaaattatgaatcagctgaa

SEQ ID NO: 10247 - protein, 455 aa, Homo sapiens
MLHPETSPGRGHLLAVLLALLGTTWAEVWPPQLQEQAPMAGALNRKESFLLLSLHNRLRSWVQPPAADMRRLDWSDSLAQLAQARAALCGIPTPSLASGLWRTLQVGWNMQLLPAGLASFVEVVSLWFAEGQRYSHAAGECARNATCTHYTQLVWATSSQLGCGRHLCSAGQTAIEAFVCAYSPGGNWEVNGKTIIPYKKGAWCSLCTASVSGCFKAWDHAGGLCEVPRNPCRMSCQNHGRLNISTCHCHCPPGYTGRYCQVRCSLQCVHGRFREEECSCVCDIGYGGAQCATKVHFPFHTCDLRIDGDCFMVSSEADTYYRARMKCQRKGGVLAQIKSQKVQDILAFYLGRLETTNEVIDSDFETRNFWIGLTYKTAKDSFRWATGEHQAFTSFAFGQPDNHGLVWLSAAMGFGNCVELQASAAFNWNDQRCKTRNRYICQFAQEHISRWGPGS

SEQ ID NO: 10248 - DNA, 2192 bp, Homo sapiens
ctgagaaacttggcccatggtgcagatctgctccagctcactctggtgggatcacgccagccacggccgggccacggcacatcatggcaacgtgctgcccacctgctacgccgcctgtttttctagaggcggacgtgatcccagcaggactggagtcagcccagggcatcacgtgctctggtccccgcctgctttgactcctcctgcctcactccccccctggcctgtagtcacgtgggtgagggtggtgggcaccggggctgggcccagcccccgaccctgcccagacagactttcctaaggcacccttttcctcgtgcagcccccctcttttgtccaccagcccagcctgactcctggagattgtgaatagctccatccagcctgagaaacaagccgggtggctgagccaggctgtgcacggagcgcctgacgggcccaacagacccatgctgcatccagagacctcccctggccgggggcatctcctggctgtgctcctggccctccttggcaccacctgggcagaggtgtggccaccccagctgcaggagcaggctccgatggccggagccctgaacaggaaggagagtttcttgctcctctccctgcacaaccgcctgcgcagctgggtccagccccctgcggctgacatgcggaggctggactggagtgacagcctggcccaactggctcaagccagggcagccctctgtggaatcccaaccccgagcctggcgtccggcctgtggcgcaccctgcaagtgggctggaacatgcagctgctgcccgcgggcttggcgtcctttgttgaagtggtcagcctgtggtttgcagaggggcagcggtacagccacgcggcaggagagtgtgctcgcaacgccacctgcacccactacacgcagctcgtgtgggccacctcaagccagctgggctgtgggcggcacctgtgctctgcaggccagacagcgatagaagcctttgtctgtgcctactcccccggaggcaactgggaggtcaacgggaagacaatcatcccctataagaagggtgcctggtgttcgctctgcacagccagtgtctcaggctgcttcaaagcctgggaccatgcaggggggctctgtgaggtccccaggaatccttgtcgcatgagctgccagaaccatggacgtctcaacatcagcacctgccactgccactgtccccctggctacacgggcagatactgccaagtgaggtgcagcctgcagtgtgtgcacggccggttccgggaggaggagtgctcgtgcgtctgtgacatcggctacgggggagcccagtgtgccaccaaggtgcattttcccttccacacctgtgacctgaggatcgacggagactgcttcatggtgtcttcagaggcagacacctattacagagccaggatgaaatgtcagaggaaaggcggggtgctggcccagatcaagagccagaaagtgcaggacatcctcgccttctatctgggccgcctggagaccaccaacgaggtgattgacagtgacttcgagaccaggaacttctggatcgggctcacctacaagaccgccaaggactccttccgctgggccacaggggagcaccaggccttcaccagttttgcctttgggcagcctgacaaccacgggctggtgtggctgagtgctgccatggggtttggcaactgcgtggagctgcaggcttcagctgccttcaactggaacgaccagcgctgcaaaacccgaaaccgttacatctgccagtttgcccaggagcacatctcccggtggggcccagggtcctgaggcctgaccacatggctccctcgcctgccctgggagcaccggctctgcttacctgtctgcccacctgtctggaacaagggccaggttaagaccacatgcctcatgtccaaagaggtctcagaccttgcacaatgccagaagttgggcagagagaggcagggaggccagtgagggccagggagtgagtgttagaagaagctggggcccttcgcctgcttttgattgggaagatgggcttcaattagatggcgaaggagaggacaccgccagtggtccaaaaaggctgctctcttccacctggcccagaccctgtggggcagcggagcttccctgtggcatgaaccccacggggtattaaattatgaatcagctgaa

SEQ ID NO: 10249 - protein, 455 aa, Homo sapiens; identical to SEQ ID NO: 10247

SEQ ID NO: 10250 - DNA, 477 bp, Homo sapiens
tcgagtcattttgtctcttcctgaagcagctcctttcttcaaagccttgaaatcttgttgatggtctgcaaaccacaccaggcacgtccgtaggcacctccatgtacatgacattcctggctcttgatattaggcctcagcggcccccagcccccaggggaacctgcagagactctcgggccgctcactccggctggcagtggcgggaggcagtgtgtgctgctcgcaccctgcgtttccagttttaggagactgaagcatcccagacagctgttgacaatcaggaagaccctacaagcaggaccgaggggactaagcagcttagcagcttcccttggtgacttggcagggggacaatcagttggcttctggaacccactgcctccaggaagggcagcaaatagaaaaaaaagaaagaaaaccacagtattcaaatatatgtcagtcaggttagacaaggagtaacttggatcaact

SEQ ID NO: 10251 - protein, 48 aa, Homo sapiens
MYMTFLALDIRPQRPPAPRGTCRDSRAAHSGWQWREAVCAARTLRFQF

SEQ ID NO: 10252 - DNA, 5455 bp, Homo sapiens
actttacatttgagctcttgcgtaccctgccagagcaaggattataaccttaattttttttcttaccccagaacttatgctcttaaccctattcaatgctgtctctctctttggctaagaaagacttctgaggcagatggaaggaaggaaggaaggagggagcgatacaaggagaggctttccgattccgtaatacacctggttgtgcaaagttcacctctacatataaagtttttgttttccaagtcattgaaccggcgacatattctaccggccattttggttgtggcaaccccaattcccttgatttttttttttgtgacagcaaatggaattagagtaggccgccctgcccgggctttttaagaaaccccagcaacccccccgggtaaggagcgccgctctcccgcccgccggtccagggtgtgtgcggtttccagcacggcctcctccttcgccccactctgggttcgcgggtcggcgccggcggggcggggctcggcagggccacgctgccacgcccagcgtctccaccccctcatttaaatacgcggcgccggcgagtgcgtcgagctcgccgcggactcaagatggcggcgtgtggacgtgtacggaggatgttccgcttgtcggcggcgctgcatctgctgctgctattcgcggccggggccgagaaactccccggccagggcgtccacagccagggccagggtcccggggccaactttgtgtccttcgtagggcaggccggaggcggcggcccggcgggtcagcagctgccccagctgcctcagtcatcgcagcttcagcagcaacagcagcagcagcaacagcaacagcagcctcagccgccgcagccgcctttcccggcgggtgggcctccggcccggcggggaggagcgggggctggtgggggctggaagctggcggaggaagagtcctgcagggaggacgtgacccgcgtgtgccctaagcacacctggagcaacaacctggcggtgctcgagtgcctgcaggatgtgagggagcctgaaaatgaaatttcttcagactgcaatcatttgttgtggaattataagctgaacctaactacagatcccaaatttgaatctgtggccagagaggtttgcaaatctactataacagagattaaagaatgtgctgatgaaccggttggaaaaggttacatggtttcctgcttggtggatcaccgaggcaacatcactgagtatcagtgtcaccagtacattaccaagatgacggccatcatttttagtgattaccgtttaatctgtggcttcatggatgactgcaaaaatgacatcaacattctgaaatgtggcagtattcggcttggagaaaaggatgcacattcacaaggtgaggtggtatcatgcttggagaaaggcctggtgaaagaagcagaagaaagagaacccaagattcaagtttctgaactctgcaagaaagccattctccgggtggctgagctgtcatcggatgactttcacttagaccggcatttatattttgcttgccgagatgatcgggagcgtttttgtgaaaatacacaagctggtgagggcagagtgtataagtgcctctttaaccataaatttgaagaatccatgagtgaaaagtgtcgagaagcacttacaacccgccaaaagctgattgcccaggattataaagtcagttattcattggccaaatcctgtaaaagtgacttgaagaaataccggtgcaatgtggaaaaccttccgcgatcgcgtgaagccaggctctcctacttgttaatgtgcctggagtcagctgtacacagagggcgacaagtcagcagtgagtgccagggggagatgctggattaccgacgcatgttgatggaagacttttctctgagccctgagatcatcctaagctgtcggggggagattgaacaccattgttccggattacatcgaaaagggcggaccctacactgtctgatgaaagtagttcgaggggagaaggggaaccttggaatgaactgccagcaggcgcttcaaacactgattcaggagactgaccctggtgcagattaccgcattgatcgagctttgaatgaagcttgtgaatctgtaatccagacagcctgcaaacatataagatctggagacccaatgatcttgtcgtgcctgatggaacatttatacacagagaagatggtagaagactgtgaacaccgtctcttagagctgcagtatttcatctcccgggattggaagctggaccctgtcctgtaccgcaagtgccagggagacgcttctcgtctttgccacacccacggttggaatgagaccagtgaatttatgcctcagggagctgtgttctcttgtttatacagacacgcctaccgcactgaggaacagggaaggaggctctcacgggagtgccgagctgaagtccaaaggatcctacaccagcgtgccatggatgtcaagctggatcctgccctccaggataagtgcctgattgatctgggaaaatggtgcagtgagaaaacagagactggacaggagctggagtgccttcaggaccatctggatgacttggtggtggagtgtagagatatagttggcaacctcactgagttagaatcagaggatattcaaatagaagccttgctgatgagagcctgtgagcccataattcagaacttctgccacgatgtggcagataaccagatagactctggggacctgatggagtgtctgatacagaacaaacaccagaaggacatgaacgagaagtgtgccatcggagttacccacttccagctggtgcagatgaaggattttcggttttcttacaagtttaaaatggcctgcaaggaggacgtgttgaagctttgcccaaacataaaaaagaaggtggacgtggtgatctgcctgagcacgaccgtgcgcaatgacactctgcaggaagccaaggagcacagggtgtccctgaagtgccgcaggcagctccgtgtggaggagctggagatgacggaggacatccgcttggagccagatctatacgaagcctgcaagagtgacatcaaaaacttctgttccgctgtgcaatatggcaacgctcagattatcgaatgtctgaaagaaaacaagaagcagctaagcacccgctgccaccaaaaagtatttaagctgcaggagacagagatgatggacccagagctagactacaccctcatgagggtctgcaagcagatgataaagaggttctgtccggaagcagattctaaaaccatgttgcagtgcttgaagcaaaataaaaacagtgaattgatggatcccaaatgcaaacagatgataaccaagcgccagatcacccagaacacagattaccgcttaaaccccatgttaagaaaagcctgtaaagctgacattcctaaattctgtcacggtatcctgactaaggccaaggatgattcagaattagaaggacaagtcatctcttgcctgaagctgagatatgctgaccagcgcctgtcttcagactgtgaagaccagatccgaatcattatccaggagtccgccctggactaccgcctggatcctcagctccagctgcactgctcagacgagatctccagtctatgtgctgaagaagcagcagcccaagagcagacaggtcaggtggaggagtgcctcaaggtcaacctgctcaagatcaaaacagaattgtgtaaaaaggaagtgctaaacatgctgaaggaaagcaaagcagacatctttgttgacccggtacttcatactgcttgtgccctggacattaaacaccactgcgcagccatcacccctggccgcgggcgtcaaatgtcctgtctcatggaagcactggaggataagcgggtgaggttacagcccgagtgcaaaaagcgcctcaatgaccggattgagatgtggagttacgcagcaaaggtggccccagcagatggcttctctgatcttgccatgcaagtaatgacgtctccatctaagaactacattctctctgtgatcagtgggagcatctgtatattgttcctgattggcctgatgtgtggacggatcaccaagcgagtgacacgagagctcaaggacaggtagagccaccttgaccaccaaaggaactacctatccagtgcccagtttgtacagccctcttgtatagcatccccactcacctcgctcttctcagaagtgacaccaaccccgtgttagagcattagcagatgtccactgcgttgtcccatccagcctccactcgtgtccatggtgtcctcctcctcctcaccgtgcagcagcagcagctggtcgctggggttactgcctttgtttggcaaacttgggtttacctgcctgtagacaagtctctctcataccaacagaacttccggtacttccagaaccaactcacctgacctgcaactcaaaggcttttttaagaaaaccaccaaaaaaaaaaatttttttaaagaaaaaaatgtatatagtaacgcatctcctccaggcttgatttgggcaatggggttatgtctttcatatgactgtgtaaaacaaagacaggacttggaggggaagcacaccacccagtgtgccatgactgaggtgtctcgttcatctctcagaagcaccttggggcctcgccagggccgtggtcttcaccgaggcgtgggtgggcagccgttccccaggctgtgtggggtcctgctttcttctgctgagacagtgacgctttccagtttccaccctaatcagccactgctggtcacagccccacagccatgggtatttctgtggtctcctcgcttcattgaagcaaagcatgagccttcctagacaagggcagctggggaggggaagggaccggaagtttgtgaagttgaacagtccatccatctgcactgagaggctggatcctgagtcccggggcagcaggatcccaggaaccttcctcctccagggcagcacaggactcagccatgtctggaccggccctgctgaggctacagtcactctggaagctctgcgcttcatcaggaggcaggactgtggcgggaggggtccttgaagatgggtgtggggagcagtgggtcaggaagtgggagccagaggtttgactcactttgctttatttttcaggctacaatacaggtcagagacaatggcttataaaggtttagtgtggtctcaggatgtgacaggcagtccagcctgacctttctgcacactccagacaaacttcccagacaagctcctttgtgcctctacgtggagagggtgtggaaagttatcacattaaaagatggaggatttgctctgttttttttctttctgtccatttgctgcgtgtacccactctagtaggcattggctaaatgttgtattttggcgattcatcaacctttgcagaatatgggctttatagaagc

SEQ ID NO: 10253 - protein, 1179 aa, Homo sapiens
MAACGRVRRMFRLSAALHLLLLFAAGAEKLPGQGVHSQGQGPGANFVSFVGQAGGGGPAGQQLPQLPQSSQLQQQQQQQQQQQQPQPPQPPFPAGGPPARRGGAGAGGGWKLAEEESCREDVTRVCPKHTWSNNLAVLECLQDVREPENEISSDCNHLLWNYKLNLTTDPKFESVAREVCKSTITEIKECADEPVGKGYMVSCLVDHRGNITEYQCHQYITKMTAIIFSDYRLICGFMDDCKNDINILKCGSIRLGEKDAHSQGEVVSCLEKGLVKEAEEREPKIQVSELCKKAILRVAELSSDDFHLDRHLYFACRDDRERFCENTQAGEGRVYKCLFNHKFEESMSEKCREALTTRQKLIAQDYKVSYSLAKSCKSDLKKYRCNVENLPRSREARLSYLLMCLESAVHRGRQVSSECQGEMLDYRRMLMEDFSLSPEIILSCRGEIEHHCSGLHRKGRTLHCLMKVVRGEKGNLGMNCQQALQTLIQETDPGADYRIDRALNEACESVIQTACKHIRSGDPMILSCLMEHLYTEKMVEDCEHRLLELQYFISRDWKLDPVLYRKCQGDASRLCHTHGWNETSEFMPQGAVFSCLYRHAYRTEEQGRRLSRECRAEVQRILHQRAMDVKLDPALQDKCLIDLGKWCSEKTETGQELECLQDHLDDLVVECRDIVGNLTELESEDIQIEALLMRACEPIIQNFCHDVADNQIDSGDLMECLIQNKHQKDMNEKCAIGVTHFQLVQMKDFRFSYKFKMACKEDVLKLCPNIKKKVDVVICLSTTVRNDTLQEAKEHRVSLKCRRQLRVEELEMTEDIRLEPDLYEACKSDIKNFCSAVQYGNAQIIECLKENKKQLSTRCHQKVFKLQETEMMDPELDYTLMRVCKQMIKRFCPEADSKTMLQCLKQNKNSELMDPKCKQMITKRQITQNTDYRLNPMLRKACKADIPKFCHGILTKAKDDSELEGQVISCLKLRYADQRLSSDCEDQIRIIIQESALDYRLDPQLQLHCSDEISSLCAEEAAAQEQTGQVEECLKVNLLKIKTELCKKEVLNMLKESKADIFVDPVLHTACALDIKHHCAAITPGRGRQMSCLMEALEDKRVRLQPECKKRLNDRIEMWSYAAKVAPADGFSDLAMQVMTSPSKNYILSVISGSICILFLIGLMCGRITKRVTRELKDR

SEQ ID NO: 10254 - DNA, 4452 bp, Homo sapiens
actttacatttgagctcttgcgtaccctgccagagcaaggattataaccttaattttttttcttaccccagaacttatgctcttaaccctattcaatgctgtctctctctttggctaagaaagacttctgaggcagatggaaggaaggaaggaaggagggagcgatacaaggagaggctttccgattccgtaatacacctggttgtgcaaagttcacctctacatataaagtttttgttttccaagtcattgaaccggcgacatattctaccggccattttggttgtggcaaccccaattcccttgatttttttttttgtgacagcaaatggaattagagtaggccgccctgcccgggctttttaagaaaccccagcaacccccccgggtaaggagcgccgctctcccgcccgccggtccagggtgtgtgcggtttccagcacggcctcctccttcgccccactctgggttcgcgggtcggcgccggcggggcggggctcggcagggccacgctgccacgcccagcgtctccaccccctcatttaaatacgcggcgccggcgagtgcgtcgagctcgccgcggactcaagatggcggcgtgtggacgtgtacggaggatgttccgcttgtcggcggcgctgcatctgctgctgctattcgcggccggggccgagaaactccccggccagggcgtccacagccagggccagggtcccggggccaactttgtgtccttcgtagggcaggccggaggcggcggcccggcgggtcagcagctgccccagctgcctcagtcatcgcagcttcagcagcaacagcagcagcagcaacagcaacagcagcctcagccgccgcagccgcctttcccggcgggtgggcctccggcccggcggggaggagcgggggctggtgggggctggaagctggcggaggaagagtcctgcagggaggacgtgacccgcgtgtgccctaagcacacctggagcaacaacctggcggtgctcgagtgcctgcaggatgtgagggagcctgaaaatgaaatttcttcagactgcaatcatttgttgtggaattataagctgaacctaactacagatcccaaatttgaatctgtggccagagaggtttgcaaatctactataacagagattaaagaatgtgctgatgaaccggttggaaaaggttacatggtttcctgcttggtggatcaccgaggcaacatcactgagtatcagtgtcaccagtacattaccaagatgacggccatcatttttagtgattaccgtttaatctgtggcttcatggatgactgcaaaaatgacatcaacattctgaaatgtggcagtattcggcttggagaaaaggatgcacattcacaagacacgcctaccgcactgaggaacagggaaggaggctctcacgggagtgccgagctgaagtccaaaggatcctacaccagcgtgccatggatgtcaagctggatcctgccctccaggataagtgcctgattgatctgggaaaatggtgcagtgagaaaacagagactggacaggagctggagtgccttcaggaccatctggatgacttggtggtggagtgtagagatatagttggcaacctcactgagttagaatcagaggatattcaaatagaagccttgctgatgagagcctgtgagcccataattcagaacttctgccacgatgtggcagataaccagatagactctggggacctgatggagtgtctgatacagaacaaacaccagaaggacatgaacgagaagtgtgccatcggagttacccacttccagctggtgcagatgaaggattttcggttttcttacaagtttaaaatggcctgcaaggaggacgtgttgaagctttgcccaaacataaaaaagaaggtggacgtggtgatctgcctgagcacgaccgtgcgcaatgacactctgcaggaagccaaggagcacagggtgtccctgaagtgccgcaggcagctccgtgtggaggagctggagatgacggaggacatccgcttggagccagatctatacgaagcctgcaagagtgacatcaaaaacttctgttccgctgtgcaatatggcaacgctcagattatcgaatgtctgaaagaaaacaagaagcagctaagcacccgctgccaccaaaaagtatttaagctgcaggagacagagatgatggacccagagctagactacaccctcatgagggtctgcaagcagatgataaagaggttctgtccggaagcagattctaaaaccatgttgcagtgcttgaagcaaaataaaaacagtgaattgatggatcccaaatgcaaacagatgataaccaagcgccagatcacccagaacacagattaccgcttaaaccccatgttaagaaaagcctgtaaagctgacattcctaaattctgtcacggtatcctgactaaggccaaggatgattcagaattagaaggacaagtcatctcttgcctgaagctgagatatgctgaccagcgcctgtcttcagactgtgaagaccagatccgaatcattatccaggagtccgccctggactaccgcctggatcctcagctccagctgcactgctcagacgagatctccagtctatgtgctgaagaagcagcagcccaagagcagacaggtcaggtggaggagtgcctcaaggtcaacctgctcaagatcaaaacagaattgtgtaaaaaggaagtgctaaacatgctgaaggaaagcaaagcagacatctttgttgacccggtacttcatactgcttgtgccctggacattaaacaccactgcgcagccatcacccctggccgcgggcgtcaaatgtcctgtctcatggaagcactggaggataagcgggtgaggttacagcccgagtgcaaaaagcgcctcaatgaccggattgagatgtggagttacgcagcaaaggtggccccagcagatggcttctctgatcttgccatgcaagtaatgacgtctccatctaagaactacattctctctgtgatcagtgggagcatctgtatattgttcctgattggcctgatgtgtggacggatcaccaagcgagtgacacgagagctcaaggacaggtagagccaccttgaccaccaaaggaactacctatccagtgcccagtttgtacagccctcttgtatagcatccccactcacctcgctcttctcagaagtgacaccaaccccgtgttagagcattagcagatgtccactgcgttgtcccatccagcctccactcgtgtccatggtgtcctcctcctcctcaccgtgcagcagcagcagctggtcgctggggttactgcctttgtttggcaaacttgggtttacctgcctgtagacaagtctctctcataccaacagaacttccggtacttccagaaccaactcacctgacctgcaactcaaaggcttttttaagaaaaccaccaaaaaaaaaaatttttttaaagaaaaaaatgtatatagtaacgcatctcctccaggcttgatttgggcaatggggttatgtctttcatatgactgtgtaaaacaaagacaggacttggaggggaagcacaccacccagtgtgccatgactgaggtgtctcgttcatctctcagaagcaccttggggcctcgccagggccgtggtcttcaccgaggcgtgggtgggcagccgttccccaggctgtgtggggtcctgctttcttctgctgagacagtgacgctttccagtttccaccctaatcagccactgctggtcacagccccacagccatgggtatttctgtggtctcctcgcttcattgaagcaaagcatgagccttcctagacaagggcagctggggaggggaagggaccggaagtttgtgaagttgaacagtccatccatctgcactgagaggctggatcctgagtcccggggcagcaggatcccaggaaccttcctcctccagggcagcacaggactcagccatgtctggaccggccctgctgaggctacagtcactctggaagctctgcgcttcatcaggaggcaggactgtggcgggaggggtccttgaagatgggtgtggggagcagtgggtcaggaagtgggagccagaggtttgactcactttgctttatttttcaggctacaatacaggtcagagacaatggcttataaaggtttagtgtggtctcaggatgtgacaggcagtccagcctgacctttctgcacactccagacaaacttcccagacaagctcctttgtgcctctacgtggagagggtgtggaaagttatcacattaaaagatggaggatttgctctgttttttttctttctgtccatttgctgcgtgtacccactctagtaggcattggctaaatgttgtattttggcgattcatcaacctttgcagaatatgggctttatagaagc

SEQ ID NO: 10255 - protein, 596 aa, Homo sapiens
MWQYSAWRKGCTFTRHAYRTEEQGRRLSRECRAEVQRILHQRAMDVKLDPALQDKCLIDLGKWCSEKTETGQELECLQDHLDDLVVECRDIVGNLTELESEDIQIEALLMRACEPIIQNFCHDVADNQIDSGDLMECLIQNKHQKDMNEKCAIGVTHFQLVQMKDFRFSYKFKMACKEDVLKLCPNIKKKVDVVICLSTTVRNDTLQEAKEHRVSLKCRRQLRVEELEMTEDIRLEPDLYEACKSDIKNFCSAVQYGNAQIIECLKENKKQLSTRCHQKVFKLQETEMMDPELDYTLMRVCKQMIKRFCPEADSKTMLQCLKQNKNSELMDPKCKQMITKRQITQNTDYRLNPMLRKACKADIPKFCHGILTKAKDDSELEGQVISCLKLRYADQRLSSDCEDQIRIIIQESALDYRLDPQLQLHCSDEISSLCAEEAAAQEQTGQVEECLKVNLLKIKTELCKKEVLNMLKESKADIFVDPVLHTACALDIKHHCAAITPGRGRQMSCLMEALEDKRVRLQPECKKRLNDRIEMWSYAAKVAPADGFSDLAMQVMTSPSKNYILSVISGSICILFLIGLMCGRITKRVTRELKDR

SEQ ID NO: 10256 - DNA, 1057 bp, Homo sapiens
acctcgctcttctcagaagtgacaccaaccccgtgttagagcattagcagatgtccactgcgttgtcccatccagcctccactcgtgtccatggtgtcctcctcctcctcaccgtgcagcagcagcagctggtcgctggggttactgcctttgtttggcaaacttgggtttacctgcctgtagacaagtctctctcataccaacagaacttccggtacttccagaaccaactcacctgacctgcaactcaaaggcttttttaagaaaaccaccaaaaaaaaaaatttttttaaagaaaaaaatgtatatagtaacgcatctcctccaggcttgatttgggcaatggggttatgtctttcatatgactgtgtaaaacaaagacaggacttggaggggaagcacaccacccagtgtgccatgactgaggtgtctcgttcatctctcagaagcaccttggggcctcgccagggccgtggtcttcaccgaggcgtgggtgggcagccgttccccaggagccatgggtatttctgtggtctcctcgcttcattgaagcaaagcatgagccttcctagacaagggcagctggggaggggaagggaccggaagtttgtgaagttgaacagtccatccatctgcactgagaggctggatcctgagtcccggggcagcaggatcccaggaaccttcctcctccagggcagcacaggactcagccatgtctggaccggccctgctgaggctacagtcactctggaagctctgcgcttcatcaggaggcaggactgtggcgggaggggtccttgaagatgggtgtggggagcagtgggtcaggaagtgggagccagaggtttgactcactttgctttatttttcaggctacaatacaggtcagagacaatggcttataaaggtttagtgtggtctcaggatgtgacaggcagtccagcctgacctttctgcacactccagacaaacttcccagacaagctcctttgtgcctctacgtggagagggtgtggaaagttatcacattaaaagatggaggatttgctctgtt

SEQ ID NO: 10257 - protein, 153 aa, Homo sapiens
MGLCLSYDCVKQRQDLEGKHTTQCAMTEVSRSSLRSTLGPRQGRGLHRGVGGQPFPRSHGYFCGLLASLKQSMSLPRQGQLGRGRDRKFVKLNSPSICTERLDPESRGSRIPGTFLLQGSTGLSHVWTGPAEATVTLEALRFIRRQDCGGRGP

SEQ ID NO: 10258 - DNA, 1082 bp, Homo sapiens
aaaggaactacctatccagtgcccagtttgtacagccctcttgtatagcatccccactcacctcgctcttctcagaagtgacaccaaccccgtgttagagcattagcagatgtccactgcgttgtcccatccagcctccactcgtgtccatggtgtcctcctcctcctcaccgtgcagcagcagcagctggtcgctggggttactgcctttgtttggcaaacttgggtttacctgcctgtagacaagtctctctcataccaacagaacttccggtacttccagaaccaactcacctgacctgcaactcaaaggcttttttaagaaaaccaccaaaaaaaaaaatttttttaaagaaaaaaatgtatatagtaacgcatctcctccaggcttgatttgggcaatggggttatgtctttcatatgactgtgtaaaacaaagacaggacttggaggggaagcacaccacccagtgtgccatgactgaggtgtctcgttcatctctcagaagcaccttggggcctcgccagggccgtggtcttcaccgaggcgtgggtgggcagccgttccccaggctgtgtggggtcctgctttcttctgctgagacagtgacgctttccagtttccaccctaatcagccactgctggtcacagccccacagccatgggtatttctgtggtctcctcgcttcattgaagcaaagcatgagccttcctcctccagggcagcacaggactcagccatgtctggaccggccctgctgaggctacagtcactctggaagctctgcgcttcatcaggaggcaggactgtggcgggaggggtccttgaagatgggtgtggggagcagtgggtcaggaagtgggagccagaggtttgactcactttgctttatttttcaggctacaatacaggtcagagacaatggcttataaaggtttagtgtggtctcaggatgtgacaggcagtccagcctgacctttctgcacactccagacaaacttcccagacaagctcctttgtgcctctacgtggagagggtgtggaaagttatcacattaaaagatggaggatttgctctgtt

SEQ ID NO: 10259 - protein, 158 aa, Homo sapiens
MGLCLSYDCVKQRQDLEGKHTTQCAMTEVSRSSLRSTLGPRQGRGLHRGVGGQPFPRLCGVLLSSAETVTLSSFHPNQPLLVTAPQPWVFLWSPRFIEAKHEPSSSRAAQDSAMSGPALLRLQSLWKLCASSGGRTVAGGVLEDGCGEQWVRKWEPEV

SEQ ID NO: 10260 - DNA, 1228 bp, Homo sapiens
gtgggagcatctgtatattgttcctgattggcctgatgtgtggacggatcaccaagcgagtgacacgagagctcaaggacaggtagagccaccttgaccaccaaaggaactacctatccagtgcccagtttgtacagccctcttgtatagcatccccactcacctcgctcttctcagaagtgacaccaaccccgtgttagagcattagcagatgtccactgcgttgtcccatccagcctccactcgtgtccatggtgtcctcctcctcctcaccgtgcagcagcagcagctggtcgctggggttactgcctttgtttggcaaacttgggtttacctgcctgtagacaagtctctctcataccaacagaacttccggtacttccagaaccaactcacctgacctgcaactcaaaggcttttttaagaaaaccaccaaaaaaaaaaatttttttaaagaaaaaaatgtatatagtaacgcatctcctccaggcttgatttgggcaatggggttatgtctttcatatgactgtgtaaaacaaagacaggacttggaggggaagcacaccacccagtgtgccatgactgaggtgtctcgttcatctctcagaagcaccttggggcctcgccagggccgtggtcttcaccgaggcgtgggtgggcagccgttccccaggctgtgtggggtcctgctttcttctgctgagacagtgacgctttccagtttccaccctaatcagccactgctggtcacagccccacagccatgggtatttctgtggtctcctcgcttcattgaagcaaagcatgagccttcctagacaagggcagctggggaggggaagggaccggaagtttgtgaagttgaacagtccatccatctgcactgagaggctggatcctgagtcccggggcagcaggatcccaggaaccttcctcctccagggcagcacaggatgtggcgggaggggtccttgaagatgggtgtggggagcagtgggtcaggaagtgggagccagaggtttgactcactttgctttatttttcaggctacaatacaggtcagagacaatggcttataaaggtttagtgtggtctcaggatgtgacaggcagtccagcctgacctttctgcacactccagacaaacttcccagacaagctcctttgtgcctctacgtggagagggtgtggaaagttatcacattaaaagatggaggatttgctctgtt

SEQ ID NO: 10261 - protein, 56 aa, Homo sapiens
MSLPRQGQLGRGRDRKFVKLNSPSICTERLDPESRGSRIPGTFLLQGSTGCGGRGP

SEQ ID NO: 10262 - DNA, 4344 bp, Homo sapiens
actttacatttgagctcttgcgtaccctgccagagcaaggattataaccttaattttttttcttaccccagaacttatgctcttaaccctattcaatgctgtctctctctttggctaagaaagacttctgaggcagatggaaggaaggaaggaaggagggagcgatacaaggagaggctttccgattccgtaatacacctggttgtgcaaagttcacctctacatataaagtttttgttttccaagtcattgaaccggcgacatattctaccggccattttggttgtggcaaccccaattcccttgatttttttttttgtgacagcaaatggaattagagtaggccgccctgcccgggctttttaagaaaccccagcaacccccccgggtaaggagcgccgctctcccgcccgccggtccagggtgtgtgcggtttccagcacggcctcctccttcgccccactctgggttcgcgggtcggcgccggcggggcggggctcggcagggccacgctgccacgcccagcgtctccaccccctcatttaaatacgcggcgccggcgagtgcgtcgagctcgccgcggactcaagatggcggcgtgtggacgtgtacggaggatgttccgcttgtcggcggcgctgcatctgctgctgctattcgcggccggggccgagaaactccccggccagggcgtccacagccagggccagggtcccggggccaactttgtgtccttcgtagggcaggccggaggcggcggcccggcgggtcagcagctgccccagctgcctcagtcatcgcagcttcagcagcaacagcagcagcagcaacagcaacagcagcctcagccgccgcagccgcctttcccggcgggtgggcctccggcccggcggggaggagcgggggctggtgggggctggaagctggcggaggaagagtcctgcagggaggacgtgacccgcgtgtgccctaagcacacctggagcaacaacctggcggtgctcgagtgcctgcaggatgtgagggagcctgaaaatgaaatttcttcagactgcaatcatttgttgtggaattataagctgaacctaactacagatcccaaatttgaatctgtggccagagaggtttgcaaatctactataacagagattaaagaatgtgctgatgaaccggttggaaaaggttacatggtttcctgcttggtggatcaccgaggcaacatcactgagtatcagtgtcaccagtacattaccaagatgacggccatcatttttagtgattaccgtttaatctgtggcttcatggatgactgcaaaaatgacatcaacattctgaaatgtggcagtattcggcttggagaaaaggatgcacattcacaagacacgcctaccgcactgaggaacagggaaggaggctctcacgggagtgccgagctgaagtccaaaggatcctacaccagcgtgccatggatgtcaagctggatcctgccctccaggataagtgcctgattgatctgggaaaatggtgcagtgagaaaacagagactggacaggagctggagtgccttcaggaccatctggatgacttggtggtggagtgtagagatatagttggcaacctcactgagttagaatcagaggatattcaaatagaagccttgctgatgagagcctgtgagcccataattcagaacttctgccacgatgtggcagataaccagatagactctggggacctgatggagtgtctgatacagaacaaacaccagaaggacatgaacgagaagtgtgccatcggagttacccacttccagctggtgcagatgaaggattttcggttttcttacaagtttaaaatggcctgcaaggaggacgtgttgaagctttgcccaaacataaaaaagaaggtggacgtggtgatctgcctgagcacgaccgtgcgcaatgacactctgcaggaagccaaggagcacagggtgtccctgaagtgccgcaggcagctccgtgtggaggagctggagatgacggaggacatccgcttggagccagatctatacgaagcctgcaagagtgacatcaaaaacttctgttccgctgtgcaatatggcaacgctcagattatcgaatgtctgaaagaaaacaagaagcagctaagcacccgctgccaccaaaaagtatttaagctgcaggagacagagatgatggacccagagctagactacaccctcatgagggtctgcaagcagatgataaagaggttctgtccggaagcagattctaaaaccatgttgcagtgcttgaagcaaaataaaaacagtgaattgatggatcccaaatgcaaacagatgataaccaagcgccagatcacccagaacacagattaccgcttaaaccccatgttaagaaaagcctgtaaagctgacattcctaaattctgtcacggtatcctgactaaggccaaggatgattcagaattagaaggacaagtcatctcttgcctgaagctgagatatgctgaccagcgcctgtcttcagactgtgaagaccagatccgaatcattatccaggagtccgccctggactaccgcctggatcctcagctccagctgcactgctcagacgagatctccagtctatgtgctgaagaagcagcagcccaagagcagacaggtcaggtggaggagtgcctcaaggtcaacctgctcaagatcaaaacagaattgtgtaaaaaggaagtgctaaacatgctgaaggaaagcaaagcagacatctttgttgacccggtacttcatactgcttgtgccctggacattaaacaccactgcgcagccatcacccctggccgcgggcgtcaaatgtcctgtctcatggaagcactggaggataagcgggtgaggttacagcccgagtgcaaaaagcgcctcaatgaccggattgagatgtggagttacgcagcaaaggtggccccagcagatggcttctctgatcttgccatgcaagtaatgacgtctccatctaagaactacattctctctgtgatcagtgggagcatctgtatattgttcctgattggcctgatgtgtggacggatcaccaagcgagtgacacgagagctcaaggacaggtagagccaccttgaccaccaaaggaactacctatccagtgcccagtttgtacagccctcttgtatagcatccccactcacctcgctcttctcagaagtgacaccaaccccgtgttagagcattagcagatgtccactgcgttgtcccatccagcctccactcgtgtccatggtgtcctcctcctcctcaccgtgcagcagcagcagctggtcgctggggttactgcctttgtttggcaaacttgggtttacctgcctgtagacaagtctctctcataccaacagaacttccggtacttccagaaccaactcacctgacctgcaactcaaaggcttttttaagaaaaccaccaaaaaaaaaaatttttttaaagaaaaaaatgtatatagtaacgcatctcctccaggcttgatttgggcaatggggttatgtctttcatatgactgtgtaaaacaaagacaggacttggaggggaagcacaccacccagtgtgccatgactgaggtgtctcgttcatctctcagaagcaccttggggcctcgccagggccgtggtcttcaccgaggcgtgggtgggcagccgttccccaggctgtgtggggtcctgctttcttctgctgagacagtgacgctttccagtttccaccctaatcagccactgctggtcacagccccacagccatgggtatttctgtggtctcctcgcttcattgaagcaaagcatgagccttcctagacaagggcagctggggaggggaagggaccggaagtttgtgaagttgaacagtccatccatctgcactgagaggctggatcctgagtcccggggcagcaggatcccaggaaccttcctcctccagggcagcacaggactcagccatgtctggaccggccctgctgaggctacagtcactctggaagctctgcgcttcatcaggaggcaggactgtggcgggaggggtccttgaagatgggtgtggggagcagtgggtcaggaagtgggagccagaggtttgactcactttgctttatttttcaggctacaatacaggtcagagacaatggcttataaaggtttagtgtggtctcaggatgtgacaggcagtccagcctgacctttctgcacactccagacaaacttcccagacaagctcctttgtgcctctacgtggagagggtgtggaaagttatcacattaaaagatggaggatttgctctgtt

SEQ ID NO: 10263 - protein, 596 aa, Homo sapiens; identical to SEQ ID NO: 10255

SEQ ID NO: 10264 - DNA, 4308 bp, Homo sapiens
actttacatttgagctcttgcgtaccctgccagagcaaggattataaccttaattttttttcttaccccagaacttatgctcttaaccctattcaatgctgtctctctctttggctaagaaagacttctgaggcagatggaaggaaggaaggaaggagggagcgatacaaggagaggctttccgattccgtaatacacctggttgtgcaaagttcacctctacatataaagtttttgttttccaagtcattgaaccggcgacatattctaccggccattttggttgtggcaaccccaattcccttgatttttttttttgtgacagcaaatggaattagagtaggccgccctgcccgggctttttaagaaaccccagcaacccccccgggtaaggagcgccgctctcccgcccgccggtccagggtgtgtgcggtttccagcacggcctcctccttcgccccactctgggttcgcgggtcggcgccggcggggcggggctcggcagggccacgctgccacgcccagcgtctccaccccctcatttaaatacgcggcgccggcgagtgcgtcgagctcgccgcggactcaagatggcggcgtgtggacgtgtacggaggatgttccgcttgtcggcggcgctgcatctgctgctgctattcgcggccggggccgagaaactccccggccagggcgtccacagccagggccagggtcccggggccaactttgtgtccttcgtagggcaggccggaggcggcggcccggcgggtcagcagctgccccagctgcctcagtcatcgcagcttcagcagcaacagcagcagcagcaacagcaacagcagcctcagccgccgcagccgcctttcccggcgggtgggcctccggcccggcggggaggagcgggggctggtgggggctggaagctggcggaggaagagtcctgcagggaggacgtgacccgcgtgtgccctaagcacacctggagcaacaacctggcggtgctcgagtgcctgcaggatgtgagggagcctgaaaatgaaatttcttcagactgcaatcatttgttgtggaattataagctgaacctaactacagatcccaaatttgaatctgtggccagagaggtttgcaaatctactataacagagattaaagaatgtgctgatgaaccggttggaaaaggttacatggtttcctgcttggtggatcaccgaggcaacatcactgagtatcagtgtcaccagtacattaccaagatgacggccatcatttttagtgattaccgtttaatctgtggcttcatggatgactgcaaaaatgacatcaacattctgaaatgtggcagtattcggcttggagaaaaggatgcacattcacaaggtgaggtggtatcatgcttggagaaaggcctggtgaaagaagcagaagaaagagaacccaagattcaagtttctgaactctgcaagaaagccattctccgggtggctgagctgtcatcggatgactttcacttagaccggcatttatattttgcttgccgagatgatcgggagcgtttttgtgaaaatacacaagctggtgagggcagagtgtataagtgcctctttaaccataaatttgaagaatccatgagtgaaaagtgtcgagaagcacttacaacccgccaaaagctgattgcccaggattataaagtcagttattcattggccaaatcctgtaaaagtgacttgaagaaataccggtgcaatgtggaaaaccttccgcgatcgcgtgaagccaggctctcctacttgttaatgtgcctggagtcagctgtacacagagggcgacaagtcagcagtgagtgccagggggagatgctggattaccgacgcatgttgatggaagacttttctctgagccctgagatcatcctaagctgtcggggggagattgaacaccattgttccggattacatcgaaaagggcggaccctacactgtctgatgaaagtagttcgaggggagaaggggaaccttggaatgaactgccagcaggcgcttcaaacactgattcaggagactgaccctggtgcagattaccgcattgatcgagctttgaatgaagcttgtgaatctgtaatccagacagcctgcaaacatataagatctggagacccaatgatcttgtcgtgcctgatggaacatttatacacagagaagatggtagaagactgtgaacaccgtctcttagagctgcagtatttcatctcccgggattggaagctggaccctgtcctgtaccgcaagtgccagggagacgcttctcgtctttgccacacccacggttggaatgagaccagtgaatttatgcctcagggagctgtgttctcttgtttatacagacacgcctaccgcactgaggaacagggaaggaggctctcacgggagtgccgagctgaagtccaaaggatcctacaccagcgtgccatggatgtcaagctggatcctgccctccaggataagtgcctgattgatctgggaaaatggtgcagtgagaaaacagagactggacaggagctggagtgccttcaggaccatctggatgacttggtggtggagtgtagagatatagttggcaacctcactgagttagaatcagaggatattcaaatagaagccttgctgatgagagcctgtgagcccataattcagaacttctgccacgatgtggcagataaccagatagactctggggacctgatggagtgtctgatacagaacaaacaccagaaggacatgaacgagaagtgtgccatcggagttacccacttccagctggtgcagatgaaggattttcggttttcttacaagtttaaaatggcctgcaaggaggacgtgttgaagctttgcccaaacataaaaaagaaggtggacgtggtgatctgcctgagcacgaccgtgcgcaatgacactctgcaggaagccaaggagcacagggtgtccctgaagtgccgcaggcagctccgtgtggaggagctggagatgacggaggacatccgcttggagccagatctatacgaagcctgcaagagtgacatcaaaaacttctgttccgctgtgcaatatggcaacgctcagattatcgaatgtctgaaagaaaacaagaagcagctaagcacccgctgccaccaaaaagtatttaagctgcaggagacagagatgatggacccagagctagactacaccctcatgagggtctgcaagcagatgataaagaggttctgtccggaagcagattctaaaaccatgttgcagtgcttgaagcaaaataaaaacagtgaattgatggatcccaaatgcaaacagatgataaccaagcgccagatcacccagaacacagattaccgcttaaaccccatgttaagaaaagcctgtaaagctgacattcctaaattctgtcacggtatcctgactaaggccaaggatgattcagaattagaaggacaagtcatctcttgcctgaagctgagatatgctgaccagcgcctgtcttcagactgtgaagaccagatccgaatcattatccaggagtccgccctggactaccgcctggatcctcagctccagctgcactgctcagacgagatctccagtctatgtgctgaagaagcagcagcccaagagcagacaggtcaggtggaggagtgcctcaaggtcaacctgctcaagatcaaaacagaattgtgtaaaaaggaagtgctaaacatgctgaaggaaagcaaagcagacatctttgttgacccggtacttcatactgcttgtgccctggacattaaacaccactgcgcagccatcacccctggccgcgggcgtcaaatgtcctgtctcatggaagcactggaggataagcgggtgaggttacagcccgagtgcaaaaagcgcctcaatgaccggattgagatgtggagttacgcagcaaaggtggccccagcagatggcttctctgatcttgccatgcaagtaatgacgtctccatctaagaactacattctctctgtgatcagtgggagcatctgtatattgttcctgattggcctgatgtgtggacggatcaccaagcgagtgacacgagagctcaaggacaggctacaatacaggtcagagacaatggcttataaaggtttagtgtggtctcaggatgtgacaggcagtccagcctgacctttctgcacactccagacaaacttcccagacaagctcctttgtgcctctacgtggagagggtgtggaaagttatcacattaaaagatggaggatttgctctgtt

SEQ ID NO: 10265 - protein, 1203 aa, Homo sapiens; identical to SEQ ID NO: 1597

SEQ ID NO: 10266 - DNA, 5347 bp, Homo sapiens
actttacatttgagctcttgcgtaccctgccagagcaaggattataaccttaattttttttcttaccccagaacttatgctcttaaccctattcaatgctgtctctctctttggctaagaaagacttctgaggcagatggaaggaaggaaggaaggagggagcgatacaaggagaggctttccgattccgtaatacacctggttgtgcaaagttcacctctacatataaagtttttgttttccaagtcattgaaccggcgacatattctaccggccattttggttgtggcaaccccaattcccttgatttttttttttgtgacagcaaatggaattagagtaggccgccctgcccgggctttttaagaaaccccagcaacccccccgggtaaggagcgccgctctcccgcccgccggtccagggtgtgtgcggtttccagcacggcctcctccttcgccccactctgggttcgcgggtcggcgccggcggggcggggctcggcagggccacgctgccacgcccagcgtctccaccccctcatttaaatacgcggcgccggcgagtgcgtcgagctcgccgcggactcaagatggcggcgtgtggacgtgtacggaggatgttccgcttgtcggcggcgctgcatctgctgctgctattcgcggccggggccgagaaactccccggccagggcgtccacagccagggccagggtcccggggccaactttgtgtccttcgtagggcaggccggaggcggcggcccggcgggtcagcagctgccccagctgcctcagtcatcgcagcttcagcagcaacagcagcagcagcaacagcaacagcagcctcagccgccgcagccgcctttcccggcgggtgggcctccggcccggcggggaggagcgggggctggtgggggctggaagctggcggaggaagagtcctgcagggaggacgtgacccgcgtgtgccctaagcacacctggagcaacaacctggcggtgctcgagtgcctgcaggatgtgagggagcctgaaaatgaaatttcttcagactgcaatcatttgttgtggaattataagctgaacctaactacagatcccaaatttgaatctgtggccagagaggtttgcaaatctactataacagagattaaagaatgtgctgatgaaccggttggaaaaggttacatggtttcctgcttggtggatcaccgaggcaacatcactgagtatcagtgtcaccagtacattaccaagatgacggccatcatttttagtgattaccgtttaatctgtggcttcatggatgactgcaaaaatgacatcaacattctgaaatgtggcagtattcggcttggagaaaaggatgcacattcacaaggtgaggtggtatcatgcttggagaaaggcctggtgaaagaagcagaagaaagagaacccaagattcaagtttctgaactctgcaagaaagccattctccgggtggctgagctgtcatcggatgactttcacttagaccggcatttatattttgcttgccgagatgatcgggagcgtttttgtgaaaatacacaagctggtgagggcagagtgtataagtgcctctttaaccataaatttgaagaatccatgagtgaaaagtgtcgagaagcacttacaacccgccaaaagctgattgcccaggattataaagtcagttattcattggccaaatcctgtaaaagtgacttgaagaaataccggtgcaatgtggaaaaccttccgcgatcgcgtgaagccaggctctcctacttgttaatgtgcctggagtcagctgtacacagagggcgacaagtcagcagtgagtgccagggggagatgctggattaccgacgcatgttgatggaagacttttctctgagccctgagatcatcctaagctgtcggggggagattgaacaccattgttccggattacatcgaaaagggcggaccctacactgtctgatgaaagtagttcgaggggagaaggggaaccttggaatgaactgccagcaggcgcttcaaacactgattcaggagactgaccctggtgcagattaccgcattgatcgagctttgaatgaagcttgtgaatctgtaatccagacagcctgcaaacatataagatctggagacccaatgatcttgtcgtgcctgatggaacatttatacacagagaagatggtagaagactgtgaacaccgtctcttagagctgcagtatttcatctcccgggattggaagctggaccctgtcctgtaccgcaagtgccagggagacgcttctcgtctttgccacacccacggttggaatgagaccagtgaatttatgcctcagggagctgtgttctcttgtttatacagacacgcctaccgcactgaggaacagggaaggaggctctcacgggagtgccgagctgaagtccaaaggatcctacaccagcgtgccatggatgtcaagctggatcctgccctccaggataagtgcctgattgatctgggaaaatggtgcagtgagaaaacagagactggacaggagctggagtgccttcaggaccatctggatgacttggtggtggagtgtagagatatagttggcaacctcactgagttagaatcagaggatattcaaatagaagccttgctgatgagagcctgtgagcccataattcagaacttctgccacgatgtggcagataaccagatagactctggggacctgatggagtgtctgatacagaacaaacaccagaaggacatgaacgagaagtgtgccatcggagttacccacttccagctggtgcagatgaaggattttcggttttcttacaagtttaaaatggcctgcaaggaggacgtgttgaagctttgcccaaacataaaaaagaaggtggacgtggtgatctgcctgagcacgaccgtgcgcaatgacactctgcaggaagccaaggagcacagggtgtccctgaagtgccgcaggcagctccgtgtggaggagctggagatgacggaggacatccgcttggagccagatctatacgaagcctgcaagagtgacatcaaaaacttctgttccgctgtgcaatatggcaacgctcagattatcgaatgtctgaaagaaaacaagaagcagctaagcacccgctgccaccaaaaagtatttaagctgcaggagacagagatgatggacccagagctagactacaccctcatgagggtctgcaagcagatgataaagaggttctgtccggaagcagattctaaaaccatgttgcagtgcttgaagcaaaataaaaacagtgaattgatggatcccaaatgcaaacagatgataaccaagcgccagatcacccagaacacagattaccgcttaaaccccatgttaagaaaagcctgtaaagctgacattcctaaattctgtcacggtatcctgactaaggccaaggatgattcagaattagaaggacaagtcatctcttgcctgaagctgagatatgctgaccagcgcctgtcttcagactgtgaagaccagatccgaatcattatccaggagtccgccctggactaccgcctggatcctcagctccagctgcactgctcagacgagatctccagtctatgtgctgaagaagcagcagcccaagagcagacaggtcaggtggaggagtgcctcaaggtcaacctgctcaagatcaaaacagaattgtgtaaaaaggaagtgctaaacatgctgaaggaaagcaaagcagacatctttgttgacccggtacttcatactgcttgtgccctggacattaaacaccactgcgcagccatcacccctggccgcgggcgtcaaatgtcctgtctcatggaagcactggaggataagcgggtgaggttacagcccgagtgcaaaaagcgcctcaatgaccggattgagatgtggagttacgcagcaaaggtggccccagcagatggcttctctgatcttgccatgcaagtaatgacgtctccatctaagaactacattctctctgtgatcagtgggagcatctgtatattgttcctgattggcctgatgtgtggacggatcaccaagcgagtgacacgagagctcaaggacaggtagagccaccttgaccaccaaaggaactacctatccagtgcccagtttgtacagccctcttgtatagcatccccactcacctcgctcttctcagaagtgacaccaaccccgtgttagagcattagcagatgtccactgcgttgtcccatccagcctccactcgtgtccatggtgtcctcctcctcctcaccgtgcagcagcagcagctggtcgctggggttactgcctttgtttggcaaacttgggtttacctgcctgtagacaagtctctctcataccaacagaacttccggtacttccagaaccaactcacctgacctgcaactcaaaggcttttttaagaaaaccaccaaaaaaaaaaatttttttaaagaaaaaaatgtatatagtaacgcatctcctccaggcttgatttgggcaatggggttatgtctttcatatgactgtgtaaaacaaagacaggacttggaggggaagcacaccacccagtgtgccatgactgaggtgtctcgttcatctctcagaagcaccttggggcctcgccagggccgtggtcttcaccgaggcgtgggtgggcagccgttccccaggctgtgtggggtcctgctttcttctgctgagacagtgacgctttccagtttccaccctaatcagccactgctggtcacagccccacagccatgggtatttctgtggtctcctcgcttcattgaagcaaagcatgagccttcctagacaagggcagctggggaggggaagggaccggaagtttgtgaagttgaacagtccatccatctgcactgagaggctggatcctgagtcccggggcagcaggatcccaggaaccttcctcctccagggcagcacaggactcagccatgtctggaccggccctgctgaggctacagtcactctggaagctctgcgcttcatcaggaggcaggactgtggcgggaggggtccttgaagatgggtgtggggagcagtgggtcaggaagtgggagccagaggtttgactcactttgctttatttttcaggctacaatacaggtcagagacaatggcttataaaggtttagtgtggtctcaggatgtgacaggcagtccagcctgacctttctgcacactccagacaaacttcccagacaagctcctttgtgcctctacgtggagagggtgtggaaagttatcacattaaaagatggaggatttgctctgtt

SEQ ID NO: 10267 - protein, 1179 aa, Homo sapiens; identical to SEQ ID NO: 10253

SEQ ID NO: 10268 - DNA, 1203 bp, Homo sapiens
gtgggagcatctgtatattgttcctgattggcctgatgtgtggacggatcaccaagcgagtgacacgagagctcaaggacaggtagagccaccttgaccaccaaaggaactacctatccagtgcccagtttgtacagccctcttgtatagcatccccactcacctcgctcttctcagaagtgacaccaaccccgtgttagagcattagcagatgtccactgcgttgtcccatccagcctccactcgtgtccatggtgtcctcctcctcctcaccgtgcagcagcagcagctggtcgctggggttactgcctttgtttggcaaacttgggtttacctgcctgtagacaagtctctctcataccaacagaacttccggtacttccagaaccaactcacctgacctgcaactcaaaggcttttttaagaaaaccaccaaaaaaaaaaatttttttaaagaaaaaaatgtatatagtaacgcatctcctccaggcttgatttgggcaatggggttatgtctttcatatgactgtgtaaaacaaagacaggacttggaggggaagcacaccacccagtgtgccatgactgaggtgtctcgttcatctctcagaagcaccttggggcctcgccagggccgtggtcttcaccgaggcgtgggtgggcagccgttccccaggctgtgtggggtcctgctttcttctgctgagacagtgacgctttccagtttccaccctaatcagccactgctggtcacagccccacagccatgggtatttctgtggtctcctcgcttcattgaagcaaagcatgagccttcctagacaagggcagctggggaggggaagggaccggaagtttgtgaagttgaacagtccatccatctgcactgagaggctggatcctgagtcccggggcagcaggatcccaggaaccttcctcctccagggcagcacaggactcagccatgtctggaccggccctgctgaggctacagtcactctggaagctctgcgcttcatcaggaggctacaatacaggtcagagacaatggcttataaaggtttagtgtggtctcaggatgtgacaggcagtccagcctgacctttctgcacactccagacaaacttcccagacaagctcctttgtgcctctacgtggagagggtgtggaaagttatcacattaaaagatggaggatttgctctgt

SEQ ID NO: 10269 - protein, 97 aa, Homo sapiens
MSLPRQGQLGRGRDRKFVKLNSPSICTERLDPESRGSRIPGTFLLQGSTGLSHVWTGPAEATVTLEALRFIRRLQYRSETMAYKGLVWSQDVTGSPA

SEQ ID NO: 10270 - DNA, 4478 bp, Homo sapiens
actttacatttgagctcttgcgtaccctgccagagcaaggattataaccttaattttttttcttaccccagaacttatgctcttaaccctattcaatgctgtctctctctttggctaagaaagacttctgaggcagatggaaggaaggaaggaaggagggagcgatacaaggagaggctttccgattccgtaatacacctggttgtgcaaagttcacctctacatataaagtttttgttttccaagtcattgaaccggcgacatattctaccggccattttggttgtggcaaccccaattcccttgatttttttttttgtgacagcaaatggaattagagtaggccgccctgcccgggctttttaagaaaccccagcaacccccccgggtaaggagcgccgctctcccgcccgccggtccagggtgtgtgcggtttccagcacggcctcctccttcgccccactctgggttcgcgggtcggcgccggcggggcggggctcggcagggccacgctgccacgcccagcgtctccaccccctcatttaaatacgcggcgccggcgagtgcgtcgagctcgccgcggactcaagatggcggcgtgtggacgtgtacggaggatgttccgcttgtcggcggcgctgcatctgctgctgctattcgcggccggggccgagaaactccccggccagggcgtccacagccagggccagggtcccggggccaactttgtgtccttcgtagggcaggccggaggcggcggcccggcgggtcagcagctgccccagctgcctcagtcatcgcagcttcagcagcaacagcagcagcagcaacagcaacagcagcctcagccgccgcagccgcctttcccggcgggtgggcctccggcccggcggggaggagcgggggctggtgggggctggaagctggcggaggaagagtcctgcagggaggacgtgacccgcgtgtgccctaagcacacctggagcaacaacctggcggtgctcgagtgcctgcaggatgtgagggagcctgaaaatgaaatttcttcagactgcaatcatttgttgtggaattataagctgaacctaactacagatcccaaatttgaatctgtggccagagaggtttgcaaatctactataacagagattaaagaatgtgctgatgaaccggttggaaaaggttacatggtttcctgcttggtggatcaccgaggcaacatcactgagtatcagtgtcaccagtacattaccaagatgacggccatcatttttagtgattaccgtttaatctgtggcttcatggatgactgcaaaaatgacatcaacattctgaaatgtggcagtattcggcttggagaaaaggatgcacattcacaaggtgaggtggtatcatgcttggagaaaggcctggtgaaagaagcagaagaaagagaacccaagattcaagtttctgaactctgcaagaaagccattctccgggtggctgagctgtcatcggatgactttcacttagaccggcatttatattttgcttgccgagatgatcgggagcgtttttgtgaaaatacacaagctggtgagggcagagtgtataagtgcctctttaaccataaatttgaagaatccatgagtgaaaagtgtcgagaagcacttacaacccgccaaaagctgattgcccaggattataaagtcagttattcattggccaaatcctgtaaaagtgacttgaagaaataccggtgcaatgtggaaaaccttccgcgatcgcgtgaagccaggctctcctacttgttaatgtgcctggagtcagctgtacacagagggcgacaagtcagcagtgagtgccagggggagatgctggattaccgacgcatgttgatggaagacttttctctgagccctgagatcatcctaagctgtcggggggagattgaacaccattgttccggattacatcgaaaagggcggaccctacactgtctgatgaaagtagttcgaggggagaaggggaaccttggaatgaactgccagcaggcgcttcaaacactgattcaggagactgaccctggtgcagattaccgcattgatcgagctttgaatgaagcttgtgaatctgtaatccagacagcctgcaaacatataagatctggagacccaatgatcttgtcgtgcctgatggaacatttatacacagagaagatggtagaagactgtgaacaccgtctcttagagctgcagtatttcatctcccgggattggaagctggaccctgtcctgtaccgcaagtgccagggagacgcttctcgtctttgccacacccacggttggaatgagaccagtgaatttatgcctcagggagctgtgttctcttgtttatacagacacgcctaccgcactgaggaacagggaaggaggctctcacgggagtgccgagctgaagtccaaaggatcctacaccagcgtgccatggatgtcaagctggatcctgccctccaggataagtgcctgattgatctgggaaaatggtgcagtgagaaaacagagactggacaggagctggagtgccttcaggaccatctggatgacttggtggtggagtgtagagatatagttggcaacctcactgagttagaatcagaggatattcaaatagaagccttgctgatgagagcctgtgagcccataattcagaacttctgccacgatgtggcagataaccagatagactctggggacctgatggagtgtctgatacagaacaaacaccagaaggacatgaacgagaagtgtgccatcggagttacccacttccagctggtgcagatgaaggattttcggttttcttacaagtttaaaatggcctgcaaggaggacgtgttgaagctttgcccaaacataaaaaagaaggtggacgtggtgatctgcctgagcacgaccgtgcgcaatgacactctgcaggaagccaaggagcacagggtgtccctgaagtgccgcaggcagctccgtgtggaggagctggagatgacggaggacatccgcttggagccagatctatacgaagcctgcaagagtgacatcaaaaacttctgttccgctgtgcaatatggcaacgctcagattatcgaatgtctgaaagaaaacaagaagcagctaagcacccgctgccaccaaaaagtatttaagctgcaggagacagagatgatggacccagagctagactacaccctcatgagggtctgcaagcagatgataaagaggttctgtccggaagcagattctaaaaccatgttgcagtgcttgaagcaaaataaaaacagtgaattgatggatcccaaatgcaaacagatgataaccaagcgccagatcacccagaacacagattaccgcttaaaccccatgttaagaaaagcctgtaaagctgacattcctaaattctgtcacggtatcctgactaaggccaaggatgattcagaattagaaggacaagtcatctcttgcctgaagctgagatatgctgaccagcgcctgtcttcagactgtgaagaccagatccgaatcattatccaggagtccgccctggactaccgcctggatcctcagctccagctgcactgctcagacgagatctccagtctatgtgctgaagaagcagcagcccaagagcagacaggtcaggtggaggagtgcctcaaggtcaacctgctcaagatcaaaacagaattgtgtaaaaaggaagtgctaaacatgctgaaggaaagcaaagcagacatctttgttgacccggtacttcatactgcttgtgccctggacattaaacaccactgcgcagccatcacccctggccgcgggcgtcaaatgtcctgtctcatggaagcactggaggataagcgggtgaggttacagcccgagtgcaaaaagcgcctcaatgaccggattgagatgtggagttacgcagcaaaggtggccccagcagatggcttctctgatcttgccatgcaagtaatgacgtctccatctaagaactacattctctctgtgatcagtgggagcatctgtatattgttcctgattggcctgatgtgtggacggatcaccaagcgagtgacacgagagctcaaggacaggtagagccaccttgaccaccaaaggaactacctatccagtgcccagtttgtacagccctcttgtatagcatccccactcacctcgctcttctcagaagtgacaccaaccccgtgttagagcattagcagatgtccactgcgttgtcccatccagcctccactcgtgtccatggtgtcctcctcctcctcaccgtgcagcagcagcagctggtcgctggggttactgcctttgtttggcaaacttgggtttacctgcctgtagacaagtctctctcataccaacagaacttccggtacttccagaaccaactcacctgacctgcaactcaaaggcttttttaagaaaaccacc

SEQ ID NO: 10271 - protein, 1179 aa, Homo sapiens; identical to SEQ ID NO: 10253

SEQ ID NO: 10272 - DNA, 2911 bp, Homo sapiens
aagtcctgtgcaaaagttttaacatacgaccattagcttcctgtgtcattcttttgattttgaatgataaaacctttcttcccacatgtaactggaagtccagctgtaagacaggctctaactaagcatgtgatccaatcactggatcagtaatgtcctcaggggctgggtgctgtggctcatgcaggtaatcccagcactttgggaggccgaggcaggtggatcgcttgaggtcaggagttcaaaaccagcctggccaacgtgatgaaaccctgcctgtactaaaagagacttaggccagcgaggtggctcatgcctgtaattccagcactttgggaggcaaatgcggtcaaatcacttgaggtctgtaattcaagaccagcctggccaacatggcgacaccccatctctactaaaaatacaaaatttagccagctgtggtggcacatacctgtaatcccagctacttgagagactgaggcaggagaatcacttgaaccgggagatggagtttgcagtgagccgagatggtgccactgtactccagcctgggtgacagagcaagactctgtctccaaaaaaaaaaaaaaaaaaaaaaaaaaagacatttcaagctggaagatttggttccctaactttgagcctagctctttcattaaagtaataataaaagtagaactctacatttatataatggttttgactttccaaagtgattttcacatctcagcagtcctgtgaaggactaaataaggtgtttcagggtagacttggcattgtgttttgcaaagaaggtccaaggccatgcagctatttggtgacagaattgaaagtaaagcctgattctcttgctgcaaggcgactttgctatgtagaagccagggtcactagacaagatgcagtcaacaaataagtctccagaacatatgacatctccagcctaaaccaagctcacctttccatgctggctccctcatgcagacggaggacatccgcttggagccagatctatacgaagcctgcaagagtgacatcaaaaacttctgttccgctgtgcaatatggcaacgctcagattatcgaatgtctgaaagaaaacaagaagcagctaagcacccgctgccaccaaaaagtatttaagctgcaggagacagagatgatggacccagagctagactacaccctcatgagggtctgcaagcagatgataaagaggttctgtccggaagcagattctaaaaccatgttgcagtgcttgaagcaaaataaaaacagtgaattgatggatcccaaatgcaaacagatgataaccaagcgccagatcacccagaacacaggtaagatcttggcttggctctcctggccccgtggagtatctgaaaaggaattcagtggctgtagagtgacctgctcaaactcccagggctttgttgcctgggaattttaagggaggagtctgagtgtaagcagggccttcctcctttgaggagcatccagaaaaatggagggagagtcaggggagagaggaggccacaagaaccagaaaactgccctaaaagaacgttcagaaggaatcaggccggcagtccttggaaagaaaaatctagaaattcaataaaacttcatgagtgtgccaggagaatgtacgggtaatctgattcggaacagaaacatttcacctctgagttggaagacctcgtaagttaatggtcacagtgagttggatattgtatttctttttcagtgttctcaaaagtgtctgttatggggaaggttgctgatgtccccttgatttttctgaggactccttagagtattggagtctgcacaaaaccccgcagagtagaaagattcctgaggacctccagaagtactcgttaacaagtcatattgctgattaaaaacagtgtagtgagagctcagtaaatgtttattgaatagataaatccatggttgtagtcatgatcattgacataatatgctccctttaggaaggtggatatctaaaaatgtgtgaatcaggtggaatgttttgtcacatgctcactgctttctactctagattaccgcttaaaccccatgttaagaaaagcctgtaaagctgacattcctaaattctgtcacggtatcctgactaaggccaaggatgattcagaattagaaggacaagtcatctcttgcctgaagctgagatatgctgaccagcgcctgtcttcagactgtgaagaccagatccgaatcattatccaggagtccgccctggactaccgcctggatcctcagctccagctgcactgctcagacgaggtgggatttgcgtgcaaaactggttacgcacagagctgctcagagaagtttccactggagaaaagttgtttactttctctcccttcagccgtgaatgatctggtgaattgaaggccatcttctaggctctccatggtctgcattcctgttctttgtaacactgaattcaacttggcattagtcctgacactctaaagcgttgttccatatttctctgttgaacaagggtgttctttcattatagctctctgtaaatttgttcttcccttcttcttattctggatggtaaacccaagacctgccagaaagataaaagtgctttcagctgggcacggtggctcacgcctgtaatcccaacactttgggaggccaaggagggtggatcatctgaggtcaggagttcaagaccagcctggctaacatggagaaatctgtctctactaaaaatacaaaaaattagccaggcgtggtggcgtgcaccagtaatctcagctactcaggaggctgaggcaggagaatcacttgaacccgggaggcggaggttgcagtgagctgagatcatgccactgcaccccagcctgggcgacagaggaagactctgtctc

SEQ ID NO: 10273 - protein, 156 aa, Homo sapiens
MQTEDIRLEPDLYEACKSDIKNFCSAVQYGNAQIIECLKENKKQLSTRCHQKVFKLQETEMMDPELDYTLMRVCKQMIKRFCPEADSKTMLQCLKQNKNSELMDPKCKQMITKRQITQNTGKILAWLSWPRGVSEKEFSGCRVTCSNSQGFVAWEF

SEQ ID NO: 10274 - DNA, 3473 bp, Homo sapiens
aaaaaaaaaaaaaaaaggtcaagaccatcctggccaacatggtgaaaccccgtttctactaaaaatacaaaaattagctgggcgtggtaaaacatgcctgtagtgccaggtacttgggaggctgaggcaggaggatcacttgaacccgggaggcggaggttgcagtgagccgagattgcaccattgcactcccgcctgggccacagagccagactccgtctcaataaaaagaaaaaaaaaaagggggattagaaaccctcataaagcactgggatgttatttagaaatacagaggagggcagctaaacatgttaaagttattttgtggggccagaaatcagagaagtggggaactaccattttgtcttaaaccttttagtactctatttgaattgtcataatgtaaaattacgtttctcaaccagttcttttttgctttctagttttcagaagttcattgccttctctcatttcgtcgtcatctctcacattatcattgtcatcatggacttatgagagcagtctgggtgtatagctctttaaaggaaggtgttttttcaggagctagtgttgcacgggtttctctctttaaaggcattattagtatgtgttccccagtaacagtggtttggcatctgctttgagggcagtgctctggcttatgagcttataaactgaagatggatatcagttacccctgttttcattttgaactacttagcattttgggaaaatctgcaaaggctttgcatactctaatgttattgctacatgtgtttttacctcacttttcttaattctgccttctcatttgttcaggccgaaagggaatatgtctttaaaaatttgcctttcaaagtataacggaggagcagttctatatttattctggggctatctacttcaaatactagaatcgtttccaaaagtatgtattagattatttgcccatcagatattactgattcagaaagagaaactgctcctcctccaccctggctctttctaaagcagaagtattaatatatttaattttctacaggatattcaaatagaagccttgctgatgagagcctgtgagcccataattcagaacttctgccacgatgtggcagataaccagatagactctggggacctgatggagtgtctgatacagaacaaacaccagaaggacatgaacgagaagtgtgccatcggagttacccacttccagctggtgcagatgaaggattttcggttttcttacaagtttaaaatggcctgcaaggaggacgtgttgaagctttgcccaaacataaaaaagaagtatgtagcttgtagttgtttcattccactttcccgaagttcctcttagctccggaatgagtatgcgagatgttaggcagccctcctgctgcctcgtggggttagccctggaggcctcccgcatctctcctttgattagcgtggcaaacactcggactgtctggacagagcatctggcgatggtagttctcacatggaggtcccataggctaaaggagcatttttaatttttccaggtcaggccatctaactgaccaagtagggctggattgtgtacttagagaagcagggtgcagtgtgagtgaaagaggcgaactgacctcttccctgcgtcgtcccgttatgtcatctcatctaagatgcagcagtttttgtattggattagatatttagtgaagaaacagaatctttattcatttaagaattaagtctttttgaggaaactgatgagctttttcagcgtgactgtccaaattcttccatgttgctctttgaaaggaccatttctagaacacttgccctcatacaaaccaaattcccaatttgctcaggtttctctacctttcaggagtgagtttcacagtaggtcaaaagtacagtcctagagttaagagcagcattcctctgtggtcacatgtttttaacacagatgttgaactgtcgttgcacacatgtgccctgtgtggcttccccttctgtcaggaatgtagtcagcattcatgctgctgcctgcctttcatgacacccacagtcaaattgcagcttttagcaccctgaaaaaaaatacagtgagccttacaggaaagacattcccccaaagggcatcttgaattcttaatggtgtgaccccccccaagcccagctctcaggccatctgcccttgtgtggccccagccagcctcaagcttctttcgtctgcagggtggacgtggtgatctgcctgagcacgaccgtgcgcaatgacactctgcaggaagccaaggagcacagggtgtccctgaagtgccgcaggcagctccgtgtggaggagctggagatggtaatgcctcccagcctctgctcccagaaaccacagtgggccagggcttggaaagctggggagaggctagggcaagggggaggcattttatccactactgtgatggttaagacttgaagtcctgtgcaaaagttttaacatacgaccattagcttcctgtgtcattcttttgattttgaatgataaaacctttcttcccacatgtaactggaagtccagctgtaagacaggctctaactaagcatgtgatccaatcactggatcagtaatgtcctcaggggctgggtgctgtggctcatgcaggtaatcccagcactttgggaggccgaggcaggtggatcgcttgaggtcaggagttcaaaaccagcctggccaacgtgatgaaaccctgcctgtactaaaagagacttaggccagcgaggtggctcatgcctgtaattccagcactttgggaggcaaatgcggtcaaatcacttgaggtctgtaattcaagaccagcctggccaacatggcgacaccccatctctactaaaaatacaaaatttagccagctgtggtggcacatacctgtaatcccagctacttgagagactgaggcaggagaatcacttgaaccgggagatggagtttgcagtgagccgagatggtgccactgtactccagcctgggtgacagagcaagactctgtctccaaaaaaaaaaaaaaaaaaaaaaaaaaagacatttcaagctggaagatttggttccctaactttgagcctagctctttcattaaagtaataataaaagtagaactctacatttatataatggttttgactttccaaagtgattttcacatctcagcagtcctgtgaaggactaaataaggtgtttcagggtagacttggcattgtgttttgcaaagaaggtccaaggccatgcagctatttggtgacagaattgaaagtaaagcctgattctcttgctgcaaggcgactttgctatgtagaagccagggtcactagacaagatgcagtcaacaaataagtctccagaacatatgacatctccagcctaaaccaagctcacctttccatgctggctccctcatgcagacggaggacatccgcttggagccagatct

SEQ ID NO: 10275 - protein, 96 aa, Homo sapiens
MRACEPIIQNFCHDVADNQIDSGDLMECLIQNKHQKDMNEKCAIGVTHFQLVQMKDFRFSYKFKMACKEDVLKLCPNIKKKYVACSCFIPLSRSSS

SEQ ID NO: 10276 - DNA, 611 bp, Homo sapiens
tgtcattcaaaagcttcttcctgaagttgattgcaggtctctccagccccggacctgggccctgcagccaccaagatgctgatgcctaagaagaacgggattgccatctatgaactcctttttaaggagggagtcatggtggccaagaaggatgtccaccttcctaagtacccagacctggcagaagacaagaatgtgcccaaccttcacatcatgaaggccatgcagtctctcaagtcttaaggctacatgaaggaacggtttgtctggagacatttctactggtaccttaccaacgactgtatccagtatctctgattacctccatctgccccgtgagactgtgccttccaccctataccacagtcatccagagactggcaggctttggcctaaaggtctggagggtgagcaacccgcaaagctcacaaaaggggaagccaaaagacacccacagacagagtgctgtgtcccctggtccgatgagaaagccgaggctggggttgggtcagcaaccaaattccagtttagaagcagatttggttgtgggtgtggtcagtgacctcagtaaaactggagaggattattttgcattgaataaacttatagac

SEQ ID NO: 10277 - protein, 55 aa, Homo sapiens
MLMPKKNGIAIYELLFKEGVMVAKKDVHLPKYPDLAEDKNVPNLHIMKAMQSLKS

SEQ ID NO: 10278 - DNA, 624 bp, Homo sapiens
caggagttgaagaccagcctagaaagcatggtgaaaccccaaccctaccaaaaaaaaaaaagacacacaggacactttctaccaaggaaccagctggctgcttccagatagctgcaccagacttctttcagatgcttctgggatatggtcttctgaccatgttctttagcctcctttgcttcctgttacctgctcagtctcaagagctcctgactcaggcttttggtctgttttcctgaaatcttctgcgtctggaccctccccagacctaaagagagcttcttgcctctccccagacctaaagagagcttcttgcctattttgctatctaaagacctctatgattaaaattttcctttaattgagtctcacagctttacttcagcacacttactattacatagtaatggataagcaggaaataaagatctacaaaagtcaaacaaatcatatatagttatagaaacatttgtaatatttgaggtaaggatttacaaagctgttttatcaaaggtcctgggtttcttctagtttacttagctctttatacaatgattgtaataaccacaaactttttgctaaccccacaccaattaggggtgctgttgaaactggtcagatgca

SEQ ID NO: 10279 - protein, 35 aa, Homo sapiens
MLLGYGLLTMFFSLLCFLLPAQSQELLTQAFGLFS

SEQ ID NO: 10280 - DNA, 448 bp, Homo sapiens
gaggtcaagagttcaagaccagcctgctcaagatggtgaaatctcacctctattaaaaatacaaaaattagctgggcatgatggtgggttgcctgtaatcccagctactcaggaggctgaggcagaactgcttgaacccgggaggtgaaggcggcggtgagctgagatagcaccactgcactccagtctgcgcgacagagcgagactccttctcaaaaaaaaaaaaagttcaaactattttaagtctgtggtgtcatacatacacatttggccctggttaataaaactccacaccaactattaaagactgacaaattccgtgaatttctataaaaatgcaagacatataaagagaatacagccaaacatttttctaacttaaaatgacaccatgatttggatggatcatagaccattttaaatgagttgcatgtacattatatattat

SEQ ID NO: 10281 - protein, 48 aa, Homo sapiens [sequence omitted]

SEQ ID NO: 10282 - DNA, 2811 bp, Homo sapiens
agtgatggctcatgaagcaatggaatatgatgttcaggtgcagttaaatcatgccgaacaacagccagctcctgctggcatggccagcagccaagggggaccagccctcctccagcctgttcctgctgatgtggtcagcagccagggggtaccatccatcctccaggacctacagaccgatcagcctgtgttggacatctgcccatttgaggtgaaccgtaacagctacttggctaccttaacagagaagatggtccacatctataagtgggagtgactgtggtctcgaaaccttgaaggcatgctgctggttagatgttgtttgctagcgcctagcagccccaagcaagatccctgtttattgtctgcagtctagaacattgggaatcatggtttgtttgcattagtatgattctaggaccctaggtcactgagacactacagattgtgtatctgttatgtccactaaaagagtaattgatgggtactttatctacattatccatttcttgggtttaaagccttcattaaccattattgtatgttggaaattcttattttctttattttctgtgtgactttctggaccttagagagtgtcctctcatcatctaggatgtgagtgggcatcaagcattttctggggaatatgacatcccatctgagttgtcctgtcacttaagtatccttgaagggactaaccatcgtcttggtactgatttgatgcaacgtagatgtaaaagagtattattcagttgaacacaagagggcactgtagaaccttgtgtccggtttatttctgaccttgaaggctgacaatcttttagtaacttgtctcatctccacacaagtgtgtgatagcacacctgggtgtgctttgtggcaataacacttgtgttccaggtgtgaagtgctgggacattggcaggcccagtgatggaagcagctagtgaacgattccctttgctaatgcctagtgcattaagttcattgctttgcgaaaggtaaggaaagaggccagttgtttgagcggtggggaagattttgttttttctagccagcttaggatctcaggattggttttatccaagctagtgctttgaagaacactatctcttgccaggaaaagatgagtgataggtcaaagcttttacttgagtctcccctagtgtcagagatcaggagaaaagacataagagaatttacaaaagctattcagactgctattgaaaacatgagaagaacttgtctcccattttgagagttcctatctaaataaagccaattcctcagactgaggggctgttcttaagtgttctttatacattccagttatccagttaaagccttccccatgtgaagctgatgtttgattccagtttcctttgatttgcctccctaaccttttctagggctcagtttgtatttctttgccttgcctcagactactttgccaacccacttccacaacagaatatgcttcaagatgtgggcaggtcagtgtcctgttcatgggagaaaatggcttaacagtctgattttctcaaatgattattgaagagttgttatcgtttttattataaaacacttctgacctgtcaattcaagagctgtttctaggatctttctctccggcaaggggttgttgcactagatttccccagagttccaagttctagttgtgccttttaatgaccctttaatattttaggacataattttttccttttttaaatttttttgtagaaatagatgtttcactacgttgtccaggctggtcttggactcctggcctcaagcaatcctcccacctcagcctcctaaagtgccaaaattataggcgtgagccactgcacccggcccctatttgaagacgtcttttgtaaaagctagcttctagaacctgagaaaagctcttttctcagaggagatactccttttgatatgttaatgattaagagtggttgcccaggcctagtttcagtggcagaataggattggaattaaaaagcagaactcatctggcttcagcagattgccaccaagaggatacaggtggtcaggtcctggctggctttgtctttgggcctgggcaggcttaggatttgactttctttgaagtacctgatgctgattgattccactaatagtaggaagcaagagacttaactatgagggacgttatgtgaatcttaagtcttaccagtccttgcattagtacattaaatttggatgttttggaagcaaattcatacgatcgtgagtgatttctccaaagaaaaaaagccttgtccagcctgaccaacatggtgaaaccccatctctactaaaaatacaaaaattaactgggtgcagtggtgcgcatgcctgtagtcccagctacttgggaggctgaggcaggagaattgcttgaaccctgggaggcagaggttgcagtgagtcgagatcgcgccactgcactccagcctcggtgacagagcaagactccatctcaaaaaaaacaaacaaacaaaaaaaaaccctgatgccattcccagtccccgttgtaggacatcacatttataaatccaggctttagtcttctgggctccaccagtctctgccccaccatattcctttgtcactacctctaagtttttttccccacttgaggatttggagttaaacgaactcaaaatgtcttgtcattgtatgtattcttgcccctgctttgaaaacagggccatgggaactctgtttatgccctgttttaatgtttctgttttatgttttactgttaatatgaaaataaagaatttgctatgtataatg

SEQ ID NO: 10283 - protein, 90 aa, Homo sapiens
MAHEAMEYDVQVQLNHAEQQPAPAGMASSQGGPALLQPVPADVVSSQGVPSILQDLQTDQPVLDICPFEVNRNSYLATLTEKMVHIYKWE

SEQ ID NO: 10284 - DNA, 4980 bp, Homo sapiens
ggcgggagcttgagcggctccggaagtggcagttggcgtaggtgcattcggagtgcggccgaggtaactaccgagtcttcggcgggctcgcgagcccggccgcggcctgctggtttcagtgatggctcatgaagcaatggaatatgatgttcaggtgcagttaaatcatgccgaacaacagccagctcctgctggcatggccagcagccaagggggaccagccctcctccagcctgttcctgctgatgtggtcagcagccagggggtaccatccatcctccagccagctcctgctgaggtgatcagcagccaagcgacaccacccctgctccagcctgctccgcaactgtctgttgacctgacagaagtggaggtcttgggagaagacactgtggagaacatcaatccaagaacttcagaacaacataggcagggatctgatggtaatcacaccatcccagcatcttcgttgcattcaatgaccaacttcatcagcggactgcagagacttcatggcatgctggaattcctgagaccttcatcttcaaaccacagtgtagggccaatgagaacaagaaggagggtatctgcttcacggagggcaagagccggagggtctcagaggacagacagtgccaggttgagagcaccattggatgcttactttcaggtgagcaggacccagcctgacttgccagctaccacttatgattcagagactaggaatcctgtatctgaagagttgcaggtgtctagtagttctgattctgacagtgacagctctgcagagtatggaggggttgttgaccaggcagaggaatctggagctgtcattttagaagagcaactagcaggtgtctcagcagagcaagaagttacatgtatcgatggaggcaagaccctccccaaacagccatctccccagaagtctgagcctctgctaccttctgcttctatggatgaggaagaaggggacacttgtacaatatgtctggaacagtggaccaatgctggggaccaccggctctcagcattacgctgtgggcatctctttgggtataggtgcatttccacgtggcttaaaggacaagtacgaaaatgtccccagtgcaacaagaaagccaggcacagtgacattgtcgtcctttatgcccgaaccctgagagctttggacactagtgaacaggagcgcatgaaaagttccctactgaaggaacagatgctaaggaaacaggccgagttagaatcagcacagtgccgactccaactgcaggtcctcactgataagtgcactaggcttcaaaggcgtgttcaggacttgcaaaaacttacgtcacatcaaagtcagaatttacagcaacccaggggctcccaagcatgggtcctgagctgctcaccctccagccagggccagcacaagcacaagtaccacttccaaaagaccttcacagtatctcaggcaggaaactgccggatcatggcatactgtgatgctctgagctgcctggtgatatcacagccttctcctcaggcctcttttcttccaggctttggtgttaagatgttgagtactgccaacatgaagagcagtcagtacattccgatgcatggcaaacagatccgtggactggcgtttagcagttacctcagaggcttgctactctctgcttccctagacaacactattaaactgaccagcctggagacaaataccgtggtccagacttataatgctggacgtcctgtctggagctgttgctggtgtcttgatgaggctaactacatctatgctggactggccaatggttcaattctggtatatgacgtgcgaaacacgagcagtcatgtgcaggagttagtagctcagaaagccagatgcccactggtctccctgtcatacatgcccagagctgcctcagctgcatttccatatggtggggtgctggctggaaccttggaggatgcttcattctgggaacagaaaatggacttttctcattggcctcatgtgctgcccttggagccagggggctgcatagactttcagacagagaacagctcccggcactgtcttgtgacctacaggcctgataaaaatcacaccaccatacgaagtgtgctgatggaaatgtcctaccgactggatgacactggaaatccaatctgctcctgccagcctgtacatacattttttggaggacctacttgcaaactattgaccaaaaatgccattttccaaagcccagagaatgatggcaacatcctggtgtgtactggggatgaagcagcaaattctgccctgctgtgggatgctgccagtggctcgttgctccaggacctacagaccgatcagcctgtgttggacatctgcccatttgaggtgaaccgtaacagctacttggctaccttaacagagaagatggtccacatctataagtgggagtgactgtggtctcgaaaccttgaaggcatgctgctggttagatgttgtttgctagcgcctagcagccccaagcaagatccctgtttattgtctgcagtctagaacattgggaatcatggtttgtttgcattagtatgattctaggaccctaggtcactgagacactacagattgtgtatctgttatgtccactaaaagagtaattgatgggtactttatctacattatccatttcttgggtttaaagccttcattaaccattattgtatgttggaaattcttattttctttattttctgtgtgactttctggaccttagagagtgtcctctcatcatctaggatgtgagtgggcatcaagcattttctggggaatatgacatcccatctgagttgtcctgtcacttaagtatccttgaagggactaaccatcgtcttggtactgatttgatgcaacgtagatgtaaaagagtattattcagttgaacacaagagggcactgtagaaccttgtgtccggtttatttctgaccttgaaggctgacaatcttttagtaacttgtctcatctccacacaagtgtgtgatagcacacctgggtgtgctttgtggcaataacacttgtgttccaggtgtgaagtgctgggacattggcaggcccagtgatggaagcagctagtgaacgattccctttgctaatgcctagtgcattaagttcattgctttgcgaaaggtaaggaaagaggccagttgtttgagcggtggggaagattttgttttttctagccagcttaggatctcaggattggttttatccaagctagtgctttgaagaacactatctcttgccaggaaaagatgagtgataggtcaaagcttttacttgagtctcccctagtgtcagagatcaggagaaaagacataagagaatttacaaaagctattcagactgctattgaaaacatgagaagaacttgtctcccattttgagagttcctatctaaataaagccaattcctcagactgaggggctgttcttaagtgttctttatacattccagttatccagttaaagccttccccatgtgaagctgatgtttgattccagtttcctttgatttgcctccctaaccttttctagggctcagtttgtatttctttgccttgcctcagactactttgccaacccacttccacaacagaatatgcttcaagatgtgggcaggtcagtgtcctgttcatgggagaaaatggcttaacagtctgattttctcaaatgattattgaagagttgttatcgtttttattataaaacacttctgacctgtcaattcaagagctgtttctaggatctttctctccggcaaggggttgttgcactagatttccccagagttccaagttctagttgtgccttttaatgaccctttaatattttaggacataattttttccttttttaaatttttttgtagaaatagatgtttcactacgttgtccaggctggtcttggactcctggcctcaagcaatcctcccacctcagcctcctaaagtgccaaaattataggcgtgagccactgcacccggcccctatttgaagacgtcttttgtaaaagctagcttctagaacctgagaaaagctcttttctcagaggagatactccttttgatatgttaatgattaagagtggttgcccaggcctagtttcagtggcagaataggattggaattaaaaagcagaactcatctggcttcagcagattgccaccaagaggatacaggtggtcaggtcctggctggctttgtctttgggcctgggcaggcttaggatttgactttctttgaagtacctgatgctgattgattccactaatagtaggaagcaagagacttaactatgagggacgttatgtgaatcttaagtcttaccagtccttgcattagtacattaaatttggatgttttggaagcaaattcatacgatcgtgagtgatttctccaaagaaaaaaagccttgtccagcctgaccaacatggtgaaaccccatctctactaaaaatacaaaaattaactgggtgcagtggtgcgcatgcctgtagtcccagctacttgggaggctgaggcaggagaattgcttgaaccctgggaggcagaggttgcagtgagtcgagatcgcgccactgcactccagcctcggtgacagagcaagactccatctcaaaaaaaacaaacaaacaaaaaaaaaccctgatgccattcccagtccccgttgtaggacatcacatttataaatccaggctttagtcttctgggctccaccagtctctgccccaccatattcctttgtcactacctctaagtttttttccccacttgaggatttggagttaaacgaactcaaaatgtcttgtcattgtatgtattcttgcccctgctttgaaaacagggccatgggaactctgtttatgccctgttttaatgtttctgttttatgttttactgttaatatgaaaataaagaatttgctatgtataatg

SEQ ID NO: 10285 - protein, 774 aa, Homo sapiens; identical to SEQ ID NO: 1599

SEQ ID NO: 10286 - DNA, 3462 bp, Homo sapiens
ggcgggagcttgagcggctccggaagtggcagttggcgtaggtgcattcggagtgcggccgaggtaactaccgagtcttcggcgggctcgcgagcccggccgcggcctgctggtttcagtgatggctcatgaagcaatggaatatgatgttcaggtgcagttaaatcatgccgaacaacagccagctcctgctggcatggccagcagccaagggggaccagccctcctccagcctgttcctgctgatgtggtcagcagccagggggtaccatccatcctccagccagctcctgctgaggtgatcagcagccaagcgacaccacccctgctccagcctgctccgcaactgtctgttgacctgacagaagtggaggtcttgggagaagacactgtggagaacatcaatccaagaacttcagaacaacataggcagggatctgatggtaatcacaccatcccagcatcttcgttgcattcaatgaccaacttcatcagcggactgcagagacttcatggcatgctggaattcctgagaccttcatcttcaaaccacagtgtagggccaatgagaacaagaaggagggtatctgcttcacggagggcaagagccggagggtctcagaggacagacagtgccaggttgagagcaccattggatgcttactttcaggtgagcaggacccagcctgacttgccagctaccacttatgattcagagactaggaatcctgtatctgaagagttgcaggtgtctagtagttctgattctgacagtgacagctctgcagagtatggaggggttgttgaccaggcagaggaatctggagctgtcattttagaagagcaactagcaggtgtctcagcagagcaagaagttacatgtatcgatggaggcaagaccctccccaaacagccatctccccagaagtctgagcctctgctaccttctgcttctatggatgaggaagaaggggacacttgtacaatatgtctggaacagtggaccaatgctggggaccaccggctctcagcattacgctgtgggcatctctttgggtataggtgcatttccacgtggcttaaaggacaagtacgaaaatgtccccagtgcaacaagaaagccaggcacagtgacattgtcgtcctttatgcccgaaccctgagagctttggacactagtgaacaggagcgcatgaaaagttccctactgaaggaacagatgctaaggaaacaggccgagttagaatcagcacagtgccgactccaactgcaggtcctcactgataagtgcactaggcttcaaaggcgtgttcaggacttgcaaaaacttacgtcacatcaaagtcagaatttacagcaacccaggggctcccaagcatgggtcctgagctgctcaccctccagccagggccagcacaagcacaagtaccacttccaaaagaccttcacagtatctcaggcaggaaactgccggatcatggcatactgtgatgctctgagctgcctggtgatatcacagccttctcctcaggcctcttttcttccaggctttggtgttaagatgttgagtactgccaacatgaagagcagtcagtacattccgatgcatggcaaacagatccgtggactggcgtttagcagttacctcagaggcttgctactctctgcttccctagacaacactattaaactgaccagcctggagacaaataccgtggtccagacttataatgctggacgtcctgtctggagctgttgctggtgtcttgatgaggctaactacatctatgctggactggccaatggttcaattctggtatatgacgtgcgaaacacgagcagtcatgtgcaggagttagtagctcagaaagccagatgcccactggtctccctgtcatacatgcccagagctgcctcagctgcatttccatatggtggggtgctggctggaaccttggaggatgcttcattctgggaacagaaaatggacttttctcattggcctcatgtgctgcccttggagccagggggctgcatagactttcagacagagaacagctcccggcactgtcttgtgacctacaggcctgataaaaatcacaccaccatacgaagtgtgctgatggaaatgtcctaccgactggatgacactggaaatccaatctgctcctgccagcctgtacatacattttttggaggacctacttgcaaactattgaccaaaaatgccattttccaaagcccagagaatgatggcaacatcctggtgtgtactggggatgaagcagcaaattctgccctgctgtgggatgctgccagtggctcgttgctccaggacctacagaccgatcagcctgtgttggacatctgcccatttgaggtgaaccgtaacagctacttggctaccttaacagagaagatggtccacatctataagtgggagtgactgtggtctcgaaaccttgaaggcatgctgctggttagatgttgtttgctagcgcctagcagccccaagcaagatccctgtttattgtctgcagtctagaacattgggaatcatggtttgtttgcattagtatgattctaggaccctaggtcactgagacactacagattgtgtatctgttatgtccactaaaagagtaattgatgggtactttatctacattatccatttcttgggtttaaagccttcattaaccattattgtatgttggaaattcttattttctttattttctgtgtgactttctggaccttagagagtgtcctctcatcatctaggatgtgagtgggcatcaagcattttctggggaatatgacatcccatctgagttgtcctgtcacttaagtatccttgaagggactaaccatcgtcttggtactgatttgatgcaacgtagatgtaaaagagtattattcagttgaacacaagagggcactgtagaaccttgtgtccggtttatttctgaccttgaaggctgacaatcttttagtaacttgtctcatctccacacaagtgtgtgatagcacacctgggtgtgctttgtggcaataacacttgtgttccaggtgtgaagtgctgggacattggcaggcccagtgatggaagcagctagtgaacgattccctttgctaatgcctagtgcattaagttcattgctttgcgaaaggtaaggaaagaggccagttgtttgagcggtggggaagattttgttttttctagccagcttaggatctcaggattggttttatccaagctagtgctttgaagaacactatctcttgccaggaaaagatgagtgataggtcaaagcttttacttgagtctcccctagtgtcagagatcaggagaaaagacataagagaatttacaaaagctattcagactgctattgaaaacatgagaagaacttgtctcccattttgagagttcctatctaaataaagccaattcctcag

SEQ ID NO: 10287 - protein, 774 aa, Homo sapiens; identical to SEQ ID NO: 1599

SEQ ID NO: 10288 - DNA, 907 bp, Homo sapiens
gaacaacataggcagggatctgatggtaatcacaccatcccagcatcttcgttgcattcaatgaccaacttcatcagcggactgcagagacttcatggcatgctggaattcctgagaccttcatcttcaaaccacagtgtagggccaatgagaacaagaaggagggtatctgcttcacggagggcaagagccggagggtctcagaggacagacagtgccaggtaaataaatatatggataagtctgtgatcattgctgtactagaaattatgaaactgaggctctgccattcaaggactgacagtgtgacttttggcaagtcaggtaacttctgacccccagttcctcataggtggaaataaaagtgcttgccttacttcacaaagtaatgaagggataagttaaactgttgtgccttgaaaactaggtggtagtttgttggcaatctctgtagagattggctgttgttcagattgtgtcttgtacaccaaaaattctttcttcacttgcaagtctctactcacccaaattcattattcactggcattccacctgggggcacaattaattaattttctttcatagtcttggtttgaacttgcctcttgaagggcttagctgtcaagtcttgacagggttattatgaagaataacaattgcctataccctgtccgttttttggttttttgtttttgtttttgagacagcgtctcactctgtcgtccaggtggagtgcagtggtgcaatcacagctcactgcagcctcgacctccccaggcttaggcgatcctcgatcctcctgcctcagcctacagagtagctgggactaaaggcacaagccgccacacccagctaattttttctgttttttgtagagatgttatttcattaaagtactgagattaca

SEQ ID NO: 10289 - protein, 54 aa, Homo sapiens
MTNFISGLQRLHGMLEFLRPSSSNHSVGPMRTRRRVSASRRARAGGSQRTDSAR

SEQ ID NO: 10290 - DNA, 848 bp, Homo sapiens
gaacaacataggcagggatctgatggtaatcacaccatcccagcatcttcgttgcattcaatgaccaacttcatcagcggactgcagagacttcatggcatgctggaattcctgagaccttcatcttcaaaccacagtgtagggccaatgagaacaagaaggagggtatctgcttcacggagggcaagagccggagggtctcagaggacagacagtgccaggtaaataaatatatggataagtctgtgatcattgctgtactagaaattatgaaactgaggctctgccattcaaggactgacagtgtgacttttggcaagtcaggtaacttctgacccccagttcctcataggtggaaataaaagtgcttgccttacttcacaaagtaatgaagggataagttaaactgttgtgccttgaaaactaggtggtagtttgttggcaatctctgtagagattggctgttgttcagattgtgtcttgtacaccaaaaattctttcttcacttgcaagtctctactcacccaaattcattattcactggcattccacctgggggcacaattaattaattttctttcatagtcttggtttgaacttgcctcttgaagggcttagctgtcaagtcttgacagggttattatgaagaataacaattgcctataccctgtccgttttttggttttttgtttttgtttttgagacagcgtctcactctgtcgtccaggctggagtacagtggtgtgatcatggctcactgcagcctcaacctccccgggctcaggtgatcctcgatcctcctgcctcagcctacagagtagctgggactaaaggcacaagccgccaca

SEQ ID NO: 10291 - protein, 54 aa, Homo sapiens; identical to SEQ ID NO: 10289

SEQ ID NO: 10292 - DNA, 1230 bp, Homo sapiens
gatcactgaaggagccgagttcgctgctgcggggcctgccctggccggggtgggaggtcgcccggcccttcccccgagagcctagcctcgggctcctcagcggcgttgcctgcgcccgctctgagcgccgattacttcatcactttaaagttgatggaagaacttcatttttaatttcatcacggaaactgtggagtaaagacttgtattatccctgttttacaggagaacaaacggagtcttactctctctcccggtctggagtgcagtggcgtgatctcggctcaatgtaacctccactctccgggttcaaggggttctcctgcctcagcctcccaagtagctaggaccacagtgatggctcatgaagcaatggaatatgatgttcaggtgcagttaaatcatgccgaacaacagccagctcctgctggcatggccagcagccaagggggaccagccctcctccagcctgttcctgctgatgtggtcagcagccagggggtaccatccatcctccagccagctcctgctgaggtgatcagcagccaagcgacaccacccctgctccagcctgctccgcaactgtctgttgacctgacagaagtggaggtcttgggagaagacactgtggagaacatcaatccaagaacttcagaacaacataggcagggatctgatggtaatcacaccatcccagcatcttcgttgcattcaatgaccaacttcatcagcggactgcagagacttcatggcatgctggaattcctgagaccttcatcttcaaaccacagtgtagggccaatgagaacaagaaggagggtatctgcttcacggagggcaagagccggagggtctcagaggacagacagtgccaggtaaataaatatatggataagtctgtgatcattgctgtactagaaattatgaaactgaggctctgccattcaaggactgacagtgtgacttttggcaagtcaggtaacttctgacccccagttcctcataggtggaaataaaagtgcttgccttacttcacaaagtaatgaagggataagttaaactgttgtgccttgaaaactaggtggtagtttgttggcaatctctgtagagattggctgttgttcagattgtgtcttgtacaccaaaaattctttcttcacttgcaagtctctactcacccaaattcattattcactggcattccacctgggggcacaattaattaatttt

SEQ ID NO: 10293 - protein, 173 aa, Homo sapiens [sequence omitted]

SEQ ID NO: 10294 - DNA, 1033 bp, Homo sapiens
aactaccgagtcttcggcgggctcgcgagcccggccgcggcctgctggtttcagagatgggaatttcactgtgttgcccaagctggtctggaacaccagagcacggagtcttactctctctcccggtctggagtgcagtggcgtgatctcggctcaattgatggctcatgaagcaatggaatatgatgttcaggtgcagttaaatcatgccgaacaacagccagctcctgctggcatggccagcagccaagggggaccagccctcctccagcctgttcctgctgatgtggtcagcagccagggggtaccatccatcctccagccagctcctgctgaggtgatcagcagccaagcgacaccacccctgctccagcctgctccgcaactgtctgttgacctgacagaagtggaggtcttgggagaagacactgtggagaacatcaatccaagaacttcagaacaacataggcagggatctgatggtaatcacaccatcccagcatcttcgttgcattcaatgaccaacttcatcagcggactgcagagacttcatggcatgctggaattcctgagaccttcatcttcaaaccacagtgtagggccaatgagaacaagaaggagggtatctgcttcacggagggcaagagccggagggtctcagaggacagacagtgccaggtaaataaatatatggataagtctgtgatcattgctgtactagaaattatgaaactgaggctctgccattcaaggactgacagtgtgacttttggcaagtcaggtaacttctgacccccagttcctcataggtggaaataaaagtgcttgccttacttcacaaagtaatgaagggataagttaaactgttgtgccttgaaaactaggtggtagtttgttggcaatctctgtagagattggctgttgttcagattgtgtcttgtacaccaaaaattctttcttcacttgcaagtctctactcacccaaattcattattcactggcattccacctgggggcacaattaattaatttt

SEQ ID NO: 10295 - protein, 173 aa, Homo sapiens [sequence omitted]

SEQ ID NO: 10296 - DNA, 954 bp, Homo sapiens
ggtgcattcggagtgcggccgaggtaactaccgagtcttcggcgggctcgcgagcccggccgcggcctgctggtttcagtgatggctcatgaagcaatggaatatgatgttcaggtgcagttaaatcatgccgaacaacagccagctcctgctggcatggccagcagccaagggggaccagccctcctccagcctgttcctgctgatgtggtcagcagccagggggtaccatccatcctccagccagctcctgctgaggtgatcagcagccaagcgacaccacccctgctccagcctgctccgcaactgtctgttgacctgacagaagtggaggtcttgggagaagacactgtggagaacatcaatccaagaacttcagaacaacataggcagggatctgatggtaatcacaccatcccagcatcttcgttgcattcaatgaccaacttcatcagcggactgcagagacttcatggcatgctggaattcctgagaccttcatcttcaaaccacagtgtagggccaatgagaacaagaaggagggtatctgcttcacggagggcaagagccggagggtctcagaggacagacagtgccaggtaaataaatatatggataagtctgtgatcattgctgtactagaaattatgaaactgaggctctgccattcaaggactgacagtgtgacttttggcaagtcaggtaacttctgacccccagttcctcataggtggaaataaaagtgcttgccttacttcacaaagtaatgaagggataagttaaactgttgtgccttgaaaactaggtggtagtttgttggcaatctctgtagagattggctgttgttcagattgtgtcttgtacaccaaaaattctttcttcacttgcaagtctctactcacccaaattcattattcactggcattccacctgggggcacaattaattaatttt

SEQ ID NO: 10297 - protein, 173 aa, Homo sapiens [sequence omitted]

SEQ ID NO: 10298 - DNA, 1092 bp, Homo sapiens
agtggcagttggcgtaggtgcattcggagtgcggccgaggtaactaccgagtcttcggcgggctcgcgagcccggccgcggcctgctggtttcagacggagtcttactctctctcccggtctggagtgcagtggcgtgatctcggctcaatgtaacctccactctccgggttcaaggggttctcctgcctcagcctcccaagtagctaggaccacagtgatggctcatgaagcaatggaatatgatgttcaggtgcagttaaatcatgccgaacaacagccagctcctgctggcatggccagcagccaagggggaccagccctcctccagcctgttcctgctgatgtggtcagcagccagggggtaccatccatcctccagccagctcctgctgaggtgatcagcagccaagcgacaccacccctgctccagcctgctccgcaactgtctgttgacctgacagaagtggaggtcttgggagaagacactgtggagaacatcaatccaagaacttcagaacaacataggcagggatctgatggtaatcacaccatcccagcatcttcgttgcattcaatgaccaacttcatcagcggactgcagagacttcatggcatgctggaattcctgagaccttcatcttcaaaccacagtgtagggccaatgagaacaagaaggagggtatctgcttcacggagggcaagagccggagggtctcagaggacagacagtgccaggtaaataaatatatggataagtctgtgatcattgctgtactagaaattatgaaactgaggctctgccattcaaggactgacagtgtgacttttggcaagtcaggtaacttctgacccccagttcctcataggtggaaataaaagtgcttgccttacttcacaaagtaatgaagggataagttaaactgttgtgccttgaaaactaggtggtagtttgttggcaatctctgtagagattggctgttgttcagattgtgtcttgtacaccaaaaattctttcttcacttgcaagtctctactcacccaaattcattattcactggcattccacctgggggcacaattaattaatttt

SEQ ID NO: 10299 - protein, 173 aa, Homo sapiens [sequence omitted]

SEQ ID NO: 10300 - DNA, 493 bp, Homo sapiens
gtaggtgcattcggagtgcggccgaggtaactaccgagtcttcggcgggctcgcgagcccggccgcggcctgctggtttcagacggagtcttactctctctcccggtctggagtgcagtggcgtgatctcggctcaatgtaacctccactctccgggttcaaggggttctcctgcctcagcctcccaagtagctaggaccacaggtgcacaccatcacggctggctaatttttttgtattttttgtagagacggggttttgccgtgttgcccaggctggtctccaactcctggtctccagctacctgcctcagtctcccaaagtgctgggattataggcgtgggccacagctcctggccgaatttgatttttatttaatttaaataaccatatgggagtagacagtgcggccccctagattctgctctttttagtccatttctcccctttgtcttcctgaaggctgagttgcttaatgtctcttgagtacatc

SEQ ID NO: 10301 - protein, 81 aa, Homo sapiens
RCIRSAAEVTTESSAGSRARPRPAGFRRSLTLSPGLECSGVISAQCNLHSPGSRGSPASASQVARTTGAHHHGWLIFLYFL

SEQ ID NO: 10302 - DNA, 2566 bp, Homo sapiens
aaataaataagaaaaatttgctacaaagcattcccatcagctgtttactgtgtagtcctgttacccccttgatcctgcccagaagcaatctaacaatcagcagtcatttttattttcatcatcagcaatgttactaagagccataggtgacagtctacctgtatcagatttccaggggaacagagctaagaagttcactggaagtcagattttcatacagaagaggaaaagattttgtgaactcagtgtccacaattcccaaatgctaaaagaattttagcagttttctttgtcatccatagacggttttctttcttccagtcctacgagtgtcagagacagccctcaaataatagcagacaggccttttttgcctttcagatgcctttccccctctgcgatggtgatataagtactcccaaaacactgtttctactactctcacgctcttcatgcagcctgactataagatgcgctattccacctttcatccctggtatcccatacggcgctagatgtaagagaatgtcagtgctcaggaaacgtgtgagcaaatgaatgaatgaatgaatgaaagggggatgagccatctaagtgccttatcccttttctcacattgcccctagatttgggtacctggctgagtttggggctggcagccttcagcacaccaatggtgtcaatggcaggtgtgcatgggacaagaacatatgctgtcatgattgtgctacagtttctttaagaacaccaggtgaccgcgcaggcctggggggatgactcacactcgtcacgccaaagccaaaggatcaggctgaccccccataaagtcagatagcacagaggggatgcccccatgccatttttccatctgcttctttgggaaaaggcgagccaggcagtggctctatgacccctctccactctcactgagtggagttcagtcctcaactgagaaacccctacattttaacatagtcatactggcaacaactacaacttagcaggtcttactggtgctttataaccattatctcaagtaatcccccctgtcatcgccccattttatacagaagaaatctctttgtgtttctcttggtcactgcactgtgataagttgaacccataatgttaaccaataaagtagccacacagacagaagtcacgacaggaaataaatccctaaggtaaaagacaattccctggcaattgtgtgtagcaacaatccctgccctttactcctctacccaagatcttgcttgtttctttctaagttgcctctctatctagcttgcaggatttgagttgaggaaaacacagacttccatgagtttgggaactacgagagaaaagacagacagagtcaaatctacagcatatctctcacctcaggaactggaagatgtattttatcaatatgatgtaaagtctgaaatatacagctttggaatcgtcctctgggaaatcgccactggagatatcccgtttcaaggtgaagaatgtgaagactggctcagccagtggtgaggttgggtccccttccagtagaccagaaattccccatcagtgctgcccctggcaatttgttgtttaatgtgggaactgcctgggctggtcagtggaatcgttggaagttcttgttgtttccatactcagagtccctagttctgatgccagccatcagcatccagagagatgtacgagtagcggagcaattttttgaggctctcatgctatcatttccaggctgtaattctgagaagatccgcaagctggtggctgtgaagcggcagcaggagccactgggtgaagactgcccttcagagctgcgggagatcattgatgagtgccgggcccatgatccctctgtgcggccctctgtggatgaaatcttaaagaaactctccaccttttctaagtagtgtatcaaaatctaaaccaaggagtctctggacaagaagctgggagaggcacaaactggacatctctctctctcatatccttcggcattgggttatctatgggtgcaaggagtgggcacgcttctctgttacaaatagaaaacgattccagtcatacaggacacatcccactccaaatgatatttccaaaaacatacctctgacagtaactttgatagatggtttgtcaaatgtatctttctgggtatccacacctcttggcaatgaaatttgcagctcctcccttccataaatgaagtctctttccccaccatttgaatctgggctggcactgtgacttgatttgatcaatagaatgtggaagaagtgactgtatgccagttccaagcctaggtttcaagaggccttataaatgtctgttggaaccttacccagccatgaacatgttgagtgagcatgctggagaatgagagaccacatgaagcagaaacatgctttcctagctgaagtcatactagcccaaccaacatggcagctaacacatgaatgaggccaatcaagaccagaagaaccactcaagcagatcccagcccaaattgcccattcacacaatcaggagctaaataaattactgttgtcttaacact

SEQ ID NO: 10303 - protein, 83 aa, Homo sapiens
MPAISIQRDVRVAEQFFEALMLSFPGCNSEKIRKLVAVKRQQEPLGEDCPSELREIIDECRAHDPSVRPSVDEILKKLSTFSK

SEQ ID NO: 10304 - DNA, 3979 bp, Homo sapiens
tgcccggccttgccttggttttagaactgagttcaattttagttttttagtttcagaactaacttcaactttctgtgtgcccaccacacaacagtctccatctatgccgcctgttctgatgactgccttccctcactgcccatttagcagggatgggctacaagtcatttccccttagatgcctggacaccacttctatgtccctacaacatacaatgggggatcttgttaggtttaaggactcagactcacaggacaggtctaggccacacttgtcattcagttacttagaaggatgtcagcagcgccaaacctttccctccagggtgagtcctcgcagtcatccaggagatactctctttgtcagagccacaggtgctggagaaagaggctcccattaggtgggtgtgggtcatccaggcttagaagcccatgacctgcaggagtcagcatctctggtaacaactctgcaggcatgccttccagtgtttctgcaagtgacatgtgagttgctgttttaagagctgccacatctgggtatggtggctcacgcctgtaatcccaacacttagggaggctaaggcgggtggatcacctgaggtcaggagttcaagactagcctggccaacatagtgaaacactgtctctactaaaaatacaaaaaattagccgggtgtggtggcgcacgcctctagtcccagctcctaaggaggctgaggcaggagaatcacttgaacccgggaggcagaggtttgcagtgagccgagatcgcgtggttgaactccagcccgggcaacaacagcaaaactccatctccaaaaaaaaagaaaaaagaaaagaaaagagctgctacatggccaggcatggtggcttatgcctgtaatccccgcactttggaagggaaggcaggaggatcactttgagcccaagagttcaagaccagccttggcaacacagtgagacctccccctcttcaaaaaatttaaaaatcagccagtcatggtggtgcacacctgtaattccagctactcaggagagtgaggcaggaggaggatgcctagagcccaggaggtcaaggctgcagggagctatgtttacgccactgtataccctagcctgggcaacagaatgagaccctgtctcaaaaaataaaaaagaggctgggcgcggtggctcacacctgtaatcccagcactttgggaggccaaggcaggtggatcatgaggttaggagatcgagaccatcctggctaacacagtgaaaccctgtctctactaaacaatacaaaaaattggccaggcgtggtggcaggtgcctgtagtcccagctactccggaggctgaggcaggagaatggcatgaacccaggaggcagaacttgcagtgagctgagattgcaccactgctctccaacctgggcgacagagtgagactccgtctcaaaaaataaataaataaataaataaataagaaaaatttgctacaaagcattcccatcagctgtttactgtgtagtcctgttacccccttgatcctgcccagaagcaatctaacaatcagcagtcatttttattttcatcatcagcaatgttactaagagccataggtgacagtctacctgtatcagatttccaggggaacagagctaagaagttcactggaagtcagattttcatacagaagaggaaaagattttgtgaactcagtgtccacaattcccaaatgctaaaagaattttagcagttttctttgtcatccatagacggttttctttcttccagtcctacgagtgtcagagacagccctcaaataatagcagacaggccttttttgcctttcagatgcctttccccctctgcgatggtgatataagtactcccaaaacactgtttctactactctcacgctcttcatgcagcctgactataagatgcgctattccacctttcatccctggtatcccatacggcgctagatgtaagagaatgtcagtgctcaggaaacgtgtgagcaaatgaatgaatgaatgaatgaaagggggatgagccatctaagtgccttatcccttttctcacattgcccctagatttgggtacctggctgagtttggggctggcagccttcagcacaccaatggtgtcaatggcaggtgtgcatgggacaagaacatatgctgtcatgattgtgctacagtttctttaagaacaccaggtgaccgcgcaggcctggggggatgactcacactcgtcacgccaaagccaaaggatcaggctgaccccccataaagtcagatagcacagaggggatgcccccatgccatttttccatctgcttctttgggaaaaggcgagccaggcagtggctctatgacccctctccactctcactgagtggagttcagtcctcaactgagaaacccctacattttaacatagtcatactggcaacaactacaacttagcaggtcttactggtgctttataaccattatctcaagtaatcccccctgtcatcgccccattttatacagaagaaatctctttgtgtttctcttggtcactgcactgtgataagttgaacccataatgttaaccaataaagtagccacacagacagaagtcacgacaggaaataaatccctaaggtaaaagacaattccctggcaattgtgtgtagcaacaatccctgccctttactcctctacccaagatcttgcttgtttctttctaagttgcctctctatctagcttgcaggatttgagttgaggaaaacacagacttccatgagtttgggaactacgagagaaaagacagacagagtcaaatctacagcatatctctcacctcaggaactggaagatgtattttatcaatatgatgtaaagtctgaaatatacaggtacactcacgttctggtacagattctaactcagatgtgcataataggaaaacccaaatcaaactcctccaaggaccacctaaactcaactctgttgaatgaaattgggtagtaatcaaaaaattcactgagttttctggcagtggctagagggacaggggaaaggggagactagttatggttgttcagtttcttggttttcttttagctttggaatcgtcctctgggaaatcgccactggagatatcccgtttcaaggctgtaattctgagaagatccgcaagctggtggctgtgaagcggcagcaggagccactgggtgaagactgcccttcagagctgcgggagatcattgatgagtgccgggcccatgatccctctgtgcggccctctgtggatgaaatcttaaagaaactctccaccttttctaagtagtgtatcaaaatctaaaccaaggagtctctggacaagaagctgggagaggcacaaactggacatctctctctctcatatccttcggcattgggttatctatgggtgcaaggagtgggcacgcttctctgttacaaatagaaaacgattccagtcatacaggacacatcccactccaaatgatatttccaaaaacatacctctgacagtaactttgatagatggtttgtcaaatgtatctttctgggtatccacacctcttggcaatgaaatttgcagctcctcccttccataaatgaagtctctttccccaccatttgaatctgggctggcactgtgacttgatttgatcaatagaatgtggaagaagtgactgtatgccagttccaagcctaggtttcaagaggccttataaatgtctgttggaaccttacccagccatgaacatgttgagtgagcatgctggagaatgagagaccacatgaagcagaaacatgctttcctagctgaagtcatactagcccaaccaacatggcagctaacacatgaatgaggccaatcaagaccagaagaaccactcaagcagatcccagcccaaattgcccattcacacaatcaggagctaaataaattactgttgtcttaacact

SEQ ID NO: 10305 - protein, 39 aa, Homo sapiens
MVVQFLGFLLALESSSGKSPLEISRFKAVILRRSASWWL

SEQ ID NO: 10306 - DNA, 923 bp, Homo sapiens
gaaaaatcagaagctcaaacttcctggtaactcaaggctaccaagtgaagctttggaatcgtcctctgggaaatcgccactggagatatcccgtttcaaggctgtaattctgagaagatccgcaagctggtggctgtgaagcggcagcaggagccactgggtgaagactgcccttcagagctgcgggagatcattgatgagtgccgggcccatgatccctctgtgcggccctctgtggatgaaatcttaaagaaactctccaccttttctaagtagtgtatcaaaatctaaaccaaggagtctctggacaagaagctgggagaggcacaaactggacatctctctctctcatatccttcggcattgggttatctatgggtgcaaggagtgggcacgcttctctgttacaaatagaaaacgattccagtcatacaggacacatcccactccaaatgatatttccaaaaacatacctctgacagtaactttgatagatggtttgtcaaatgtatctttctgggtatccacacctcttggcaatgaaatttgcagctcctcccttccataaatgaagtctctttccccaccatttgaatctgggctggcactgtgacttgatttgatcaatagaatgtggaagaagtgactgtatgccagttccaagcctaggtttcaagaggccttataaatgtctgttggaaccttacccagccatgaacatgttgagtgagcatgctggagaatgagagaccacatgaagcagaaacatgctttcctagctgaagtcatactagcccaaccaacatggcagctaacacatgaatgaggccaatcaagaccagaagaaccactcaagcagatcccagcccaaattgcccattcacacaatcaggagctaaataaattactgttgtcttaacact

SEQ ID NO: 10307 - protein, 34 aa, Homo sapiens
MGARSGHASLLQIENDSSHTGHIPLQMIFPKTYL

SEQ ID NO: 10308 - DNA, 2106 bp, Homo sapiens
aatattatccagcacagagaagcaaacaccagaagcttctctccaactttcagtttttctctaaacttccagtccttctcatactgtgtcctggttataatagttgctgggaccttattctattctgaatccccagcccctaaagaaggcttggtactgacgtgtacagcgtagttacccagtgactttggggaaggcaggaagagtgtggaaaggacaggaggaaggaagggaggggccgtggctccgagctgcctagaaagcggctccagggagccagggcaccgtgagcctggtggttggcagctggagccacgtcggagggggaagtgtcgcagcattctctgcaggcatcacagacctgaggcagtggcctccggagggcactggacagaaacagccatccaagtggctgagtggagggaccctgctcaagtgcagctgcagtggccggggtttccctcaggtagggatcggggcgccttgtcgccgccagccacgtgtggcgtccggtacagtcagcagagtgcagggtgcgggcaccaggaaagggggcgcaggggaactcccgcgggcctcgcgtttgcaaacttctcgcctgggcaggaggcggtcgtgggaaagaaggtggaagagcgagctttttggaactgtgcacgggacagattggacgcacacccctcgggaggcgcgaaggcatggaaaatttgaagcatattatcacccttggccaggtcatccacaaacggtgtgaagagatgaaatactgcaagaaacagtgccggcgcctgggccaccgcgtcctcggcctgatcaagcctctggagatgctccaggaccaaggaaagaggagcgtgccctctgagaagttaaccacagccatgaaccgcttcaaggctgccctggaggaggctaatggggagatagaaaagttcagcaatagatccaatatctgcaggtttctaacagcaagccaggacaaaatactcttcaaggacgtgaacaggaagctgagtgatgtctggaaggagctctcgctgttacttcaggttgagcaacgcatgcctgtttcacccataagccaaggagcgtcctgggcacaggaagatcagcaggatgcagacgaagacaggcgagctttccagatgctaagaagagataatgaaaaaatagaagcttcactgagacgattagaaatcaacatgaaagaaatcaaggaaactttgaggcagtctttggaatcgtcctctgggaaatcgccactggagatatcccgtttcaaggctgtaattctgagaagatccgcaagctggtggctgtgaagcggcagcaggagccactgggtgaagactgcccttcagagctgcgggagatcattgatgagtgccgggcccatgatccctctgtgcggccctctgtggatgaaatcttaaagaaactctccaccttttctaagtagtgtatcaaaatctaaaccaaggagtctctggacaagaagctgggagaggcacaaactggacatctctctctctcatatccttcggcattgggttatctatgggtgcaaggagtgggcacgcttctctgttacaaatagaaaacgattccagtcatacaggacacatcccactccaaatgatatttccaaaaacatacctctgacagtaactttgatagatggtttgtcaaatgtatctttctgggtatccacacctcttggcaatgaaatttgcagctcctcccttccataaatgaagtctctttccccaccatttgaatctgggctggcactgtgacttgatttgatcaatagaatgtggaagaagtgactgtatgccagttccaagcctaggtttcaagaggccttataaatgtctgttggaaccttacccagccatgaacatgttgagtgagcatgctggagaatgagagaccacatgaagcagaaacatgctttcctagctgaagtcatactagcccaaccaacatggcagctaacacatgaatgaggccaatcaagaccagaagaaccactcaagcagatcccagcccaaattgcccattcacacaatcaggagctaaataaattactgttgtcttaacact

SEQ ID NO: 10309 - protein, 207 aa, Homo sapiens
MENLKHIITLGQVIHKRCEEMKYCKKQCRRLGHRVLGLIKPLEMLQDQGKRSVPSEKLTTAMNRFKAALEEANGEIEKFSNRSNICRFLTASQDKILFKDVNRKLSDVWKELSLLLQVEQRMPVSPISQGASWAQEDQQDADEDRRAFQMLRRDNEKIEASLRRLEINMKEIKETLRQSLESSSGKSPLEISRFKAVILRRSASWWL

SEQ ID NO: 10310 - DNA, 2761 bp, Homo sapiens
aatattatccagcacagagaagcaaacaccagaagcttctctccaactttcagtttttctctaaacttccagtccttctcatactgtgtcctggttataatagttgctgggaccttattctattctgaatccccagcccctaaagaaggcttggtactgacgtgtacagcgtagttacccagtgactttggggaaggcaggaagagtgtggaaaggacaggaggaaggaagggaggggccgtggctccgagctgcctagaaagcggctccagggagccagggcaccgtgagcctggtggttggcagctggagccacgtcggagggggaagtgtcgcagcattctctgcaggcatcacagacctgaggcagtggcctccggagggcactggacagaaacagccatccaagtggctgagtggagggaccctgctcaagtgcagctgcagtggccggggtttccctcaggtagggatcggggcgccttgtcgccgccagccacgtgtggcgtccggtacagtcagcagagtgcagggtgcgggcaccaggaaagggggcgcaggggaactcccgcgggcctcgcgtttgcaaacttctcgcctgggcaggaggcggtcgtgggaaagaaggtggaagagcgagctttttggaactgtgcacgggacagattggacgcacacccctcgggaggcgcgaaggcatggaaaatttgaagcatattatcacccttggccaggtcatccacaaacggtgtgaagagatgaaatactgcaagaaacagtgccggcgcctgggccaccgcgtcctcggcctgatcaagcctctggagatgctccaggaccaaggaaagaggagcgtgccctctgagaagttaaccacagccatgaaccgcttcaaggctgccctggaggaggctaatggggagatagaaaagttcagcaatagatccaatatctgcaggtttctaacagcaagccaggacaaaatactcttcaaggacgtgaacaggaagctgagtgatgtctggaaggagctctcgctgttacttcaggttgagcaacgcatgcctgtttcacccataagccaaggagcgtcctgggcacaggaagatcagcaggatgcagacgaagacaggcgagctttccagatgctaagaagagataatgaaaaaatagaagcttcactgagacgattagaaatcaacatgaaagaaatcaaggaaactttgaggcagtatttaccaccaaaatgcatgcaggagatcccgcaagagcaaatcaaggagatcaagaaggagcagctttcaggatccccgtggattctgctaagggaaaatgaagtcagcacactttataaaggagaataccacagagctccagtggccataaaagtattcaaaaaactccaggctggcagcattgcaatagtgaggcagactttcaataaggagatcaaaaccatgaagaaattcgaatctcccaacatcctgcgtatatttgggatttgcattgatgaaacagtgactccgcctcaattctccattgtcatggagtactgtgaactcgggaccctgagggagctgttggatagggaaaaagacctcacacttggcaagcgcatggtcctagtcctgggggcagcccgaggcctataccggctacaccattcagaagcacctgaactccacggaaaaatcagaagctcaaacttcctggtaactcaaggctaccaagtgaagcttgcaggatttgagttgaggaaaacacagacttccatgagtttgggaactacgagagaaaagacagacagagtcaaatctacagcatatctctcacctcaggaactggaagatgtattttatcaatatgatgtaaagtctgaaatatacagctttggaatcgtcctctgggaaatcgccactggagatatcccgtttcaaggctgtaattctgagaagatccgcaagctggtggctgtgaagcggcagcaggagccactgggtgaagactgcccttcagagctgcgggagatcattgatgagtgccgggcccatgatccctctgtgcggccctctgtggatgaaatcttaaagaaactctccaccttttctaagtagtgtatcaaaatctaaaccaaggagtctctggacaagaagctgggagaggcacaaactggacatctctctctctcatatccttcggcattgggttatctatgggtgcaaggagtgggcacgcttctctgttacaaatagaaaacgattccagtcatacaggacacatcccactccaaatgatatttccaaaaacatacctctgacagtaactttgatagatggtttgtcaaatgtatctttctgggtatccacacctcttggcaatgaaatttgcagctcctcccttccataaatgaagtctctttccccaccatttgaatctgggctggcactgtgacttgatttgatcaatagaatgtggaagaagtgactgtatgccagttccaagcctaggtttcaagaggccttataaatgtctgttggaaccttacccagccatgaacatgttgagtgagcatgctggagaatgagagaccacatgaagcagaaacatgctttcctagctgaagtcatactagcccaaccaacatggcagctaacacatgaatgaggccaatcaagaccagaagaaccactcaagcagatcccagcccaaattgcccattcacacaatcaggagctaaataaattactgttgtcttaacact

SEQ ID NO: 10311 - protein, 471 aa, Homo sapiens; identical to SEQ ID NO: 1602

SEQ ID NO: 10312 - DNA, 254 bp, Homo sapiens
atggttgttcagtttcttggttttcttttagctttggaatcgtcctctgggaaatcgccactggagatatcccgtttcaaggctgtaattctgagaagatccgcaagctggtggctgtgaagcggcagcaggagccactgggtgaagactgcccttcagagctgcgggagatcattgatgagtgccgggcccatgatccctctgtgcggccctctgtggatgagcagaagcgcagacttaatgatgtgttctga

SEQ ID NO: 10313 - protein, 39 aa, Homo sapiens; identical to SEQ ID NO: 10305

SEQ ID NO: 10314 - DNA, 1233 bp, Homo sapiens
aatattatccagcacagagaagcaaacaccagaagcttctctccaactttcagtttttctctaaacttccagtccttctcatactgtgtcctggttataatagttgctgggaccttattctattctgaatccccagcccctaaagaaggcttggtactgacgtgtacagcgtagttacccagtgactttggggaaggcaggaagagtgtggaaaggacaggaggaaggaagggaggggccgtggctccgagctgcctagaaagcggctccagggagccagggcaccgtgagcctggtggttggcagctggagccacgtcggagggggaagtgtcgcagcattctctgcaggcatcacagacctgaggcagtggcctccggagggcactggacagaaacagccatccaagtggctgagtggagggaccctgctcaagtgcagctgcagtggccggggtttccctcaggtagggatcggggcgccttgtcgccgccagccacgtgtggcgtccggtacagtcagcagagtgcagggtgcgggcaccaggaaagggggcgcaggggaactcccgcgggcctcgcgtttgcaaacttctcgcctgggcaggaggcggtcgtgggaaagaaggtggaagagcgagctttttggaactgtgcacgggacagattggacgcacacccctcgggaggcgcgaaggcatggaaaatttgaagcatattatcacccttggccaggtcatccacaaacggtgtgaagagatgaaatactgcaagaaacagtgccggcgcctgggccaccgcgtcctcggcctgatcaagcctctggagatgctccaggaccaaggaaagaggagcgtgccctctgagaagttaaccacagccatgaaccgcttcaaggctgccctggaggaggctaatggggagatagaaaagttcagcaatagatccaatatctgcaggtttctaacagcaagccaggacaaaatactcttcaaggacgtgaacaggaagctgagtgatgtctggaaggagctctcgctgttacttcaggttgagcaacgcatgcctgtttcacccataagccaaggagcgtcctgggcacaggaagatcagcaggatgcagacgaagacaggcgagctttccagatgctaagaagagataatgaaaaaatagaagcttcactgagacgattagaaatcaacatgaaagaaatcaaggaaactttgaggcagt

SEQ ID NO: 10315 - protein, 177 aa, Homo sapiens
MENLKHIITLGQVIHKRCEEMKYCKKQCRRLGHRVLGLIKPLEMLQDQGKRSVPSEKLTTAMNRFKAALEEANGEIEKFSNRSNICRFLTASQDKILFKDVNRKLSDVWKELSLLLQVEQRMPVSPISQGASWAQEDQQDADEDRRAFQMLRRDNEKIEASLRRLEINMKEIKETLR

SEQ ID NO: 10316 - DNA, 1112 bp, Homo sapiens
aatattatccagcacagagaagcaaacaccagaagcttctctccaactttcagtttttctctaaacttccagtccttctcatactgtgtcctggttataatagttgctgggaccttattctattctgaatccccagcccctaaagaaggcttggtactgacgtgtacagcgtagttacccagtgactttggggaaggcaggaagagtgtggaaaggacaggaggaaggaagggaggggccgtggctccgagctgcctagaaagcggctccagggagccagggcaccgtgagcctggtggttggcagctggagccacgtcggagggggaagtgtcgcagcattctctgcaggcatcacagacctgaggcagtggcctccggagggcactggacagaaacagccatccaagtggctgagtggagggaccctgctcaagtgcagctgcagtggccggggtttccctcaggtagggatcggggcgccttgtcgccgccagccacgtgtggcgtccggtacagtcagcagagtgcagggtgcgggcaccaggaaagggggcgcaggggaactcccgcgggcctcgcgtttgcaaacttctcgcctgggcaggaggcggtcgtgggaaagaaggtggaagagcgagctttttggaactgtgcacgggacagattggacgcacacccctcgggaggcgcgaaggtcatccacaaacggtgtgaagagatgaaatactgcaagaaacagtgccggcgcctgggccaccgcgtcctcggcctgatcaagcctctggagatgctccaggaccaaggaaagaggagcgtgccctctgagaagttaaccacagccatgaaccgcttcaaggctgccctggaggaggctaatggggagatagaaaagttcagcaatagatccaatatctgcaggtttctaacagcaagccaggacaaaatactcttcaaggacgtgaacaggaagctgagtgatgtctggaaggagctctcgctgttacttcaggttgagcaacgcatgcctgtttcacccataagccaaggagcgtcctgggcacaggaagatcagcaggatgcagacgaagacaggcgagctttccagatgct

SEQ ID NO: 10317 - protein, 129 aa, Homo sapiens
MKYCKKQCRRLGHRVLGLIKPLEMLQDQGKRSVPSEKLTTAMNRFKAALEEANGEIEKFSNRSNICRFLTASQDKILFKDVNRKLSDVWKELSLLLQVEQRMPVSPISQGASWAQEDQQDADEDRRAFQ

SEQ ID NO: 10318 - DNA, 556 bp, Homo sapiens
atgcaatttcaggattgctccaggaaatagcctgttgagaattcagtgctaggagaaagctgtgctttccaaatgaatcctatgccttctaaaaagacatccatatgatccacattttctttctttgccttagctgccagggagctagcagttaaattaggtggctcacagcaatcattagctcttctctattttctctacaaatgtatctgcaatatttttttttccagagtaaggtctttctcccagtggagaaatcacttgggccacttctgcatctagagtgtcagacccaagctaggaaaaagaatcatctttaaaagtatgtcatcagcactcaagacctttaatgagccagcggaattggtctcctggtcctctcctcactccacagagactgaaaactatgtcagttcatcgccacgcaatatatatcaaggactaccatgagtcagagactctgccagcactgggcaaagaaggaagaaggccttgtctgggacatcatggtgcttaaagtctagagaagtgtccagagaagtcaacaagtgggaag

SEQ ID NO: 10319 - protein, 55 aa, Homo sapiens
MSQRNWSPGPLLTPQRLKTMSVHRHAIYIKDYHESETLPALGKEGRRPCLGHHGA

SEQ ID NO: 10320 - DNA, 566 bp, Homo sapiens
attgctccaggaaatagcctgttgagaattcagtgctaggagaaagctgtgctttccaaatgaatcctatgccttctaaaaagacatccatatgatccacattttctttctttgccttagctgccagggagctagcagttaaattaggtggctcacagcaatcattagctcttctctattttctctacaaatgtatctgcaatatttttttttccagagtaaggtctttctcccagtggagaaatcacttgggccacttctgcatctagagtgtcagacccaagctaggaaaaagaatcatctttaaaagtatgtcatcagcactcaagacctttaatgagccagcggaattggtctcctggtcctctcctcactccacagagactgaaaacgaaccagacagaggacgagagtccgcatgctgaaccacttaaattcacatggcggctaagaagacaagagtttcggcaggcatagaggctaagagagttaagagcatcctccgtgcctagtacagtccccagctgcatcataaacagatgaaatgaaaaagttttttctcccaa

SEQ ID NO: 10321 - protein, 46 aa, Homo sapiens
MSQRNWSPGPLLTPQRLKTNQTEDESPHAEPLKFTWRLRRQEFRQA

SEQ ID NO: 10322 - DNA, 874 bp, Homo sapiens
atcagcctctacccaatgctttcgtgatgctgctgctgatctatttgggaagttggctggctggcgaggcagagcctctcctcaaagcctggctcccacggaaaatatgctcagtgcagccgcgtgcatgaatgaaaacgccgccgggcgcttctagtcggacaaaatgcagccgagaactccgctcgttctgtgcgttctcctgtcccaggtgctgctgctaacatctgcagaagatttggactgcactcctggatttcagcagaaagtgttccatatcaatcagccagctgaattcattgaggaccagtcaattctaaacttgaccttcagtgactgtaagggaaacgacaagctacgctatgaggtctcgagcccatacttcaaggtgaacagcgatggcggcttagttgctctgagaaacataactgcagtgggcaaaactctgttcgtccatgcacggaccccccatgcggaagatatggcagaactcgtgattgtcggggggaaagacatccagggctccttgcaggatatatttaaatttgcaagaacttctcctgtcccaagacaaaagaggtccattgtggtatctcccattttaattccagagaatcagagacagcctttcccaagagatgttggcaagagaacccacaatcctattaacagcgaacttctcttgaatgaaggcattacagcagatttaaatccatgcattacaattttagcaatttaatgaacatcctatttggcgacattattgctttaaaggaataaatcacaaacattttacttcccactagcactcggtatttcaaatccattttctctacagaatgatgtgtttaaataaattgtcctgttgactgaa

SEQ ID NO: 10323 - protein, 190 aa, Homo sapiens
MQPRTPLVLCVLLSQVLLLTSAEDLDCTPGFQQKVFHINQPAEFIEDQSILNLTFSDCKGNDKLRYEVSSPYFKVNSDGGLVALRNITAVGKTLFVHARTPHAEDMAELVIVGGKDIQGSLQDIFKFARTSPVPRQKRSIVVSPILIPENQRQPFPRDVGKRTHNPINSELLLNEGITADLNPCITILAI

SEQ ID NO: 10324 - DNA, 3886 bp, Homo sapiens
atcagcctctacccaatgctttcgtgatgctgctgctgatctatttgggaagttggctggctggcgaggcagagcctctcctcaaagcctggctcccacggaaaatatgctcagtgcagccgcgtgcatgaatgaaaacgccgccgggcgcttctagtcggacaaaatgcagccgagaactccgctcgttctgtgcgttctcctgtcccaggtgctgctgctaacatctgcagaagatttggactgcactcctggatttcagcagaaagtgttccatatcaatcagccagctgaattcattgaggaccagtcaattctaaacttgaccttcagtgactgtaagggaaacgacaagctacgctatgaggtctcgagcccatacttcaaggtgaacagcgatggcggcttagttgctctgagaaacataactgcagtgggcaaaactctgttcgtccatgcacggaccccccatgcggaagatatggcagaactcgtgattgtcggggggaaagacatccagggctccttgcaggatatatttaaatttgcaagaacttctcctgtcccaagacaaaagaggtccattgtggtatctcccattttaattccagagaatcagagacagcctttcccaagagatgttggcaaggtagtcgatagtgacaggccagaaaggtccaagttccggctcactggaaagggagtggatcaagagcctaaaggaattttcagaatcaatgagaacacagggagcgtctccgtgacacggaccttggacagagaagtaatcgctgtttatcaactatttgtggagaccactgatgtcaatggcaaaactctcgaggggccggtgcctctggaagtcattgtgattgatcagaatgacaaccgaccgatctttcgggaaggcccctacatcggccacgtcatggaagggtcacccacaggcaccacagtgatgcggatgacagcctttgatgcagatgacccagccaccgataatgccctcctgcggtataatatccgtcagcagacgcctgacaagccatctcccaacatgttctacatcgatcctgagaaaggagacattgtcactgttgtgtcacctgcgctgctggaccgagagactctggaaaatcccaagtatgaactgatcatcgaggctcaagatatggctggactggatgttggattaacaggcacggccacagccacgatcatgatcgatgacaaaaatgatcactcaccaaaattcaccaagaaagagtttcaagccacagtcgaggaaggagctgtgggagttattgtcaatttgacagttgaagataaggatgaccccaccacaggtgcatggagggctgcctacaccatcatcaacggaaaccccgggcagagctttgaaatccacaccaaccctcaaaccaacgaagggatgctttctgttgtcaaaccattggactatgaaatttctgccttccacaccctgctgatcaaagtggaaaatgaagacccactcgtacccgacgtctcctacggccccagctccacagccaccgtccacatcactgtcctggatgtcaacgagggcccagtcttctacccagaccccatgatggtgaccaggcaggaggacctctctgtgggcagcgtgctgctgacagtgaatgccacggaccccgactccctgcagcatcaaaccatcaggtattctgtttacaaggacccagcaggttggctgaatattaaccccatcaatgggactgttgacaccacagctgtgctggaccgtgagtccccatttgtcgacaacagcgtgtacactgctctcttcctggcaattgacagtggcaaccctcccgctacgggcactgggactttgctgataaccctggaggacgtgaatgacaatgccccgttcatttaccccacagtagctgaagtctgtgatgatgccaaaaacctcagtgtagtcattttgggagcatcagataaggatcttcacccgaatacagatcctttcaaatttgaaatccacaaacaagctgttcctgataaagtctggaagatctccaagatcaacaatacacacgccctggtaagccttcttcaaaatctgaacaaagcaaactacaacctgcccatcatggtgacagattcagggaaaccacccatgacgaatatcacagatctcagggtacaagtgtgctcctgcaggaattccaaagtggactgcaacgcggcaggggccctgcgcttcagcctgccctcagtcctgctcctcagcctcttcagcttagcttgtctgtgagaactcctgacgtctgaagcttgactcccaagtttccatagcaacaggaaaaaaaaaaatctatccaaatctgaagattgcggtttacagctatcgaacttcacaactaggcctcaattgttccggttttttattttctttacaatttcacttagtctgtacttcatcattttgacagcatcttcctccctcctttaattaatggaatcttctgaattttccctgaatgtttaaagatcatgacatatgacttgatcttctgggagcaggaacaatgactactttttctggtgtgttaacatgtcgctagccagtgctccaggcacccagctttgtctgtgggttagtattggtgtatgtatgagtatctgtatgtatatatacacggtatttatagagagagactatcctggagaagcctcgttttgatgccattcttccttgcaaggttaagcaaggtgggtggaaactaagacacctgaaccctccagggcctcccgcatcaaggtcagcatgaggacagaccacagagctgtcacttttgctccgaagctacttctccactgtcccgttcagtctgaatgctgccacaaccagccaggcaggtccacagagagggagagcagagaaagaagtcctttctctttattgagttcgaggactacaaccaatttacactgccatctgatgccgtgatcctgagccaaggaggtgaggagcagagcaggcaatttcaccaccaaatgccaagaaaagggctgacattttctttcatgggcaccaacctgcatttgtatgtgtcccgaatccacagtcgtactgattctaatggggacacagatcatggtagagaatctctccctcctcagtaaatgtacaactgcacctgtcatcatggaggtcatacatgcatacaaagaggtgtacaggtaccatcttgtatacacatatatacccacatgtacagacatacatttatgcacattcacgctgtttgtttcatatatacaggcataaaatagagtaaatacaggtagttttaaaagtacccttttgtgtgaattgactaccgttgtttgcaaacccgaaaataaaagacgttcattatgtatgaaaagtaactgatttgtattctgtgagcatgtaaaagcggaaagttagtgcttgttctaagattaccttcttgttgataaaccataaatgaatcatcaaagctcacaccaaatttttctatcaaataaaactagtgacagcttgtggctttttattagagctcgccacgaactagggtaaggtgagtgtcttagcatattttaatgcagttgcttactaaaggttttaaccgcacatgcacacacacacgctttcttatgcaatctatgtttgcacttgtgctttcagttagccttctgtaggaagtagaagtcatatgttgtctttgttgtagtgaaattatacagatagagttccatatattgtatttgtttcaatggtaaatccttttggaacatatagaatgcagagatttttttttccattaaaataaatgggtattggtggttaaaactgctggacagt

SEQ ID NO: 10325 - protein, 713 aa, Homo sapiens; identical to SEQ ID NO: 1604

SEQ ID NO: 10326 - DNA, 3388 bp, Homo sapiens
aaccgggtccggcccaggaggcttgggcgcgcgcagccatcccgggcctcgccggggacctagggacgcaggcaacgcctgcgcccgctcaccatggtcgagggacgcgtctccgagttcctgaagaaactcggcttctcgggcgggggccgccagtaccaggcgctggagaaggacgaagaggaagccttgattgatgaacagagtgagctgaaagccatcgagaaagagaagaaggtgacagccctgccccccaaggaagcgtgcaaatgccagaaagaggatttggccagagcgttttgtgtggacttacacactgggctgtcggagttctcggtgacgcagcgccggctggcccatggctggaatgagtttgttgctgacaacagcgaacctgtgtggaagaaatacctggatcagtttaagaaccccctgatcctgctgctgctgggctctgccctggtgagtgtcctcaccaaggagtatgaggacgccgtcagcatcgccacggcagtgcttgtcgtggtcactgtcgccttcatccaggagtacaggtcggagaaatctctggaagagctgaccaagatggttcctccagaatgtaactgcctaagagaaggaaaactccagcacctgcttgctcgagaactggttcctggtgatgtcgtatctctctcgatcggagaccggatccctgcagacatccgactcactgaggtcacggacctcttggtggatgaatccagtttcaccggggaagccgagccatgtagtaaaacagacagccccttgacaggcggtggggacctcaccaccctcagcaacatcgtcttcatggggaccctggtgcagtatgggaggggccagggggtcgtgattggaacaggggaaagctctcagttcggagaagtgtttaagatgatgcaggctgaagagacacctaaaactcctttgcagaaaagcatggacaggctaggaaagcaactgacactcttctcctttggcataatcggtctcatcatgctcattggctggtcgcaagggaaacaactcctgagtatgttcacgatcggggtcagcctggctgtggcggccattccagagggtctgcccatcgtcgtcatggtgacgctggtcctgggagtgctgcggatggccaagaagcgggtcatcgtgaagaagttacccatcgtggagactttaggttgctgcagcgttctctgttctgacaagacggggactctgactgccaatgaaatgacagtgacccagcttgtaacgtcagatgggcttcgtgccgaggtcagcggagttgggtatgacggtcaagggactgtgtgtcttctaccatccaaggaagtcattaaggaattttccaatgtctcagtgggaaagttagtggaggcgggctgtgttgccaacaatgcggtcatcagaaagaacgccgtgatggggcagcccaccgagggtgcattgatggccctggcgatgaagatggacttaagtgatattaaaaattcatatataagaaaaaaagagattccattcagttcagagcagaagtggatggcggtgaaatgcagtctgaagactgaggatcaggaagacatttacttcatgaaaggggccttggaagaggtgatccgctactgcaccatgtacaacaacgggggcatccccctgccgctgacgccccagcagaggtcattctgcctgcaggaagagaagaggatggggtcgctcggtttgcgggtgctggccctggcttctgggcccgagctggggcggctgacgtttctcggtcttgtgggcatcattgaccccccgagagttggcgtgaaggaagcagtccaggttctctccgagtctggtgtgtctgtgaagatgataacgggggatgccctggagacggccttggccataggaagaaacatcggcctgtgcaacgggaagctgcaagccatgtccggggaggaggtggacagcgtggagaagggcgagctggccgaccgcgtggggaaggtgtccgtgttcttcaggaccagcccaaagcacaagctcaaaatcatcaaggctctgcaggagtcaggggcgatcgtggccatgactggggatggggtgaacgacgcagtggccctgaagtctgcagacattgggatcgccatggggcagacagggacggacgtcagcaaagaggccgccaacatgatcctggtggatgatgacttctcagccatcatgaatgcagtggaggaaggcaagggtattttttacaacatcaaaaactttgtccgattccagctgagcacgagcatctccgccctgagtctcatcactctgtccaccgtgttcaacctgcccagccccctcaacgccatgcagatcctatggatcaacatcatcatggatgggccaccggcgcagagcttgggggtagagcccgttgacaaagacgccttcaggcagccaccacggagtgtgcgggacaccatcctcagcagagccctcatcctgaagatcctcatgtccgcggccatcatcatcagcgggaccctctttatcttctggaaggagatgcctgaagacagagcaagcactccccgcaccacgacgatgacgttcacttgttttgtgtttttcgatctcttcaacgccttgacctgccgctctcagaccaagctgatatttgagatcggctttctcaggaaccacatgttcctctactccgtcctggggtccatcctggggcagctggcggtcatttacatccccccgctgcagagggtcttccagacggagaacctgggagcgcttgatttgctgtttttaactggattggcctcatccgtcttcattttgtcagagctcctcaaactatgtgaaaaatactgttgcagccccaagagagtccagatgcaccctgaagatgtgtagtggaccgcactccgcggcaccttccctaatcatctcgatctggttgtgactgtggcccctgccgtgtctcctcgtcaggggagacttttaggaggccgcagccttccatcaccggatcagtttttcctcttaggaaagctgcaggaacctcgtgggctccagggacccaggcccacatccatccagcgttcccgctggctgtgggacagacagggaggggcctgtacagaaacaccacactgtttattaaatcacaatgatttttattaaccatgtctaactacgtatctgtgccacagcttgcagtgaggcaggccactcgtggcagatacaaggggctcctgagaggcagtgggtaggatggtcacactctgcccattgccctcctggaggccccatttcctcatcataaaatgagggacttttaaataaagtgctatgccgggggataatt

SEQ ID NO: 10327 - protein, 946 aa, Homo sapiens; identical to SEQ ID NO: 1606

SEQ ID NO: 10328 - DNA, 3475 bp, Homo sapiens
aaccgggtccggcccaggaggcttgggcgcgcgcagccatcccgggcctcgccggggacctagggacgcaggcaacgcctgcgcccgctcaccatggtcgagggacgcgtctccgagttcctgaagaaactcggcttctcgggcgggggccgccagtaccaggcgctggagaaggacgaagaggaagccttgattgatgaacagagtgagctgaaagccatcgagaaagagaagaaggtgacagccctgccccccaaggaagcgtgcaaatgccagaaagaggatttggccagagcgttttgtgtggacttacacactgggctgtcggagttctcggtgacgcagcgccggctggcccatggctggaatgagtttgttgctgacaacagcgaacctgtgtggaagaaatacctggatcagtttaagaaccccctgatcctgctgctgctgggctctgccctggtgagtgtcctcaccaaggagtatgaggacgccgtcagcatcgccacggcagtgcttgtcgtggtcactgtcgccttcatccaggagtacaggtcggagaaatctctggaagagctgaccaagatggttcctccagaatgtaactgcctaagagaaggaaaactccagcacctgcttgctcgagaactggttcctggtgatgtcgtatctctctcgatcggagaccggatccctgcagacatccgactcactgaggtcacggacctcttggtggatgaatccagtttcaccggggaagccgagccatgtagtaaaacagacagccccttgacaggcggtggggacctcaccaccctcagcaacatcgtcttcatggggaccctggtgcagtatgggaggggccagggggtcgtgattggaacaggggaaagctctcagttcggagaagtgtttaagatgatgcaggctgaagagacacctaaaactcctttgcagaaaagcatggacaggctaggaaagcaactgacactcttctcctttggcataatcggtctcatcatgctcattggctggtcgcaagggaaacaactcctgagtatgttcacgatcggggtcagcctggctgtggcggccattccagagggtctgcccatcgtcgtcatggtgacgctggtcctgggagtgctgcggatggccaagaagcgggtcatcgtgaagaagttacccatcgtggagactttaggttgctgcagcgttctctgttctgacaagacggggactctgactgccaatgaaatgacagtgacccagcttgtaacgtcagatgggcttcgtgccgaggtcagcggagttgggtatgacggtcaagggactgtgtgtcttctaccatccaaggaagtcattaaggaattttccaatgtctcagtgggaaagttagtggaggcgggctgtgttgccaacaatgcggtcatcagaaagaacgccgtgatggggcagcccaccgagggtgcattgatggccctggcgatgaagatggacttaagtgatattaaaaattcatatataagaaaaaaagagattccattcagttcagagcagaagtggatggcggtgaaatgcagtctgaagactgaggatcaggaagacatttacttcatgaaaggggccttggaagaggtgatccgctactgcaccatgtacaacaacgggggcatccccctgccgctgacgccccagcagaggtcattctgcctgcaggaagagaagaggatggggtcgctcggtttgcgggtgctggccctggcttctgggcccgagctggggcggctgacgtttctcggtcttgtgggcatcattgaccccccgagagttggcgtgaaggaagcagtccaggttctctccgagtctggtgtgtctgtgaagatgataacgggggatgccctggagacggccttggccataggaagaaacatcggcctgtgcaacgggaagctgcaagccatgtccggggaggaggtggacagcgtggagaagggcgagctggccgaccgcgtggggaaggtgtccgtgttcttcaggaccagcccaaagcacaagctcaaaatcatcaaggctctgcaggagtcaggggcgatcgtggccatgactggggatggggtgaacgacgcagtggccctgaagtctgcagacattgggatcgccatggggcagacagggacggacgtcagcaaagaggccgccaacatgatcctggtggatgatgacttctcagccatcatgaatgcagtggaggaaggcaagggtattttttacaacatcaaaaactttgtccgattccagctgagcacgagcatctccgccctgagtctcatcactctgtccaccgtgttcaacctgcccagccccctcaacgccatgcagatcctatggatcaacatcatcatggatgggccaccggcgcagaggagttcccagaaaactgaagtgtgttgcactgcagtgagactgggagtagaaggcagaggagaaagtacctgggccggcagagctggcttgggggtagagcccgttgacaaagacgccttcaggcagccaccacggagtgtgcgggacaccatcctcagcagagccctcatcctgaagatcctcatgtccgcggccatcatcatcagcgggaccctctttatcttctggaaggagatgcctgaagacagagcaagcactccccgcaccacgacgatgacgttcacttgttttgtgtttttcgatctcttcaacgccttgacctgccgctctcagaccaagctgatatttgagatcggctttctcaggaaccacatgttcctctactccgtcctggggtccatcctggggcagctggcggtcatttacatccccccgctgcagagggtcttccagacggagaacctgggagcgcttgatttgctgtttttaactggattggcctcatccgtcttcattttgtcagagctcctcaaactatgtgaaaaatactgttgcagccccaagagagtccagatgcaccctgaagatgtgtagtggaccgcactccgcggcaccttccctaatcatctcgatctggttgtgactgtggcccctgccgtgtctcctcgtcaggggagacttttaggaggccgcagccttccatcaccggatcagtttttcctcttaggaaagctgcaggaacctcgtgggctccagggacccaggcccacatccatccagcgttcccgctggctgtgggacagacagggaggggcctgtacagaaacaccacactgtttattaaatcacaatgatttttattaaccatgtctaactacgtatctgtgccacagcttgcagtgaggcaggccactcgtggcagatacaaggggctcctgagaggcagtgggtaggatggtcacactctgcccattgccctcctggaggccccatttcctcatcataaaatgagggacttttaaataaagtgctatgccgggggataatt

SEQ ID NO: 10329 - protein, 975 aa, Homo sapiens
MVEGRVSEFLKKLGFSGGGRQYQALEKDEEEALIDEQSELKAIEKEKKVTALPPKEACKCQKEDLARAFCVDLHTGLSEFSVTQRRLAHGWNEFVADNSEPVWKKYLDQFKNPLILLLLGSALVSVLTKEYEDAVSIATAVLVVVTVAFIQEYRSEKSLEELTKMVPPECNCLREGKLQHLLARELVPGDVVSLSIGDRIPADIRLTEVTDLLVDESSFTGEAEPCSKTDSPLTGGGDLTTLSNIVFMGTLVQYGRGQGVVIGTGESSQFGEVFKMMQAEETPKTPLQKSMDRLGKQLTLFSFGIIGLIMLIGWSQGKQLLSMFTIGVSLAVAAIPEGLPIVVMVTLVLGVLRMAKKRVIVKKLPIVETLGCCSVLCSDKTGTLTANEMTVTQLVTSDGLRAEVSGVGYDGQGTVCLLPSKEVIKEFSNVSVGKLVEAGCVANNAVIRKNAVMGQPTEGALMALAMKMDLSDIKNSYIRKKEIPFSSEQKWMAVKCSLKTEDQEDIYFMKGALEEVIRYCTMYNNGGIPLPLTPQQRSFCLQEEKRMGSLGLRVLALASGPELGRLTFLGLVGIIDPPRVGVKEAVQVLSESGVSVKMITGDALETALAIGRNIGLCNGKLQAMSGEEVDSVEKGELADRVGKVSVFFRTSPKHKLKIIKALQESGAIVAMTGDGVNDAVALKSADIGIAMGQTGTDVSKEAANMILVDDDFSAIMNAVEEGKGIFYNIKNFVRFQLSTSISALSLITLSTVFNLPSPLNAMQILWINIIMDGPPAQRSSQKTEVCCTAVRLGVEGRGESTWAGRAGLGVEPVDKDAFRQPPRSVRDTILSRALILKILMSAAIIISGTLFIFWKEMPEDRASTPRTTTMTFTCFVFFDLFNALTCRSQTKLIFEIGFLRNHMFLYSVLGSILGQLAVIYIPPLQRVFQTENLGALDLLFLTGLASSVFILSELLKLCEKYCCSPKRVQMHPEDV

SEQ ID NO: 10330 - DNA, 4046 bp, Homo sapiens
aaccgggtccggcccaggaggcttgggcgcgcgcagccatcccgggcctcgccggggacctagggacgcaggcaacgcctgcgcccgctcaccatggtcgagggacgcgtctccgagttcctgaagaaactcggcttctcgggcgggggccgccagtaccaggcgctggagaaggacgaagaggaagccttgattgatgaacagagtgagctgaaagccatcgagaaagagaagaaggtgacagccctgccccccaaggaagcgtgcaaatgccagaaagaggatttggccagagcgttttgtgtggacttacacactgggctgtcggagttctcggtgacgcagcgccggctggcccatggctggaatgagtttgttgctgacaacagcgaacctgtgtggaagaaatacctggatcagtttaagaaccccctgatcctgctgctgctgggctctgccctggtgagtgtcctcaccaaggagtatgaggacgccgtcagcatcgccacggcagtgcttgtcgtggtcactgtcgccttcatccaggagtacaggtcggagaaatctctggaagagctgaccaagatggttcctccagaatgtaactgcctaagagaaggaaaactccagcacctgcttgctcgagaactggttcctggtgatgtcgtatctctctcgatcggagaccggatccctgcagacatccgactcactgaggtcacggacctcttggtggatgaatccagtttcaccggggaagccgagccatgtagtaaaacagacagccccttgacaggcggtggggacctcaccaccctcagcaacatcgtcttcatggggaccctggtgcagtatgggaggggccagggggtcgtgattggaacaggggaaagctctcagttcggagaagtgtttaagatgatgcaggctgaagagacacctaaaactcctttgcagaaaagcatggacaggctaggaaagcaactgacactcttctcctttggcataatcggtctcatcatgctcattggctggtcgcaagggaaacaactcctgagtatgttcacgatcggggtcagcctggctgtggcggccattccagagggtctgcccatcgtcgtcatggtgacgctggtcctgggagtgctgcggatggccaagaagcgggtcatcgtgaagaagttacccatcgtggagactttaggttgctgcagcgttctctgttctgacaagacggggactctgactgccaatgaaatgacagtgacccagcttgtaacgtcagatgggcttcgtgccgaggtcagcggagttgggtatgacggtcaagggactgtgtgtcttctaccatccaaggaagtcattaaggaattttccaatgtctcagtgggaaagttagtggaggcgggctgtgttgccaacaatgcggtcatcagaaagaacgccgtgatggggcagcccaccgagggtgcattgatggccctggcgatgaagatggacttaagtgatattaaaaattcatatataagaaaaaaagagattccattcagttcagagcagaagtggatggcggtgaaatgcagtctgaagactgaggatcaggaagacatttacttcatgaaaggggccttggaagaggtgatccgctactgcaccatgtacaacaacgggggcatccccctgccgctgacgccccagcagaggtcattctgcctgcaggaagagaagaggatggggtcgctcggtttgcgggtgctggccctggcttctgggcccgagctggggcggctgacgtttctcggtcttgtgggcatcattgaccccccgagagttggcgtgaaggaagcagtccaggttctctccgagtctggtgtgtctgtgaagatgataacgggggatgccctggagacggccttggccataggaagaaacatcggcctgtgcaacgggaagctgcaagccatgtccggggaggaggtggacagcgtggagaagggcgagctggccgaccgcgtggggaaggtgtccgtgttcttcaggaccagcccaaagcacaagctcaaaatcatcaaggctctgcaggagtcaggggcgatcgtggccatgactggggatggggtgaacgacgcagtggccctgaagtctgcagacattgggatcgccatggggcagacagggacggacgtcagcaaagaggccgccaacatgatcctggtggatgatgacttctcagccatcatgaatgcagtggaggaaggcaagggtattttttacaacatcaaaaactttgtccgattccagctgagcacgagcatctccgccctgagtctcatcactctgtccaccgtgttcaacctgcccagccccctcaacgccatgcagatcctatggatcaacatcatcatggatgggccaccggcgcagagcttgggggtagagcccgttgacaaagacgccttcaggcagccaccacggagtgtgcgggacaccatcctcagcagagccctcatcctgaagatcctcatgtccgcggccatcatcatcagcgggaccctctttatcttctggaaggagatgcctgaagacagagcaagcactccccgcaccacgacgatgacgttcacttgttttgtgtttttcgatctcttcaacgccttgacctgccgctctcagaccaagctgatatttgagatcggctttctcaggaaccacatgttcctctactccgtcctggggtccatcctggggcagctggcggtcatttacatccccccgctgcagagggtcttccagacggagaacctgggagcgcttgatttgctgtttttaactggattggcctcatccgtcttcattttgtcagagctcctcaaactatgtgaaaaatactgttgcagccccaagagagtccagatgcaccctgaagatgtgtagtggaccgcactccgcggcaccttccctaatcatctcgatctggttgtgactgtggcccctgccgtgtctcctcgtcaggggagacttttaggaggccgcagccttccatcaccggatcagtttttcctcttaggaaagctgcaggaacctcgtgggctccagggacccaggcccacatccatccagcgttcccgctggctgtgggacagacagggaggggcctgtacagaaacaccacactgtttattaaatcacaatgatttttattaaccatgtctaactacgtatctgtgccacagcttgcagtgaggcaggccactcgtggcagatacaaggggctcctgagaggcagtgggtaggatggtcacactctgcccattgccctcctggaggccccatttcctcatcataaaatgagggacttttaaataaagtgctatgccgggggataattattttgatgtgtttacctagggtttttcatacaaggggccaggttggaaacccacagccatgtgttaatggccacgtggggtgagcagcaatccatcatgaatggcctacaggaaggcctcggcttttggacataaagagtagggctgggcatggtggctcacgcctgtaatcccagcactttgcaaggccaaggcaggcagatcacttgaggccagcctggccaacacagcaaaaccctgtctgtctctactaaaagtttaaaaaaaaaaaaaaaaacagttgccaggcgtgatgatgcacacctgttaatcccagctactcgggaggctgaggcaggagaatggcttgagtccaggaggtggagattgtaccactgcactgcagcatgggcaacaaagcaagagtctctctcagaaagtggcccttctctccggaaccaggaactgtagtatctcctgctgcctgcagacaagcttgatttcccactgccccaaagacttccaaaaaccgatctgctcttccacgtgacagatggcagaggagagaggtctccatgctgttcttctgcctgaagccacgccagaaccaccaaagggaaccagaaggggaactccgtccccatctctcaggaaataaggccagagctagaacccccc

SEQ ID NO: 10331 - protein, 946 aa, Homo sapiens; identical to SEQ ID NO: 1606

SEQ ID NO: 10332 - DNA, 3786 bp, Homo sapiens
gaatcaacagaatttgtctttttgtgactggtttatttcacttaacttcatcctcaaggttcaacttaaaggtgtatccatgttgtagcacgtgtcagcattttctttcgttctcaggctaaatagtatttcattgtgtgtgtacaccatgtttcatgcattcattcatcccttgaaagattggtgggttgtttcctcctttttgcttttgtgaacagtgctacgaacatggttgtacaaacatctcttggagccccactagcagttcctttgggtatataccccaaagtggaattgctggatctggtagctccctttttaattttttgaggaatcgccacacagtttccataacagctgcaccattttacattcccaagaccttttttttttttttttttttaagaagaaaagatgtgtttctgcatttctggaagtctatgctgcatttccatttgttgaaatttaagaccagagtcgtcttttctgctgtaattataatggtcactggcttgtgccttttcctcctctctctgccccatctgcacggggtctttgaacaagtcccagcaccttggtggacaagcctgtgtccctggcccatcatggaagccgctgcctttcagagtgggagtctgtaccctgttgcctcattccttgctgcgcccatgagtgagcttgtgcctgacctctccttccaggtggacttacacactgggctgtcggagttctcggtgacgcagcgccggctggcccatggctggaatgagtttgttgctgacaacagcgaacctgtgtggaagaaatacctggatcagtttaagaaccccctgatcctgctgctgctgggctctgccctggtgagtgtcctcaccaaggagtatgaggacgccgtcagcatcgccacggcagtgcttgtcgtggtcactgtcgccttcatccaggagtacaggtcggagaaatctctggaagagctgaccaagatggttcctccagaatgtaactgcctaagagaaggaaaactccagcacctgcttgctcgagaactggttcctggtgatgtcgtatctctctcgatcggagaccggatccctgcagacatccgactcactgaggtcacggacctcttggtggatgaatccagtttcaccggggaagccgagccatgtagtaaaacagacagccccttgacaggcggtggggacctcaccaccctcagcaacatcgtcttcatggggaccctggtgcagtatgggaggggccagggggtcgtgattggaacaggggaaagctctcagttcggagaagtgtttaagatgatgcaggctgaagagacacctaaaactcctttgcagaaaagcatggacaggctaggaaagcaactgacactcttctcctttggcataatcggtctcatcatgctcattggctggtcgcaagggaaacaactcctgagtatgttcacgatcggggtcagcctggctgtggcggccattccagagggtctgcccatcgtcgtcatggtgacgctggtcctgggagtgctgcggatggccaagaagcgggtcatcgtgaagaagttacccatcgtggagactttaggttgctgcagcgttctctgttctgacaagacggggactctgactgccaatgaaatgacagtgacccagcttgtaacgtcagatgggcttcgtgccgaggtcagcggagttgggtatgacggtcaagggactgtgtgtcttctaccatccaaggaagtcattaaggaattttccaatgtctcagtgggaaagttagtggaggcgggctgtgttgccaacaatgcggtcatcagaaagaacgccgtgatggggcagcccaccgagggtgcattgatggccctggcgatgaagatggacttaagtgatattaaaaattcatatataagaaaaaaagagattccattcagttcagagcagaagtggatggcggtgaaatgcagtctgaagactgaggatcaggaagacatttacttcatgaaaggggccttggaagaggtgatccgctactgcaccatgtacaacaacgggggcatccccctgccgctgacgccccagcagaggtcattctgcctgcaggaagagaagaggatggggtcgctcggtttgcgggtgctggccctggcttctgggcccgagctggggcggctgacgtttctcggtcttgtgggcatcattgaccccccgagagttggcgtgaaggaagcagtccaggttctctccgagtctggtgtgtctgtgaagatgataacgggggatgccctggagacggccttggccataggaagaaacatcggcctgtgcaacgggaagctgcaagccatgtccggggaggaggtggacagcgtggagaagggcgagctggccgaccgcgtggggaaggtgtccgtgttcttcaggaccagcccaaagcacaagctcaaaatcatcaaggctctgcaggagtcaggggcgatcgtggccatgactggggatggggtgaacgacgcagtggccctgaagtctgcagacattgggatcgccatggggcagacagggacggacgtcagcaaagaggccgccaacatgatcctggtggatgatgacttctcagccatcatgaatgcagtggaggaaggcaagggtattttttacaacatcaaaaactttgtccgattccagctgagcacgagcatctccgccctgagtctcatcactctgtccaccgtgttcaacctgcccagccccctcaacgccatgcagatcctatggatcaacatcatcatggatgggccaccggcgcagagcttgggggtagagcccgttgacaaagacgccttcaggcagccaccacggagtgtgcgggacaccatcctcagcagagccctcatcctgaagatcctcatgtccgcggccatcatcatcagcgggaccctctttatcttctggaaggagatgcctgaagacagagcaagcactccccgcaccacgacgatgacgttcacttgttttgtgtttttcgatctcttcaacgccttgacctgccgctctcagaccaagctgatatttgagatcggctttctcaggaaccacatgttcctctactccgtcctggggtccatcctggggcagctggcggtcatttacatccccccgctgcagagggtcttccagacggagaacctgggagcgcttgatttgctgtttttaactggattggcctcatccgtcttcattttgtcagagctcctcaaactatgtgaaaaatactgttgcagccccaagagagtccagatgcaccctgaagatgtgtagtggaccgcactccgcggcaccttccctaatcatctcgatctggttgtgactgtggcccctgccgtgtctcctcgtcaggggagacttttaggaggccgcagccttccatcaccggatcagtttttcctcttaggaaagctgcaggaacctcgtgggctccagggacccaggcccacatccatccagcgttcccgctggctgtgggacagacagggaggggcctgtacagaaacaccacactgtttattaaatcacaatgatttttattaaccatgtctaactacgtatctgtgccacagcttgcagtgaggcaggccactcgtggcagatacaaggggctcctgagaggcagtgggtaggatggtcacactctgcccattgccctcctggaggccccatttcctcatcataaaatgagggacttttaaataaagtgctatgccgggggataatt

SEQ ID NO: 10333 - protein, 963 aa, Homo sapiens
MLHFHLLKFKTRVVFSAVIIMVTGLCLFLLSLPHLHGVFEQVPAPWWTSLCPWPIMEAAAFQSGSLYPVASFLAAPMSELVPDLSFQVDLHTGLSEFSVTQRRLAHGWNEFVADNSEPVWKKYLDQFKNPLILLLLGSALVSVLTKEYEDAVSIATAVLVVVTVAFIQEYRSEKSLEELTKMVPPECNCLREGKLQHLLARELVPGDVVSLSIGDRIPADIRLTEVTDLLVDESSFTGEAEPCSKTDSPLTGGGDLTTLSNIVFMGTLVQYGRGQGVVIGTGESSQFGEVFKMMQAEETPKTPLQKSMDRLGKQLTLFSFGIIGLIMLIGWSQGKQLLSMFTIGVSLAVAAIPEGLPIVVMVTLVLGVLRMAKKRVIVKKLPIVETLGCCSVLCSDKTGTLTANEMTVTQLVTSDGLRAEVSGVGYDGQGTVCLLPSKEVIKEFSNVSVGKLVEAGCVANNAVIRKNAVMGQPTEGALMALAMKMDLSDIKNSYIRKKEIPFSSEQKWMAVKCSLKTEDQEDIYFMKGALEEVIRYCTMYNNGGIPLPLTPQQRSFCLQEEKRMGSLGLRVLALASGPELGRLTFLGLVGIIDPPRVGVKEAVQVLSESGVSVKMITGDALETALAIGRNIGLCNGKLQAMSGEEVDSVEKGELADRVGKVSVFFRTSPKHKLKIIKALQESGAIVAMTGDGVNDAVALKSADIGIAMGQTGTDVSKEAANMILVDDDFSAIMNAVEEGKGIFYNIKNFVRFQLSTSISALSLITLSTVFNLPSPLNAMQILWINIIMDGPPAQSLGVEPVDKDAFRQPPRSVRDTILSRALILKILMSAAIIISGTLFIFWKEMPEDRASTPRTTTMTFTCFVFFDLFNALTCRSQTKLIFEIGFLRNHMFLYSVLGSILGQLAVIYIPPLQRVFQTENLGALDLLFLTGLASSVFILSELLKLCEKYCCSPKRVQMHPEDV

SEQ ID NO: 10334 - DNA, 4444 bp, Homo sapiens
gaatcaacagaatttgtctttttgtgactggtttatttcacttaacttcatcctcaaggttcaacttaaaggtgtatccatgttgtagcacgtgtcagcattttctttcgttctcaggctaaatagtatttcattgtgtgtgtacaccatgtttcatgcattcattcatcccttgaaagattggtgggttgtttcctcctttttgcttttgtgaacagtgctacgaacatggttgtacaaacatctcttggagccccactagcagttcctttgggtatataccccaaagtggaattgctggatctggtagctccctttttaattttttgaggaatcgccacacagtttccataacagctgcaccattttacattcccaagaccttttttttttttttttttttaagaagaaaagatgtgtttctgcatttctggaagtctatgctgcatttccatttgttgaaatttaagaccagagtcgtcttttctgctgtaattataatggtcactggcttgtgccttttcctcctctctctgccccatctgcacggggtctttgaacaagtcccagcaccttggtggacaagcctgtgtccctggcccatcatggaagccgctgcctttcagagtgggagtctgtaccctgttgcctcattccttgctgcgcccatgagtgagcttgtgcctgacctctccttccaggtggacttacacactgggctgtcggagttctcggtgacgcagcgccggctggcccatggctggaatgagtttgttgctgacaacagcgaacctgtgtggaagaaatacctggatcagtttaagaaccccctgatcctgctgctgctgggctctgccctggtgagtgtcctcaccaaggagtatgaggacgccgtcagcatcgccacggcagtgcttgtcgtggtcactgtcgccttcatccaggagtacaggtcggagaaatctctggaagagctgaccaagatggttcctccagaatgtaactgcctaagagaaggaaaactccagcacctgcttgctcgagaactggttcctggtgatgtcgtatctctctcgatcggagaccggatccctgcagacatccgactcactgaggtcacggacctcttggtggatgaatccagtttcaccggggaagccgagccatgtagtaaaacagacagccccttgacaggcggtggggacctcaccaccctcagcaacatcgtcttcatggggaccctggtgcagtatgggaggggccagggggtcgtgattggaacaggggaaagctctcagttcggagaagtgtttaagatgatgcaggctgaagagacacctaaaactcctttgcagaaaagcatggacaggctaggaaagcaactgacactcttctcctttggcataatcggtctcatcatgctcattggctggtcgcaagggaaacaactcctgagtatgttcacgatcggggtcagcctggctgtggcggccattccagagggtctgcccatcgtcgtcatggtgacgctggtcctgggagtgctgcggatggccaagaagcgggtcatcgtgaagaagttacccatcgtggagactttaggttgctgcagcgttctctgttctgacaagacggggactctgactgccaatgaaatgacagtgacccagcttgtaacgtcagatgggcttcgtgccgaggtcagcggagttgggtatgacggtcaagggactgtgtgtcttctaccatccaaggaagtcattaaggaattttccaatgtctcagtgggaaagttagtggaggcgggctgtgttgccaacaatgcggtcatcagaaagaacgccgtgatggggcagcccaccgagggtgcattgatggccctggcgatgaagatggacttaagtgatattaaaaattcatatataagaaaaaaagagattccattcagttcagagcagaagtggatggcggtgaaatgcagtctgaagactgaggatcaggaagacatttacttcatgaaaggggccttggaagaggtgatccgctactgcaccatgtacaacaacgggggcatccccctgccgctgacgccccagcagaggtcattctgcctgcaggaagagaagaggatggggtcgctcggtttgcgggtgctggccctggcttctgggcccgagctggggcggctgacgtttctcggtcttgtgggcatcattgaccccccgagagttggcgtgaaggaagcagtccaggttctctccgagtctggtgtgtctgtgaagatgataacgggggatgccctggagacggccttggccataggaagaaacatcggcctgtgcaacgggaagctgcaagccatgtccggggaggaggtggacagcgtggagaagggcgagctggccgaccgcgtggggaaggtgtccgtgttcttcaggaccagcccaaagcacaagctcaaaatcatcaaggctctgcaggagtcaggggcgatcgtggccatgactggggatggggtgaacgacgcagtggccctgaagtctgcagacattgggatcgccatggggcagacagggacggacgtcagcaaagaggccgccaacatgatcctggtggatgatgacttctcagccatcatgaatgcagtggaggaaggcaagggtattttttacaacatcaaaaactttgtccgattccagctgagcacgagcatctccgccctgagtctcatcactctgtccaccgtgttcaacctgcccagccccctcaacgccatgcagatcctatggatcaacatcatcatggatgggccaccggcgcagagcttgggggtagagcccgttgacaaagacgccttcaggcagccaccacggagtgtgcgggacaccatcctcagcagagccctcatcctgaagatcctcatgtccgcggccatcatcatcagcgggaccctctttatcttctggaaggagatgcctgaagacagagcaagcactccccgcaccacgacgatgacgttcacttgttttgtgtttttcgatctcttcaacgccttgacctgccgctctcagaccaagctgatatttgagatcggctttctcaggaaccacatgttcctctactccgtcctggggtccatcctggggcagctggcggtcatttacatccccccgctgcagagggtcttccagacggagaacctgggagcgcttgatttgctgtttttaactggattggcctcatccgtcttcattttgtcagagctcctcaaactatgtgaaaaatactgttgcagccccaagagagtccagatgcaccctgaagatgtgtagtggaccgcactccgcggcaccttccctaatcatctcgatctggttgtgactgtggcccctgccgtgtctcctcgtcaggggagacttttaggaggccgcagccttccatcaccggatcagtttttcctcttaggaaagctgcaggaacctcgtgggctccagggacccaggcccacatccatccagcgttcccgctggctgtgggacagacagggaggggcctgtacagaaacaccacactgtttattaaatcacaatgatttttattaaccatgtctaactacgtatctgtgccacagcttgcagtgaggcaggccactcgtggcagatacaaggggctcctgagaggcagtgggtaggatggtcacactctgcccattgccctcctggaggccccatttcctcatcataaaatgagggacttttaaataaagtgctatgccgggggataattattttgatgtgtttacctagggtttttcatacaaggggccaggttggaaacccacagccatgtgttaatggccacgtggggtgagcagcaatccatcatgaatggcctacaggaaggcctcggcttttggacataaagagtagggctgggcatggtggctcacgcctgtaatcccagcactttgcaaggccaaggcaggcagatcacttgaggccagcctggccaacacagcaaaaccctgtctgtctctactaaaagtttaaaaaaaaaaaaaaaaacagttgccaggcgtgatgatgcacacctgttaatcccagctactcgggaggctgaggcaggagaatggcttgagtccaggaggtggagattgtaccactgcactgcagcatgggcaacaaagcaagagtctctctcagaaagtggcccttctctccggaaccaggaactgtagtatctcctgctgcctgcagacaagcttgatttcccactgccccaaagacttccaaaaaccgatctgctcttccacgtgacagatggcagaggagagaggtctccatgctgttcttctgcctgaagccacgccagaaccaccaaagggaaccagaaggggaactccgtccccatctctcaggaaataaggccagagctagaacccccc

SEQ ID NO: 10335 - protein, 963 aa, Homo sapiens; identical to SEQ ID NO: 10333

SEQ ID NO: 10336 - DNA, 2968 bp, Homo sapiens
agttctcagtgttctgggaatgttattcatcgatgcgttttggcagcaaaataggcttctggtttaagaaccccctgatcctgctgctgctgggctctgccctggtgagtgtcctcaccaaggagtatgaggacgccgtcagcatcgccacggcagtgcttgtcgtggtcactgtcgccttcatccagcctaagagaaggaaaactccagcacctgcttgctcgagaactggttcctggtgatgtcgtatctctctcgatcggagaccggatccctgcagacatccgactcactgaggtcacggacctcttggtggatgaatccagtttcaccggggaagccgagccatgtagtaaaacagacagccccttgacaggcggtggggacctcaccaccctcagcaacatcgtcttcatggggaccctggtgcagtatgggaggggccagggggtcgtgattggaacaggggaaagctctcagttcggagaagtgtttaagatgatgcaggctgaagagacacctaaaactcctttgcagaaaagcatggacaggctaggaaagcaactgacactcttctcctttggcataatcggtctcatcatgctcattggctggtcgcaagggaaacaactcctgagtatgttcacgatcggggtcagcctggctgtggcggccattccagagggtctgcccatcgtcgtcatggtgacgctggtcctgggagtgctgcggatggccaagaagcgggtcatcgtgaagaagttacccatcgtggagactttaggttgctgcagcgttctctgttctgacaagacggggactctgactgccaatgaaatgacagtgacccagcttgtaacgtcagatgggcttcgtgccgaggtcagcggagttgggtatgacggtcaagggactgtgtgtcttctaccatccaaggaagtcattaaggaattttccaatgtctcagtgggaaagttagtggaggcgggctgtgttgccaacaatgcggtcatcagaaagaacgccgtgatggggcagcccaccgagggtgcattgatggccctggcgatgaagatggacttaagtgatattaaaaattcatatataagaaaaaaagagattccattcagttcagagcagaagtggatggcggtgaaatgcagtctgaagactgaggatcaggaagacatttacttcatgaaaggggccttggaagaggtgatccgctactgcaccatgtacaacaacgggggcatccccctgccgctgacgccccagcagaggtcattctgcctgcaggaagagaagaggatggggtcgctcggtttgcgggtgctggccctggcttctgggcccgagctggggcggctgacgtttctcggtcttgtgggcatcattgaccccccgagagttggcgtgaaggaagcagtccaggttctctccgagtctggtgtgtctgtgaagatgataacgggggatgccctggagacggccttggccataggaagaaacatcggcctgtgcaacgggaagctgcaagccatgtccggggaggaggtggacagcgtggagaagggcgagctggccgaccgcgtggggaaggtgtccgtgttcttcaggaccagcccaaagcacaagctcaaaatcatcaaggctctgcaggagtcaggggcgatcgtggccatgactggggatggggtgaacgacgcagtggccctgaagtctgcagacattgggatcgccatggggcagacagggacggacgtcagcaaagaggccgccaacatgatcctggtggatgatgacttctcagccatcatgaatgcagtggaggaaggcaagggtattttttacaacatcaaaaactttgtccgattccagctgagcacgagcatctccgccctgagtctcatcactctgtccaccgtgttcaacctgcccagccccctcaacgccatgcagatcctatggatcaacatcatcatggatgggccaccggcgcagagcttgggggtagagcccgttgacaaagacgccttcaggcagccaccacggagtgtgcgggacaccatcctcagcagagccctcatcctgaagatcctcatgtccgcggccatcatcatcagcgggaccctctttatcttctggaaggagatgcctgaagacagagcaagcactccccgcaccacgacgatgacgttcacttgttttgtgtttttcgatctcttcaacgccttgacctgccgctctcagaccaagctgatatttgagatcggctttctcaggaaccacatgttcctctactccgtcctggggtccatcctggggcagctggcggtcatttacatccccccgctgcagagggtcttccagacggagaacctgggagcgcttgatttgctgtttttaactggattggcctcatccgtcttcattttgtcagagctcctcaaactatgtgaaaaatactgttgcagccccaagagagtccagatgcaccctgaagatgtgtagtggaccgcactccgcggcaccttccctaatcatctcgatctggttgtgactgtggcccctgccgtgtctcctcgtcaggggagacttttaggaggccgcagccttccatcaccggatcagtttttcctcttaggaaagctgcaggaacctcgtgggctccagggacccaggcccacatccatccagcgttcccgctggctgtgggacagacagggaggggcctgtacagaaacaccacactgtttattaaatcacaatgatttttattaaccatgtctaactacgtatctgtgccacagcttgcagtgaggcaggccactcgtggcagatacaaggggctcctgagaggcagtgggtaggatggtcacactctgcccattgccctcctggaggccccatttcctcatcataaaatgagggacttttaaataaagtgctatgccgggggataatt

SEQ ID NO: 10337 - protein, 795 aa, Homo sapiens
MRTPSASPRQCLSWSLSPSSSLREGKLQHLLARELVPGDVVSLSIGDRIPADIRLTEVTDLLVDESSFTGEAEPCSKTDSPLTGGGDLTTLSNIVFMGTLVQYGRGQGVVIGTGESSQFGEVFKMMQAEETPKTPLQKSMDRLGKQLTLFSFGIIGLIMLIGWSQGKQLLSMFTIGVSLAVAAIPEGLPIVVMVTLVLGVLRMAKKRVIVKKLPIVETLGCCSVLCSDKTGTLTANEMTVTQLVTSDGLRAEVSGVGYDGQGTVCLLPSKEVIKEFSNVSVGKLVEAGCVANNAVIRKNAVMGQPTEGALMALAMKMDLSDIKNSYIRKKEIPFSSEQKWMAVKCSLKTEDQEDIYFMKGALEEVIRYCTMYNNGGIPLPLTPQQRSFCLQEEKRMGSLGLRVLALASGPELGRLTFLGLVGIIDPPRVGVKEAVQVLSESGVSVKMITGDALETALAIGRNIGLCNGKLQAMSGEEVDSVEKGELADRVGKVSVFFRTSPKHKLKIIKALQESGAIVAMTGDGVNDAVALKSADIGIAMGQTGTDVSKEAANMILVDDDFSAIMNAVEEGKGIFYNIKNFVRFQLSTSISALSLITLSTVFNLPSPLNAMQILWINIIMDGPPAQSLGVEPVDKDAFRQPPRSVRDTILSRALILKILMSAAIIISGTLFIFWKEMPEDRASTPRTTTMTFTCFVFFDLFNALTCRSQTKLIFEIGFLRNHMFLYSVLGSILGQLAVIYIPPLQRVFQTENLGALDLLFLTGLASSVFILSELLKLCEKYCCSPKRVQMHPEDV

SEQ ID NO: 10338 - DNA, 3626 bp, Homo sapiens
agttctcagtgttctgggaatgttattcatcgatgcgttttggcagcaaaataggcttctggtttaagaaccccctgatcctgctgctgctgggctctgccctggtgagtgtcctcaccaaggagtatgaggacgccgtcagcatcgccacggcagtgcttgtcgtggtcactgtcgccttcatccagcctaagagaaggaaaactccagcacctgcttgctcgagaactggttcctggtgatgtcgtatctctctcgatcggagaccggatccctgcagacatccgactcactgaggtcacggacctcttggtggatgaatccagtttcaccggggaagccgagccatgtagtaaaacagacagccccttgacaggcggtggggacctcaccaccctcagcaacatcgtcttcatggggaccctggtgcagtatgggaggggccagggggtcgtgattggaacaggggaaagctctcagttcggagaagtgtttaagatgatgcaggctgaagagacacctaaaactcctttgcagaaaagcatggacaggctaggaaagcaactgacactcttctcctttggcataatcggtctcatcatgctcattggctggtcgcaagggaaacaactcctgagtatgttcacgatcggggtcagcctggctgtggcggccattccagagggtctgcccatcgtcgtcatggtgacgctggtcctgggagtgctgcggatggccaagaagcgggtcatcgtgaagaagttacccatcgtggagactttaggttgctgcagcgttctctgttctgacaagacggggactctgactgccaatgaaatgacagtgacccagcttgtaacgtcagatgggcttcgtgccgaggtcagcggagttgggtatgacggtcaagggactgtgtgtcttctaccatccaaggaagtcattaaggaattttccaatgtctcagtgggaaagttagtggaggcgggctgtgttgccaacaatgcggtcatcagaaagaacgccgtgatggggcagcccaccgagggtgcattgatggccctggcgatgaagatggacttaagtgatattaaaaattcatatataagaaaaaaagagattccattcagttcagagcagaagtggatggcggtgaaatgcagtctgaagactgaggatcaggaagacatttacttcatgaaaggggccttggaagaggtgatccgctactgcaccatgtacaacaacgggggcatccccctgccgctgacgccccagcagaggtcattctgcctgcaggaagagaagaggatggggtcgctcggtttgcgggtgctggccctggcttctgggcccgagctggggcggctgacgtttctcggtcttgtgggcatcattgaccccccgagagttggcgtgaaggaagcagtccaggttctctccgagtctggtgtgtctgtgaagatgataacgggggatgccctggagacggccttggccataggaagaaacatcggcctgtgcaacgggaagctgcaagccatgtccggggaggaggtggacagcgtggagaagggcgagctggccgaccgcgtggggaaggtgtccgtgttcttcaggaccagcccaaagcacaagctcaaaatcatcaaggctctgcaggagtcaggggcgatcgtggccatgactggggatggggtgaacgacgcagtggccctgaagtctgcagacattgggatcgccatggggcagacagggacggacgtcagcaaagaggccgccaacatgatcctggtggatgatgacttctcagccatcatgaatgcagtggaggaaggcaagggtattttttacaacatcaaaaactttgtccgattccagctgagcacgagcatctccgccctgagtctcatcactctgtccaccgtgttcaacctgcccagccccctcaacgccatgcagatcctatggatcaacatcatcatggatgggccaccggcgcagagcttgggggtagagcccgttgacaaagacgccttcaggcagccaccacggagtgtgcgggacaccatcctcagcagagccctcatcctgaagatcctcatgtccgcggccatcatcatcagcgggaccctctttatcttctggaaggagatgcctgaagacagagcaagcactccccgcaccacgacgatgacgttcacttgttttgtgtttttcgatctcttcaacgccttgacctgccgctctcagaccaagctgatatttgagatcggctttctcaggaaccacatgttcctctactccgtcctggggtccatcctggggcagctggcggtcatttacatccccccgctgcagagggtcttccagacggagaacctgggagcgcttgatttgctgtttttaactggattggcctcatccgtcttcattttgtcagagctcctcaaactatgtgaaaaatactgttgcagccccaagagagtccagatgcaccctgaagatgtgtagtggaccgcactccgcggcaccttccctaatcatctcgatctggttgtgactgtggcccctgccgtgtctcctcgtcaggggagacttttaggaggccgcagccttccatcaccggatcagtttttcctcttaggaaagctgcaggaacctcgtgggctccagggacccaggcccacatccatccagcgttcccgctggctgtgggacagacagggaggggcctgtacagaaacaccacactgtttattaaatcacaatgatttttattaaccatgtctaactacgtatctgtgccacagcttgcagtgaggcaggccactcgtggcagatacaaggggctcctgagaggcagtgggtaggatggtcacactctgcccattgccctcctggaggccccatttcctcatcataaaatgagggacttttaaataaagtgctatgccgggggataattattttgatgtgtttacctagggtttttcatacaaggggccaggttggaaacccacagccatgtgttaatggccacgtggggtgagcagcaatccatcatgaatggcctacaggaaggcctcggcttttggacataaagagtagggctgggcatggtggctcacgcctgtaatcccagcactttgcaaggccaaggcaggcagatcacttgaggccagcctggccaacacagcaaaaccctgtctgtctctactaaaagtttaaaaaaaaaaaaaaaaacagttgccaggcgtgatgatgcacacctgttaatcccagctactcgggaggctgaggcaggagaatggcttgagtccaggaggtggagattgtaccactgcactgcagcatgggcaacaaagcaagagtctctctcagaaagtggcccttctctccggaaccaggaactgtagtatctcctgctgcctgcagacaagcttgatttcccactgccccaaagacttccaaaaaccgatctgctcttccacgtgacagatggcagaggagagaggtctccatgctgttcttctgcctgaagccacgccagaaccaccaaagggaaccagaaggggaactccgtccccatctctcaggaaataaggccagagctagaacccccc

SEQ ID NO: 10339 - protein, 795 aa, Homo sapiens; identical to SEQ ID NO: 10337

SEQ ID NO: 10340 - DNA, 505 bp, Homo sapiens
aactcagtggcatgaaagcatcccagaacgttcagatgtgtgcccagccctgtggctctcacgcatctcctgtgctagggggacgatctggatcagtgcctggcccatggaagactcctgacccaggcttgttcactgaatgaaggcattccacatgttctgtgatgcgggcaagtcattcattcatttatgcatttagaatgagctttgagaatatggcagcctacaaaatggacatggtcctgccttcagggagcttctggtccagcctatggcctcttgcctggaaagagatgttaccacgttattaggaggtagtgtggtgtgagccactttggaaggaatggtgactctgaacctctgggggatggaagaaaagaatgctgctttgcatggacaaacctgagttcgattcccagcgctgtttatcggatgtgggatctgatcttggggggaccttcttcaagcctctctgagcttcagtttctgcattaaaaatgagaag

SEQ ID NO: 10341 - protein, 43 aa, Homo sapiens
MKASQNVQMCAQPCGSHASPVLGGRSGSVPGPWKTPDPGLFTE

SEQ ID NO: 10342 - DNA, 2191 bp, Homo sapiens
agggcgggcccgcgagggctgagcggcgcgggctgtcacaggcgcccgaagcgcgctgcaggtggcaacttggaggtgccgccaccgcagctgcgggaggagcccgggtctggcggccccttccagcctccaggagctctttcccgccgccgagcccgagactggaccccggagaattcgaaggaaagagcccctgcggagggacctgtgagcagccctacctctctctgcccttgcgctactttttttctccaaggaaggttgtgcctgcgggctgcgaacaagctccgggaggggccccaaaggaaggcttcggtgactcagactcggaatccaagccggaccaggaggccgagccccaggaggcggcgggggcgcaggggcgcgcgggggcgcccgtgccggagccgcccaaggaggagcagcagcaggccctggagcagttcgccgccgctgcagcgcacagcaccccggtgcggagggaggtcactgacaaggaacaggagtttgctgccagggctgcaaaacagctcgaatatcagcaattagaagacgataaactttctcagaaatcatctagcagtaaactctctcggtctccattaaagattgtcaaaaagcctaaaagcatgcagtgcaaagtgatacttctcgatggatcagaatatacctgtgatgtagagaaacgctccagaggacaagtgctgtttgataaagtgtgtgaacacttgaacttgctagagaaagactactttgggcttacgtatcgagatgctgaaaaccagaagaattggttggaccctgctaaggaaataaaaaaacaggttcgaagtggtgcttggcacttttcatttaatgtgaaattttatccaccagaccctgcccaactatctgaagatatcaccaggtactacctctgcttgcagttgcgagatgacatcgtgtccggaaggctgccctgctcctttgttaccctggccttgctgggctcctacactaggccaaagagcagcaccctgacatgtcagtgaccaaagtagtggtccataaagagacagagatcacaccagaagatggagaggattgaccagaggaataacttagcttgcacatgaatgcagtcatgcaaaccgttaggaaaaccagagcctatatggagttccctcttctaacccaactgacttgtatctgtccgtggaaaatttcagtccagaagaattgaccttgaccattaataaagacactggcagagagatcttcccataataaagcaatctgattcagcatcactaaaccgataatgcatgaagcaacgataaaattacaaaagagcagcatttttaattttcacaaaatgtctcagttttcagctatacctgcacgttcataaccaacaatataaaccgtggtctcatgtaacacataaacaattcatgcctttcatagtttattattattaaagtctaaacaaaattgcaatttcttaggtaaccttatatttacaataaatgaagattaccctcaaatgctagaagctgtctaggtccgtccggtgtgtcagattttcctcagattagatgtgccaataaccaagtttattcagtaaacaacttgtacttgtttcatctggttttattactctcacccataaacagtaatgactctctgaccctctggaaatatgtaatgcttccaatcttgctttgtgtatctcatttaatttgttataaggtagtactgattttagcatattaatgcgatttcttccttgttgtttgctttggtctgtgttcaatccagagagcttaaattgtcattattttgggaagaaaacctgtatttttgttagtttacaatattatgaaatttcacttcaggagaaactgctgggcttcctgtggctttgttttcttagttactttttccgtgccgtgtattttttaattgatttttcttcttttacttgaaaagaaagtgttttattttcaaatctggtccatatttacattctagttcagagccaagccttaaactgtacagaatttccactgtaattaaaactatttagtgttagttataaatagccttcaaaaagagagattctccattacacgatcacctgcatcacagcccatggtgaatgtatgtttctgcatagcgaaataaaaatggcaaatgcactgaaagctct

SEQ ID NO: 10343 - protein, 133 aa, Homo sapiens
MQCKVILLDGSEYTCDVEKRSRGQVLFDKVCEHLNLLEKDYFGLTYRDAENQKNWLDPAKEIKKQVRSGAWHFSFNVKFYPPDPAQLSEDITRYYLCLQLRDDIVSGRLPCSFVTLALLGSYTRPKSSTLTCQ

SEQ ID NO: 10344 - DNA, 514 bp, Homo sapiens
aggaggtattgggagacaaaagaagctcatctataaacattttccatgaatcaagcagaaacttgggttttaaaggattcgcatagaacgggatgccacaggcaaggacagatcccctgaggctgtggaatgagtggggacatccccgcccatctctggatcagactcggaatccaagccggaccaggaggccgagccccaggaggcggcgggggcgcaggggcgcgcgggggcgcccgtgccggagccgcccaaggaggagcagcagcaggccctggagcagttcgccgccgctgcagcgcacagcaccccggtgcggagggaggtcactgacaaggaacaggagtttgctgccagggctgcaaaacagctcgaatatcagcaattagaagacgataaactttctcagaaatcatctagcagtaaactctctcggtctccattaaagattgtcaaaaagcctaaaagcatgcagtgcaaagtgatacttctcgatggatcagaatatacctgt

SEQ ID NO: 10345 - protein, 98 aa, Homo sapiens [sequence omitted]

SEQ ID NO: 10346 - DNA, 717 bp, Homo sapiens; identical to SEQ ID NO: 1723

SEQ ID NO: 10347 - protein, 238 aa, Homo sapiens; identical to SEQ ID NO: 1724

SEQ ID NO: 10348 - DNA, 9518 bp, Homo sapiens
cggggccagggcagcgcggactcgcgtcccgtggagcgttccaggcgggcgcgcggctttctccccagacccaccgagtggcggcggaggcgagatgcgcgggggcgtgctcctggtcttgctgctgtgtgtcgccgcgcagtgccggcagagaggcctgtttcctgccattctcaatcttgccagcaatgctcacatcagcaccaatgccacctgtggcgagaaggggccggagatgttctgcaaacttgtggagcatgtgccaggtcggcccgtccgaaacccacagtgccggatctgtgatggcaacagcgcaaaccccagagaacgccatccaatatcacatgccatagatggcaccaataactggtggcaaagtcccagcattcagaatgggagagaatatcactgggtcacaatcactctggacttaagacaggtctttcaagttgcatatgtcatcattaaagctgccaatgcccctcgacctggaaactggattttggagcgttctctggatggcaccacgttcagcccctggcagtattatgcagtcagcgactcagagtgtttgtctcgttacaatataactccaagacgagggccacccacctacagggctgatgatgaagtgatctgcacctcctattattccagattggtgccacttgagcatggagagattcatacatcactcatcaatggcagaccaagcgctgacgatctttcacccaagttgttggaattcacttctgcacgatatattcgccttcgcttgcaacgcattagaacgctcaatgcagatctcatgacccttagccaccgggaacctaaagaactggatcctattgttaccagacgctattattattcaataaaggacatttctgttggaggcatgtgtatctgctatggccatgctagtagctgcccatgggatgaaactacaaagaaactgcagtgtcaatgtgagcataatacttgcggggagagctgtaacaggtgctgtcctgggtaccatcagcagccctggaggccgggaaccgtgtcctccggcaatacatgtgaagcatgtaattgtcacaataaagccaaagactgttactatgatgaaagtgttgcaaagcagaagaaaagtttgaatactgctggacagttcagaggaggaggggtttgcataaattgcttgcagaacaccatgggaatcaactgtgaaacctgtattgatggatattatagaccacacaaagtgtctccttatgaggatgagccttgccgcccctgtaattgtgaccctgtggggtccctcagttctgtctgtattaaggatgacctccattctgacttacacaatgggaagcagccaggtcagtgcccatgtaaggaaggttatacaggagaaaaatgtgatcgctgccaacttggctataaggattacccgacctgtgtctcctgtgggtgcaacccagtgggcagtgccagtgatgagccctgcacagggccctgtgtttgtaaggaaaacgttgaggggaaggcctgtgatcgctgcaagccaggattctataacttgaaggaaaaaaacccccggggctgctccgagtgcttctgctttggcgtttctgatgtctgcagcagcctctcttggcctgttggtcaggtaaacagtatgtccgggtggctggtcaccgacttgatcagtcccaggaagatcccgtctcagcaagatgcactaggcgggcgccatcaggtcagcatcaacaacaccgcggtcatgcagagactggctcccaagtactactgggcagcccccgaggcctaccttggaaataagctgactgcgtttggcggattcctgaaatacacggtgtcctacgatattccggtagagacggtagacagtaacctcatgtcgcatgctgacgtcatcattaagggaaacggactcactttaagcacacaggctgagggtctgtcattgcagccttatgaagagtacctaaacgtggttagacttgtgcctgaaaacttccaagattttcacagcaaaaggcagattgatcgtgaccagctgatgactgtccttgccaatgtgacacatcttttgatcagagccaactacaattctgcaaaaatggctctttacaggttggagtccgtctctctggacatagccagctctaatgccatcgacctggtggtggccgctgatgtggagcactgtgaatgtccgcaaggctacacagggacctcctgtgagtcgtgcctctctggctattaccgcgtggatggaatactctttggaggaatttgtcaaccctgtgaatgccacggccatgcagctgagtgtaatgttcacggcgtttgcattgcgtgtgcgcacaacaccaccggcgtccactgtgagcagtgcttgcccggcttctacggggagccttcccgagggacacctggggactgccagccctgcgcctgccctctcaccatagcctccaacaatttcagccccacctgccacctcaatgatggagatgaagtggtctgtgactggtgtgccccgggctactcaggagcttggtgtgagagatgtgcagatggttactatggaaacccaacagtgcctggcgaatcttgtgttccctgtgactgcagcggcaacgtggacccctcggaggctggtcactgtgactcagtcaccggggagtgcctgaagtgcctggggaacacagatggcgcccactgtgaaaggtgtgctgacgggttctatggggacgctgtgacagccaagaactgccgcgcctgtgaatgccatgtgaaaggctcccattctgccgtgtgccatcttgagaccgggctctgtgactgcaaaccaaacgtgactggacagcagtgtgaccagtgcttgcatggctattatgggctggactcaggccatggctgccggccctgcaactgcagcgtggcaggctccgtgtcagatggctgcacggatgaaggccagtgtcactgtgtcccaggtgtggcagggaaaaggtgtgacaggtgtgcccatggcttctacgcctaccaggatggtagctgtacaccctgtgactgcccacacactcagaatacctgcgacccagaaactggagagtgtgtctgcccccctcacacacagggtgtgaagtgtgaagaatgtgaggatgggcactggggctacgatgcggaggtggggtgccaggcctgcaattgcagtctcgtggggtcgactcatcatcggtgcgatgtggtcaccggccattgccagtgcaagtcaaaatttggtggccgggcctgcgatcagtgttccttgggttacagagactttcccgactgtgttccctgtgactgtgacctgagggggacgtcgggggacgcctgcaacctggagcagggtctctgcggctgtgtggaggaaaccggggcctgcccttgcaaggaaaatgtctttggtcctcagtgcaacgaatgtcgagagggcaccttcgctctccgcgcagacaaccccctgggctgcagcccgtgcttctgctccgggctgtcccacctctgctcagagctggaggactacgtgaggaccccagtaacgctgggctccgatcagcctcttctgcgtgtggtttctcagagtaacttgaggggcacgaccgagggggtttactaccaggcccccgacttcctgctggatgccgccaccgtccggcagcacatccgtgcagagccgttttactggcggctgccgcagcagttccaaggagaccagctcatggcctatggtggcaaactgaagtacagcgtggccttctattctttggatggcgtcggcacctccaattttgagcctcaagttctcatcaaaggtggtcggatcagaaagcaagtcatttacatggatgcaccagccccagagaatggagtgagacaggaacaagaagtagcaatgagagagaatttttggaaatattttaactctgtttctgaaaaacctgtcacgcgagaggattttatgtctgtcctcagcgatattgagtacatcctcatcaaggcatcgtatggtcaaggattacagcagagcagaatctcagacatttcaatggaggttggcagaaaggctgaaaagctgcacccagaagaagaggttgcatctcttttagagaattgtgtctgtcctcctggcactgtgggattctcatgtcaggactgcgcccctgggtaccacagagggaagctcccagcagggagtgacaggggaccacgccctctggttgctccttgtgttccctgcagttgcaacaaccacagtgacacctgtgaccccaacaccgggaagtgtctgaactgtggcgataacacagcaggtgaccattgtgatgtgtgtacttctggctactacgggaaggtgactggctcagcaagtgactgtgctctgtgtgcctgtcctcacagccctcctgccagttttagtcccacttgtgtcttggaaggggaccacgatttccgttgtgacgcctgtctcctgggctatgaaggaaaacactgtgaaaggtgctcctcaagctattatgggaaccctcaaacaccaggtggcagttgccagaagtgtgactgcaacccgcacggctctgtccacggtgactgtgaccgcacatctgggcagtgcgtttgcaggctgggggcctcggggctccggtgcgatgagtgtgaaccgaggcacattctgatggaaacagattgtgtttcctgtgatgatgagtgtgtaggtgtgctgctgaatgacttggatgagattggtgatgccgttctttctctgaacctcactggcattatccctgtcccatatggaattttgtcaaacctggaaaatacaactaaatatctccaggaatctttattaaaagaaaatatgcaaaaggacctgggaaaaattaagcttgaaggtgttgcagaagaaacggacaacctgcaaaagaagctcactaggatgttagcgagtacccaaaaggtgaatagggcaactgagagaatcttcaaggagagtcaagacctggccatagccattgagaggctgcagatgagcatcacagaaattatggaaaagacaactttaaatcagactttggatgaagatttcctactacccaattctactcttcagaacatgcaacagaatggtacatctttgctagaaatcatgcagataagagacttcacacagttgcaccaaaatgccacccttgaactcaaggctgctgaagatttattgtcacaaattcaggaaaattaccagaagccgctggaagaattggaggtattgaaagaagcagcaagccacgtcctttcaaagcacaacaatgaactaaaggcggctgaggcgctcgtgagggaagctgaggcaaagatgcaggaaagcaaccacctgctgctcatggtcaatgctaatctgagagaattcagtgataaaaagctgcatgttcaagaagaacaaaatctgacctcagagctcattgtccaaggaagaggattgatagatgctgctgctgcacaaacagatgctgtacaagatgctctagagcacttagaggatcaccaggataagctacttttatggtctgccaaaatcaggcaccacatagatgacctggtcatgcacatgtcccaaaggaacgcagtcgacctggtctacagagctgaggaccatgccgctgagttccagagactagcagatgttctgtacagtggccttgaaaacatcagaaatgtgtccctgaatgccaccagtgcagcctatgtccattacaacatccagagcctgattgaagaatcggaggaactggccagagatgctcacaggactgtgactgagacgagcctgctctcagaatcccttgtttctaacgggaaagcggccgtgcagcgcagctccagatttctaaaagaaggcaacaacctcagcaggaagcttccaggtattgcattggaactgagtgaattgagaaataagacaaacagatttcaagagaatgctgttgaaattaccaggcaaaccaatgaatcactcttgatacttagagcaattcctaaaggtataagagacaagggagccaaaaccaaagagctggccacgtctgcaagccagagcgcggtgagcacgctgagggacgtggcggggctgagccaggagctgctgaacacatctgccagcctgtccagggtcaacaccacattacgagagacacaccagcttctgcaggactccaccatggccactctgttggctggaagaaaagtcaaagacgtggaaattcaagccaaccttttgtttgatcggttgaagcctttgaagatgttagaggagaatctgagcagaaacctatcagaaattaaactgttgatcagccaggcccgcaaacaagcagcttctattaaagtcgccgtgtctgcagacagagattgcatccgggcctaccagcctcagatttcctctaccaactacaataccttaacactaaatgttaagacacaggaacccgataatcttctcttctacctcggtagcagcaccgcttctgatttccttgcagtggagatgcggcgagggagagtggccttcctgtgggacctgggctccgggtccacacgcttggagtttccagactttcccattgatgacaacagatggcacagtatccatgtagccagatttggaaacattggttcactgagtgtaaaggaaatgagctcaaatcaaaagtcaccaacaaaaacaagtaaatcccctgggacagctaatgttctggatgtaaacaattcaacactcatgtttgttggaggtcttggaggacaaatcaagaaatctcctgctgtgaaggttactcattttaaaggctgcttgggggaggccttcctgaatggaaaatccataggcctatggaactatattgaaagggaaggcaagtgccgtgggtgcttcggaagctcccagaatgaagacccttccttccattttgacgggagtgggtactctgtcgtggagaagtcacttccggctaccgtgacccagataatcatgctttttaataccttttcacctaatggacttcttctctacctgggttcatacggcacaaaagactttttatccatcgagctgtttcgtggcagagtgaaggttatgactgacctgggttcaggacccattacccttttgacagacagacgttataacaatggaacctggtacaaaattgccttccagcgaaaccggaagcaaggagtgctagcagttatcgatgcctataacaccagtaataaagaaaccaagcagggcgagactccgggagcatcttctgacctcaaccgcctagacaaggacccgatttatgtgggtggattaccaaggtcaagagttgtaaggagaggtgtcaccaccaaaagctttgtgggctgcatcaagaacctggaaatatccagatcaacctttgacttactcagaaattcctatggagtgagaaaaggctgtttactggagcccatccggagtgttagcttcctgaaaggcggctacattgaattgccacccaaatctttgtcaccagaatcagaatggctggtaacatttgccaccacgaacagcagtggcatcatcctggctgccctcggcggggatgtggagaagcggggtgatcgtgaggaagcacacgtgcccttcttttccgtcatgctgatcggaggcaacattgaggtacatgtcaatcctggggatgggacaggcctgagaaaagctctcctgcacgctcccacgggtacctgcagtgatggacaagcgcattccatctccttggtcaggaatcggagaattatcactgtccaattggatgagaacaatcctgtggaaatgaagttgggcacattagtagaaagcaggacgataaatgtgtccaatctgtacgtcgggggaattccagagggagaggggacgtcactgctcacaatgagaagatcgttccatggctgtatcaaaaacctgatcttcaatttggaacttttggatttcaacagtgcagttggccatgagcaagtcgacctggacacctgctggctgtcagaaaggcctaagctggctcccgatgcagaggacagcaagctcttgccagagccccgggcttttccagaacagtgtgtggtggatgcagctctggagtacgttcccggcgctcaccagtttggtctcacacaaaacagccatttcatcttgccttttaatcagtcggctgtcagaaagaagctctcggttgagctaagcatccgcacgttcgcctccagcggcctgatttactacatggctcatcagaaccaagcagactacgctgtgctccagctgcacgggggccgcctccacttcatgtttgaccttggcaaaggcagaacaaaggtctctcaccctgcactgctcagtgatggcaagtggcacacggtcaagacagactatgttaaaagaaaaggcttcataactgtcgacggccgagagtctcccatggtgactgtggtgggagatggaaccatgctggatgtggagggtttgttctacctaggaggcctgccctcccagtaccaggccaggaaaattggaaatatcacccacagcatccctgcctgcattggggatgtgacggttaacagcaaacagctggacaaggacagcccggtgtctgccttcacggtgaacaggtgctacgcagtggcccaggaaggaacatactttgacggaagcggatatgcagctcttgtcaaagagggctacaaagtccagtcagatgtgaacatcacactggagtttcgaacctcctcgcagaatggcgtcctcctggggatcagcactgccaaagtggatgccattggactagagcttgtggacggcaaggtcttgttccatgtcaacaatggtgctggcaggataacagctgcatatgagcccaaaaccgccactgtgctctgtgatggaaaatggcacactcttcaagctaacaaaagcaaacaccgtatcactctgattgttgacgggaacgcagttggcgctgaaagtccacacacccagtctacctcagtggacaccaacaatcccatttatgttggtggctatcctgctggtgtgaagcaaaaatgcctgcgcagccagacctcgttccgcgggtgtttgaggaagctagctctgattaagagcccgcaggtgcagtcctttgacttcagcagagcgttcgaactgcacggagttttccttcattcctgtcctgggaccgagtcctgaacttcaagcagaatcctcagttggaatcattgctaatattttgaggagaagtgtatgtgtgaattaagaatctcttcagttcatatttcatttccaactcaggttaagtgtttctggggagagatgttgtgtttacgttacactaaaaccacatgtgcaacaaatacctccattaaatggtctaaaatgtaaattg

SEQ ID NO: 10349 - protein, 3075 aa, Homo sapiens; identical to SEQ ID NO: 1726

SEQ ID NO: 10350 - DNA, 5057 bp, Homo sapiens
atgaggggacttgggacttgcctggcgactttggccggacttttgctaactgcggcgggcgagacgttctcaggtggctgcctctttgatgagccgtatagcacatgtggatatagtcaatctgaaggtgatgacttcaattgggagcaagtgaacaccttgactaaaccgacttctgatccatggatgccatcaggttctttcatgctggtgaatgcctctgggagacctgaggggcagagagcccacctgctcttaccccaacttaaagaaaatgacacccactgcatcgattttcactattttgtgtccagcaagagtaattctcctccggggttactcaatgtctacgtgaaggtcaataacgggccactggggaatcctatctggaatatatctggagacccaacacgtacatggaacagggcagaactggccattagtactttctggcctaacttttatcaggtgatttttgaagtgataacttctggacatcaaggctatctcgctatcgatgaggtgaaggtgttaggacatccatgtaccaggactcctcacttcctgcggattcagaatgtggaagttaatgctggccagtttgctaccttccagtgcagtgccatcggcaggaccgtggcaggagacaggctctggttacagggcattgatgtgcgagatgctcctctgaaggaaatcaaggtgaccagctcccgacgcttcattgcttcatttaatgttgtgaataccaccaaacgagatgctggaaagtaccgctgcatgattcgcactgaaggaggtgttggaatatcaaactatgcagagttggtagttaaagaaccacccgttcctattgccccacctcagctcgcctctgtaggagccacctacctgtggatacagctcaacgccaactccatcaatggggatgggcccattgtggcccgagaggtggagtactgcacggccagtgggagctggaatgaccggcagccagtcgattccacgagctataaaattggacaccttgacccagatacagaatatgagattagtgtgctcctgaccaggccaggggagggtggcactggctctcctggtccagctctcaggacaagaacaaagtgtgctgatcccatgcgaggcccaagaaaactagaagtagtggaggtcaaatctcggcaaatcactatccgctgggagccatttggatataatgtaactcgttgccacagttataatctcactgtccactactgttaccaagttggaggacaagaacaagtgcgagaagaagtaagctgggatacagaaaactcacaccctcaacacacgatcactaacctgtcaccatacaccaatgtcagtgtgaaactgatcctcatgaacccagagggccggaaggaaagccaagaactcatagtgcagacagatgaagacctcccaggtgctgttcccactgaatccatacaaggaagtacctttgaagagaagatatttcttcagtggagagaaccaactcaaacatatggtgtaatcactttatatgagatcacctacaaagcagtcagttcctttgacccagaaatagatttatccaatcagagtggaagagtttcaaagctgggaaatgaaacccattttctgttttttggactgtatccggggaccacatactcctttaccatccgagctagcacagctaagggttttgggcctccagcaacaaaccagttcaccaccaaaatatcagcaccctctatgccagcttatgaacttgagacacctttgaatcaaactgacaataccgtgacagtcatgctgaaacctgcccacagcagaggagcacctgtcagtgtctatcaaatagttgttgaggaagaacgtcctcgaagaactaaaaagacgacagaaatcttaaagtgctacccagtgccaattcacttccagaatgcttctctgctgaactcacagtactactttgctgcagaatttcctgcagacagcctccaagctgcgcagccttttacaattggtgataataagacatataatggatactggaacactccccttctcccctataaaagctacagaatttatttccaagctgctagtagagccaatggggaaaccaaaatagactgtgtccaagtggccacaaaaggagctgccactccgaaaccagtcccagaacccgagaaacagacagaccatacagttaaaattgctggagtcatcgcgggcatcttgctgttcgtgattatatttcttggagttgtgttggtaatgaagaaaaggaaactggccaagaagcggaaagagaccatgagcagcacccgacaggagatgactgtgatggtgaactcaatggacaagagctatgctgagcagggcacaaactgcgacgaggctttctcattcatggacacgcacaatctgaatgggagatctgtgtcttcaccatcgtccttcacaatgaaaacaaatacactgagcacatcggtgcctaattcctattacccagatgaaacccacacaatggccagcgataccagcagcctggtgcagtcccatacttacaagaagcgagagccggccgacgtgccctatcagactgggcagctccaccccgccatccgggtggcagacctccttcagcacatcacacagatgaagtgtgcggagggctacggcttcaaggaggaatacgagagcttctttgaagggcagtctgcaccatgggactcggctaagaaagatgagaacagaatgaagaacagatacgggaatatcattgcatacgatcattcccgagtgaggctgcagacaatagaaggagacacaaactcagactatatcaatggcaattatatcgatggttatcatcgacccaatcattacattgctacccaagggccaatgcaggaaaccatctatgacttctggaggatggtgtggcacgaaaacactgcaagtatcatcatggtgaccaatcttgtggaagtgggaagggtcaaatgctgcaaatactggccagatgacacagagatatataaagacattaaagttaccctaatagaaacagaactactggcagaatatgtgataagaacatttgctgttgaaaagagaggtgtgcatgaaatccgagagatcagacagtttcacttcactggctggccggatcatggggtcccctaccatgccaccggcctgctgggattcgtgcggcaagtcaagtccaagagcccgcccagtgcaggcccactggtggtgcactgcagtgctggtgcagggaggactggctgtttcatcgtcattgatatcatgttggacatggccgaaagggaaggggtcgtagacatctacaactgcgtcagggagctgcggtcacggagggtgaacatggtgcaaacagaggagcagtatgtgtttatccacgatgcgatcctggaagcctgtctttgtggggacacctctgtgcctgcttcccaagttaggtctctgtattatgacatgaacaaactggatccacagacaaactcaagccagattaaagaggaattccggacgctaaacatggtgacaccaacgctgcgagtagaggactgcagcatcgcactgttgccccggaaccatgagaaaaaccggtgcatggacatcctgcccccagaccgctgcctgcccttcctcatcaccatcgatggggagagcagcaactacatcaatgctgccctcatggacagctataaacagccttcagcttttatagtcacccagcatcctttgccaaacacagtgaaagacttttggagactggtcctggattatcactgcacatccgtagttatgctaaatgatgtggatcctgcccagttgtgtccacagtactggccagaaaacggagtacacagacacggccccatccaggtggaatttgtctctgctgacctggaagaggacatcatcagcaggatattccgcatttacaatgccgccagaccccaagatggatatcggatggtgcagcaattccagttcctgggctggccgatgtacagggacacaccagtgtctaagcgctccttcttgaagctcattcgccaggtggacaagtggcaagaggagtacaatggcggggaaggccgcacggttgtgcactgcttgaacgggggaggccgcagtgggacgttctgcgccatcagcatcgtatgtgagatgctccggcaccagagaaccgtggatgtctttcacgctgtgaagacactgaggaacaacaagcccaacatggtcgacctcctggatcagtacaagttctgctacgaggtggccctggaatacttgaattctggctgatggtgtaaacagctctgcaaacaatccctttcataccacaaagccaagacgttccatggtatttgtgcaaaagagatgaagacttctcaatatgcttattttgctttgcataattggctctttttaagagcccaagaaagtgtttctaaaattgcttgcactgcccaatcccagtaatgctgctgcctgacagaaacacacacacagccacagttgccaaatcccgtactccttgccaccggcttcctagagcagcgtagacagctggtaaactgaagagcacaactatattcttatgaaggaatttgtacctttggggtattattttgtggcccgtgaccctcgttattgttacagctgagtgtatgtttttgttctgtggagaatgctatctggcattatggtaatatattattttaggtaatatttgtactttaacatgttgcataatatatgcttatgtagctttccaggactaacagataaatgtgtaatgaacaaagatatgttgtatgagtcgtcgtttctgtcagatttgtattgtttccaagggaaaagcttgggggaggactcagttcacaaaatgcaaaactcaacgatcagattcacggacccagagcttttccatgtgtttatattgtaaatatttttgatttcatcaaattatttattcattaaaagaaatttttgtgaagcac

SEQ ID NO: 10351 - protein, 1452 aa, Homo sapiens; identical to SEQ ID NO: 1729

SEQ ID NO: 10352 - DNA, 5151 bp, Homo sapiens
atgaggggacttgggacttgcctggcgactttggccggacttttgctaactgcggcgggcgagacgttctcaggtggctgcctctttgatgagccgtatagcacatgtggatatagtcaatctgaaggtgatgacttcaattgggagcaagtgaacaccttgactaaaccgacttctgatccatggatgccatcaggttctttcatgctggtgaatgcctctgggagacctgaggggcagagagcccacctgctcttaccccaacttaaagaaaatgacacccactgcatcgattttcactattttgtgtccagcaagagtaattctcctccggggttactcaatgtctacgtgaaggtcaataacgggccactggggaatcctatctggaatatatctggagacccaacacgtacatggaacagggcagaactggccattagtactttctggcctaacttttatcaggtgatttttgaagtgataacttctggacatcaaggctatctcgctatcgatgaggtgaaggtgttaggacatccatgtaccaggactcctcacttcctgcggattcagaatgtggaagttaatgctggccagtttgctaccttccagtgcagtgccatcggcaggaccgtggcaggagacaggctctggttacagggcattgatgtgcgagatgctcctctgaaggaaatcaaggtgaccagctcccgacgcttcattgcttcatttaatgttgtgaataccaccaaacgagatgctggaaagtaccgctgcatgattcgcactgaaggaggtgttggaatatcaaactatgcagagttggtagttaaagaaccacccgttcctattgccccacctcagctcgcctctgtaggagccacctacctgtggatacagctcaacgccaactccatcaatggggatgggcccattgtggcccgagaggtggagtactgcacggccagtgggagctggaatgaccggcagccagtcgattccacgagctataaaattggacaccttgacccagatacagaatatgagattagtgtgctcctgaccaggccaggggagggtggcactggctctcctggtccagctctcaggacaagaacaaagtgtgctgatcccatgcgaggcccaagaaaactagaagtagtggaggtcaaatctcggcaaatcactatccgctgggagccatttggatataatgtaactcgttgccacagttataatctcactgtccactactgttaccaagttggaggacaagaacaagtgcgagaagaagtaagctgggatacagaaaactcacaccctcaacacacgatcactaacctgtcaccatacaccaatgtcagtgtgaaactgatcctcatgaacccagagggccggaaggaaagccaagaactcatagtgcagacagatgaagacctcccaggtgctgttcccactgaatccatacaaggaagtacctttgaagagaagatatttcttcagtggagagaaccaactcaaacatatggtgtaatcactttatatgagatcacctacaaagcagtcagttcctttgacccagaaatagatttatccaatcagagtggaagagtttcaaagctgggaaatgaaacccattttctgttttttggactgtatccggggaccacatactcctttaccatccgagctagcacagctaagggttttgggcctccagcaacaaaccagttcaccaccaaaatatcagcaccctctatgccagcttatgaacttgagacacctttgaatcaaactgacaataccgtgacagtcatgctgaaacctgcccacagcagaggagcacctgtcagtgtctatcaaatagttgttgaggaagaacgtcctcgaagaactaaaaagacgacagaaatcttaaagtgctacccagtgccaattcacttccagaatgcttctctgctgaactcacagtactactttgctgcagaatttcctgcagacagcctccaagctgcgcagccttttacaattggtgataataagacatataatggatactggaacactccccttctcccctataaaagctacagaatttatttccaagctgctagtagagccaatggggaaaccaaaatagactgtgtccaagtggccacaaaaggagctgccactccgaaaccagtcccagaacccgagaaacagacagaccatacagttaaaattgctggagtcatcgcgggcatcttgctgttcgtgattatatttcttggagttgtgttggtaatgaagaaaaggaaactggccaagaagcggaaagagaccatgagcagcacccgacaggagatgactgtgatggtgaactcaatggacaagagctatgctgagcagggcacaaactgcgacgaggctttctcattcatggacacgcacaatctgaatgggagatctgtgtcttcaccatcgtccttcacaatgaaaacaaatacactgagcacatcggtgcctaattcctattacccagatgaaacccacacaatggccagcgataccagcagcctggtgcagtcccatacttacaagaagcgagagccggccgacgtgccctatcagactgggcagctccaccccgccatccgggtggcagacctccttcagcacatcacacagatgaagtgtgcggagggctacggcttcaaggaggaatacgagagcttctttgaagggcagtctgcaccatgggactcggctaagaaagatgagaacagaatgaagaacagatacgggaatatcattgcatacgatcattcccgagtgaggctgcagacaatagaaggagacacaaactcagactatatcaatggcaattatatcgatggttatcatcgacccaatcattacattgctacccaagggccaatgcaggaaaccatctatgacttctggaggatggtgtggcacgaaaacactgcaagtatcatcatggtgaccaatcttgtggaagtgggaagggtcaaatgctgcaaatactggccagatgacacagagatatataaagacattaaagttaccctaatagaaacagaactactggcagaatatgtgataagaacatttgctgttgaaaagagaggtgtgcatgaaatccgagagatcagacagtttcacttcactggctggccggatcatggggtcccctaccatgccaccggcctgctgggattcgtgcggcaagtcaagtccaagagcccgcccagtgcaggcccactggtggtgcactgcagtgctggtgcagggaggactggctgtttcatcgtcattgatatcatgttggacatggccgaaagggaaggggtcgtagacatctacaactgcgtcagggagctgcggtcacggagggtgaacatggtgcaaacagaggagcagtatgtgtttatccacgatgcgatcctggaagcctgtctttgtggggacacctctgtgcctgcttcccaagttaggtctctgtattatgacatgaacaaactggatccacagacaaactcaagccagattaaagaggaattccggacgctaaacatggtgacaccaacgctgcgagtagaggactgcagcatcgcactgttgccccggaaccatgagaaaaaccggtgcatggacatcctgcccccagaccgctgcctgcccttcctcatcaccatcgatggggagagcagcaactacatcaatgctgccctcatggacagctataaacagccttcagcttttatagtcacccagcatcctttgccaaacacagtgaaagacttttggagactggtcctggattatcactgcacatccgtagttatgctaaatgatgtggatcctgcccagttgtgtccacagtactggccagaaaacggagtacacagacacggccccatccaggtggaatttgtctctgctgacctggaagaggacatcatcagcaggatattccgcatttacaatgccgccagaccccaagatggatatcggatggtgcagcaattccagttcctgggctggccgatgtacagggacacaccagtgtctaagcgctccttcttgaagctcattcgccaggtggacaagtggcaagaggagtacaatggcggggaaggccgcacggttgtgcactgcttgaacgggggaggccgcagtgggacgttctgcgccatcagcatcgtatgtgagatgctccggcaccagagaaccgtggatgtctttcacgctgtgaagacactgaggaacaacaagcccaacatggtcgacctcctggatcagtacaagttctgctacgaggtggccctggaatacttgaattctggctgatggtgtaaacagctctgcaaacaatccctttcataccacaaagccaagacgttccatggtatttgtgcaaaagagatgaagacttctcaatatgcttattttgctttgcataattggctctttttaagagcccaagaaagtgtttctaaaattgcttgcactgcccaatcccagtaatgctgctgcctgacagaaacacacacacagccacagttgccaaatcccgtactccttgccaccggcttcctagagcagcgtagacagctggtaaactgaagagcacaactatattcttatgaaggaatttgtacctttggggtattattttgtggcccgtgaccctcgttattgttacagctgagtgtatgtttttgttctgtggagaatgctatctggcattatggtaatatattattttaggtaatatttgtactttaacatgttgcataatatatgcttatgtagctttccaggactaacagataaatgtgtaatgaacaaagatatgttgtatgagtcgtcgtttctgtcagatttgtattgtttccaagggaaaagcttgggggaggactcagttcacaaaatgcaaaactcaacgatcagattcacggacccagagcttttccatgtgtttatattgtaaatatttttgatttcatcaaattatttattcattaaaagaaatttttgtgaagcacagtgagtgacaatcatttttcttaaggcctggaaacgattttctgtatgatgttactttatgtgaattctcatctcaataaatgatgacccgtg

SEQ ID NO: 10353 - protein, 1452 aa, Homo sapiens; identical to SEQ ID NO: 1729

SEQ ID NO: 10354 - DNA, 5296 bp, Homo sapiens
gtgctgtggcccaatcctgtgcgtgtctcctcttcaggctcctgccggagcatgcttctctaatcttaccatttatcactgacccttcggtgaaactctcttctgtttaaatttaccagggtacactttgtaatacttgggaccaagaatttgaagatagtaatcagacaaatcaaacaactagtagtagtggagagacacgtagccctacaggaaggggtagaattatcattaaaaacacagacaaaccagagactgcctgaaaaaaaaaaaaagatgaactggaaagattcaaagtaggctctattggaggtggctgcctctttgatgagccgtatagcacatgtggatatagtcaatctgaaggtgatgacttcaattgggagcaagtgaacaccttgactaaaccgacttctgatccatggatgccatcaggttctttcatgctggtgaatgcctctgggagacctgaggggcagagagcccacctgctcttaccccaacttaaagaaaatgacacccactgcatcgattttcactattttgtgtccagcaagagtaattctcctccggggttactcaatgtctacgtgaaggtcaataacgggccactggggaatcctatctggaatatatctggagacccaacacgtacatggaacagggcagaactggccattagtactttctggcctaacttttatcaggtgatttttgaagtgataacttctggacatcaaggctatctcgctatcgatgaggtgaaggtgttaggacatccatgtaccaggactcctcacttcctgcggattcagaatgtggaagttaatgctggccagtttgctaccttccagtgcagtgccatcggcaggaccgtggcaggagacaggctctggttacagggcattgatgtgcgagatgctcctctgaaggaaatcaaggtgaccagctcccgacgcttcattgcttcatttaatgttgtgaataccaccaaacgagatgctggaaagtaccgctgcatgattcgcactgaaggaggtgttggaatatcaaactatgcagagttggtagttaaagaaccacccgttcctattgccccacctcagctcgcctctgtaggagccacctacctgtggatacagctcaacgccaactccatcaatggggatgggcccattgtggcccgagaggtggagtactgcacggccagtgggagctggaatgaccggcagccagtcgattccacgagctataaaattggacaccttgacccagatacagaatatgagattagtgtgctcctgaccaggccaggggagggtggcactggctctcctggtccagctctcaggacaagaacaaagtgtgctgatcccatgcgaggcccaagaaaactagaagtagtggaggtcaaatctcggcaaatcactatccgctgggagccatttggatataatgtaactcgttgccacagttataatctcactgtccactactgttaccaagttggaggacaagaacaagtgcgagaagaagtaagctgggatacagaaaactcacaccctcaacacacgatcactaacctgtcaccatacaccaatgtcagtgtgaaactgatcctcatgaacccagagggccggaaggaaagccaagaactcatagtgcagacagatgaagacctcccaggtgctgttcccactgaatccatacaaggaagtacctttgaagagaagatatttcttcagtggagagaaccaactcaaacatatggtgtaatcactttatatgagatcacctacaaagcagtcagttcctttgacccagaaatagatttatccaatcagagtggaagagtttcaaagctgggaaatgaaacccattttctgttttttggactgtatccggggaccacatactcctttaccatccgagctagcacagctaagggttttgggcctccagcaacaaaccagttcaccaccaaaatatcagcaccctctatgccagcttatgaacttgagacacctttgaatcaaactgacaataccgtgacagtcatgctgaaacctgcccacagcagaggagcacctgtcagtgtctatcaaatagttgttgaggaagaacgtcctcgaagaactaaaaagacgacagaaatcttaaagtgctacccagtgccaattcacttccagaatgcttctctgctgaactcacagtactactttgctgcagaatttcctgcagacagcctccaagctgcgcagccttttacaattggtgataataagacatataatggatactggaacactccccttctcccctataaaagctacagaatttatttccaagctgctagtagagccaatggggaaaccaaaatagactgtgtccaagtggccacaaaaggagctgccactccgaaaccagtcccagaacccgagaaacagacagaccatacagttaaaattgctggagtcatcgcgggcatcttgctgttcgtgattatatttcttggagttgtgttggtaatgaagaaaaggaaactggccaagaagcggaaagagaccatgagcagcacccgacaggagatgactgtgatggtgaactcaatggacaagagctatgctgagcagggcacaaactgcgacgaggctttctcattcatggacacgcacaatctgaatgggagatctgtgtcttcaccatcgtccttcacaatgaaaacaaatacactgagcacatcggtgcctaattcctattacccagatgaaacccacacaatggccagcgataccagcagcctggtgcagtcccatacttacaagaagcgagagccggccgacgtgccctatcagactgggcagctccaccccgccatccgggtggcagacctccttcagcacatcacacagatgaagtgtgcggagggctacggcttcaaggaggaatacgagagcttctttgaagggcagtctgcaccatgggactcggctaagaaagatgagaacagaatgaagaacagatacgggaatatcattgcatacgatcattcccgagtgaggctgcagacaatagaaggagacacaaactcagactatatcaatggcaattatatcgatggttatcatcgacccaatcattacattgctacccaagggccaatgcaggaaaccatctatgacttctggaggatggtgtggcacgaaaacactgcaagtatcatcatggtgaccaatcttgtggaagtgggaagggtcaaatgctgcaaatactggccagatgacacagagatatataaagacattaaagttaccctaatagaaacagaactactggcagaatatgtgataagaacatttgctgttgaaaagagaggtgtgcatgaaatccgagagatcagacagtttcacttcactggctggccggatcatggggtcccctaccatgccaccggcctgctgggattcgtgcggcaagtcaagtccaagagcccgcccagtgcaggcccactggtggtgcactgcagtgctggtgcagggaggactggctgtttcatcgtcattgatatcatgttggacatggccgaaagggaaggggtcgtagacatctacaactgcgtcagggagctgcggtcacggagggtgaacatggtgcaaacagaggagcagtatgtgtttatccacgatgcgatcctggaagcctgtctttgtggggacacctctgtgcctgcttcccaagttaggtctctgtattatgacatgaacaaactggatccacagacaaactcaagccagattaaagaggaattccggacgctaaacatggtgacaccaacgctgcgagtagaggactgcagcatcgcactgttgccccggaaccatgagaaaaaccggtgcatggacatcctgcccccagaccgctgcctgcccttcctcatcaccatcgatggggagagcagcaactacatcaatgctgccctcatggacagctataaacagccttcagcttttatagtcacccagcatcctttgccaaacacagtgaaagacttttggagactggtcctggattatcactgcacatccgtagttatgctaaatgatgtggatcctgcccagttgtgtccacagtactggccagaaaacggagtacacagacacggccccatccaggtggaatttgtctctgctgacctggaagaggacatcatcagcaggatattccgcatttacaatgccgccagaccccaagatggatatcggatggtgcagcaattccagttcctgggctggccgatgtacagggacacaccagtgtctaagcgctccttcttgaagctcattcgccaggtggacaagtggcaagaggagtacaatggcggggaaggccgcacggttgtgcactgcttgaacgggggaggccgcagtgggacgttctgcgccatcagcatcgtatgtgagatgctccggcaccagagaaccgtggatgtctttcacgctgtgaagacactgaggaacaacaagcccaacatggtcgacctcctggatcagtacaagttctgctacgaggtggccctggaatacttgaattctggctgatggtgtaaacagctctgcaaacaatccctttcataccacaaagccaagacgttccatggtatttgtgcaaaagagatgaagacttctcaatatgcttattttgctttgcataattggctctttttaagagcccaagaaagtgtttctaaaattgcttgcactgcccaatcccagtaatgctgctgcctgacagaaacacacacacagccacagttgccaaatcccgtactccttgccaccggcttcctagagcagcgtagacagctggtaaactgaagagcacaactatattcttatgaaggaatttgtacctttggggtattattttgtggcccgtgaccctcgttattgttacagctgagtgtatgtttttgttctgtggagaatgctatctggcattatggtaatatattattttaggtaatatttgtactttaacatgttgcataatatatgcttatgtagctttccaggactaacagataaatgtgtaatgaacaaagatatgttgtatgagtcgtcgtttctgtcagatttgtattgtttccaagggaaaagcttgggggaggactcagttcacaaaatgcaaaactcaacgatcagattcacggacccagagcttttccatgtgtttatattgtaaatatttttgatttcatcaaattatttattcattaaaagaaatttttgtgaagcac

SEQ ID NO: 10355 - protein, 1390 aa, Homo sapiens
MPSGSFMLVNASGRPEGQRAHLLLPQLKENDTHCIDFHYFVSSKSNSPPGLLNVYVKVNNGPLGNPIWNISGDPTRTWNRAELAISTFWPNFYQVIFEVITSGHQGYLAIDEVKVLGHPCTRTPHFLRIQNVEVNAGQFATFQCSAIGRTVAGDRLWLQGIDVRDAPLKEIKVTSSRRFIASFNVVNTTKRDAGKYRCMIRTEGGVGISNYAELVVKEPPVPIAPPQLASVGATYLWIQLNANSINGDGPIVAREVEYCTASGSWNDRQPVDSTSYKIGHLDPDTEYEISVLLTRPGEGGTGSPGPALRTRTKCADPMRGPRKLEVVEVKSRQITIRWEPFGYNVTRCHSYNLTVHYCYQVGGQEQVREEVSWDTENSHPQHTITNLSPYTNVSVKLILMNPEGRKESQELIVQTDEDLPGAVPTESIQGSTFEEKIFLQWREPTQTYGVITLYEITYKAVSSFDPEIDLSNQSGRVSKLGNETHFLFFGLYPGTTYSFTIRASTAKGFGPPATNQFTTKISAPSMPAYELETPLNQTDNTVTVMLKPAHSRGAPVSVYQIVVEEERPRRTKKTTEILKCYPVPIHFQNASLLNSQYYFAAEFPADSLQAAQPFTIGDNKTYNGYWNTPLLPYKSYRIYFQAASRANGETKIDCVQVATKGAATPKPVPEPEKQTDHTVKIAGVIAGILLFVIIFLGVVLVMKKRKLAKKRKETMSSTRQEMTVMVNSMDKSYAEQGTNCDEAFSFMDTHNLNGRSVSSPSSFTMKTNTLSTSVPNSYYPDETHTMASDTSSLVQSHTYKKREPADVPYQTGQLHPAIRVADLLQHITQMKCAEGYGFKEEYESFFEGQSAPWDSAKKDENRMKNRYGNIIAYDHSRVRLQTIEGDTNSDYINGNYIDGYHRPNHYIATQGPMQETIYDFWRMVWHENTASIIMVTNLVEVGRVKCCKYWPDDTEIYKDIKVTLIETELLAEYVIRTFAVEKRGVHEIREIRQFHFTGWPDHGVPYHATGLLGFVRQVKSKSPPSAGPLVVHCSAGAGRTGCFIVIDIMLDMAEREGVVDIYNCVRELRSRRVNMVQTEEQYVFIHDAILEACLCGDTSVPASQVRSLYYDMNKLDPQTNSSQIKEEFRTLNMVTPTLRVEDCSIALLPRNHEKNRCMDILPPDRCLPFLITIDGESSNYINAALMDSYKQPSAFIVTQHPLPNTVKDFWRLVLDYHCTSVVMLNDVDPAQLCPQYWPENGVHRHGPIQVEFVSADLEEDIISRIFRIYNAARPQDGYRMVQQFQFLGWPMYRDTPVSKRSFLKLIRQVDKWQEEYNGGEGRTVVHCLNGGGRSGTFCAISIVCEMLRHQRTVDVFHAVKTLRNNKPNMVDLLDQYKFCYEVALEYLNSG

SEQ ID NO: 10356 - DNA, 5390 bp, Homo sapiens
gtgctgtggcccaatcctgtgcgtgtctcctcttcaggctcctgccggagcatgcttctctaatcttaccatttatcactgacccttcggtgaaactctcttctgtttaaatttaccagggtacactttgtaatacttgggaccaagaatttgaagatagtaatcagacaaatcaaacaactagtagtagtggagagacacgtagccctacaggaaggggtagaattatcattaaaaacacagacaaaccagagactgcctgaaaaaaaaaaaaagatgaactggaaagattcaaagtaggctctattggaggtggctgcctctttgatgagccgtatagcacatgtggatatagtcaatctgaaggtgatgacttcaattgggagcaagtgaacaccttgactaaaccgacttctgatccatggatgccatcaggttctttcatgctggtgaatgcctctgggagacctgaggggcagagagcccacctgctcttaccccaacttaaagaaaatgacacccactgcatcgattttcactattttgtgtccagcaagagtaattctcctccggggttactcaatgtctacgtgaaggtcaataacgggccactggggaatcctatctggaatatatctggagacccaacacgtacatggaacagggcagaactggccattagtactttctggcctaacttttatcaggtgatttttgaagtgataacttctggacatcaaggctatctcgctatcgatgaggtgaaggtgttaggacatccatgtaccaggactcctcacttcctgcggattcagaatgtggaagttaatgctggccagtttgctaccttccagtgcagtgccatcggcaggaccgtggcaggagacaggctctggttacagggcattgatgtgcgagatgctcctctgaaggaaatcaaggtgaccagctcccgacgcttcattgcttcatttaatgttgtgaataccaccaaacgagatgctggaaagtaccgctgcatgattcgcactgaaggaggtgttggaatatcaaactatgcagagttggtagttaaagaaccacccgttcctattgccccacctcagctcgcctctgtaggagccacctacctgtggatacagctcaacgccaactccatcaatggggatgggcccattgtggcccgagaggtggagtactgcacggccagtgggagctggaatgaccggcagccagtcgattccacgagctataaaattggacaccttgacccagatacagaatatgagattagtgtgctcctgaccaggccaggggagggtggcactggctctcctggtccagctctcaggacaagaacaaagtgtgctgatcccatgcgaggcccaagaaaactagaagtagtggaggtcaaatctcggcaaatcactatccgctgggagccatttggatataatgtaactcgttgccacagttataatctcactgtccactactgttaccaagttggaggacaagaacaagtgcgagaagaagtaagctgggatacagaaaactcacaccctcaacacacgatcactaacctgtcaccatacaccaatgtcagtgtgaaactgatcctcatgaacccagagggccggaaggaaagccaagaactcatagtgcagacagatgaagacctcccaggtgctgttcccactgaatccatacaaggaagtacctttgaagagaagatatttcttcagtggagagaaccaactcaaacatatggtgtaatcactttatatgagatcacctacaaagcagtcagttcctttgacccagaaatagatttatccaatcagagtggaagagtttcaaagctgggaaatgaaacccattttctgttttttggactgtatccggggaccacatactcctttaccatccgagctagcacagctaagggttttgggcctccagcaacaaaccagttcaccaccaaaatatcagcaccctctatgccagcttatgaacttgagacacctttgaatcaaactgacaataccgtgacagtcatgctgaaacctgcccacagcagaggagcacctgtcagtgtctatcaaatagttgttgaggaagaacgtcctcgaagaactaaaaagacgacagaaatcttaaagtgctacccagtgccaattcacttccagaatgcttctctgctgaactcacagtactactttgctgcagaatttcctgcagacagcctccaagctgcgcagccttttacaattggtgataataagacatataatggatactggaacactccccttctcccctataaaagctacagaatttatttccaagctgctagtagagccaatggggaaaccaaaatagactgtgtccaagtggccacaaaaggagctgccactccgaaaccagtcccagaacccgagaaacagacagaccatacagttaaaattgctggagtcatcgcgggcatcttgctgttcgtgattatatttcttggagttgtgttggtaatgaagaaaaggaaactggccaagaagcggaaagagaccatgagcagcacccgacaggagatgactgtgatggtgaactcaatggacaagagctatgctgagcagggcacaaactgcgacgaggctttctcattcatggacacgcacaatctgaatgggagatctgtgtcttcaccatcgtccttcacaatgaaaacaaatacactgagcacatcggtgcctaattcctattacccagatgaaacccacacaatggccagcgataccagcagcctggtgcagtcccatacttacaagaagcgagagccggccgacgtgccctatcagactgggcagctccaccccgccatccgggtggcagacctccttcagcacatcacacagatgaagtgtgcggagggctacggcttcaaggaggaatacgagagcttctttgaagggcagtctgcaccatgggactcggctaagaaagatgagaacagaatgaagaacagatacgggaatatcattgcatacgatcattcccgagtgaggctgcagacaatagaaggagacacaaactcagactatatcaatggcaattatatcgatggttatcatcgacccaatcattacattgctacccaagggccaatgcaggaaaccatctatgacttctggaggatggtgtggcacgaaaacactgcaagtatcatcatggtgaccaatcttgtggaagtgggaagggtcaaatgctgcaaatactggccagatgacacagagatatataaagacattaaagttaccctaatagaaacagaactactggcagaatatgtgataagaacatttgctgttgaaaagagaggtgtgcatgaaatccgagagatcagacagtttcacttcactggctggccggatcatggggtcccctaccatgccaccggcctgctgggattcgtgcggcaagtcaagtccaagagcccgcccagtgcaggcccactggtggtgcactgcagtgctggtgcagggaggactggctgtttcatcgtcattgatatcatgttggacatggccgaaagggaaggggtcgtagacatctacaactgcgtcagggagctgcggtcacggagggtgaacatggtgcaaacagaggagcagtatgtgtttatccacgatgcgatcctggaagcctgtctttgtggggacacctctgtgcctgcttcccaagttaggtctctgtattatgacatgaacaaactggatccacagacaaactcaagccagattaaagaggaattccggacgctaaacatggtgacaccaacgctgcgagtagaggactgcagcatcgcactgttgccccggaaccatgagaaaaaccggtgcatggacatcctgcccccagaccgctgcctgcccttcctcatcaccatcgatggggagagcagcaactacatcaatgctgccctcatggacagctataaacagccttcagcttttatagtcacccagcatcctttgccaaacacagtgaaagacttttggagactggtcctggattatcactgcacatccgtagttatgctaaatgatgtggatcctgcccagttgtgtccacagtactggccagaaaacggagtacacagacacggccccatccaggtggaatttgtctctgctgacctggaagaggacatcatcagcaggatattccgcatttacaatgccgccagaccccaagatggatatcggatggtgcagcaattccagttcctgggctggccgatgtacagggacacaccagtgtctaagcgctccttcttgaagctcattcgccaggtggacaagtggcaagaggagtacaatggcggggaaggccgcacggttgtgcactgcttgaacgggggaggccgcagtgggacgttctgcgccatcagcatcgtatgtgagatgctccggcaccagagaaccgtggatgtctttcacgctgtgaagacactgaggaacaacaagcccaacatggtcgacctcctggatcagtacaagttctgctacgaggtggccctggaatacttgaattctggctgatggtgtaaacagctctgcaaacaatccctttcataccacaaagccaagacgttccatggtatttgtgcaaaagagatgaagacttctcaatatgcttattttgctttgcataattggctctttttaagagcccaagaaagtgtttctaaaattgcttgcactgcccaatcccagtaatgctgctgcctgacagaaacacacacacagccacagttgccaaatcccgtactccttgccaccggcttcctagagcagcgtagacagctggtaaactgaagagcacaactatattcttatgaaggaatttgtacctttggggtattattttgtggcccgtgaccctcgttattgttacagctgagtgtatgtttttgttctgtggagaatgctatctggcattatggtaatatattattttaggtaatatttgtactttaacatgttgcataatatatgcttatgtagctttccaggactaacagataaatgtgtaatgaacaaagatatgttgtatgagtcgtcgtttctgtcagatttgtattgtttccaagggaaaagcttgggggaggactcagttcacaaaatgcaaaactcaacgatcagattcacggacccagagcttttccatgtgtttatattgtaaatatttttgatttcatcaaattatttattcattaaaagaaatttttgtgaagcacagtgagtgacaatcatttttcttaaggcctggaaacgattttctgtatgatgttactttatgtgaattctcatctcaataaatgatgacccgtg

SEQ ID NO: 10357 - protein, 1390 aa, Homo sapiens; identical to SEQ ID NO: 10355

SEQ ID NO: 10358 - DNA, 2039 bp, Homo sapiens
gttatcccactgcccctgtggctcttctgtctcttcatgccttcctggtctggcctctgctcatttcattcatcttatggggtgcctccatggttgctgtctttgggctgctattctagctcatgattccaaagtggggtactctacttcggtgacccaacatgaccttaaagacttgcttatgcacctctgacaaatcaagatgcacgacccctggacaccttcaaaaagccacagggcttttagtttctcagatgatcaccacattggcatcctattgctgctgtaacaaattcgaacctcgtggcttcatcatcttactgttttgcaggtcagaagccctaaaagaaggtgacggcagggttggttcctcccaaaagctctgggaagaatctggtccttgccttttccagattctagaaacctccctcatattttgcctcgtgatcccctcctcacacttcagagcccgtcggcacaacctctgcttctgttatctttccttcacattgacccttctgccttcctcataaatagaaccttgtgattacgtttggccaacccagataatccagtctatctttccatctctagacccttattttaatcatacctgcaaactcctttttgccatgtaaggtaacatagtcccagattctggggactgggatgtagacatctttggaggcccttattctgcctaccacagtcatgatgagttggggcaatgttgctgactgacgacacacagaacctctaaaacattcttttactttccctgttcgtctccattgtaaatagggattctttgtctagggtttggggtttaagcctgttaatttagtagaacctcatttttctcttctacccctggaagatttttttccactgaggctgtgattcctagagtcagccagtatttcttgagttctatttattgtgcacctgggtacacaaaatgagtaagatacgaccctggaccttatggactgctagaggagaaagatgttactgcagtagagtacatgttgtgttgatttcattttctagatatctttaggttccgtccctttgtttctgtcttctctcattgtgtcatttgttactatgatttctgaaaacaatttacccagtttcccttgacatcagttggactcacaccgtatctcctccagtccattactgtacacacagaggtgtttgtgttacctctttgcctaaggtccttccattcccagcatcagaatacactgaaatctttaacatgtcatacttcttgttgcagtctgtattgtgcttttccttctagcctttttacctgccataccaagaagcacttctgttcttgccatatgggataagttatacttcccttagagttcccctagagttctcctatactttccctatagtttttttatagttctcctaaagttcccccatagctaccctatatttcccctatagttctgtgctctctcttggctcctgactctgaagagcttctcttattcactagacttttcctctttattccctgcctaagaaacttctgtgcatcctgaagcctgggcttaagcagtgcttcctagaaagcttgcactgacaacatctccaggactatagtttgaatatttgtcccctccaaaactcatgttgaaatattaatcaccagtattaaatcagtatttaatctccagtgtcattattgagaggtggggcctttaagaggtgattgggtcatcataggagagccctcattaatggattaatacatgtgtggattagtggattaatgggttatcatgggagagggaccagtggctttatgagaagaggagagacttgaactagcacactcagccccctcaccatgtgatgccctatgctgcctcaggaatctgcagagtcccggccgggcgtggtggctcacgcctgtaatcccagcactttgggaggctgaggcgggcagatcatgaggtcaggagattgagaccatcctggtgaacacggtgaaaccccatctctactaaaaatac

SEQ ID NO: 10359 - protein, 123 aa, Homo sapiens
MTLKTCLCTSDKSRCTTPGHLQKATGLLVSQMITTLASYCCCNKFEPRGFIILLFCRSEALKEGDGRVGSSQKLWEESGPCLFQILETSLIFCLVIPSSHFRARRHNLCFCYLSFTLTLLPSS

SEQ ID NO: 10360 - DNA, 1152 bp, Homo sapiens
atgcaggtgggttcagctcagcagaagagggcactcaatgcccttgagagcaggtgcgggacccaggctgcaactggccttgctaacttgtccctggcgtcctcactcgctgtctggcctggcaagcccgcggtgagctcccatctgtcccctgtcatctgcgagctgcgctatggaactgatctgaagggccatccgcctccccctccacccatgctccccaaccttgactgctcccttagtgatcccaaggccccctcaccgcgcatactgccacagccgctcgcagctcccgtggcccacctccctctcctccaggttgctgcccccggggtctttttgagcacatcagatcatcttgctcagaataccccgtggctaccgcctctaggataatgcccaacggccttggtttggcgagggctcctcctgtttgggcagcagctcctcctgagctcccgaggccacgggggtgccaactgtggagcgcccgccgtgccgtttagacgcgagagctgcgtcgggtaccagcgatccttaaaggagctcggggaccaggggcacagcttggagaggacagcgagggagcctcccggagccgagccgccgtctgccgctgccaagggccgcaaagccaagcgcggctcccgggcgccacccgcccgcaccgtcggccccccgaccccggccgcccggatccctgccgtgaccctcgcggtgacctcggtggccgggtccccggcccgctgctcgcgcatcagccacacggacagcagctccgacctctctgactgcccctccgaacccctgtccgacgagcagcgcctgctccctgccgccagcagcgacgccgaatccggcacgggctccagcgacctccccgggacccccaaggagcccagcctgggcgagcagtctcggctcgtgccagcggcggaggaagaagagctgctgcgggagatggaggagctgcgctcggagaacgactatctcaaggtgagccgcgcctcggccgcaggtgtcccggggcgcccccggagggcctggctgcggcggggacccgccaacccctccttcccgggcctgtccagcgccttctccctcctgctctccacggtcctacccccgcattgtcaggcattggcaacttaa

SEQ ID NO: 10361 - protein, 131 aa, Homo sapiens
MQVGSAQQKRALNALESRCGTQAATGLANLSLASSLAVWPGKPAVSSHLSPVICELRYGTDLKGHPPPPPPMLPNLDCSLSDPKAPSPRILPQPLAAPVAHLPLLQVAAPGVFLSTSDHLAQNTPWLPPLG

SEQ ID NO: 10362 - DNA, 817 bp, Homo sapiens
acaataaataaaacagttggtgtcaatacaactccccttattttctctcaagtcacctggatcgtcctgaccccgggaaccccgtctgcagcaccaggccccctccgtggagaaaagatggagccggattaagcacccagtgctaaggcgactaagacgccactgcccgcaggccctgccggaaaatactcagagagtgcagcaggcgccgcgattccttagaaagtgctggcgtggcctctcctgacacagaaagccggctcctggatgcttacaaaggactggcccgcgcaacaccgttgctcctcaacccgggccacactccaaggacctctactgagcttcagcttgctcaccgaaaacggcgcggccccctctacccgggatgtcggagcccaggagaccctgagagcccccagctctttccgtaattgcaggagaaggggcaagcgggtccgtagccgggggccctccagtggcattatcctgaaccgccacgcccgcacgtggcccggctagagctccctggcgaaggatcacctgttcctacagtgacaactggacctggcccgaacccctggcatctggcaacattattacctgtcgaaacagaagtagagatttgaaatagaggatgcctgttcccatttcctcctgctgtctggaaggaagtctggctttccagcccaactctaagctcatctttacatacaaaataagggtatgtttacatggaaagcaaaaatagaaccatggatttacagaaggttccatagcagcaaataacagtgcttatgaaataaacattttaaatatt

SEQ ID NO: 10363 - protein, 83 aa, Homo sapiens
MLTKDWPAQHRCSSTRATLQGPLLSFSLLTENGAAPSTRDVGAQETLRAPSSFRNCRRRGKRVRSRGPSSGIILNRHARTWPG

SEQ ID NO: 10364 - DNA, 614 bp, Homo sapiens
cccgagcggggtttcggggggtttcgcggggcccggcgtggcggaggatgtccgggggcgctcgccaccggagcgaccagtccccgggacccccaaggagcccagcctgggcgagcagtctcggctcgtgccagcggcggaggaagaagagctgctgcgggagatggaggagctgcgctcggagaacgactatctcaaggatgagttagatgaactccgtgctgagatggaagagatgagagacagttatttagaggaagatgtttaccagctgcaggaacttcggcgagaactggaccgcgctaataaaaactgccgaatcctgcagtaccgtcttcggaaagccgagcagaaaagcctgaaagtggctgagacgggtcaggtggatggtgagcttattcgaagcctggagcaggacttgaaggtagccaaagatgtatctgtcagattgcaccacgaacttaagacggtggaggaaaagcgcgctaaagctgaggatgaaaacgaaactctccgacagcagatgattgaagtggaaatatccaaacaggccctccagaatgagctggagagactgaaagagagttccctaaaaagaagaagcactcgggaaa

SEQ ID NO: 10365 - protein, 149 aa, Homo sapiens
MEELRSENDYLKDELDELRAEMEEMRDSYLEEDVYQLQELRRELDRANKNCRILQYRLRKAEQKSLKVAETGQVDGELIRSLEQDLKVAKDVSVRLHHELKTVEEKRAKAEDENETLRQQMIEVEISKQALQNELERLKESSLKRRSTR

SEQ ID NO: 10366 - DNA, 6010 bp, Homo sapiens
cggcgcctgctgcactctctgagtattttccggcagggcctgcgggcagtggcgtcttagtcgccttagcactgggtgcttaatccggctccatcttttctccacggagggggcctggtgctgcagacggggttcccggggtcaggacgatccaggatgagttagatgaactccgtgctgagatggaagagatgagagacagttatttagaggaagatgtttaccagctgcaggaacttcggcgagaactggaccgcgctaataaaaactgccgaatcctgcagtaccgtcttcggaaagccgagcagaaaagcctgaaagtggctgagacgggtcaggtggatggtgagcttattcgaagcctggagcaggacttgaaggtagccaaagatgtatctgtcagattgcaccacgaacttaagacggtggaggaaaagcgcgctaaagctgaggatgaaaacgaaactctccgacagcagatgattgaagtggaaatatccaaacaggccctccagaatgagctggagagactgaaagagagttccctaaaaagaagaagcactcgggaaatgtacaaggagaagaaaacctttaaccaggatgacagtgccgatttgaggtgccagctccagtttgccaaagaggaagccttcctgatgcgcaaaaagatggccaagctaggaagggagaaggacgagctggagcaggagctccagaagtacaagtccctctatggggatgtggacagtcccctgcccacgggggaagcaggcgggccccccagcacccgggaggccgagctgaagctgcggctaaagctggtggaggaggaagccaacatcttgggccggaagatcgtggagctggaggtggagaaccgtggcctcaaggcagagatggaggacatgcggggccagcaggagcgggagggcccgggtcgggaccacgcacccagcattcctacctcacccttcggtgactccctggagtcctccactgagctccgccgccacctgcagtttgtagaagaggaagcggagttgctccggaggtccatctccgagatcgaagaccacaaccggcaactgacccacgagctcagcaagtttaagtttgagcctccccgggagccgggctggctaggagagggtgcaagtcctggtgccgggggtggggcccccctgcaggaggagctgaagtcagccaggctgcagatcagcgagctcagcggcaaggtgctcaaactgcagcacgagaaccacgcgctgctgtccaacatccagcgctgcgacctggcagcccacctggggctgcgtgcccccagtccccgggacagcgatgccgagagtgatgcgggcaagaaggagagtgatggggaggagagccgcctgccccagcccaagcgggaagggcctgttggcggggagagtgactcggaggaaatgtttgagaagacgtcgggcttcgggagcgggaagccatcggaggccagcgagccatgccccacggagctcctgaaggcccgggaggactctgagtacctagtgaccctaaaacacgaggcccagcggctagagcggacggtggagcgcctcatcacggacaccgacagcttcctccatgatgcggggctgcggggtggtgcgcccttaccggggcctggcctccagggcgaagaggagcagggtgagggggaccagcaggagccccagctgctggggaccatcaacgccaagatgaaggctttcaagaaagagctgcaggccttcctggagcaggtgaaccgcattggggatggcctatcccccttgccccacctcacagagtcctctagcttcctctccactgtgacttccgtgtcccgggactcccccatcgggaacctggggaaggagctgggcccagacttgcagtccagactgaaagagcagctggagtggcagctcgggccggcccgaggggacgagcgggagagcctgcgcctccgagccgcgcgggagctgcaccgccgcgcagacggggacaccgggagccacgggctgggaggccagacctgcttcagcctggagatggaggaggagcacctctatgccttgaggtggaaagaactggaaatgcacagcctggctttgcaaaacaccctccatgagcgaacctggagtgatgagaagaatctgatgcagcaggagctccggtccttgaagcagaacattttcctcttctacgtcaaactcaggtggctgctgaaacactggcggcaagggaagcagatggaggaggaaggagaggagttcactgagggtgaacatccagagaccctctccaggctcggggagcttggagtccaggggggtcaccaggcggatggcccagaccacgacagtgaccgaggctgtggctttccagtgggggagcactccccacactcccgggtgcagattggagatcacagcttgcggctgcagaccgcggacaggggacagccccacaaacaggtggtggaaaaccagcagctgttcagcgccttcaaggccttgctggaggacttccgtgcggagctgcgggaggatgagcgtgcccgactacggctgcagcagcaatatgccagcgacaaggcggcctgggacgtggagtgggccgtgctcaagtgccgtctggaacagctggaagagaagactgagaacaagttgggagaactaggctcctccgctgagagcaagggggccttgaagaaggagagagaggtgcaccagaagctcctggcagacagtcacagcctggtcatggacctgcgctggcagatccatcacagcgagaagaactggaaccgggagaaggtggaacttctcgaccgcctggacagagatcggcaggagtgggagcggcagaagaaggaattcttgtggaggatagagcagttgcagaaagagaacagtccccggagaggtggcagtttcctctgtgatcaaaaagacggcaacgttcgcccctttccccaccagggaagcctccgcatgccccgtccagtggccatgtggccttgtgcagatgctgactccatcccgtttgaagaccggccgctgtccaagctgaaggagtcggacaggtgctcggccagtgagaatctctacctggatgccttgtccctggatgacgagccagaagagccaccagcccacaggcccgagagggagttcaggaaccgcctccctgaggaagaagaaaatcacaaaggaaatcttcaaagggcggtgtccgtgtcctccatgtctgagttccagcgtctaatggacatctcccccttcctgcctgagaagggcctgccgtccaccagcagcaaggaggatgtcaccccacccctgtctccagacgacctcaagtacatcgaggagttcaacaagagctgggactacacacccaacaggggccacaatggtggggggccggacctttgggccgacaggaccgaggtggggcgggcagggcacgaggacagcacagagcctttccccgactcctcctggtacctaaccacaagtgtcaccatgaccacggacaccatgaccagcccagagcactgccagaagcagccactgcggagccacgtcctcaccgagcagtcggggttgcgcgtgttacacagcccgcctgccgtgcgcagggtcgacagcatcacggcggcaggtggtgagggtccctttcccacaagcagagccagagggagcccgggagacaccaagggaggccctccagaacccatgctcagcaggtggccttgcacctcccccaggcactcccgggactatgtggagggggcacggcgcccccttgatagtcccctctgtacctccctggggtttgcctccccactgcacagcctggagatgtccaagaacttgagtgatgacatgaaggaggtggccttctctgtcaggaatgccatctgctccggccctggcgagctgcaagtcaaggacatggcctgccagaccaatgggtcccggacgatggggacccagactgttcagaccatcagtgtgggcttgcagactgaagccctgcgtggcagcggtgtcaccagcagcccccacaagtgtctcactccaaaggctgggggcggtgctacacccgtgtcgtctccttcccggagccttaggagcagacaggtggcccctgccatcgagaaggtgcaggccaagtttgaacgcacatgctgctcccccaagtatggttctcccaagctgcagaggaagcccctccccaaagccgaccagccaaataacaggacgtcaccagggatggcccagaaagggtacagtgagtcagcctgggcccgctccaccaccacaagggagagccccgtgcacaccaccattaatgatggcctctccagcctcttcaacatcattgaccacagccccgtggtgcaggaccccttccagaaggggctgcgggccggcagtcggtctcgctcagcagagccccgaccagagctgggcccaggccaggaaacaggcaccaattcccgaggaaggtcgcctagccccattggggtggggtcagagatgtgcagggaggaagggggagagggcacgccagtgaagcaggacttatctgctccccctggctacacgctcactgagaacgtggcccggatcctcaacaagaagctgctggaacatgccttaaaggaggagaggaggcaggctgcccacgggcccccgggtctccacagtgacagccactcgctgggggacacagccgagccagggcccatggagaaccaaactgtcttgctaactgccccctggggactctagccctgcccgcctcacgctgaactaccttgttctgcactagctccatccctagagccctgcttctccaggcccgagagaccagcaaaccgtcgccctccgtcccgttgggccccacattcccccactgcctcacagcctcagtcacccggagacccgacgtccttggaggagcatggtggcgaggagccgcccgaggagcagccacaccgagatgcaagcttgcatggattatcacagtataattcactgtaatttgcataaccacaccatcaccatgaacaaaactctgcccaacaggagagatctagttttctcaaggtcaaagaatgttttttaaaaacacaaagctgctgaatgttcaacctgtgaaactgagatgtttctagaatgaaacagtaaatgtgcctgtaataacttaatttttttcatagctcagaaaactatttttgtctccatcttttttacacacagtatattaaacgaaaaggtaaataaggtataaatagatttaaaaaataaaagttttaaaaaatgtacattttaagagattctgaacaccctcgctgtcaatacctgactgcctctgttaaatttgcactgttacattttggttcagtttatttccatgttgaattagagtggattaagttaattttattttgtcagtgttactgttttttacgaattttttaatgcttcagactgtctgattcagtgaactttttgtagtgaaaaagccatgaagccagtagacaagacagatattctgtatgctggaggggatacaggatgattttgaaaaggtacaaagtcctcagtgggcttagaaaattcactgtatgatccttatattatcctacttggcttgcacgtcttcgggtgcatgtatataccgctactgtgtcctcgccatcacctaaatgtgactcagtctgttccactgtaatatgttgtgaatttccttgtactgtacttttattgttggtcttcttgcatcgatgatccaacagcaacaccatttttaaattattgtgaaaagattaactggcaatgtacagagtttactcaaagttttcttaagggaaaacactacaaaaagtcacaaggataccaaatggaaacacatgatgatgcctctgggtctgtatgagaccgtgatgaagtagaaataaagcccttctgagatggca

SEQ ID NO: 10367 - protein, 1545 aa, Homo sapiens
MEEMRDSYLEEDVYQLQELRRELDRANKNCRILQYRLRKAEQKSLKVAETGQVDGELIRSLEQDLKVAKDVSVRLHHELKTVEEKRAKAEDENETLRQQMIEVEISKQALQNELERLKESSLKRRSTREMYKEKKTFNQDDSADLRCQLQFAKEEAFLMRKKMAKLGREKDELEQELQKYKSLYGDVDSPLPTGEAGGPPSTREAELKLRLKLVEEEANILGRKIVELEVENRGLKAEMEDMRGQQEREGPGRDHAPSIPTSPFGDSLESSTELRRHLQFVEEEAELLRRSISEIEDHNRQLTHELSKFKFEPPREPGWLGEGASPGAGGGAPLQEELKSARLQISELSGKVLKLQHENHALLSNIQRCDLAAHLGLRAPSPRDSDAESDAGKKESDGEESRLPQPKREGPVGGESDSEEMFEKTSGFGSGKPSEASEPCPTELLKAREDSEYLVTLKHEAQRLERTVERLITDTDSFLHDAGLRGGAPLPGPGLQGEEEQGEGDQQEPQLLGTINAKMKAFKKELQAFLEQVNRIGDGLSPLPHLTESSSFLSTVTSVSRDSPIGNLGKELGPDLQSRLKEQLEWQLGPARGDERESLRLRAARELHRRADGDTGSHGLGGQTCFSLEMEEEHLYALRWKELEMHSLALQNTLHERTWSDEKNLMQQELRSLKQNIFLFYVKLRWLLKHWRQGKQMEEEGEEFTEGEHPETLSRLGELGVQGGHQADGPDHDSDRGCGFPVGEHSPHSRVQIGDHSLRLQTADRGQPHKQVVENQQLFSAFKALLEDFRAELREDERARLRLQQQYASDKAAWDVEWAVLKCRLEQLEEKTENKLGELGSSAESKGALKKEREVHQKLLADSHSLVMDLRWQIHHSEKNWNREKVELLDRLDRDRQEWERQKKEFLWRIEQLQKENSPRRGGSFLCDQKDGNVRPFPHQGSLRMPRPVAMWPCADADSIPFEDRPLSKLKESDRCSASENLYLDALSLDDEPEEPPAHRPEREFRNRLPEEEENHKGNLQRAVSVSSMSEFQRLMDISPFLPEKGLPSTSSKEDVTPPLSPDDLKYIEEFNKSWDYTPNRGHNGGGPDLWADRTEVGRAGHEDSTEPFPDSSWYLTTSVTMTTDTMTSPEHCQKQPLRSHVLTEQSGLRVLHSPPAVRRVDSITAAGGEGPFPTSRARGSPGDTKGGPPEPMLSRWPCTSPRHSRDYVEGARRPLDSPLCTSLGFASPLHSLEMSKNLSDDMKEVAFSVRNAICSGPGELQVKDMACQTNGSRTMGTQTVQTISVGLQTEALRGSGVTSSPHKCLTPKAGGGATPVSSPSRSLRSRQVAPAIEKVQAKFERTCCSPKYGSPKLQRKPLPKADQPNNRTSPGMAQKGYSESAWARSTTTRESPVHTTINDGLSSLFNIIDHSPVVQDPFQKGLRAGSRSRSAEPRPELGPGQETGTNSRGRSPSPIGVGSEMCREEGGEGTPVKQDLSAPPGYTLTENVARILNKKLLEHALKEERRQAAHGPPGLHSDSHSLGDTAEPGPMENQTVLLTAPWGL

SEQ ID NO: 10368 - DNA, 6093 bp, Homo sapiens
gagtgttttcagaagtgggaatagcaggcgaggtcttgaggcctgaagaagcaaagcgtcgcttagtcaatgctgagatgcgtcttgtggaacagaatttttgggacatttgcaggatgagttagatgaactccgtgctgagatggaagagatgagagacagttatttagaggaagatgtttaccagctgcaggaacttcggcgagaactggaccgcgctaataaaaactgccgaatcctgcagtaccgtcttcggaaagccgagcagaaaagcctgaaagtggctgagacgggtcaggtggatggtgagcttattcgaagcctggagcaggacttgaaggtagccaaagatgtatctgtcagattgcaccacgaacttaagacggtggaggaaaagcgcgctaaagctgaggatgaaaacgaaactctccgacagcagatgattgaagtggaaatatccaaacaggccctccagaatgagctggagagactgaaagagagttccctaaaaagaagaagcactcgggaaatgtacaaggagaagaaaacctttaaccaggatgacagtgccgatttgaggtgccagctccagtttgccaaagaggaagccttcctgatgcgcaaaaagatggccaagctaggaagggagaaggacgagctggagcaggagctccagaagtacaagtccctctatggggatgtggacagtcccctgcccacgggggaagcaggcgggccccccagcacccgggaggccgagctgaagctgcggctaaagctggtggaggaggaagccaacatcttgggccggaagatcgtggagctggaggtggagaaccgtggcctcaaggcagagatggaggacatgcggggccagcaggagcgggagggcccgggtcgggaccacgcacccagcattcctacctcacccttcggtgactccctggagtcctccactgagctccgccgccacctgcagtttgtagaagaggaagcggagttgctccggaggtccatctccgagatcgaagaccacaaccggcaactgacccacgagctcagcaagtttaagtttgagcctccccgggagccgggctggctaggagagggtgcaagtcctggtgccgggggtggggcccccctgcaggaggagctgaagtcagccaggctgcagatcagcgagctcagcggcaaggtgctcaaactgcagcacgagaaccacgcgctgctgtccaacatccagcgctgcgacctggcagcccacctggggctgcgtgcccccagtccccgggacagcgatgccgagagtgatgcgggcaagaaggagagtgatggggaggagagccgcctgccccagcccaagcgggaagggcctgttggcggggagagtgactcggaggaaatgtttgagaagacgtcgggcttcgggagcgggaagccatcggaggccagcgagccatgccccacggagctcctgaaggcccgggaggactctgagtacctagtgaccctaaaacacgaggcccagcggctagagcggacggtggagcgcctcatcacggacaccgacagcttcctccatgatgcggggctgcggggtggtgcgcccttaccggggcctggcctccagggcgaagaggagcagggtgagggggaccagcaggagccccagctgctggggaccatcaacgccaagatgaaggctttcaagaaagagctgcaggccttcctggagcaggtgaaccgcattggggatggcctatcccccttgccccacctcacagagtcctctagcttcctctccactgtgacttccgtgtcccgggactcccccatcgggaacctggggaaggagctgggcccagacttgcagtccagactgaaagagcagctggagtggcagctcgggccggcccgaggggacgagcgggagagcctgcgcctccgagccgcgcgggagctgcaccgccgcgcagacggggacaccgggagccacgggctgggaggccagacctgcttcagcctggagctcaggggcccccccgttttacctgagcagagtgtatccatagaggagctacagggtcagctcgtgcaggcggccagactgcatcaagaggagacagagacatttacaaacaagatccataagatggaggaggagcacctctatgccttgaggtggaaagaactggaaatgcacagcctggctttgcaaaacaccctccatgagcgaacctggagtgatgagaagaatctgatgcagcaggagctccggtccttgaagcagaacattttcctcttctacgtcaaactcaggtggctgctgaaacactggcggcaagggaagcagatggaggaggaaggagaggagttcactgagggtgaacatccagagaccctctccaggctcggggagcttggagtccaggggggtcaccaggcggatggcccagaccacgacagtgaccgaggctgtggctttccagtgggggagcactccccacactcccgggtgcagattggagatcacagcttgcggctgcagaccgcggacaggggacagccccacaaacaggtggtggaaaaccagcagctgttcagcgccttcaaggccttgctggaggacttccgtgcggagctgcgggaggatgagcgtgcccgactacggctgcagcagcaatatgccagcgacaaggcggcctgggacgtggagtgggccgtgctcaagtgccgtctggaacagctggaagagaagactgagaacaagttgggagaactaggctcctccgctgagagcaagggggccttgaagaaggagagagaggtgcaccagaagctcctggcagacagtcacagcctggtcatggacctgcgctggcagatccatcacagcgagaagaactggaaccgggagaaggtggaacttctcgaccgcctggacagagatcggcaggagtgggagcggcagaagaaggaattcttgtggaggatagagcagttgcagaaagagaacagtccccggagaggtggcagtttcctctgtgatcaaaaagacggcaacgttcgcccctttccccaccagggaagcctccgcatgccccgtccagtggccatgtggccttgtgcagatgctgactccatcccgtttgaagaccggccgctgtccaagctgaaggagtcggacaggtgctcggccagtgagaatctctacctggatgccttgtccctggatgacgagccagaagagccaccagcccacaggcccgagagggagttcaggaaccgcctccctgaggaagaagaaaatcacaaaggaaatcttcaaagggcggtgtccgtgtcctccatgtctgagttccagcgtctaatggacatctcccccttcctgcctgagaagggcctgccgtccaccagcagcaaggaggatgtcaccccacccctgtctccagacgacctcaagtacatcgaggagttcaacaagagctgggactacacacccaacaggggccacaatggtggggggccggacctttgggccgacaggaccgaggtggggcgggcagggcacgaggacagcacagagcctttccccgactcctcctggtacctaaccacaagtgtcaccatgaccacggacaccatgaccagcccagagcactgccagaagcagccactgcggagccacgtcctcaccgagcagtcggggttgcgcgtgttacacagcccgcctgccgtgcgcagggtcgacagcatcacggcggcaggtggtgagggtccctttcccacaagcagagccagagggagcccgggagacaccaagggaggccctccagaacccatgctcagcaggtggccttgcacctcccccaggcactcccgggactatgtggagggggcacggcgcccccttgatagtcccctctgtacctccctggggtttgcctccccactgcacagcctggagatgtccaagaacttgagtgatgacatgaaggaggtggccttctctgtcaggaatgccatctgctccggccctggcgagctgcaagtcaaggacatggcctgccagaccaatgggtcccggacgatggggacccagactgttcagaccatcagtgtgggcttgcagactgaagccctgcgtggcagcggtgtcaccagcagcccccacaagtgtctcactccaaaggctgggggcggtgctacacccgtgtcgtctccttcccggagccttaggagcagacaggtggcccctgccatcgagaaggtgcaggccaagtttgaacgcacatgctgctcccccaagtatggttctcccaagctgcagaggaagcccctccccaaagccgaccagccaaataacaggacgtcaccagggatggcccagaaagggtacagtgagtcagcctgggcccgctccaccaccacaagggagagccccgtgcacaccaccattaatgatggcctctccagcctcttcaacatcattgaccacagccccgtggtgcaggaccccttccagaaggggctgcgggccggcagtcggtctcgctcagcagagccccgaccagagctgggcccaggccaggaaacaggcaccaattcccgaggaaggtcgcctagccccattggggtggggtcagagatgtgcagggaggaagggggagagggcacgccagtgaagcaggacttatctgctccccctggctacacgctcactgagaacgtggcccggatcctcaacaagaagctgctggaacatgccttaaaggaggagaggaggcaggctgcccacgggcccccgggtctccacagtgacagccactcgctgggggacacagccgagccagggcccatggagaaccaaactgtcttgctaactgccccctggggactctagccctgcccgcctcacgctgaactaccttgttctgcactagctccatccctagagccctgcttctccaggcccgagagaccagcaaaccgtcgccctccgtcccgttgggccccacattcccccactgcctcacagcctcagtcacccggagacccgacgtccttggaggagcatggtggcgaggagccgcccgaggagcagccacaccgagatgcaagcttgcatggattatcacagtataattcactgtaatttgcataaccacaccatcaccatgaacaaaactctgcccaacaggagagatctagttttctcaaggtcaaagaatgttttttaaaaacacaaagctgctgaatgttcaacctgtgaaactgagatgtttctagaatgaaacagtaaatgtgcctgtaataacttaatttttttcatagctcagaaaactatttttgtctccatcttttttacacacagtatattaaacgaaaaggtaaataaggtataaatagatttaaaaaataaaagttttaaaaaatgtacattttaagagattctgaacaccctcgctgtcaatacctgactgcctctgttaaatttgcactgttacattttggttcagtttatttccatgttgaattagagtggattaagttaattttattttgtcagtgttactgttttttacgaattttttaatgcttcagactgtctgattcagtgaactttttgtagtgaaaaagccatgaagccagtagacaagacagatattctgtatgctggaggggatacaggatgattttgaaaaggtacaaagtcctcagtgggcttagaaaattcactgtatgatccttatattatcctacttggcttgcacgtcttcgggtgcatgtatataccgctactgtgtcctcgccatcacctaaatgtgactcagtctgttccactgtaatatgttgtgaatttccttgtactgtacttttattgttggtcttcttgcatcgatgatccaacagcaacaccatttttaaattattgtgaaaagattaactggcaatgtacagagtttactcaaagttttcttaagggaaaacactacaaaaagtcacaaggataccaaatggaaacacatgatgatgcctctgggtctgtatgagaccgtgatgaagtagaaataaagcccttctgagatggca

SEQ ID NO: 10369 - protein, 1586 aa, Homo sapiens; identical to SEQ ID NO: 1731

SEQ ID NO: 10370 - DNA, 576 bp, Homo sapiens
cagaagtgggaatagcaggcgaggtcttgaggcctgaagaagcaaaggatgagttagatgaactccgtgctgagatggaagagatgagagacagttatttagaggaagatgtttaccagctgcaggaacttcggcgagaactggaccgcgctaataaaaactgccgaatcctgcagtaccgtcttcggaaagccgagcagaaaagcctgaaagtggctgagacgggtcaggtggatggtgagcttattcgaagcctggagcaggacttgaaggtagccaaagatgtatctgtcagattgcaccacgaacttaagacggtggaggaaaagcgcgctaaagctgaggatgaaaacgaaactctccgacagcagatgattgaagtggaaatatccaaacaggccctccagaatgagctggagagactgaaagagagttccctaaaaagaagaagcactcgggaaatgtacaaggagaagaaaacctttaaccaggtaagcagaggttttcattctaatgttacatctcctataagtgaagtcaactcattttgaatgtttttcagtaagtgttagcttt

SEQ ID NO: 10371 - protein, 158 aa, Homo sapiens
MEEMRDSYLEEDVYQLQELRRELDRANKNCRILQYRLRKAEQKSLKVAETGQVDGELIRSLEQDLKVAKDVSVRLHHELKTVEEKRAKAEDENETLRQQMIEVEISKQALQNELERLKESSLKRRSTREMYKEKKTFNQVSRGFHSNVTSPISEVNSF

SEQ ID NO: 10372 - DNA, 373 bp, Homo sapiens
aatgactccttgggttcccctgtattcagggtgcattcctgtggacagcaaagagtggaggtgtgggaaagtcagaataggtgaatgggaaaaaacagacccaatgtgtatttaaaataatggaaaatgtctcatttgtggatagcgtcgcttagtcaatgctgagatgcgtcttgtggaacagaatttttgggacatttgcaggatgagttagatgaactccgtgctgagatggaagagatgagagacagttatttagaggaagatgtttaccagctgcaggaacttcggcgagaactggaccgcgctaataaaaactgccgaatcctgcagtaccgtcttcggaaagccgagcagaaaagcctgaaagtgg

SEQ ID NO: 10373 - protein, 46 aa, Homo sapiens
MEEMRDSYLEEDVYQLQELRRELDRANKNCRILQYRLRKAEQKSLK

SEQ ID NO: 10374 - DNA, 915 bp, Homo sapiens
cggagctttgtgatgcggagcttcgtgatgcacgccccgatgcctgcggggctataaaaacgctcgcaagcgccaagtctcctcaggagccgccggcaagggggcaacgaggaagctcttaagagcgcggccggaaagcagttgagttacagacatcctgccaaaatgatttcttcaaagcccagacttgtcgtaccctatggcctcaagactctgctcgagggaattagcagagctgttctcaaaaccaacccatcaaacatcaaccagtttgcagcagcttattttcaagaacttactatgtatagagggaatactactatggatataaaagatctggttaaacaatttcatcagattaaagtagagaaatggtcagaaggaacgacaccacagaagaaattagaatgtttaaaagaaccaggaaaaacatctgtagaatctaaagtacctacccagatggaaaaatctacagacacagacgaggacaatgtaaccagaacagaatatagtgacaaaaccacccagtttccatcagtttatgctgtgccaggcactgagcaaacggaagcagttggtggtctttcttccaaaccagccacccctaagactactaccccaccctcatcaccacctccaacagctgtctcaccagagtttgcctacgtcccagctgacccagctcagcttgctgctcagatgttagaagatgtagctaaaaaaagttcaggatctggtgacaaatgtgctccctttggaagttacggtattgctggggaggtaaccgtgactactgctcacaaacgtcgcaaagcagaaactgaaaactgatccagaaatgacgctgtctgggtcaacatttcagggaggagtctgccaccagtgtaatgtatcaataaacttcatgcaagcata

SEQ ID NO: 10375 - protein, 221 aa, Homo sapiens; identical to SEQ ID NO: 1743

SEQ ID NO: 10376 - DNA, 1392 bp, Homo sapiens
cggagctttgtgatgcggagcttcgtgatgcacgccccgatgcctgcggggctataaaaacgctcgcaagcgccaagtctcctcaggagccgccggcaagggggcaacgaggaagctcttaagagcgcggccggaaagcagttgagttacagacatcctgccaaaatgatttcttcaaagcccagacttgtcgtaccctatggcctcaagactctgctcgagggaattagcagagctgttctcaaaaccaacccatcaaacatcaaccagtttgcagcagcttattttcaagaacttactatgtatagagggaatactactatggatataaaagatctggttaaacaatttcatcagattaaagtagagaaatggtcagaaggaacgacaccacagaagaaattagaatgtttaaaagaaccaggaaaaacatctgtagaatctaaagtacctacccagatggaaaaatctacagacacagacgaggacaatgtaaccagaacagaatatagtgacaaaaccacccagtttccatcagtttatgctgtgccaggcactgagcaaacggaagcagttggtggtctttcttccaaaccagccacccctaagactactaccccaccctcatcaccacctccaacagctgtctcaccagagtttgcctacgtcccagctgacccagctcagcttgctgctcagatgttagcaatggcaacaagtgaacgaggacaaccaccaccatgttctaacatgtggaccctttattgtctaactgataagaatcaacaaggtcacccatcaccgccacctgcacctgggccttttccccaagcaaccctctatttacctaatcctaaggatccacagtttcagcagcatccaccaaaagtcacttttccaacttatgtgatgggcgacaccaagaagaccagtgccccaccttttatcttagtaggctcaaatgttcaggaagcacagggatggaaacctcttcctggacatgctgtcgtttcacagtcagatgtcttgagatatgttgcaatgcaagtgcccattgctgttcctgcagatgagaaataccagaaacataccctaagtccccagaatgctaatcctccaagtggacaagatgtccccaggccaaaaagccctgttttcctttctgttgctttcccagtagaagatgtagctaaaaaaagttcaggatctggtgacaaatgtgctccctttggaagttacggtattgctggggaggtaaccgtgactactgctcacaaacgtcgcaaagcagaaactgaaaactgatccagaaatgacgctgtctgggtcaacatttcagggaggagtctgccaccagtgtaatgtatcaataaacttcatgcaagcatacaa

SEQ ID NO: 10377 - protein, 379 aa, Homo sapiens; identical to SEQ ID NO: 1737

SEQ ID NO: 10378 - DNA, 2336 bp, Homo sapiens
tgcggagcttcgtgatgcacgccccgatgcctgcggggctataaaaacgctcgcaagcgccaagtctcctcaggagccgccggcaagggggcaacgaggaagctcttaagagcgcggccggaaagcagttgagttacagacatcctgccaaaatgatttcttcaaagcccagacttgtcgtaccctatggcctcaagactctgctcgagggaattagcagagctgttctcaaaaccaacccatcaaacatcaaccagtttgcagcagcttattttcaagaacttactatgtatagagggaatactactatggatataaaagatctggttaaacaatttcatcagattaaagtagagaaatggtcagaaggaacgacaccacagaagaaattagaatgtttaaaagaaccaggaaaaacatctgtagaatctaaagtacctacccagatggaaaaatctacagacacagacgaggacaatgtaaccagaacagaatatagtgacaaaaccacccagtttccatcagtttatgctgtgccaggcactgagcaaacggaagcagttggtggtctttcttccaaaccagccacccctaagactactaccccaccctcatcaccacctccaacagctgtctcaccagagtttgcctacgtcccagctgacccagctcagcttgctgctcagatgttaggtaaagtttcatctattcattctgatcaatctgatgtgttaatggtggatgtggcaaccagtatgcctgttgttatcaaggaggtgccaagctcagaggctgctgaagatgtcatggtggctgctcctcttgtgtgttctggaaaggtgctagaagtgcaggttgtgaaccaaacatctgtccatgtagatttgggttctcaacctaaagaaaatgaggctgaaccatcaacggcttcctcagtccccttgcaggatgaacaagaacctcctgcttatgatcaagctcctgaggtcactttgcaggctgatattgaggttatgtcaactgttcatatatcatctgtctataacgatgtgcctgtgactgaaggagttgtttatatcgagcaactgccagaacaaatagttatcccttttactgatcaagttgcttgtcttaaagaaaatgagcagtcaaaagaaaatgagcagtcaccacgagttagtcccaaatctgtagtagaaaagaccacctctggcatgtctaaaaaatctgtagagtctgtaaaacttgcacagttggaggagaatgcaaaatattcctcagtatatatggaggcagaagcaacagctctgctctctgacacatctttgaaaggtcagcctgaggtacctgcacaactcctggatgcagaaggtgctatcaaaataggctctgaaaaatctctgcaccttgaagtggagatcacttcaatagtctctgacaatactgggcaggaggagtctggggaaaactctgtaccccaggagatggaaggcaaacctgtgctctctggggaagctgcagaagcagtgcactcaggtacatctgtaaagtcatctagtggccccttccctcctgctccagaaggccttactgcaccagaaattgaaccagaaggggaatcaacagctgaataaggtttgatgaagccagcaatggcaacaagtgaacgaggacaaccaccaccatgttctaacatgtggaccctttattgtctaactgataagaatcaacaaggtcacccatcaccgccacctgcacctgggccttttccccaagcaaccctctatttacctaatcctaaggatccacagtttcagcagcatccaccaaaagtcacttttccaacttatgtgatgggcgacaccaagaagaccagtgccccaccttttatcttagtaggctcaaatgttcaggaagcacagggatggaaacctcttcctggacatgctgtcgtttcacagtcagatgtcttgagatatgttgcaatgcaagtgcccattgctgttcctgcagatgagaaataccagaaacataccctaagtccccagaatgctaatcctccaagtggacaagatgtccccaggccaaaaagccctgttttcctttctgttgctttcccagtagaagatgtagctaaaaaaagttcaggatctggtgacaaatgtgctccctttggaagttacggtattgctggggaggtaaccgtgactactgctcacaaacgtcgcaaagcagaaactgaaaactgatccagaaatgacgctgtctgggtcaacatttcagggaggagtctgccaccagtgtaatgtatcaataaacttcatgcaagcatacaa

SEQ ID NO: 10379 - protein, 493 aa, Homo sapiens; identical to SEQ ID NO: 1733

SEQ ID NO: 10380 - DNA, 1156 bp, Homo sapiens
tgcggagcttcgtgatgcacgccccgatgcctgcggggctataaaaacgctcgcaagcgccaagtctcctcaggagccgccggcaagggggcaacgaggaagctcttaagagcgcggccggaaagcagtagagaaatggtcagaaggaacgacaccacagaagaaattagaatgtttaaaagaaccaggaaaaacatctgtagaatctaaagtacctacccagatggaaaaatctacagacacagacgaggacaatgtaaccagaacagaatatagtgacaaaaccacccagtttccatcagtttatgctgtgccaggcactgagcaaacggaagcagttggtggtctttcttccaaaccagccacccctaagactactaccccaccctcatcaccacctccaacagctgtctcaccagagtttgcctacgtcccagctgacccagctcagcttgctgctcagatgttagcaatggcaacaagtgaacgaggacaaccaccaccatgttctaacatgtggaccctttattgtctaactgataagaatcaacaaggtcacccatcaccgccacctgcacctgggccttttccccaagcaaccctctatttacctaatcctaaggatccacagtttcagcagcatccaccaaaagtcacttttccaacttatgtgatgggcgacaccaagaagaccagtgccccaccttttatcttagtaggctcaaatgttcaggaagcacagggatggaaacctcttcctggacatgctgtcgtttcacagtcagatgtcttgagatatgttgcaatgcaagtgcccattgctgttcctgcagatgagaaataccagaaacataccctaagtccccagaatgctaatcctccaagtggacaagatgtccccaggccaaaaagccctgttttcctttctgttgctttcccagtagaagatgtagctaaaaaaagttcaggatctggtgacaaatgtgctccctttggaagttacggtattgctggggaggtaaccgtgactactgctcacaaacgtcgcaaagcagaaactgaaaactgatccagaaatgacgctgtctgggtcaacatttcagggaggagtctgccaccagtgtaatgtatcaataaacttcatgcaagcatacaa

SEQ ID NO: 10381 - protein, 281 aa, Homo sapiens; identical to SEQ ID NO: 1735

SEQ ID NO: 10382 - DNA, 2282 bp, Homo sapiens
tgcggagcttcgtgatgcacgccccgatgcctgcggggctataaaaacgctcgcaagcgccaagtctcctcaggagccgccggcaagggggcaacgaggaagctcttaagagcgcggccggaaagcagttgagttacagacatcctgccaaaatgatttcttcaaagcccagacttgtcgtaccctatggcctcaagactctgctcgagggaattagcagagctgttctcaaaaccaacccatcaaacatcaaccagtttgcagcagcttattttcaagaacttactatgtatagagtagagaaatggtcagaaggaacgacaccacagaagaaattagaatgtttaaaagaaccaggaaaaacatctgtagaatctaaagtacctacccagatggaaaaatctacagacacagacgaggacaatgtaaccagaacagaatatagtgacaaaaccacccagtttccatcagtttatgctgtgccaggcactgagcaaacggaagcagttggtggtctttcttccaaaccagccacccctaagactactaccccaccctcatcaccacctccaacagctgtctcaccagagtttgcctacgtcccagctgacccagctcagcttgctgctcagatgttaggtaaagtttcatctattcattctgatcaatctgatgtgttaatggtggatgtggcaaccagtatgcctgttgttatcaaggaggtgccaagctcagaggctgctgaagatgtcatggtggctgctcctcttgtgtgttctggaaaggtgctagaagtgcaggttgtgaaccaaacatctgtccatgtagatttgggttctcaacctaaagaaaatgaggctgaaccatcaacggcttcctcagtccccttgcaggatgaacaagaacctcctgcttatgatcaagctcctgaggtcactttgcaggctgatattgaggttatgtcaactgttcatatatcatctgtctataacgatgtgcctgtgactgaaggagttgtttatatcgagcaactgccagaacaaatagttatcccttttactgatcaagttgcttgtcttaaagaaaatgagcagtcaaaagaaaatgagcagtcaccacgagttagtcccaaatctgtagtagaaaagaccacctctggcatgtctaaaaaatctgtagagtctgtaaaacttgcacagttggaggagaatgcaaaatattcctcagtatatatggaggcagaagcaacagctctgctctctgacacatctttgaaaggtcagcctgaggtacctgcacaactcctggatgcagaaggtgctatcaaaataggctctgaaaaatctctgcaccttgaagtggagatcacttcaatagtctctgacaatactgggcaggaggagtctggggaaaactctgtaccccaggagatggaaggcaaacctgtgctctctggggaagctgcagaagcagtgcactcaggtacatctgtaaagtcatctagtggccccttccctcctgctccagaaggccttactgcaccagaaattgaaccagaaggggaatcaacagctgaataaggtttgatgaagccagcaatggcaacaagtgaacgaggacaaccaccaccatgttctaacatgtggaccctttattgtctaactgataagaatcaacaaggtcacccatcaccgccacctgcacctgggccttttccccaagcaaccctctatttacctaatcctaaggatccacagtttcagcagcatccaccaaaagtcacttttccaacttatgtgatgggcgacaccaagaagaccagtgccccaccttttatcttagtaggctcaaatgttcaggaagcacagggatggaaacctcttcctggacatgctgtcgtttcacagtcagatgtcttgagatatgttgcaatgcaagtgcccattgctgttcctgcagatgagaaataccagaaacataccctaagtccccagaatgctaatcctccaagtggacaagatgtccccaggccaaaaagccctgttttcctttctgttgctttcccagtagaagatgtagctaaaaaaagttcaggatctggtgacaaatgtgctccctttggaagttacggtattgctggggaggtaaccgtgactactgctcacaaacgtcgcaaagcagaaactgaaaactgatccagaaatgacgctgtctgggtcaacatttcagggaggagtctgccaccagtgtaatgtatcaataaacttcatgcaagcatacaa

SEQ ID NO: 10383 - protein, 475 aa, Homo sapiens; identical to SEQ ID NO: 1739

SEQ ID NO: 10384 - DNA, 1287 bp, Homo sapiens
cctatggctccgaagtccccgctggcatcctgaaagttgagttacagacatcctgccaaaatgatttcttcaaagcccagacttgtcgtaccctatggcctcaagactctgctcgagggaattagcagagctgttctcaaaaccaacccatcaaacatcaaccagtttgcagcagcttattttcaagaacttactatgtatagagggaatactactatggatataaaagatctggttaaacaatttcatcagattaaagtagagaaatggtcagaaggaacgacaccacagaagaaattagaatgtttaaaagaaccaggaaaaacatctgtagaatctaaagtacctacccagatggaaaaatctacagacacagacgaggacaatgtaaccagaacagaatatagtgacaaaaccacccagtttccatcagtttatgctgtgccaggcactgagcaaacggaagcagttggtggtctttcttccaaaccagccacccctaagactactaccccaccctcatcaccacctccaacagctgtctcaccagagtttgcctacgtcccagctgacccagctcagcttgctgctcagatgttagcaatggcaacaagtgaacgaggacaaccaccaccatgttctaacatgtggaccctttattgtctaactgataagaatcaacaaggtcacccatcaccgccacctgcacctgggccttttccccaagcaaccctctatttacctaatcctaaggatccacagtttcagcagcatccaccaaaagtcacttttccaacttatgtgatgggcgacaccaagaagaccagtgccccaccttttatcttagtaggctcaaatgttcaggaagcacagggatggaaacctcttcctggacatgctgtcgtttcacagtcagatgtcttgagatatgttgcaatgcaagtgcccattgctgttcctgcagatgagaaataccagaaacataccctaagtccccagaatgctaatcctccaagtggacaagatgtccccaggccaaaaagccctgttttcctttctgttgctttcccagtagaagatgtagctaaaaaaagttcaggatctggtgacaaatgtgctccctttggaagttacggtattgctggggaggtaaccgtgactactgctcacaaacgtcgcaaagcagaaactgaaaactgatccagaaatgacgctgtctgggtcaacatttcagggaggagtctgccaccagtgtaatgtatcaataaacttcatgcaagcatacaa

SEQ ID NO: 10385 - protein, 379 aa, Homo sapiens; identical to SEQ ID NO: 1737

SEQ ID NO: 10386 - DNA, 1149 bp, Homo sapiens
accctcatcaccacctccaacagctgtctcaccagagtttgcctacgtcccagctgacccagctcagcttgctgctcagatgttaggtaaagtttcatctattcattctgatcaatctgatgtgttaatggtggatgtggcaaccagtatgcctgttgttatcaaggaggtgccaagctcagaggctgctgaagatgtcatggtggctgctcctcttgtgtgttctggaaaggtgctagaagtgcaggttgtgaaccaaacatctgtccatgtagatttgggttctcaacctaaagaaaatgaggctgaaccatcaacggcttcctcagtccccttgcaggatgaacaagaacctcctgcttatgatcaagctcctgaggtcactttgcaggctgatattgaggttatgtcaactgttcatatatcatctgtctataacgatgtgcctgtgactgaaggagttgtttatatcgagcaactgccagaacaaatagttatcccttttactgatcaagttgcttgtcttaaagaaaatgagcagtcaaaagaaaatgagcagtcaccacgagttagtcccaaatctgtagtagaaaagaccacctctggcatgtctaaaaaatctgtagagtctgtaaaacttgcacagttggaggagaatgcaaaatattcctcagtatatatggaggcagaagcaacagctctgctctctgacacatctttgaaaggtcagcctgaggtacctgcacaactcctggatgcagaaggtgctatcaaaataggctctgaaaaatctctgcaccttgaagtggagatcacttcaatagtctctgctccagaaggccttactgcaccagaaattgaaccaaatgctaatcctccaagtggacaagatgtccccaggccaaaaagccctgttttcctttctgttgctttcccagtagaagatgtagctaaaaaaagttcaggatctggtgacaaatgtgctccctttggaagttacggtattgctggggaggtaaccgtgactactgctcacaaacgtcgcaaagcagaaactgaaaactgatccagaaatgacgctgtctgggtcaacatttcagggaggagtctgccaccagtgtaatgtatcaataaacttcatgcaagcat

SEQ ID NO: 10387 - protein, 328 aa, Homo sapiens
MLGKVSSIHSDQSDVLMVDVATSMPVVIKEVPSSEAAEDVMVAAPLVCSGKVLEVQVVNQTSVHVDLGSQPKENEAEPSTASSVPLQDEQEPPAYDQAPEVTLQADIEVMSTVHISSVYNDVPVTEGVVYIEQLPEQIVIPFTDQVACLKENEQSKENEQSPRVSPKSVVEKTTSGMSKKSVESVKLAQLEENAKYSSVYMEAEATALLSDTSLKGQPEVPAQLLDAEGAIKIGSEKSLHLEVEITSIVSAPEGLTAPEIEPNANPPSGQDVPRPKSPVFLSVAFPVEDVAKKSSGSGDKCAPFGSYGIAGEVTVTTAHKRRKAETEN

SEQ ID NO: 10388 - DNA, 1287 bp, Homo sapiens
gtttattctcagatatagaggttatgtcattttataaagacttcattgataagatggcttttattcatactaatcctcccaatgttaccccttccatcttccaagaagaaaaaaaatgcctgaatattcagaatagatatttctgatttgaaaattctaaagaattaaactggaaaagtatttcatttacttagtgctctgaatttacttttacagttttctgcagtcagtatcattaaaatggttaagtttacatttgaactgaaaatatgtataaaatctagcaattcacaaaaatgccctagaaatatagattttaatcaccattacataatgacaaaccttgttaaatgcttccacttccagtggcaaatgccactagggaaagtaagttgcactcatgtaagtatcaaactatataaaaggaggccttgtgcatttcaagtttgcaaagtacctgtgtacttaaaatatgtgtggagacctactgtacagtagttttgcccctttaattggggcacattcatcttaaatcttatagtatttatccacccaaaccccagactgagatactgctcccaggggcctaggtagctgccagtccgtgattttaattgctgtcttgaagttaacaagtgttataatgaaataatctacctgatgctaaataaaggctttagaatgttccccaaaagtgtggtttcttttaaaatttcaaatatactaatgttgccacttaatactatcctaaattgttagacgtgtcctacgaaagaagtccttgtggtaccatagctcccagggtcaaggagatgataaccagttacctggcatgcatagtggacacagcctgggcgcaccctgcaaagctggcttcttctcatactcaggtgtcagtttacatctgagcctgaacaccctacctaatagtgacaattaaaggaacagcaatgggcacttgcattgcaacatatctcaagacatctgactgtgaaacgacagcatgtccaggaagaggtttccatccctgtgcttcctgaacatttgagcctactaagataaaaggtggggcactggtcttcttggtgtcgcccatcacataagttggaaaagtgacttttggtggatgctgctgaaactgtggatccttaggattaggtaaatagagggttgcttggggaaaaggcccaggtgcaggtggcggtgatgggtgaccttgttgattcttatcagttagacaataaagggtccacatgttagaacatggtggtggttgtcctcgttcac

SEQ ID NO: 10389 - protein, 35 aa, Homo sapiens
MHSGHSLGAPCKAGFFSYSGVSLHLSLNTLPNSDN

SEQ ID NO: 10390 - DNA, 3316 bp, Homo sapiens
ccagggccggtgtctccaggagagggccgagcgcacagcagctctaggacctcgcaggcgcctcggcgcggcactcacgtagagcccaaggagcagtccccgacctctcctcggagggccgtgcaggcttccccggcggtccctacctgcgcctccgcccgccagcggcgctggggaaggggaggagcggcccggacgctgcccgccgcgcgcagggagccgcccgccgcaggccttgccgccgcccgcccgcgctctccccgcgagccccggagggcgggtctgcggccgagccagcggcggcggaggggcagcgcagacctctgcggcccgggcgggcgcggcgcgggagtcctgggccgctggcgggcaacgcctctgcccgacctcgctggggaaggctggcgctgctgcccggccggagccaggggcaggctgcgcaaaggtgacttagggagaccttgcgggccgccctgggtcgcgcctcccggatcggctcgcctcggctcgactggaggggaggaggaggagcaggccgagcgcattcgcgctggagcttgcgaggagcgcagggtggagcgcgccagccggggtcctcggatctggcccaggtgaggaattttaaattggaacaagagcaagaaaaaaacaaaatcttgtcagaagcactggagacgctggccactgaacatcatgaattagagcagtctctggtgaaaggctctccacccgccagcatccttagcgaggacgagttctatgatgcgctgtcagattccgagtccgaaaggtccctgagtagattggaagcagtgacagcacgctcctttgaagaggaaggagagcatttgggcagtagaaaacacagaatgtccgaagaaaaagactgtggtggcggagatgctctctccaatggcatcaagaaacacagaacaagtttgccttctcctatgttttccagaaatgacttcagtatctggagcatcctcagaaaatgtattggaatggaactatccaagatcacgatgccagttatatttaatgagcctctgagcttcctacagcgcctaactgaatacatggagcatacttacctcatccacaaggccagttcactctctgatcctgtggaaaggatgcagtgtgtagctgcgtttgctgtatctgctgttgcttctcagtgggaacggactggaaaacctttcaacccactgctgggagagacttatgaattagtgcgagatgaccttggatttagactcatctccgaacaggtcagccatcacccaccaatcagtgcatttcatgctgaaggattaaacaatgacttcatctttcatggctctatctatcccaaactgaaattctgggggaagagtgtagaagcagaacccaaaggaaccatcaccttggagctccttgaacacaatgaggcatatacatggacaaatcccacctgctgtgtgcataatatcattgtgggtaaactgtggatcgaacagtatggcaatgtggaaattataaaccacaagactggggacaaatgtgtgttgaattttaagccatgtggcctttttggtaaggaattacacaaagttgaaggctacattcaagataaaagcaaaaagaagctctgtgccctctatgggaagtggactgaatgtttatacagtgttgaccctgccacgtttgacgcttacaaaaaaaatgataagaaaaatacagaagagaagaagaacagcaaacagatgagcacctctgaggagttggatgaaatgccagtgccggattctgaaagtgtattcattatccctggaagcgttcttctatggcgaatagccccacggcctccaaattctgcccagatgtataattttactagttttgcaatggttttgaatgaagtagacaaagacatggagagtgtgattcccaagacagactgcaggttacggcctgacatcagagccatggaaaatggagagatagatcaagctagtgaagaaaaaaaacgacttgaggaaaaacaaagagcagcccgcaaaaacaggtccaagtcagaagaggactggaagacgaggtggttccatcaaggtcctaatccctacaatggagcacaggactggatttactctggcagctactgggacagaaattacttcaatttgcctgacatttattaaaatgcatacaagtcagggtgtttggctaatctacaaataagtcttaaacctatgtttttaaatttttttcccttggtttctacttatcttttaaaaaaaaaaatgaaaaaacactcatgagataactgcatttcacccaacaaaagcagggtataaggcgatattggtgatgaaagtcttaggaaaaatgcataattttgctataaaatgtacttatttggaatactattttatatagaggtaagagaacactgctggggaatatgctttttatggttgctgttgccatatttactgaaggtttatacctaaatgtaactttagctttatggaactatatagtaatcccaaatcaagttattttgaatatttttatgctgtcatgcttgaatgttttagatgtaacctttgacatatttagaactctcctcctatacaatgtttattctcagatatagaggttatgtcattttataaagacttcattgataagatggcttttattcatactaatcctcccaatgttaccccttccatcttccaagaagaaaaaaaatgcctgaatattcagaatagatatttctgatttgaaaattctaaagaattaaactggaaaagtatttcatttacttagtgctctgaatttacttttacagttttctgcagtcagtatcattaaaatggttaagtttacatttgaactgaaaatatgtataaaatctagcaattcacaaaaatgccctagaaatatagattttaatcaccattacataatgacaaaccttgttaaatgcttccacttccagtggcaaatgccactagggaaagtaagttgcactcatgtaagtatcaaactatataaaaggaggccttgtgcatttcaagtttgcaaagtacctgtgtacttaaaatatgtgtggagacctactgtacagtagttttgcccctttaattggggcacattcatcttaaatcttatagtatttatccacccaaaccccagactgagatactgctcccaggggcctaggtagctgccagtccgtgattttaattgctgtcttgaagttaacaagtgttataatgaaataatctacctgatgctaaataaaggctttagaatgttccccaaa

SEQ ID NO: 10391 - protein, 437 aa, Homo sapiens; identical to SEQ ID NO: 1745

SEQ ID NO: 10392 - DNA, 4148 bp, Homo sapiens
aggatgcgcgttccaggggcgggctgcggggaggggcggcgccacctcgcgctccgccgtggtcccggcgccgggtcccggagacagacgttacgcgggctcgagcgtcctcggggagtgccagccagagttggtgacgaccacttcctcgacgtggggcgggcggacgggaagcctggggtcgtggccaccgcctcgggagctctgggagcccgggtgaccgcgtagaaatgaacacagaagcggagcaacagcttctccatcacgccagaaatggcaatgctgaagaagtaagacaactattagagaccatggcgaggaatgaagtgattgctgacattaattgcaaaggaagaagtaagtctaacttgggctggacacctctacatctggcatgctattttggacacagacaagtggtccaggatctgttgaaggctggtgcagaagtgaatgtgttgaatgacatgggagacacgccgcttcatcgagctgcctttacaggacgaaaggagttggtaatgcttctcttagaatataatgctgatactactattgttaatgggagtggacagacagcaaaagaagttactcatgctgaagaaatcagaagcatgcttgaagctgtagaaaggactcaacaaagaaagcttgaagaattacttttagcagcagcaagagaaggcaaaacaacagaactcacagctctgctcaacaggcccaatcctcctgatgttaactgttcggatcagttaggaaatacacccttgcattgtgcagcttaccgggcccataaacaatgtgccttaaagcttctaagaagtggagcagaccctaatctgaagaacaaaaatgatcagaaacctcttgaccttgcccagggtgctgaaatgaaacacattcttgttggtaataaggtcatctacaaagcattgaaacgatatgagggccctctctggaagagttcaagattttttggctggagattattctgggtagtgttagagcatggagtcctttcatggtataggaaacagcctgatgcagttcataatatttatcgccagggatgcaaacacctgactcaagcagtatgcacggtaaaatccactgatagctgcctcttctttattaaatgctttgatgacaccattcatggcttccgggttcctaagaatagccttcagcagtcaagagaggactggctggaagcaatagaagaacattctgcttacagcactcactactgttcccaggaccagctgactgatgaggaggaggaagatacggtttctgctgcagacctgaagaaatcattagagaaagcacagtcatgccaacagcgactagatagggaaatttccaactttctcaaaatgattaaggagtgtgacatggctaaagaaatgcttccatcatttcttcagaaagttgaagttgtctcagaagcttctagagaaacttgtgtagctttgactgattgccttaatctcttcaccaaacaagaaggggtgaggaattttaaattggaacaagagcaagaaaaaaacaaaatcttgtcagaagcactggagacgctggccactgaacatcatgaattagagcagtctctggtgaaaggctctccacccgccagcatccttagcgaggacgagttctatgatgcgctgtcagattccgagtccgaaaggtccctgagtagattggaagcagtgacagcacgctcctttgaagaggaaggagagcatttgggcagtagaaaacacagaatgtccgaagaaaaagactgtggtggcggagatgctctctccaatggcatcaagaaacacagaacaagtttgccttctcctatgttttccagaaatgacttcagtatctggagcatcctcagaaaatgtattggaatggaactatccaagatcacgatgccagttatatttaatgagcctctgagcttcctacagcgcctaactgaatacatggagcatacttacctcatccacaaggccagttcactctctgatcctgtggaaaggatgcagtgtgtagctgcgtttgctgtatctgctgttgcttctcagtgggaacggactggaaaacctttcagtcagccatcacccaccaatcagtgcatttcatgctgaaggattaaacaatgacttcatctttcatggctctatctatcccaaactgaaattctgggggaagagtgtagaagcagaacccaaaggaaccatcaccttggagctccttgaacacaatgaggcatatacatggacaaatcccacctgctgtgtgcataatatcattgtgggtaaactgtggatcgaacagtatggcaatgtggaaattataaaccacaagactggggacaaatgtgtgttgaattttaagccatgtggcctttttggtaaggaattacacaaagttgaaggctacattcaagataaaagcaaaaagaagctctgtgccctctatgggaagtggactgaatgtttatacagtgttgaccctgccacgtttgacgcttacaaaaaaaatgataagaaaaatacagaagagaagaagaacagcaaacagatgagcacctctgaggagttggatgaaatgccagtgccggattctgaaagtgtattcattatccctggaagcgttcttctatggcgaatagccccacggcctccaaattctgcccagatgtataattttactagttttgcaatggttttgaatgaagtagacaaagacatggagagtgtgattcccaagacagactgcaggttacggcctgacatcagagccatggaaaatggagagatagatcaagctagtgaagaaaaaaaacgacttgaggaaaaacaaagagcagcccgcaaaaacaggtccaagtcagaagaggactggaagacgaggtggttccatcaaggtcctaatccctacaatggagcacaggactggatttactctggcagctactgggacagaaattacttcaatttgcctgacatttattaaaatgcatacaagtcagggtgtttggctaatctacaaataagtcttaaacctatgtttttaaatttttttcccttggtttctacttatcttttaaaaaaaaaaatgaaaaaacactcatgagataactgcatttcacccaacaaaagcagggtataaggcgatattggtgatgaaagtcttaggaaaaatgcataattttgctataaaatgtacttatttggaatactattttatatagaggtaagagaacactgctggggaatatgctttttatggttgctgttgccatatttactgaaggtttatacctaaatgtaactttagctttatggaactatatagtaatcccaaatcaagttattttgaatatttttatgctgtcatgcttgaatgttttagatgtaacctttgacatatttagaactctcctcctatacaatgtttattctcagatatagaggttatgtcattttataaagacttcattgataagatggcttttattcatactaatcctcccaatgttaccccttccatcttccaagaagaaaaaaaatgcctgaatattcagaatagatatttctgatttgaaaattctaaagaattaaactggaaaagtatttcatttacttagtgctctgaatttacttttacagttttctgcagtcagtatcattaaaatggttaagtttacatttgaactgaaaatatgtataaaatctagcaattcacaaaaatgccctagaaatatagattttaatcaccattacataatgacaaaccttgttaaatgcttccacttccagtggcaaatgccactagggaaagtaagttgcactcatgtaagtatcaaactatataaaaggaggccttgtgcatttcaagtttgcaaagtacctgtgtacttaaaatatgtgtggagacctactgtacagtagttttgcccctttaattggggcacattcatcttaaatcttatagtatttatccacccaaaccccagactgagatactgctcccaggggcctaggtagctgccagtccgtgattttaattgctgtcttgaagttaacaagtgttataatgaaataatctacctgatgctaaataaaggctttagaatgttccccaaa

SEQ ID NO: 10393 - protein, 637 aa, Homo sapiens
MNTEAEQQLLHHARNGNAEEVRQLLETMARNEVIADINCKGRSKSNLGWTPLHLACYFGHRQVVQDLLKAGAEVNVLNDMGDTPLHRAAFTGRKELVMLLLEYNADTTIVNGSGQTAKEVTHAEEIRSMLEAVERTQQRKLEELLLAAAREGKTTELTALLNRPNPPDVNCSDQLGNTPLHCAAYRAHKQCALKLLRSGADPNLKNKNDQKPLDLAQGAEMKHILVGNKVIYKALKRYEGPLWKSSRFFGWRLFWVVLEHGVLSWYRKQPDAVHNIYRQGCKHLTQAVCTVKSTDSCLFFIKCFDDTIHGFRVPKNSLQQSREDWLEAIEEHSAYSTHYCSQDQLTDEEEEDTVSAADLKKSLEKAQSCQQRLDREISNFLKMIKECDMAKEMLPSFLQKVEVVSEASRETCVALTDCLNLFTKQEGVRNFKLEQEQEKNKILSEALETLATEHHELEQSLVKGSPPASILSEDEFYDALSDSESERSLSRLEAVTARSFEEEGEHLGSRKHRMSEEKDCGGGDALSNGIKKHRTSLPSPMFSRNDFSIWSILRKCIGMELSKITMPVIFNEPLSFLQRLTEYMEHTYLIHKASSLSDPVERMQCVAAFAVSAVASQWERTGKPFSQPSPTNQCISC

SEQ ID NO: 10394 - DNA, 4216 bp, Homo sapiens
aggatgcgcgttccaggggcgggctgcggggaggggcggcgccacctcgcgctccgccgtggtcccggcgccgggtcccggagacagacgttacgcgggctcgagcgtcctcggggagtgccagccagagttggtgacgaccacttcctcgacgtggggcgggcggacgggaagcctggggtcgtggccaccgcctcgggagctctgggagcccgggtgaccgcgtagaaatgaacacagaagcggagcaacagcttctccatcacgccagaaatggcaatgctgaagaagtaagacaactattagagaccatggcgaggaatgaagtgattgctgacattaattgcaaaggaagaagtaagtctaacttgggctggacacctctacatctggcatgctattttggacacagacaagtggtccaggatctgttgaaggctggtgcagaagtgaatgtgttgaatgacatgggagacacgccgcttcatcgagctgcctttacaggacgaaaggagttggtaatgcttctcttagaatataatgctgatactactattgttaatgggagtggacagacagcaaaagaagttactcatgctgaagaaatcagaagcatgcttgaagctgtagaaaggactcaacaaagaaagcttgaagaattacttttagcagcagcaagagaaggcaaaacaacagaactcacagctctgctcaacaggcccaatcctcctgatgttaactgttcggatcagttaggaaatacacccttgcattgtgcagcttaccgggcccataaacaatgtgccttaaagcttctaagaagtggagcagaccctaatctgaagaacaaaaatgatcagaaacctcttgaccttgcccagggtgctgaaatgaaacacattcttgttggtaataaggtcatctacaaagcattgaaacgatatgagggccctctctggaagagttcaagattttttggctggagattattctgggtagtgttagagcatggagtcctttcatggtataggaaacagcctgatgcagttcataatatttatcgccagggatgcaaacacctgactcaagcagtatgcacggtaaaatccactgatagctgcctcttctttattaaatgctttgatgacaccattcatggcttccgggttcctaagaatagccttcagcagtcaagagaggactggctggaagcaatagaagaacattctgcttacagcactcactactgttcccaggaccagctgactgatgaggaggaggaagatacggtttctgctgcagacctgaagaaatcattagagaaagcacagtcatgccaacagcgactagatagggaaatttccaactttctcaaaatgattaaggagtgtgacatggctaaagaaatgcttccatcatttcttcagaaagttgaagttgtctcagaagcttctagagaaacttgtgtagctttgactgattgccttaatctcttcaccaaacaagaaggggtgaggaattttaaattggaacaagagcaagaaaaaaacaaaatcttgtcagaagcactggagacgctggccactgaacatcatgaattagagcagtctctggtgaaaggctctccacccgccagcatccttagcgaggacgagttctatgatgcgctgtcagattccgagtccgaaaggtccctgagtagattggaagcagtgacagcacgctcctttgaagaggaaggagagcatttgggcagtagaaaacacagaatgtccgaagaaaaagactgtggtggcggagatgctctctccaatggcatcaagaaacacagaacaagtttgccttctcctatgttttccagaaatgacttcagtatctggagcatcctcagaaaatgtattggaatggaactatccaagatcacgatgccagttatatttaatgagcctctgagcttcctacagcgcctaactgaatacatggagcatacttacctcatccacaaggccagttcactctctgatcctgtggaaaggatgcagtgtgtagctgcgtttgctgtatctgctgttgcttctcagtgggaacggactggaaaacctttcaacccactgctgggagagacttatgaattagtgcgagatgaccttggatttagactcatctccgaacaggtcagccatcacccaccaatcagtgcatttcatgctgaaggattaaacaatgacttcatctttcatggctctatctatcccaaactgaaattctgggggaagagtgtagaagcagaacccaaaggaaccatcaccttggagctccttgaacacaatgaggcatatacatggacaaatcccacctgctgtgtgcataatatcattgtgggtaaactgtggatcgaacagtatggcaatgtggaaattataaaccacaagactggggacaaatgtgtgttgaattttaagccatgtggcctttttggtaaggaattacacaaagttgaaggctacattcaagataaaagcaaaaagaagctctgtgccctctatgggaagtggactgaatgtttatacagtgttgaccctgccacgtttgacgcttacaaaaaaaatgataagaaaaatacagaagagaagaagaacagcaaacagatgagcacctctgaggagttggatgaaatgccagtgccggattctgaaagtgtattcattatccctggaagcgttcttctatggcgaatagccccacggcctccaaattctgcccagatgtataattttactagttttgcaatggttttgaatgaagtagacaaagacatggagagtgtgattcccaagacagactgcaggttacggcctgacatcagagccatggaaaatggagagatagatcaagctagtgaagaaaaaaaacgacttgaggaaaaacaaagagcagcccgcaaaaacaggtccaagtcagaagaggactggaagacgaggtggttccatcaaggtcctaatccctacaatggagcacaggactggatttactctggcagctactgggacagaaattacttcaatttgcctgacatttattaaaatgcatacaagtcagggtgtttggctaatctacaaataagtcttaaacctatgtttttaaatttttttcccttggtttctacttatcttttaaaaaaaaaaatgaaaaaacactcatgagataactgcatttcacccaacaaaagcagggtataaggcgatattggtgatgaaagtcttaggaaaaatgcataattttgctataaaatgtacttatttggaatactattttatatagaggtaagagaacactgctggggaatatgctttttatggttgctgttgccatatttactgaaggtttatacctaaatgtaactttagctttatggaactatatagtaatcccaaatcaagttattttgaatatttttatgctgtcatgcttgaatgttttagatgtaacctttgacatatttagaactctcctcctatacaatgtttattctcagatatagaggttatgtcattttataaagacttcattgataagatggcttttattcatactaatcctcccaatgttaccccttccatcttccaagaagaaaaaaaatgcctgaatattcagaatagatatttctgatttgaaaattctaaagaattaaactggaaaagtatttcatttacttagtgctctgaatttacttttacagttttctgcagtcagtatcattaaaatggttaagtttacatttgaactgaaaatatgtataaaatctagcaattcacaaaaatgccctagaaatatagattttaatcaccattacataatgacaaaccttgttaaatgcttccacttccagtggcaaatgccactagggaaagtaagttgcactcatgtaagtatcaaactatataaaaggaggccttgtgcatttcaagtttgcaaagtacctgtgtacttaaaatatgtgtggagacctactgtacagtagttttgcccctttaattggggcacattcatcttaaatcttatagtatttatccacccaaaccccagactgagatactgctcccaggggcctaggtagctgccagtccgtgattttaattgctgtcttgaagttaacaagtgttataatgaaataatctacctgatgctaaataaaggctttagaatgttccccaaa

SEQ ID NO: 10395 - protein, 950 aa, Homo sapiens; identical to SEQ ID NO: 1747

SEQ ID NO: 10396 - DNA, 678 bp, Homo sapiens
gtgtatttgcagctcggtggctttgcggggcagcctggggccacggaggacgccgggggacggagcggggagggcggccagacttgatccagggatgtgaggaattttaaattggaacaagagcaagaaaaaaacaaaatcttgtcagaagcactggagacgctggccactgaacatcatgaattagagcagtctctggtgaaaggctctccacccgccagcatccttagcgaggacgagttctatgatgcgctgtcagattccgagtccgaaaggtccctgagtagattggaagcagtgacagcacgctcctttgaagaggaaggagagcatttgggcagtagaaaacacagaatgtccgaagaaaaagactgtggtggcggagatgctctctccaatggcatcaagaaacacagaacaagtttgccttctcctatgttttccagaaatgacttcagtatctggagcatcctcagaaaatgtattggaatggaactatccaagatcacgatgccagttatatttaatgagcctctgagcttcctacagcgcctaactgaatacatggagcatacttacctcatccacaaggccagttcactctctgatcctgtggaaaggatgcagtgtgtagctgcgtttgctgtatctgctgttgcttctcagtgggaacggact

SEQ ID NO: 10397 - protein, 107 aa, Homo sapiens
MSEEKDCGGGDALSNGIKKHRTSLPSPMFSRNDFSIWSILRKCIGMELSKITMPVIFNEPLSFLQRLTEYMEHTYLIHKASSLSDPVERMQCVAAFAVSAVASQWER

SEQ ID NO: 10398 - DNA, 832 bp, Homo sapiens
gcgagccccggagggcgggtctgcggccgagccagcggcggcggaggggcagcgcagacctctgcggcccgggcgggcgcggcgcgggagtcctgggccgctggcgggcaacgcctctgcccgacctcgctggggaaggctggcgctgctgcccggccggagccaggggcaggctgcgcaaaggtgacttagggagaccttgcgggccgccctgggtcgcgcctcccggatcggctcgcctcggctcgactggaggggaggaggaggagcaggccgagcgcattcgcgctggagcttgcgaggagcgcagggtggagcgcgccagccggggtcctcggatctggcccaggtgaggaattttaaattggaacaagagcaagaaaaaaacaaaatcttgtcagaagcactggagacgctggccactgaacatcatgaattagagcagtctctggtgaaaggctctccacccgccagcatccttagcgaggacgagttctatgatgcgctgtcagattccgagtccgaaaggtccctgagtagattggaagcagtgacagcacgctcctttgaagaggaaggagagcatttgggcagtagaaaacacagaatgtccgaagaaaaagactgtggtggcggagatgctctctccaatggcatcaagaaacacaggaactatccaagatcacgatgccagttatatttaatgagcctctgagcttcctacagcgcctaactgaatacatggagcatacttacctcatccacaaggccagttcactctctgatcctgtggaaaggatgcagtgtgtagctgcgtttgctgtatctgctg

SEQ ID NO: 10399 - protein, 47 aa, Homo sapiens
MPVIFNEPLSFLQRLTEYMEHTYLIHKASSLSDPVERMQCVAAFAVS

SEQ ID NO: 10400 - DNA, 7993 bp, Homo sapiens
agatagtgtattttttaactggtggtggaacccatctagattccatctaggaggctatttcatttagttcaaaagcattttattgaattcttactgtgtgccaggcattttagacatcaaatccagaaatgaggtctctcttctggaatttcatctagttggcaggagttcagaatttatttttggtattagggcagaattctatgaaagaaatcatagtgttgtctttctctctgcctaaagaaataatttctccaaagtgccctgtaggtagaatgaaaataacacagaattggcagacctctataaggcattttcctatgtgctaggcagaaaaactaaactgagtattaattttttggttaatgttttaaaaagttttttccccactaaagaagtaatgtatcaccagccccaggttccccatcagcagctctataaatcttcctccaaaataaatcttaaagccacatacaaggccgggcacggtggctcacacctgtaatcccaacatgctgggattacaggcatgcgtcactgcacccggcctatattataattttttaacactttgacagagttttaaacatgagtcagatcatgttactcttacttaaaacccttcagtggcttttcatcctatttagaataaaactcaaactccttatgctggcttacaaaagtctggcctacaaaccccttgtgtgatgtggcctctgcgtgcctctctgactttatctcttgcctgctgaattgttcctacctcagagcctttgcatcagctgttcctctgctagaatgtccttccctgtattttcacaaggctggatccttcttttcaacctagacatcccttcctcaaagaggccttccctgatcaacccctcatcctccaatctaaagtggtatcccagttactctgtcaaatcatttatttaaaaagtctgggcgtaccgtggttcattgtctgctgtatctttaagaattaatttatcatctgtctttcccaccttctatgctttcccatccccccagtattttttctgttatgttcactgctgaatcctcagtgcctaaaatagtaatcggtacataacagaccctcattaggggatatcatacaaaaaaattgccaacacataccagatgtttggtatttataaaaatattattattttaaaccacccccagcccccctttttgtttttagagacagagtctcactctgtcacccagtctggagtgcagtggtagctgggactgtaggcacatgccaccgtgcctggctaattaaattttttttttttttttttgtagagataaggtctcactgtattaccccggcgagtcttaagcttctggcctcaagccatccttccgccttagcctcccagagtactgggattatagttgtgagccactgcgcctggcctaaaaggttatctgatagaatatatcaccttcctgcataaacagttccagagttctcattgatatgttgttttgaaaggactgttctaattttcataggtagctttcatttctctaataataagctatttgaggctaggagatggtttgatttatttgtgggtttttgtttgtttgtttttttaccttttgtccttcatttaatgtcctgctcacttcagaactctataaataactttgataagacaaactccatttttgttgttgttgggcaaaacatggaatgtgcatgtgtaaggttggaaaaattaacattgatagcttgccggctttattctccattgtcacctttttcttttgtcctaaattgtggaccatcacaccctcagcttgtgagccatctctgctacccattatgcagcgagacggctgaagcgtggctgtggtcggctaaagagtggaccccaaatttgtgattagttaggtatcttgagatgaggggaaatcctgaattatccaggtagatctatgtagttacaaggctcctgataggagggagggctatagagagagagagaacagaatgctggaagcagaggttggaatgatgtgctttggagatggaggaagagaccccatgtcaagtcaggtagttggccgctagaagtggaaaaggcaaggaaatgtctcccttagagcctccagaaggaatgcagctctgtccacatgttgatttcagcccagtgaaattgatttcagacttctgatctctgaaactgtaagataataaatttgtattgtttaagccacaaatttatgagttcatgataatttgttgtgaagttaatctgatttgctggcttaatagttagcgaccaaaagggaggccataaataattgagatggcaacctctctctggtaggtaattttctggggaaagaaaaagatataggcaatagaaaaatgaaggactattagatgctgcagttacagcattgattgtcatagtacatttaagctgttgatggctttttttctttgtattttgcacagatcagaaacctcttgaccttgcccagggtgctgaaatgaaacacattcttgttggtaataaggtcatctacaaagcattgaaacgatatgagggccctctctggaagagttcaagattttttggctggagattattctgggtagtgttagagcatggagtcctttcatggtataggaaacagcctgatgcagttcataatatttatcgccagggatgcaaacacctgactcaagcagtatgcacggtaaaatccactgatagctgcctcttctttattaaatgctttgatgacaccattcatggcttccgggttcctaagaatagccttcagcagtcaagagaggactggctggaagcaatagaagaacattctgcttacagcactcactactgttcccaggaccagctgactgatgaggaggaggaagatacggtttctgctgcagacctgaagaaatcattagagaaagcacagtcatgccaacagcgactagatagggaaatttccaactttctcaaaatgattaaggagtgtgacatggctaaagaaatgcttccatcatttcttcagaaagttgaagttgtctcagaagcttctagagaaacttgtgtagctttgactgattgccttaatctcttcaccaaacaagaaggggtgaggaattttaaattggaacaagagcaagaaaaaaacaaaatcttgtcagaagcactggagacgctggccactgaacatcatgaattagagcagtctctggtgaaaggctctccacccgccagcatccttagcgaggacgagttctatgatgcgctgtcagattccgagtccgaaaggtccctgagtagattggaagcagtgacagcacgctcctttgaagaggaaggagagcatttgggcagtagaaaacacagaatgtccgaagaaaaagactgtggtggcggagatgctctctccaatggcatcaagaaacacagaacaagtttgccttctcctatgttttccagaaatgacttcagtatctggagcatcctcagaaaatgtattggaatggtaaattaatggttttgtcatatgatattaagcagatatgtttaatcgcatattctttagaaaggaacctaaaagtttgcattaaagtggtgcacgacaacgtttatgggaacgtacgagaatcataaattgtgaaaagtcgtaggtgacttttttctgacaagaatttgagctgctctaatggctttagtgtgcatttttgatgtaaaaaaaaaaacaaacagaaactgaaaatgccgtgtttctgttgacacagcacatttatattgccccatagacttacctagaaactctcagaaagaacagacaaccccacagtggagaacagaatttcacttacacttctgtgcacagagcaagttttcgtatttggaatttgtaagtgtggtatattaaatatttggaatatgtctctgcttagttatctgtgcaggtggatctgatgtggggggaggtagggagatggcagcatttcctttcatagaaatccttggattcccttgaaggtagtagtcaacaccaccaccctgatgtcagtcaggctaggattctgggtaaagttctcataactcttcctagtgtgaccttggaccaccgaacatgtaagtcatgtggcacaaaagaatctgcctggacattaccttttaacattttgcaattgaatgtgtaccctgggagcactccagaactttccctgtgctgggaagtacagtcacctcatgcacacttcattctgtggcttgaaatcctgtccgctgcagagatacccactttggcatttttcttttcattttctttcttttttcatttcatttcttttcatttttttgagacaggggctcattacccagactggagtgaagtggtgccctcatggctcactgtagcctcaacctccccagctcaatttatccgcccacctcagcctcctgagtagctgggaccacaggcgcgtcgtgccacacctggctaatttttttgtatttttagtagagaaggagtgttgctatgtttcccaggctggtctcgaactcctgggctcaagcagtcctcccacctcagccttccaaagtgttgggattacaggccttagccaccatgcctggcctctggcatttttccaatgtctctcttctctgagtggataatgaaatctgaaacttcctaaatgtaatttccaaggaacaaatttcataaacattaattttaaacaaatattttttgactcctgcatggagagtaattcatctaaatttcggagcctgataatgtgggatctaatccccgctctcccgcttcctggctgtgagaccccaagcaagttgcagttcctacgtgagtagcattccatccagtgtagaactagcatcataatttgtaccttagaggtaggtgtattgagcgataaataatttatgtaaaatgcctggaactattcctggtttaacgttgcgctcaataaataatagttcatattatcattaatcacagctgagaatgagacttgagctctaattttatttcaattctattaggattcaacaggacaaagcaaatgtatatagacagatgacagtaacacacgtttgtctctttggaactgaaaatttcaagataaaaattagtatttatttgtattctgcagagtcagtatttttcaaacccttagttaaatatgtttacctttatgatccagtatgcaaatatgtatatatgcatgtccttaaaattaaaatcagtttcacaaaagaatgctcatcattactacaaattgtattttctattatattaaagtaacattgattccagctcgttacatttattttacaacttgttaatgaaccagacccaccatttgaaaaacactgctctgagttactatagaatttgtactgtatctttgtaaggttatttggtcaaaggagtttgtatgaacatttcagatatggtttagtctttttggccactttagaatatacagttttctgtatttctgttgactgattcctttctcctgctctctcctgtttcactgggtgtcagctgtagtgttggtgttatgaatttgttcatgaaggtgactagcaatctgtctagtttacgtccaaatcgagactaaccattcttttaaaagataggagatgatgttatgttggattgcacctgctatgttctgaaagatactctgtttctctagaatgcggttttacttttatgtttaggcacataacttcttgtacaagtaaatgcttatgctgaatcataaataaaatacaacaaataaacatagagctgtttgggttgaaagggttccatagaatgttctgaatcatatctctagaacttactgattcaaagcatagagagagagcttcaggggaagtcgtgtttttggaaacttctttctgctgaggttcataggagacaaatgttctgaaagaacatttttattaatgtggattgaaaggagatcacctagcttttggaaatattgttctttgggcactgtctgctgtaggaccttctctcttaggcagcagacacaatcaaggtataagcactaagcgacagtaaagattaaaaatgaggagtcttgagagagaaatacaaatattaccactttttttttttttttttgagtcggagtctcactttgttgcccaggctggaatgcagtggtgcagtctcggctcactgcagtctccacctcccgggttcaagtgattctcctgcctcagcctcccgagtagctgggactacaggtgcatgccaccatgcccagctaattttttgtacttttagcagagatggggtttcaccatgttggccagactggtctcgaactcatgacctcagttgatccacccaccctggcttccaaaagtgctgggattacaggcatgagccaccgcgcccagcctgcatgtttctgattctatcacattaatccaaatacttcacttcgtgtcctttttgtgggggtgaaactgagttctagaagccatgtgtataccttcagctatcatctctcttcccttacctccatttacccagcttcttaatttgttaataagtcctaagagtggaagaggaaatttgatactgagccttagctcttcctgctctctgttgttgtgaggagcgtgccaggacagagtgcggggtgtaagcatcctgcgggtgacagccccacaattccacactcaaccagagtcctcatcccattttttccgtaacaattaatgccccagatttgtatgctatgatgatatcattttatggtgtaatgctattattattcaaaatatgtggcttttctaaattcacagtacatattcttatctgccagatatggtctaggtctcactctgtcttaggaaggaaaggaagaggttcttctccatgcatttgtcatcttggccccccgtgtctgcagccccatccccagccgggctcactctgccccatctcctccactcccatgcacctgcacgttgtactttacctttttccaaatagcatttagccactttgatttccaatactgatgacatccttcttttcttctcccagtctgttttgagcaggattatgttatcaaaatgtcagattatacaatgtgaaatgaatactttacctaactggaattcaaccctaaatctgtttgtggttgaagcttttaccaaacaaacaaatctccggctcctgagaactaatcctgacactgcttagtcatttgaagcctttgcttatttctttctgcttgtttcccctttgtcacaggactctttaatccgaaagcctcatgtcctgtgtgtaccctgtttccgtcctcctcttctcctccatccctttgctccagtggctttctcagcagggctcagccagaggttaggtcgttggtgttcatgctcagtgacttaggcaaccagccccaggacctcagcacaaaatttgaggaggtacttgagctcaaggccatgtgcgtgctgcccttgtgtgtgttcaaatgtcttggagtaatagaatagtcctggattattgcaagaggtgacaaaggtctggtacatcaggaataccgactacttaaagtgaaagaaaagtgttgtatcattcttttaaaggtagctagtggaatccacataccatcgagttttgattgccactgtcattctgttaaataaatacatgagcaagctattcttcagtcattgaaaagcttatacttctatgtctcctttaatttgtatttccattttatccttcctataggataactcagttaacttcgtgtcctttttgtaggggtgaaactgagttccagaagccatgtgcataccttcagctatcatctctcttccattagctccatttaccgagttaactcaattgttttaatctctgagggtcttttatcgattacttcatcatacttcattactgcagaaatatgtat

SEQ ID NO: 10401 - protein, 341 aa, Homo sapiens
MKHILVGNKVIYKALKRYEGPLWKSSRFFGWRLFWVVLEHGVLSWYRKQPDAVHNIYRQGCKHLTQAVCTVKSTDSCLFFIKCFDDTIHGFRVPKNSLQQSREDWLEAIEEHSAYSTHYCSQDQLTDEEEEDTVSAADLKKSLEKAQSCQQRLDREISNFLKMIKECDMAKEMLPSFLQKVEVVSEASRETCVALTDCLNLFTKQEGVRNFKLEQEQEKNKILSEALETLATEHHELEQSLVKGSPPASILSEDEFYDALSDSESERSLSRLEAVTARSFEEEGEHLGSRKHRMSEEKDCGGGDALSNGIKKHRTSLPSPMFSRNDFSIWSILRKCIGMVN

SEQ ID NO: 10402 - DNA, 580 bp, Homo sapiens
gtatttgcagctcggtggctttgcggggcagcctggggccacggaggacgccgggggacggagcggggagggcggccagacttgatccagggatgtgaggaattttaaattggaacaagagcaagaaaaaaacaaaatcttgtcagaagcactggagacgctggccactgaacatcatgaattagagcagtctctggtgaaaggctctccacccgccagcatccttagcgaggacgagttctatgatgcgctgtcagattccgagtccgaaaggtccctgagtagattggaagcagtgacagcacgctcctttgaagaggaaggagagcatttgggcagtagaaaacacagaatgtccgaagaaaaagactgtggtggcggagatgctctctccaatggcatcaagaaacacagaacaagtttgccttctcctatgttttccagaaatgacttcagtatctggagcatcctcagaaaatgtattggaatggtaaattaatggttttgtcatatgatattaagcagatatgtttaatcgcatattctttagaaaggaacctaaaagtttgcattaaagtgg

SEQ ID NO: 10403 - protein, 48 aa, Homo sapiens
MSEEKDCGGGDALSNGIKKHRTSLPSPMFSRNDFSIWSILRKCIGMVN

SEQ ID NO: 10404 - DNA, 1025 bp, Homo sapiens
aggtcatttttgcagcttattgtgatgacaacagtggaggatggtcttccacttcaccttaaaagcggctgttctctgattatcattaagcatggccacgcccgcacttaacttctgacagtggggaaagcagctgtgtgtgatagcttggaaggtttactgctgcctcaagtcctcttctctgcagttgaggtttcaggtttcaatcctcccaataccacaagacagagcacggggcggctgccgcctccgcctccgcgccttaacctaggcggcttgccgaagatctcagccccgcggccgcgcgctcgccctgccctagaccagggttgggcgcagcggcggaggtggcttctgggctgcgcgagctgggagagctgggaggcggcgatcgcagctgggccgggacttccttcctccaccgcacggcaacaaaacaaccctgcggcaggcactgagtgcttcgcagctgtctgggcgagaggcacagcgatgggctccgtgctgagcaccgacagcggcaaatcggcgcccgcctctgccaccgcgcgggccctggagcgcaggagggacccggagttgcccgtcacgtccttcgactgcgccgtgtgccttgaggtgttacaccagcctgtccggacccgctgtggccacgtattctgccgttcctgtattgctaccagtctaaagaacaacaagtggacctgtccttattgccgggcatatcttccttcagaaggagttccagcaactgatgtagccaaaagaatgaaatcagagtataagaactgcgctgagtgtgacaccctggtttgcctcagtgaaatgagggcacatattcggacttgtcagaagtacatagataagtatggaccactacaagaacttgaggagacagcagcaaggtgtgtatgtcccttttgtcagagggaactgtatgaagacagcttgctggatcattgtattactcatcacagatcggaacggaggcctgtggattttaatataattgaggaagctcttat

SEQ ID NO: 10405 - protein, 176 aa, Homo sapiens
MGSVLSTDSGKSAPASATARALERRRDPELPVTSFDCAVCLEVLHQPVRTRCGHVFCRSCIATSLKNNKWTCPYCRAYLPSEGVPATDVAKRMKSEYKNCAECDTLVCLSEMRAHIRTCQKYIDKYGPLQELEETAARCVCPFCQRELYEDSLLDHCITHHRSERRPVDFNIIEEA

SEQ ID NO: 10406 - DNA, 2396 bp, Homo sapiens
aggtcatttttgcagcttattgtgatgacaacagtggaggatggtcttccacttcaccttaaaagcggctgttctctgattatcattaagcatggccacgcccgcacttaacttctgacagtggggaaagcagctgtgtgtgatagcttggaaggtttactgctgcctcaagtcctcttctctgcagttgaggtttcaggtttcaatcctcccaataccacaagacagagcacggggcggctgccgcctccgcctccgcgccttaacctaggcggcttgccgaagatctcagccccgcggccgcgcgctcgccctgccctagaccagggttgggcgcagcggcggaggtggcttctgggctgcgcgagctgggagagctgggaggcggcgatcgcagctgggccgggacttccttcctccaccgcacggcaacaaaacaaccctgcggcaggcactgagtgcttcgcagctgtctgggcgagaggcacagcgatgggctccgtgctgagcaccgacagcggcaaatcggcgcccgcctctgccaccgcgcgggccctggagcgcaggagggacccggagttgcccgtcacgtccttcgactgcgccgtgtgccttgaggtgttacaccagcctgtccggacccgctgtggccacgtattctgccgttcctgtattgctaccagtctaaagaacaacaagtggacctgtccttattgccgggcatatcttccttcagaaggagttccagcaactgatgtagccaaaagaatgaaatcagagtataagaactgcgctgagtgtgacaccctggtttgcctcagtgaaatgagggcacatattcggacttgtcagaagtacatagataagtatggaccactacaagaacttgaggagacagcagcaaggtgtgtatgtcccttttgtcagagggaactgtatgaagacagcttgctggatcattgtattactcatcacagatcggaacggaggcctgtgttctgtccactttgccgtttaatacccgatgagaatccaagcagcttcagtggcagtttaataagacatctgcaagttagtcacactttgttttatgatgatttcatagattttaatataattgaggaagctcttatccgaagagtcttagaccggtcacttcttgaatatgtgaatcactcgaacaccacataattttattaaaacgaagggaaaagggaccactgaattgcaccatttaagatgctgcttgaacaaatgggagggaagttgtcaatgattgatgggcaaaaatgtacaacacagttatgtgtttgtccatgtttattgttatagtgcatttaaaaactgctttaattttaatggtttaaatctgttttacatccttgagattcttacacatctaacaacaaaaaaaattatctacatcagtcattgttacatggaaaagacaggtggtaggcaagtaggtggaggatctcggtttgcaaattagataatactctgtgtataatgctacatatcaataactaccatcatggttaggcacgataactaatctttgttctgtgtaaaaaaatatggagagtgaaacaaagtgcagacattcaaagaaataagaaatctgctccaatgctcttgttctaatctctaataggttaacgttaataatcttgtatgggagttggaaaggaaaattttggaagtcaagaaagtccatttaggccggacgcggtggcttacgcttgtaatcccagcactttgggaggctgaagcaggcggatcacaaggtcaggagttcgagaccagcctggccaacactggtctctgtgaaactccgtctctactaaaaatacaaaaattagctggacgtgttggcgggcatctgtaataccagctacttgggaggctgaggcagaagaatcacttgaacccgggaggcagaggttacagtgagctgagatcgcaccagtacactccagcctgggtaacagagctagactccatctcaaaaaaaaaaaaaaaaaaaatccatttaaccaaattgtcttacataatactgtaacaaaacaaattttgtgttagaaaagtatacttaattctttgactttttataactgcatacataagaattcaatatttttcaaatatttatagcttatttagaaatatttctataatataagcaatttcttaaaaaccatcagatgatacttacagtataagtattcacatccagactttttagtagaaaaccctaagggctttgatatcttttttgattgtaacattttaaaaattatgaaataaaagtactgaaaaccagacacaaaatttatagctgaatgccttattataaggaaatactcttttaggactcagccagtcaccccacgtgt

SEQ ID NO: 10407 - protein, 232 aa, Homo sapiens; identical to SEQ ID NO: 1750

SEQ ID NO: 10408 - DNA, 627 bp, Homo sapiens
gatggtctcgatctcctgacctcgtgatccgcccgcctcggcctcccaaagtgctgggattacaggcgtgagccaccgcgcccggccgtatatgctttttagaagaaccaaattcaagaacttaacagttggatcttctaagtttgcctcagtgaaatgagggcacatattcggacttgtcagaagtacatagataagtatggaccactacaagaacttgaggagacagcagcaaggtgtgtatgtcccttttgtcagagggaactgtatgaagacagcttgctggatcattgtattactcatcacagatcggaacggaggcctgtgttctgtccactttgccgtttaatacccgatgagaatccaagcagcttcagtggcagtttaataagacatctgcaagttagtcacactttgttttatgatgatttcatagattttaatataattgaggaagctcttatccgaagagtcttagaccggtcacttcttgaatatgtgaatcactcgaacaccacataattttattaaaacgaagggaaaagggaccactgaattgcaccatttaagatgctgcttgaacaaatgggagggaagttgtcaatgattgatgggcaaaaatgtaca

SEQ ID NO: 10409 - protein, 121 aa, Homo sapiens [sequence omitted]

SEQ ID NO: 10410 - DNA, 687 bp, Homo sapiens
cggccgtatatgctttttagaagaaccaaattcaagaacttaacagttggatcttctaagtatcggagaatttgaaaaatagtagtattcttgataatgccttaatttttggtggtactggtgttacgaatgcatctatttagtcagttgatcccacagtatgaccttacttgaaagttaaaaggctggatcgcataagctttcattgagcccttttttaacagtgagtttattttgaatttgtttttatgtaggtttgcctcagtgaaatgagggcacatattcggacttgtcagaagtacatagataagtatggaccactacaagaacttgaggagacagcagcaaggtgtgtatgtcccttttgtcagagggaactgtatgaagacagcttgctggatcattgtattactcatcacagatcggaacggaggcctgtggattttaatataattgaggaagctcttatccgaagagtcttagaccggtcacttcttgaatatgtgaatcactcgaacaccacataattttattaaaacgaagggaaaagggaccactgaattgcaccatttaagatgctgcttgaacaaatgggagggaagttgtcaatgattgatgggcaaaaatgtacaacacagttatgtgtttgtccatgtttattgttatagtgcatttaaaaactgcttt

SEQ ID NO: 10411 - protein, 85 aa, Homo sapiens
MRAHIRTCQKYIDKYGPLQELEETAARCVCPFCQRELYEDSLLDHCITHHRSERRPVDFNIIEEALIRRVLDRSLLEYVNHSNTT

SEQ ID NO: 10412 - DNA, 525 bp, Homo sapiens
cacagtatgaccttacttgaaagttaaaaggctggatcgcataagctttcattgagcccttttttaacagtgagtttattttgaatttgtttttatgtaggtttgcctcagtgaaatgagggcacatattcggacttgtcagaagtacatagataagtatggaccactacaagaacttgaggagacagcagcaaggtgtgtatgtcccttttgtcagagggaactgtatgaagacagcttgctggatcattgtattactcatcacagatcggaacggaggcctgtgttctgtccactttgccgtttaatacccgatgagaatccaagcagcttcagtggcagtttaataagacatctgcaagttagtcacactttgttttatgatgatttcatagattttaatataattgaggaagctcttatccgaagagtcttagaccggtcacttcttgaatatgtgaatcactcgaacaccacataattttattaaaacgaagggaaaagggaccactgaattgcaccatt

SEQ ID NO: 10413 - protein, 121 aa, Homo sapiens [sequence omitted]

SEQ ID NO: 10414 - DNA, 231 bp, Homo sapiens
cacaattacaaccccacaaaagtaactgctagactgatttaaatggtaatcactttgttgcatttgattactgctgccacacctaaatgcatatatctatattttaatattatcaatttaaagcgatattagcacacagtgcaggttcaggcacattgaatttgagaagacttaggttcagtcctttggcaagactgtaaatcacggtgtctttctttccttcctccttct

SEQ ID NO: 10415 - protein, 30 aa, Homo sapiens
YYQFKAILAHSAGSGTLNLRRLRFSPLARL

SEQ ID NO: 10416 - DNA, 767 bp, Homo sapiens
ggctcgcgccccgccctcagcccccgtcttcgcccaaggcctcccttttcactgcttttccgcctctactcaccccgaccccgagccccgagtgcccagcccgtgtccgcggcttcctccccgccccgcttcccggcaccccggcccctccacgcttccgccggggagactctcacctaggagccccgaagcggcgttgtggacggagctgcttttccttcacgtgttcgtagagacccggcccagcgctttcctcgagcttcctgtccggccgccgctatcttcgcagccgaggccccggggcaaatggagggcggcgtgcgctgtgcttatcggcccctaacggggccggagccgaggctcatggtgcagggagattcgcccgccgccgccagcagctctgtcttggcattgcgctgcctacagcctacccggccgtcaccgaacgcgggagcgccggggatctgggcggaggagccaggagaggcggggaggcacggggtgtgaagtgcggcctgtatagcaaccggcgcacggcgccttccgcgggttgtgacctttgaagagaaatgccgtagaagcatggacgtggcttttcaccaaggttattcactaatttaagtgttttttttaattttattttattttattttattttttgagacaggtactcactctgtctcccaggccggagtgcaattatctgtacaattgataatctataagatggtccaacctgcgtaacagagtgagattccgtctcaaaa

SEQ ID NO: 10417 - protein, 66 aa, Homo sapiens
MEGGVRCAYRPLTGPEPRLMVQGDSPAAASSSVLALRCLQPTRPSPNAGAPGIWAEEPGEAGRHGV

SEQ ID NO: 10418 - DNA, 962 bp, Homo sapiens
atggcgacagcggcagcggccgaggtgacggtggcggcccggggcccgactccctacatgaacccggaggggggagggggatcgcatcaggatacagcgcgcgccaggaagggggcggggccctgggtagggcggggccgaacgcagagacgctactgccgcacgcgccgggcaagaggcgacccctcccacggctcctcccacagggggctggatgggggacggtgcttggcgggaggctgggctcgcagcatgccgtgggcccgccccgctcgcccctcaccccgccccaggacgcggcctcacgctctaggccacgccctcaccgggctccaggcgcgggctcgcgccccgccctcagcccccgtcttcgcccaaggcctcccttttcactgcttttccgcctctactcaccccgaccccgagccccgaagacccggcccagcgctttcctcgagcttcctgtccggccgccgctatcttcgcagccgaggccccggggcaaatggagggcggcgtgcgctgtgcttatcggcccctaacggggccggagccgaggctcatggtgcagggagattcgcccgccgccgccagcagctctgtcttggcattgcgctgcctacagcctacccggccgtcaccgaacgcgggagcgccggggatctgggcggaggagccaggagaggcggggaggcacggggtgtgaagtgcggcctgtatagcaaccggcgcacggcgccttccgcgggttgtgacctttgaagagaaatgccgtagaagcatggacgtggcttttcaccaaggttattcactaatttaagtgttttttttaattttattttattttattttattttttgagacaggtactcactctgtctcccaggccggagtgcaattatctgtacaattgataatctataagatggtccaacctgcgtaacagagtgagattccgtctc

SEQ ID NO: 10419 - protein, 253 aa, Homo sapiens [sequence omitted]

SEQ ID NO: 10420 - DNA, 735 bp, Homo sapiens
cgaaaacttcctgaaaggcccaatgtatttgacaggagaggtaactggggtcccgggcctagcgaggcggggcggggaggcgcaggtgtcaccgcgggcgcccagctgcttacgtcacaacccgcggaaggcgccgtgcgccggttgctatacaggccgcacttcacaccccgtgcctccccgcctctcctggctcctccgcccagatccccggcgctcccgcgttcggtgacggccgggtaggctgtaggcagcgcaatgccaagacagagctgctggcggcggcgggcgaatctccctgcaccatgagcctcggctccggccccgttaggggccgataagcacagcgcacgccgccctccatttgccccggggcctcggctgcgaagatagcggcggccggacaggaagctcgaggaaagcgctgggccgggtctctacgaacacgtgaaggaaaagcagctccgtccacaacgccgcttcggggctcctagggagtcgggccccgggccgccaccgtcacctcggccgctgccgctgtcgccatcgccttgtttccccatcccccgccatggccgaggacctctctgcggccacgtcctacaccgaagatgatttctactgccccgtctgtcaggaggtgctcaaaacgcccgtgcggaccacggcctgtcagcacgtagacagggtcatgctgtgttacccaggcgggccttgaactcattggctcaagag

SEQ ID NO: 10421 - protein, 48 aa, Homo sapiens
MAEDLSAATSYTEDDFYCPVCQEVLKTPVRTTACQHVDRVMLCYPGGP

SEQ ID NO: 10422 - DNA, 750 bp, Homo sapiens
cgaaaacttcctgaaaggcccaatgtatttgacaggagaggtaactggggtcccgggcctagcgaggcggggcggggaggcgcaggtgtcaccgcgggcgcccagctgcttacgtcacaacccgcggaaggcgccgtgcgccggttgctatacaggccgcacttcacaccccgtgcctccccgcctctcctggctcctccgcccagatccccggcgctcccgcgttcggtgacggccgggtaggctgtaggcagcgcaatgccaagacagagctgctggcggcggcgggcgaatctccctgcaccatgagcctcggctccggccccgttaggggccgataagcacagcgcacgccgccctccatttgccccggggcctcggctgcgaagatagcggcggccggacaggaagctcgaggaaagcgctgggccgggtctctacgaacacgtgaaggaaaagcagctccgtccacaacgccgcttcggggctcctagggagtcgggccccgggccgccaccgtcacctcggccgctgccgctgtcgccatcgccttgtttccccatcccccgccatggccgaggacctctctgcggccacgtcctacaccgaagatgatttctactgccccgtctgtcaggaggtgctcaaaacgcccgtgcggaccacggcctgtcagcacgtattaaattctatcgcatgagacatcattacaaatcttgtaagaagtatcaggatgaatatggtgtttct

SEQ ID NO: 10423 - protein, 42 aa, Homo sapiens
MAEDLSAATSYTEDDFYCPVCQEVLKTPVRTTACQHVLNSIA

SEQ ID NO: 10424 - DNA, 2843 bp, Homo sapiens
cgaaaacttcctgaaaggcccaatgtatttgacaggagaggtaactggggtcccgggcctagcgaggcggggcggggaggcgcaggtgtcaccgcgggcgcccagctgcttacgtcacaacccgcggaaggcgccgtgcgccggttgctatacaggccgcacttcacaccccgtgcctccccgcctctcctggctcctccgcccagatccccggcgctcccgcgttcggtgacggccgggtaggctgtaggcagcgcaatgccaagacagagctgctggcggcggcgggcgaatctccctgcaccatgagcctcggctccggccccgttaggggccgataagcacagcgcacgccgccctccatttgccccggggcctcggctgcgaagatagcggcggccggacaggaagctcgaggaaagcgctgggccgggtctctacgaacacgtgaaggaaaagcagctccgtccacaacgccgcttcggggctcctagggagtcgggccccgggccgccaccgtcacctcggccgctgccgctgtcgccatcgccttgtttccccatcccccgccatggccgaggacctctctgcggccacgtcctacaccgaagatgatttctactgccccgtctgtcaggaggtgctcaaaacgcccgtgcggaccacggcctgtcagcacgttttctgtagaaaatgtttcctgactgcaatgagggaaagcggagcacattgtcccctatgtcgtggaaatgtgactagaagagagagagcatgtcctgaacgggccttagaccttgaaaatataatgaggaagttttctggtagctgcagatgctgtgcaaaacagattaaattctatcgcatgagacatcattacaaatcttgtaagaagtatcaggatgaatatggtgtttcttctatcattccaaactttcagatctctcaagattcagtagggaacagcaataggagtgaaacatccacatctgataacacagaaacttaccaagagaatacaagttcttctggtcatcctacttttaagtgtcccctgtgtcaagaatcaaattttaccagacagcgtttactggatcactgtaacagtaatcacctatttcagatagttcctgtgacatgtcctatttgtgtgtctcttccttggggagatcctagccagattaccagaaatttcgttagtcatctaaatcagagacatcaatttgattatggagaatttgtgaatcttcagctagatgaagaaacccaataccaaactgctgttgaagaatcttttcaagtaaacatctgaaggctgtagacatctctgcatctttgtacctgcaagtgccatctttaagggggaaactacatgaagtcaccgttacagtaacttgatgtgtatattaataaaagtaattcagtcattttagtttttgattgaaaataaaggtagggcttctaaaaacttcatcatcttgataagttaaaaaatgaaagttatgacattagctttaaaggtgtaaaaaagatgtttcactaatgtaacggtgaaagagaatccctgttgtactttatctttttgtaatattatttttgaatttttcattattatgttgcttttgaaatttgatgcattcctcccatttactttattattgtacacatttaacacacagtagcaaattttgaacgatgtgattgatataacctaacaaatctgagccagttattattagagttgcagaatagaaacttgaagtgctaaatggaataatccaaaggaaattttttaaatgcaggttctagctgaaaaattcaactataagaaaattgtatttatataacatttactatttttgaagactagtgagatttctgtaataattttaattctttaaaaagtgaaagcttgttgtaaagatattttctttttgttattagaaggaaatacaaagagaaaaatttctttctttcatgggcatttgataatttcagtctttgactgatttgtaagcctagaatatactaagctgaataacagctctttggcctcagaattttcagtagccagtatttctgattaactaagttgaaactcttattagaaactttcagttggtgatattgtattctagaagatataaatgagaggtttggcttcatctcagtttagaaatttattcaaagctaaagatgtatatatacatatacttttgtgtgtatatatacacatatgtgtgtatgcagtttgtcaggttatatatagaatttctattaaggattttttaaatggacaagcaatagggggttgaagtgtttatctgatttgtttaaaattttgtatatcaccaaatttttaaaaagtgatagtcacagtgctaagttatctagttggctactattacaccttaaaaattgagtttacacacacacaattacctgtttatatggtgctcatttgttattctcaaatataatgtgtgaccgtgatatagtgagaaagattctaccaaccactgtttcactactttttagttaaaattgggtatgttcttaatattcattagtgagaatcacaaagtattttgtagaaggcccaaatcacagaataaaggactaagagtggatttgctgacattccatactaatatacattgtttatgctttctttaaaataactagaagaacataaaagaaagagaatctcagaagtagtttgctgctaatatatacatatattgtataaaaaggtatattttggttttgttaaaacccttgttgacttttctacactgaacattttttttaacttgatttaataaaaatgttaattttggaagtgc

SEQ ID NO: 10425 - protein, 245 aa, Homo sapiens; identical to SEQ ID NO: 1755

SEQ ID NO: 10426 - DNA, 3683 bp, Homo sapiens
cgaaaacttcctgaaaggcccaatgtatttgacaggagaggtaactggggtcccgggcctagcgaggcggggcggggaggcgcaggtgtcaccgcgggcgcccagctgcttacgtcacaacccgcggaaggcgccgtgcgccggttgctatacaggccgcacttcacaccccgtgcctccccgcctctcctggctcctccgcccagatccccggcgctcccgcgttcggtgacggccgggtaggctgtaggcagcgcaatgccaagacagagctgctggcggcggcgggcgaatctccctgcaccatgagcctcggctccggccccgttaggggccgataagcacagcgcacgccgccctccatttgccccggggcctcggctgcgaagatagcggcggccggacaggaagctcgaggaaagcgctgggccgggtctctacgaacacgtgaaggaaaagcagctccgtccacaacgccgcttcggggctcctagggagtcgggccccgggccgccaccgtcacctcggccgctgccgctgtcgccatcgccttgtttccccatcccccgccatggccgaggacctctctgcggccacgtcctacaccgaagatgatttctactgccccgtctgtcaggaggtgctcaaaacgcccgtgcggaccacggcctgtcagcacgttttctgtagaaaatgtttcctgactgcaatgagggaaagcggagcacattgtcccctatgtcgtggaaatgtgactagaagagagagagcatgtcctgaacgggccttagaccttgaaaatataatgaggaagttttctggtagctgcagatgctgtgcaaaacagattaaattctatcgcatgagacatcattacaaatcttgtaagaagtatcaggatgaatatggtgtttcttctatcattccaaactttcagatctctcaagattcagtagggaacagcaataggagtgaaacatccacatctgataacacagaaacttaccaagagaatacaagttcttctggtcatcctacttttaagtgtcccctgtgtcaagaatcaaattttaccagacagcgtttactggatcactgtaacagtaatcacctatttcagatagttcctgtgacatgtcctatttgtgtgtctcttccttggggagatcctagccagattaccagaaatttcgttagtcatctaaatcagagacatcaatttgattatggagaatttgtgaatcttcagctagatgaagaaacccaataccaaactgctgttgaagaatcttttcaagtaaacatctgaaggctgtagacatctctgcatctttgtacctgcaagtgccatctttaagggggaaactacatgaagtcaccgttacagtaacttgatgtgtatattaataaaagtaattcagtcattttagtttttgattgaaaataaaggtagggcttctaaaaacttcatcatcttgataagttaaaaaatgaaagttatgacattagctttaaaggtgtaaaaaagatgtttcactaatgtaacggtgaaagagaatccctgttgtactttatctttttgtaatattatttttgaatttttcattattatgttgcttttgaaatttgatgcattcctcccatttactttattattgtacacatttaacacacagtagcaaattttgaacgatgtgattgatataacctaacaaatctgagccagttattattagagttgcagaatagaaacttgaagtgctaaatggaataatccaaaggaaattttttaaatgcaggttctagctgaaaaattcaactataagaaaattgtatttatataacatttactatttttgaagactagtgagatttctgtaataattttaattctttaaaaagtgaaagcttgttgtaaagatattttctttttgttattagaaggaaatacaaagagaaaaatttctttctttcatgggcatttgataatttcagtctttgactgatttgtaagcctagaatatactaagctgaataacagctctttggcctcagaattttcagtagccagtatttctgattaactaagttgaaactcttattagaaactttcagttggtgatattgtattctagaagatataaatgagaggtttggcttcatctcagtttagaaatttattcaaagctaaagatgtatatatacatatacttttgtgtgtatatatacacatatgtgtgtatgcagtttgtcaggttatatatagaatttctattaaggattttttaaatggacaagcaatagggggttgaagtgtttatctgatttgtttaaaattttgtatatcaccaaatttttaaaaagtgatagtcacagtgctaagttatctagttggctactattacaccttaaaaattgagtttacacacacacaattacctgtttatatggtgctcatttgttattctcaaatataatgtgtgaccgtgatatagtgagaaagattctaccaaccactgtttcactactttttagttaaaattgggtatgttcttaatattcattagtgagaatcacaaagtattttgtagaaggcccaaatcacagaataaaggactaagagtggatttgctgacattccatactaatatacattgtttatgctttctttaaaataactagaagaacataaaagaaagagaatctcagaagtagtttgctgctaatatatacatatattgtataaaaaggtatattttggttttgttaaaacccttgttgacttttctacactgaacattttttttaacttgatttaataaaaatgttaattttggaagtgcagttttgtaaaaacctttttcagtcaaacagtaaagactttatttatggattgtaataacaaccacaagaaaagccatacatcttaatgaacatacgcctttgttctgtcattttaaagagtggtgtttactatgtgtgtgcttgagcattttctttcagttacatgggtgtaatttaaaaaacagctcctttttaagacttttgaccatagtgttttccagtttaaagcaataactttcatagtttctttcaaagtttaatacatccaatatgtcaagttaaaccattctgggatttgcaaagtttaatacatccaatatgtcaagttaaaccattctgggatttgcaaagtttaatacatccaatatgtcaagttaaaccattctgggatttgggaacttctttaaaggaaaattgtagtagaggtcatcttgatggaattgtgttttaaagttttgtgaatgagttaaatatcattgatagtcttgtgtgtctcacatatcagctttttcataaggaaaatactttatttgcttttatctgagaatttctcagtatgaaaatgattgtttaaaatttcccctctttttgtcagtgcattgggaatagggatagactttacagatttatggaaattaaatttatggggaaaagtttatttttaatattacttatagctgagtcagaattaaaggagggaattgtattgatactccaatacctaaatttcacaataccacttaggaaagctatttcaacaaattacagttttattgttaaaacagagtcttatttgagatgtattgctttatttttcaattaaaagtggttttctccta

SEQ ID NO: 10427 - protein, 245 aa, Homo sapiens; identical to SEQ ID NO: 1755

SEQ ID NO: 10428 - DNA, 3401 bp, Homo sapiens
cgaaaacttcctgaaaggcccaatgtatttgacaggagaggtaactggggtcccgggcctagcgaggcggggcggggaggcgcaggtgtcaccgcgggcgcccagctgcttacgtcacaacccgcggaaggcgccgtgcgccggttgctatacaggccgcacttcacaccccgtgcctccccgcctctcctggctcctccgcccagatccccggcgctcccgcgttcggtgacggccgggtaggctgtaggcagcgcaatgccaagacagagctgctggcggcggcgggcgaatctccctgcaccatgagcctcggctccggccccgttaggggccgataagcacagcgcacgccgccctccatttgccccggggcctcggctgcgaagatagcggcggccggacaggaagctcgaggaaagcgctgggccgggtctctacgaacacgtgaaggaaaagcagctccgtccacaacgccgcttcggggctcctagggagtcgggccccgggccgccaccgtcacctcggccgctgccgctgtcgccatcgccttgtttccccatcccccgccatggccgaggacctctctgcggccacgtcctacaccgaagatgatttctactgccccgtctgtcaggaggtgctcaaaacgcccgtgcggaccacggcctgtcagcacgtcaataggagtgaaacatccacatctgataacacagaaacttaccaagagaatacaagttcttctggtcatcctacttttaagtgtcccctgtgtcaagaatcaaattttaccagacagcgtttactggatcactgtaacagtaatcacctatttcagatagttcctgtgacatgtcctatttgtgtgtctcttccttggggagatcctagccagattaccagaaatttcgttagtcatctaaatcagagacatcaatttgattatggagaatttgtgaatcttcagctagatgaagaaacccaataccaaactgctgttgaagaatcttttcaagtaaacatctgaaggctgtagacatctctgcatctttgtacctgcaagtgccatctttaagggggaaactacatgaagtcaccgttacagtaacttgatgtgtatattaataaaagtaattcagtcattttagtttttgattgaaaataaaggtagggcttctaaaaacttcatcatcttgataagttaaaaaatgaaagttatgacattagctttaaaggtgtaaaaaagatgtttcactaatgtaacggtgaaagagaatccctgttgtactttatctttttgtaatattatttttgaatttttcattattatgttgcttttgaaatttgatgcattcctcccatttactttattattgtacacatttaacacacagtagcaaattttgaacgatgtgattgatataacctaacaaatctgagccagttattattagagttgcagaatagaaacttgaagtgctaaatggaataatccaaaggaaattttttaaatgcaggttctagctgaaaaattcaactataagaaaattgtatttatataacatttactatttttgaagactagtgagatttctgtaataattttaattctttaaaaagtgaaagcttgttgtaaagatattttctttttgttattagaaggaaatacaaagagaaaaatttctttctttcatgggcatttgataatttcagtctttgactgatttgtaagcctagaatatactaagctgaataacagctctttggcctcagaattttcagtagccagtatttctgattaactaagttgaaactcttattagaaactttcagttggtgatattgtattctagaagatataaatgagaggtttggcttcatctcagtttagaaatttattcaaagctaaagatgtatatatacatatacttttgtgtgtatatatacacatatgtgtgtatgcagtttgtcaggttatatatagaatttctattaaggattttttaaatggacaagcaatagggggttgaagtgtttatctgatttgtttaaaattttgtatatcaccaaatttttaaaaagtgatagtcacagtgctaagttatctagttggctactattacaccttaaaaattgagtttacacacacacaattacctgtttatatggtgctcatttgttattctcaaatataatgtgtgaccgtgatatagtgagaaagattctaccaaccactgtttcactactttttagttaaaattgggtatgttcttaatattcattagtgagaatcacaaagtattttgtagaaggcccaaatcacagaataaaggactaagagtggatttgctgacattccatactaatatacattgtttatgctttctttaaaataactagaagaacataaaagaaagagaatctcagaagtagtttgctgctaatatatacatatattgtataaaaaggtatattttggttttgttaaaacccttgttgacttttctacactgaacattttttttaacttgatttaataaaaatgttaattttggaagtgcagttttgtaaaaacctttttcagtcaaacagtaaagactttatttatggattgtaataacaaccacaagaaaagccatacatcttaatgaacatacgcctttgttctgtcattttaaagagtggtgtttactatgtgtgtgcttgagcattttctttcagttacatgggtgtaatttaaaaaacagctcctttttaagacttttgaccatagtgttttccagtttaaagcaataactttcatagtttctttcaaagtttaatacatccaatatgtcaagttaaaccattctgggatttgcaaagtttaatacatccaatatgtcaagttaaaccattctgggatttgcaaagtttaatacatccaatatgtcaagttaaaccattctgggatttgggaacttctttaaaggaaaattgtagtagaggtcatcttgatggaattgtgttttaaagttttgtgaatgagttaaatatcattgatagtcttgtgtgtctcacatatcagctttttcataaggaaaatactttatttgcttttatctgagaatttctcagtatgaaaatgattgtttaaaatttcccctctttttgtcagtgcattgggaatagggatagactttacagatttatggaaattaaatttatggggaaaagtttatttttaatattacttatagctgagtcagaattaaaggagggaattgtattgatactccaatacctaaatttcacaataccacttaggaaagctatttcaacaaattacagttttattgttaaaacagagtcttatttgagatgtattgctttatttttcaattaaaagtggttttctccta

SEQ ID NO: 10429 - protein, 151 aa, Homo sapiens; identical to SEQ ID NO: 1757

SEQ ID NO: 10430 - DNA, 2088 bp, Homo sapiens
ctgatgcgatccccctcccccctccgggttcatgtagggagtcgggccccgggccgccaccgtcacctcggccgctgccgctgtcgccatcgccttgtttccccatcccccgccatggccgaggacctctctgcggccacgtcctacaccgaagatgatttctactgccccgtctgtcaggaggtgctcaaaacgcccgtgcggaccacggcctgtcagcacgttttctgtagaaaatgtttcctgactgcaatgagggaaagcggagcacattgtcccctatgtcgtggaaatgtgactagaagagagagagcatgtcctgaacgggccttagaccttgaaaatataatgaggaagttttctggtagctgcagatgctgtgcaaaacagattaaattctatcgcatgagacatcattacaaatcttgtaagaagtatcaggatgaatatggtgtttcttctatcattccaaactttcagatctctcaagattcagtagggaacaggtaagcaatacttattcctaaatacagaattttcataattgaaatggaaattgttttgggaactatatgataaggtatttggggggatgtgtgtgtgtgtatgtgcacatgtgtttttaaagtgaattgccaagtatcagaactacagcatttgccttaaaatctgtttggcacacgtaagctctcatctgggagatgacttcatgaacttcagcttatgttatttaaaatcattctaagaattttcatttttttgagtaaaaaataagttggagatttttctcttactgattttgcaactgaaatgatttgaaaaactatagaaaatccttttcagtaatgtatttgcaaactacaacctgttttttctttgctatctaagggatagacttagagtttgaaatttttattctaaaatgtcatgtaaaaatgaaaccaggtgcagtgcagttctgtttgagtctcatttcttttaaacaactagatttggattgatttgtatcttatctcagattcatgtacattaaacatttttatgaaatgtattttacacagaaaaatggccaaaatgcacttgtggtttaaaaaaataatgattaacatccagttacctattaacccaggtcaagaaagaacatttttcaaaacttcaggatctctatgtgagctcctgcccatttgaaccgtacactcctagatgcaaccactattctcttatttggattattcattcctttgattttctttatgtatcatcacccatgcatgtatccctaaacaatgcattgttaattttgaaaacttcagtagtaagcacatacgtaactgtaaggaaagacaatattgccactattatagaaaggttcccaggagacagtatgttaagcagtctctaatattttattttagtagcctttcattttacatattgctaatttttagtaacttaaccgcccttaagcacttcatgttgatcatactacattaggcgtcttccctactcagttgaaatttctggtaaaaacctttagtgattgtctggtaaagatctgcagtaattttctgattgcctagtctgaaaaaacttcaggttctcattttacttgacttgttagtgtcaaggaaatttgtttgaaagttgttgctcttatagtttttttttagtccttctgggtttcttcatttctatgtttttcttattgttgtacttctactttattgtaatttcctatctgcttttttacccaatagattgttcttaagtgaggggatggtgtttgtcttgttgagcatatctccagcttttagtaaagttcttagtatacatgattgtaatcacgcttttaatgaccaaattttcttatcaggagacaggccttcctcccccttatttcttagatccacttggtcatagacacttgattcctaatagcaatattcctcatctgtacttttattttatcttgtcacttccctagctcaggccctcatcatctctcactcgaactatgataatagcctttttagctggtagttatcctctaatctgttttacattctatcgccaaagtaatattaatga

SEQ ID NO: 10431 - protein, 168 aa, Homo sapiens
MRSPSPLRVHVGSRAPGRHRHLGRCRCRHRLVSPSPAMAEDLSAATSYTEDDFYCPVCQEVLKTPVRTTACQHVFCRKCFLTAMRESGAHCPLCRGNVTRRERACPERALDLENIMRKFSGSCRCCAKQIKFYRMRHHYKSCKKYQDEYGVSSIIPNFQISQDSVGNR

SEQ ID NO: 10432 - DNA, 999 bp, Homo sapiens
tcgatgagtattcacgggctgtccgtgatgtgaaaaccgactggaatgaagaatgcaagagccccaagaagggtcggtgctctggccacaaccacgtgcccaattcgctcagctacgcccgcgatgagctcacccagtccttccaccgactctcggtctgtgtgtatggcaacaatctccatggcaacagtgaggtgaaccttcatggttgcagggacctggggggagattgggctccctttcctcatgacatcctgccctatcaggactctggagatagtgggagcgactaccttttcccagaagctagtgaagaatcagcaggcatcccgggaaagtcagaacttccctacgaagagctgtggctggaggaaggcaagcccagccatcagcctctcactcgctctctgagcgagaagaacagatgtgatcagtttagaggttctgtccgatccaaatgtgcgacttctcctcttcccatccctgggactctgggagcagcagtgaagtcttcagatactgccctacctccacctccagtgcctcccaaatctgaagccagacagggttttatcacattgcccagactggtctcaaagtcctgagctcaagccatccgctcgcctcggcctcccaaagtgctgagattacaggtattttcacctacagcaatctacctgactagatctacttgtctgccatctacagagcaagtaactgaggcctcaatagacaggttgtgctactgcgcaggaatgagttcccggttcatctttcattacttcactcttctccagactgtgctatattacctcacactatgcatctccctttttataatgagagttactgcaattttaaatatctcattttgcttcacagtcatcaatcctttgttgacaaaaatctaccttactgataatgccccaaccaaatataaatcaactactttctcttgcatacatgaagtgaaataaatagaacagcatgttttattct

SEQ ID NO: 10433 - protein, 73 aa, Homo sapiens
MSSRFIFHYFTLLQTVLYYLTLCISLFIMRVTAILNISFCFTVINPLLTKIYLTDNAPTKYKSTTFSCIHEVK

SEQ ID NO: 10434 - DNA, 3255 bp, Homo sapiens
gaccgcagcagagccggaggggtgggcaggcgcgggtccgggagacgcgcggggaaacgcgcggagccgtgtctgctcaatcaagtcaaatactgaacaacttcctggcggagaggctgagaattttatacttgcttaggttttaaaatattcttataactatgactgaaaacaagacagtttcctcttcttccactagagatgatcaaaccaatataggtttaacatgtcaggaagtaaaggctctcagagagaaggcatggtcaaggacaaatgaaggcaatgccatgtctcaaagtttggttctatatggagcctctaaggagaacagtgaaggttttcatgaaagtaaaatgacaaatactgaaggggtgaataaaggcatttactttagctacccatgtcgacgtcacagctgtgccgtagtaaatattccagcaccttgtgtcaacaaaatgatttcacacatccaagatgtggagtccaaaatacaggagcatttgaaaaggtttgaaacttcttttgaagaatggagcagaacttcttccacaaaagacctgaaagaagattggagtgtaactacaccagtgaaagaggtcaaaccaggagaaaagagagatgaaaagtgtccagagttaaagcaggaaatggaaacattgctctcagaggccattcgtctcattaaaagtctagaaactgaccgggcagacgctgaagaagctttaaaacaacagagatcaagaaagaatatgattaacatgaaaattgactcttggtcagtctggaaacttcaagaactcccattggctgtgcagaaagaacatgaggcctatttgagtgatgttatagaattacaatggcatcttgaagataaagctaatcaactacaacattttgaaaaacaaaagacagagttagaagaagcaaatgcaaagattcaagcagacatagactacatgaatgaacatggccctctactggactctaagcagaatcaggaacttcaagatctgaagaaccattataaaaaaaaaatggaggtaatggacctacacagaaaagttaatgaagaacttgaagaagctttagaagcctgtgaaaatgccagattgaaggctcagcaaattaaagaagagattgataaggatatttaccaggatgaaaaaaccatagaggcctacaagagagagatatatcaacttaacagtctatttgatcattactcttcatcagtgataaatgttaatactaatattgaggagaaggaagaggaagtgactgaagcaataagggaaacaaagtcatcaaaaaatgaattacattctctatcaaaaatgctggaagatttgagaagagtttatgaccaactaacctggaagcaaaaaagtcatgaaaatcagtatctggaagcagttaatgatttttatgctgcaaaaaaaacatgggatattgagctttctgatgttgcaaaagatttttcagctatttctttggcatgtacaaaactgacggaagacaataaaaaacttgagattgatattaacaaaataacagtaaaaaccaatgaaagcatacggaaaaaatcaaaatacgaatctgaaataaaatatttgacaataatgaagttaaagaatgataaacatctcaagaacatctataaggaggcttatcgcattggtactcttttccacctaaccaaacacaagacagatgaaatggaagataaaatagcagaagtgagaagaaagttcaagggtagagaagaattcctgaaaaaactcactcaaggtgaagtggctgctggaatggtgcttcagaaaaaactatattccatttacgaagtccaggcacttgagcggaaagagcttataaaaaatagagcaatatgtgccatgtcactggcagaactacaggaacctctgcttcaactagaagatgaagctgaaagaatcagaagtctcgacaaagaacattctgttagtaaacgctcagcaatttttaaagacctagaagcaactaaaagtaagacaatgattttttatgcaaaaataaatgaattgaatgaggaattaaaagcaaaagaagaagaaaagaaaagttttgatcagacacttgaaatattaaagaacaaatttataactatgagatttaaaagggaacatgcacaaactgtgtttgatcattatatgcaagagaaaaaagactgtgaagagagaatctttgaggaagatcagagatttagagtgctccttgctgtaagacaaaaaactcttcaagatacccaaaaaataatagctgattcacttgaagaaaatctgcgtttagctcaagagtatcaacagctacagattacattcttaaaagaaaaggacaattatttcaatatatatgataaacagctatcacttgatacttcaattagagataagaaacagctctgtcagctgcagagaaggatgcacacactgtggcaggagcacttcaaactggtggtcctcttcagccagatgaggctggccaacttccagacagactctcaggagagtattcagaaaatattagctgtgcaggaggaatcttcaaatttaatgcaacacatcttaggtttcttccagactttgacagatggcacatgcgaaaacgatggttaagcaaacaaccaatgtatcttggatgctgaaataaaagacaagaaaagtcacacagttcagataacagtgtaattggacattcacctgtttgccatttcacacttccatgaacgaaaaactcactcacctcccagcatgctttgccactcttttactcacagcaaatccataacaatgaaacaggtgactttcatgctgctgtcaggaacgatctaatttcagctctgggtgactgattgcaattggctttgcctcatctgataattaatctatgtcaccattaattggaagagagaataattactggcggtgttgacagtgactgttcgcttccccagatttccctatcgtcttggcccaaataaaggctttgccattcagtacttaaagtttgtgtaaactgtaacaatatctatgcccatgtgacactttgagacactctgtctaatgtacttttgtttttgtgtttaccagtcttttttagctcactgagagctgtctctctcaatcactcctcaatgttctatcttaattttgtggaagtttaaagttttcaatgagctggagatgaatgattaatgaataaatttaaatgcttcatttt

SEQ ID NO: 10435 - protein, 829 aa, Homo sapiens; identical to SEQ ID NO: 1759

SEQ ID NO: 10436 - DNA, 2948 bp, Homo sapiens
gaccgcagcagagccggaggggtgggcaggcgcgggtccgggagacgcgcggggaaacgcgcggagccgtgtctgctcaatcaagtcaaatactgaacaacttcctggcggagaggctgagaattttatacttgcttgctcgaaagcaccccaaataagatgatccacgccaacacctcccctttacaggttttaaaatattcttataactatgactgaaaacaagacagtttcctcttcttccactagagatgatcaaaccaatataggtttaacatgtcaggaagtaaaggctctcagagagaaggcatggtcaaggacaaatgaaggcaatgccatgtctcaaagtttggttctatatggagcctctaaggagaacagtgaaggttttcatgaaagtaaaatgacaaatactgaaggggtgaataaaggcatttactttagctacccatgtcgacgtcacagctgtgccgtagtaaatattccagcaccttgtgtcaacaaaatgatttcacacatccaagatgtggagtccaaaatacaggagcatttgaaaaggtttgaaacttcttttgaagaatggagcagaacttcttccacaaaagacctgaaagaagattggagtgtaactacaccagtgaaagaggtcaaaccaggagaaaagagagatgaaaagtgtccagagttaaagcaggaaatggaaacattgctctcagaggccattcgtctcattaaaagtctagaaactgaccgggcagacgctgaagaagctttaaaacaacagagatcaagaaagaatatgattaacatgaaaattgactcttggtcagtctggaaacttcaagaactcccattggctgtgcagaaagaacatgaggcctatttgagtgatgttatagaattacaatggcatcttgaagataaagctaatcaactacaacattttgaaaaacaaaagacagagttagaagaagcaaatgcaaagattcaagcagacatagactacatgaatgaacatggccctctactggactctaagcagaatcaggaacttcaagatctgaagaaccattataaaaaaaaaatggaggtaatggacctacacagaaaagttaatgaagaacttgaagaagctttagaagcctgtgaaaatgccagattgaaggctcagcaaattaaagaagagattgataaggatatttaccaggatgaaaaaaccatagaggcctacaagagagagatatatcaacttaacagtctatttgatcattactcttcatcagtgataaatgttaatactaatattgaggagaaggaagaggaagtgactgaagcaataagggaaacaaagtcatcaaaaaatgaattacattctctatcaaaaatgctggaagatttgagaagagtttatgaccaactaacctggaagcaaaaaagtcatgaaaatcagtatctggaagcagttaatgatttttatgctgcaaaaaaaacatgggatattgagctttctgatgttgcaaaagatttttcagctatttctttggcatgtacaaaactgacggaagacaataaaaaacttgagattgatattaacaaaataacagtaaaaaccaatgaaagcatacggaaaaaatcaaaatacgaatctgaaataaaatatttgacaataatgaagttaaagaatgataaacatctcaagaacatctataaggaggcttatcgcattggtactcttttccacctaaccaaacacaagacagatgaaatggaagataaaatagcagaagtgagaagaaagttcaagggtagagaagaattcctgaaaaaactcactcaaggtgaagtggctgctggaatggtgcttcagaaaaaactatattccatttacgaagtccaggcacttgagcggaaagagcttataaaaaatagagcaatatgtgccatgtcactggcagaactacaggaacctctgcttcaactagaagatgaagctgaaagaatcagaagtctcgacaaagaacattctgttatgcttaataatataattgatcagaaagatcttattagaagaaaggtgggaaaagtaaagaaaaaattacgaaaaaaggggaagaaaacccttgatgcattaatagaaactgagagtaaacgctcagcaatttttaaagacctagaagcaactaaaagtaagacaatgattttttatgcaaaaataaatgaattgaatgaggaattaaaagcaaaagaagaagaaaagaaaagttttgatcagacacttgaaatattaaagaacaaatttataactatgagatttaaaagggaacatgcacaaactgtgtttgatcattatatgcaagagaaaaaagactgtgaagagagaatctttgaggaagatcagagatttagagtgctccttgctgtaagacaaaaaactcttcaagatacccaaaaaataatagctgattcacttgaagaaaatctgcgtttagctcaagagtatcaacagctacagattacattcttaaaagaaaaggacaattatttcaatatatatgataaacagctatcacttgatacttcaattagagataagaaacagctctgtcagctgcagagaaggatgcacacactgtggcaggagcacttcaaactggtggtcctcttcagccagatgaggctggccaacttccagacagactctcaggagagtattcagaaaatattagctgtgcagaaccagtatgatttggaaaaagaataaaattgcttttaaagtacaaaaataattatgaaccacttcaaacgtaatgtctgtgttttatttctcatcagaattcattagtgtgtagcatcaataatttagcccatcatttgccaacactgacttggctcagtagttcaatcatgtaaccctgtaaactcactttccattaaaatgaatgttgctg

SEQ ID NO: 10437 - protein, 849 aa, Homo sapiens
MTENKTVSSSSTRDDQTNIGLTCQEVKALREKAWSRTNEGNAMSQSLVLYGASKENSEGFHESKMTNTEGVNKGIYFSYPCRRHSCAVVNIPAPCVNKMISHIQDVESKIQEHLKRFETSFEEWSRTSSTKDLKEDWSVTTPVKEVKPGEKRDEKCPELKQEMETLLSEAIRLIKSLETDRADAEEALKQQRSRKNMINMKIDSWSVWKLQELPLAVQKEHEAYLSDVIELQWHLEDKANQLQHFEKQKTELEEANAKIQADIDYMNEHGPLLDSKQNQELQDLKNHYKKKMEVMDLHRKVNEELEEALEACENARLKAQQIKEEIDKDIYQDEKTIEAYKREIYQLNSLFDHYSSSVINVNTNIEEKEEEVTEAIRETKSSKNELHSLSKMLEDLRRVYDQLTWKQKSHENQYLEAVNDFYAAKKTWDIELSDVAKDFSAISLACTKLTEDNKKLEIDINKITVKTNESIRKKSKYESEIKYLTIMKLKNDKHLKNIYKEAYRIGTLFHLTKHKTDEMEDKIAEVRRKFKGREEFLKKLTQGEVAAGMVLQKKLYSIYEVQALERKELIKNRAICAMSLAELQEPLLQLEDEAERIRSLDKEHSVMLNNIIDQKDLIRRKVGKVKKKLRKKGKKTLDALIETESKRSAIFKDLEATKSKTMIFYAKINELNEELKAKEEEKKSFDQTLEILKNKFITMRFKREHAQTVFDHYMQEKKDCEERIFEEDQRFRVLLAVRQKTLQDTQKIIADSLEENLRLAQEYQQLQITFLKEKDNYFNIYDKQLSLDTSIRDKKQLCQLQRRMHTLWQEHFKLVVLFSQMRLANFQTDSQESIQKILAVQNQYDLEKE

SEQ ID NO: 10438 - DNA, 335 bp, Homo sapiens
gaaccaaatgcaattccctggccaccctgagggagttagagtcgactagttcttcaccccttccagaggcgtgtctgctcaatcaagtcaaatactgaacaacttcctggcggagaggctgagaattttatacttgcttgctcgaaagcaccccaaataagatgatccacgccaacacctcccctttacagcaaaaggctgaagctcaaatacattaactacccttcccaaggtcagatagccagccagtaatggggcccatgaggaactgaattctacatctaactgattgaaaagctatgttctttggcatttgattaaactactttaatcat

SEQ ID NO: 10439 - protein, 41 aa, Homo sapiens
SRLVLHPFQRRVCSIKSNTEQLPGGEAENFILACSKAPQIR

SEQ ID NO: 10440 - DNA, 2555 bp, Homo sapiens
actcaccgcgctcacactcgccgcgctcacactcgccctctcgcgcgcgcacacccgtgcacactcgccgcgcgccccctactccagccacgccctgaaaccctcgcgagacccctctccctccaactcagcccccaaattcctggggcgctgcccactccgtgcaggccgttccacccgcttcccgctgtcccgctcaggccgaaagccgcggacacggtggcctttggaacttgtgtaggagtccgccccgcacctcgacgcctctgtcctgtgcgctcacgcgtgcacactcactcacacacacaccgcactactctcctctgttggactgccttaaccctgtctctgcttggctgggggaactcccagagccttgttgaaagggtacagagccagtgtcttcggatacagaactaataatgttacttcacattgtctccatgtatatataccagcatcactctacatattaaataatagggaagtatccttttttccattttccttttttattaaaaaacctataaatatgaaaaatctaatatttatttgcagctcctcaacacgtgatcttacgtgttccctgggatatgtgcatctttttgttggcgaccatagatgtaaaagatatttgcaaaagatatttcaaacttgggtgtaattcaagcagtctccaatagcagagacaatatgccttgaagaacacctatgtcaggaaggctcaccctgcaacagttctcaggaagatctttccaggagatctgcccgggaagagcagacatgcaacagattcaatcctgtgggaagattactctgtcaagaaagagcaaggatagccattcacaggattgcaccatgaggctcatggattagaaattaagatgatagcaatgagatcaagagtgttaaaagcaggagcagagtgtagttgtggggcttgcctgcaatatctgattgggcattagctcacagtggagaagtctgatgggagaggagtgcaaaggaatgaaggaacataatatccatggttggctttggatcccaagtatgactctgttgcaagacccattggaagttataatagaggttgtgctacatacttcttccatcagtctggattggctctgaattgaagataattattcctgcagtatgtagagaaagagccaagaaagagattgattacaaatggaagataattgcattaacattttgtgagatattatttaaaatgtttgtcaaccataaaaggtagtatggtgaaatctgccaacttagttaagcttcatatttcagtgtaactgtcaagttagcttatatgctgatctttatctgttagattatttagtagtatctaggtatctactagatttcctaaaggcagtcagtcacaggggcttccaaataaaaaatacttcagattatgacctggatttgagacaaaattccaccattcactatctgtgtgaactaaggaagttgtttatttattgtgaaccaaagtttctttctttctttctttcttttttgacaaaatctcactctgtcacccaggctggagtgcagtgatatgatctcagctcactgcaacatgtgcctatctgcctcctgggctcaagtgattctcgtgcctcagcctacctagtagctgggattacaggtgtgtaggtgtgtgccaccactccctggctattttttgtattttcagtagagatggagttttttccatgttggccaggctggtcccgaattcctggcctcaagtgatctgcctgtcttgagctcccaaagtgtggggattacaggtgtgagccaccccactcagctccctcagtttctttaagtgtgaggtgaagataataatctgtatctcatagctttcctctgaagattaactatattattttaaaagatttttaacacagtgtttgacatacactaagtgcttaataactgatagctattattaatattatttttaaagcctcagtattctatgaatgaaagaacaaatatatctaatctcaaatgtttatattttgaaaactatctaggcttacactgatcttattcatgcaataaagaggatagttctggagactgcgcattcagggaagacagaatgggttagatgtactttcctattcctgctgataagtacagttaaaaatcctggacatcttatatacacaaaaatataaaaatgttgaaaggtgaaaaggaagaagtaaattggcttgagaatttggggacccaagggacagtacataaatgagttccctggattttgtattttggtttttgtctcatatatcctagacagggtattaaagaagcagactaccaagagatgccaaggtgcagaaaaaaagcaccagcaaaggtctactgtctctaagcaaaggaccaggaaagggacagccaaggaagacacaacacttactgtgctatgccagccaaataccccaagaagaaacccatggctctgtccctactcatgccaacaaagaccatgtgggcatcctggacatctatttttttttttttttttt

SEQ ID NO: 10441 - protein, 54 aa, Homo sapiens
MSGRLTLQQFSGRSFQEICPGRADMQQIQSCGKITLSRKSKDSHSQDCTMRLMD

SEQ ID NO: 10442 - DNA, 7551 bp, Homo sapiens
gagcaccccgtggaatcccccacgtcatcatcagaaccatcaatgagatgcaaacatgaaagacaagaggaagaagaaggaccgcacctgggccgaggctgcccgcctggcactagaaaaacaccccaactcaccaatgacagcaaagcagatattggaagtcattcagaaagaagggttaaaagaaacaagtggaacctctccattagcctgtctgaatgcaatgcttcacactaacactcgaataggggatggaacattcttcaaaatccctggaaagtcaggcctctatgctctcaaaaaagaggagtcgtcatgcccagcagatggcacgttggatttagtctgtgaatctgaattggatggtacagatatggccgaggcaaatgcccatggagaagaaaatggagtttgttcgaagcaggtaactgatgaagcatcttccactcgagattcaagccttactaacacagcagtgcaaagcaagttagtgtcttccttccagcagcacaccaaaaaggctcttaaacaggctttgaggcagcagcagaaaagaagaaatggagtctcaatgatggtaaacaagactgttcctcgtgttgttttgacaccattaaaggtgtctgatgagcagtcggattcgccttcaggatctgaatctaaaaatggtgaagcagacagttcagataaagaaatgaaacatgggcaaaaatctcccactggaaaacaaacaagtcagcacttaaaacgattaaaaaagtctggtttagggcacttgaaatggaccaaagctgaggacattgacatagaaaccccaggatctattcttgtcaacactaacttgagggcattaataaataaacatacgtttgcttccttacctcagcattttcaacaatacctcctgcttttgctcccagaagtggataggcagatgggaagtgatggaattttacgcctcagtacttcagctctaaataatgaattctttgcatatgcagcacaagggtggaaacagcgactggcagaaggagagtttaccccagaaatgcagttgcggataaggcaagaaattgagaaggaaaagaaaacagaaccttggaaagaaaaattctttgagaggttttatggagaaaagctgggcatgtcaagagaggaatctgtgaagctcactactggaccaaacaacgctggagctcaaagtagttcttcatgtgggacttctggccttccagtttctgcacagacagccttggcagaacaacagccaaaaagcatgaaaagcccagcttctccagagcctggtttctgtgctactctttgccctatggtagaaattccacctaaagatataatggcagaattggagtcagaggatatcttgatccctgaagaatctgtaattcaggaggaaattgcagaagaggtagagactagtatctgtgaatgccaggatgaaaatcataagacaatacctgaattttctgaggaggctgaaagtctaaccaattctcatgaagaaccccaaatagcacctcctgaagataacttggaatcctgtgttatgatgaatgatgttttagaaactttgcctcatattgaagttaagatagaagggaagtcagaatcaccccaggaagaaatgacagttgttatcgatcagttagaagtctgtgactctcttattccttccacttcatctatgactcatgtcagtgacacagaacataaggagtcagaaactgcagtagagaccagtacccccaaaataaaaacagggtcatcttctctagaaggccagtttccaaatgaaggaattgctatagatatggagctacagagtgaccctgaagaacagctttcagaaaatgcctgcatctctgaaacgtccttttcttctgagagcccagagggagcctgtaccagcctgccttctccaggaggggaaacacagtccacatcagaagaatcatgtactccagcctcccttgagacaacattttgttctgaggtatctagcactgaaaatacagacaaatacaaccagagaaattccactgatgaaaactttcatgcatctttgatgtcagaaatatctccaatatccacttcacctgaaatatcagaagcatctcttatgtccaacttaccattaacatctgaagcatcaccagtatccaacttacctttaacatcagaaacctcaccgatgtctgacttacctttaacatcagaaacttcttcagtgtcttccatgcttctcacctctgagaccacttttgtatccagtttgccacttccttcagaaacatctccaatttccaactcttccataaatgagagaatggcacatcagcaaagaaagtcaccttctgtatctgaagagccactctccccgcagaaagatgagtcttccgccactgccaaacctctgggagagaaccttacctcccagcagaagaatctgtctaatactcccgaacccatcataatgagttcttcttccattgctcctgaagcatttccgtctgaagatttgcacaataagaccctgagtcagcaaacctgtaaatcacatgttgacactgagaagccctaccctgcttcaattccagaacttgcttctactgaaatgataaaagttaaaaatcatagcgtcctgcaaagaacagaaaaaaaagtgttaccttcaccattggaattatctgtcttttctgaagggacagataataagggaaatgagcttccatctgctaaattacaggacaagcaatatatctcatcagtggataaggctccattttcagaaggctctagaaataaaacacataagcaagggagtacacagagtcggttagaaacctcacatacttccaagtcatcagagccctccaagtcacctgatgggataagaaatgaaagtagagattcagagatatcaaagagaaaaactgcagagcaacacagctttggaatctgtaaggaaaagagagctaggatagaagatgatcagtcaacccggaacatatcatctagcagcccacctgagaaagaacagcctcccagagaggaaccaagggttccccctctcaagattcagctttccaaaattgggccaccttttataatcaagagccaaccagtctccaaacctgagtctcgagcatccactagcacatctgtcagtggcgggaggaacacaggagccaggaccctcgcagatatcaaggcccgggcccaacaagctcgggcccagcgagaggctgctgcagctgctgctgtggctgctgcagcgagcattgtctctggagccatgggaagtccaggagagggtggaaagacgagaactctggcacacatcaaagagcagacaaaggctaagctctttgcaaagcatcaagctcgagcccatctcttccagacctctaaagagacccggttgcctcctccgctcagctcaaaggaagggcctccaaacttagaagtctcttctacccctgaaacaaaaatggaaggttcgactggtgtcattattgtcaatccaaactgtagatctcctagcaacaagtctgcccacctccgggagaccaccactgtactacagcagtctcttaacccaagtaaacttccagaaactgccactgacttatctgtgcatagttctgatgaaaacatacctgtgtcacatttatctgagaaaattgtttcatctacctcttctgaaaatagcagtgtgcccatgctttttaataaaaattctgtccctgtatctgtttgcagcactgctatatcgggagcaattaaagaacatccctttgtgagttctgttgataaatcctctgtcctaatgtctgttgacagtgcaaacactacaatttctgcttgtaatataagcatgttaaaaaccatccagggaactgacactccatgcatagccattataccaaaatgtattgaaagcactcccatttcagccactacagagggctccagcatatcaagctccatggatgataagcagttactaatatcaagcagcagtgctagtaacttagtctccactcagtacacctctgtgccaactccctccatcggaaacaatttgccaaacctctccactagctctgtcttgattcccccaatgggaattaacaacagatttccttctgagaagatagccatacctgggagtgaagaacaggccactgtatccatgggtaccactgtgagagcagccctcagctgcagtgattctgtagcggtcacagactctctggttgcacacccgaccgtcgcaatgtttactggaaacatgctgacaataaactcttatgatagtcctcccaagttaagtgctgaaagcttggacaaaaattcagggcctcgaaacagggcagataattctggaaaacctcagcaaccaccagggggctttgcaccagcagccataaaccgatcaattccgtgtaaagtcatcgttgaccacagcaccacgctgacctccagtttgtctctgactgtctccgttgaaagctcagaagccagcttggacctgcagggcagaccagtgaggacagaggcatccgtacagcccgtggcgtgtcctcaggtgtctgtgattagcaggcctgagccagttgccaacgaaggtatagatcacagttccactttcattgctgcttcggcagcaaaacaagacagtaaaacattgccggccacctgcacaagtctccgagaattaccccttgttccagataaattaaatgagccgactgctcccagtcataactttgctgagcaggcacgtggcccagctcctttcaaaagtgaagcagacacaacctgtagcaatcagtataacccaagtaaccggatttgctggaatgatgatgggatgaggagcacaggacagcctctggttactcactcgggttcaagtaaacaaaaagaatatctagagcaaagctgtccaaaggctatcaaaactgaacatgccaactacttgaacgtgtcagaacttcatcccaggaatcttgtaacaaatgttgctcttcctgtgaaatctgaacttcacgaagcagacaagggctttagaatggacactgaagacttccctggccctgagctgcctcctccggctgcagagggagcctctagtgtacaacaaacacagaacatgaaagcttccacctcaagtcccatggaagaggctatttccttggctaccgatgccctgaagagagtccctggtgcagggagctcaggctgtcgtctgtcctctgtggaggctaacaatccgctggtgacgcagttactacagggcaacctgcctttggaaaaagtgttgccacagcccagattgggagccaagcttgaaatcaacaggcttccattgcctcttcaaactacctcagtgggtaaaacagcaccagagagaaacgttgaaattccgcccagctctccaaatccagatggtaagggctacttggcagggactctggcaccactccaaatgagaaagcgagaaaaccaccccaaaaagagagtagctaggactgtaggagaacacactcaagttaaatgtgaaccaggaaaattgttggtggagccagatgttaaaggggtgccttgtgtcatcagttccggcatcagtcagctaggacacagccagccatttaagcaagaatggctaaacaagcactccatgcagaacagaattgttcacagccctgaggtcaaacagcaaaagcggctgctcccctcgtgtagcttccagcagaacctatttcatgttgacaagaatggcggcttccacactgacgctggtacctcacacagacagcagttttaccaaatgcctgtggctgccaggggccccattcctactgcagctctgttacaggcctcttccaagaccccagtggggtgtaatgcatttgccttcaacaggcatcttgaacagaagggattgggagaggttagtctttcctcagcacctcaccagctaaggttagccaacatgttatcccccaatatgcccatgaaagaaggtgatgaggtgggaggcactgcacacacaatgccaaacaaagcactagtacattccctaatgcagaagtcccatctgatcaaaaacaacctccagttaccatggaaaccactaagagacttagttggccacagtccacgggcatatgtagcaatataaaatcggaacctctttcttttgaggaaggtttaagcagcagctgtgaactgggcatgaaacaagtttcctatgaccagaatgaaatgaaagaacagttaaaagcattcgcgctaaaaagtgcagatttctcttcctatttgctttctgagccacaaaagccttttacccaattagctgctcagaaaatgcaggtgcagcaacaacagcagctctgtggaaattatccaacaatacactttggtagcacgagtttcaaaagggcagcatctgcaattgaaaagtccattgggattttgggaagtggctccaatcctgccacaggcttgtctggtcagaacgctcagatgcccgttcagaactttgccgacagcagcaatgcagatgaattggaactgaaatgctcttgccggctgaaagccatgattgtgtgcaaaggctgtggggccttctgccatgacgactgcataggtccttcaaaactttgtgtagcatgcctggttgtacgataagagctgagtgaaagatgcagtatcccttttccacacggaaaagccaaatagcatcagcaacaacaaatagaataatgcagtggtttctatcatgctaatttattttgctttggagcaggtacctttcctctatggcattattttcttgcatttctcataaaggggaggatgcatcccaactgaatggctcactggcatgtcttttatgtgttcagttgccattcctagctttggaaagtttctatctgtccatgtgtatacaagtcaatgccccatttttgtttttcttttaaccgaggtgtagataggaaaaggacatttttaattacttaataaccggaaatgcagatgtgtaaggagaatgagaggaatgagttaaagtggttatgcatttttctatagatgagccattacagcaaggaattttacagttgacttctctgaacctagctttaccacagtgattaaatcctatttagaaaggggaatctgatttaaatgtgtgattccttgtatttgctcctatcacaaaagatatattaaaggaggtatgccattaatgaaatccactgtcctgagtattatctttcctcctgttgtactttctcagagactatggcagaatatctggatcttccttggattttgtacacatattgtagtgaaatgtgtcctacatctgaaattgcatgggactcatgcccagcaatctggttctaggcctttgacacctgataatatgagagcaattggccagccaatagccataagcccagaggattttagagcttcatgtgtggcttttaagagcaggtttgaaaaaaaaaaaaaaaa

SEQ ID NO: 10443 - protein, 2050 aa, Homo sapiens
MKDKRKKKDRTWAEAARLALEKHPNSPMTAKQILEVIQKEGLKETSGTSPLACLNAMLHTNTRIGDGTFFKIPGKSGLYALKKEESSCPADGTLDLVCESELDGTDMAEANAHGEENGVCSKQVTDEASSTRDSSLTNTAVQSKLVSSFQQHTKKALKQALRQQQKRRNGVSMMVNKTVPRVVLTPLKVSDEQSDSPSGSESKNGEADSSDKEMKHGQKSPTGKQTSQHLKRLKKSGLGHLKWTKAEDIDIETPGSILVNTNLRALINKHTFASLPQHFQQYLLLLLPEVDRQMGSDGILRLSTSALNNEFFAYAAQGWKQRLAEGEFTPEMQLRIRQEIEKEKKTEPWKEKFFERFYGEKLGMSREESVKLTTGPNNAGAQSSSSCGTSGLPVSAQTALAEQQPKSMKSPASPEPGFCATLCPMVEIPPKDIMAELESEDILIPEESVIQEEIAEEVETSICECQDENHKTIPEFSEEAESLTNSHEEPQIAPPEDNLESCVMMNDVLETLPHIEVKIEGKSESPQEEMTVVIDQLEVCDSLIPSTSSMTHVSDTEHKESETAVETSTPKIKTGSSSLEGQFPNEGIAIDMELQSDPEEQLSENACISETSFSSESPEGACTSLPSPGGETQSTSEESCTPASLETTFCSEVSSTENTDKYNQRNSTDENFHASLMSEISPISTSPEISEASLMSNLPLTSEASPVSNLPLTSETSPMSDLPLTSETSSVSSMLLTSETTFVSSLPLPSETSPISNSSINERMAHQQRKSPSVSEEPLSPQKDESSATAKPLGENLTSQQKNLSNTPEPIIMSSSSIAPEAFPSEDLHNKTLSQQTCKSHVDTEKPYPASIPELASTEMIKVKNHSVLQRTEKKVLPSPLELSVFSEGTDNKGNELPSAKLQDKQYISSVDKAPFSEGSRNKTHKQGSTQSRLETSHTSKSSEPSKSPDGIRNESRDSEISKRKTAEQHSFGICKEKRARIEDDQSTRNISSSSPPEKEQPPREEPRVPPLKIQLSKIGPPFIIKSQPVSKPESRASTSTSVSGGRNTGARTLADIKARAQQARAQREAAAAAAVAAAASIVSGAMGSPGEGGKTRTLAHIKEQTKAKLFAKHQARAHLFQTSKETRLPPPLSSKEGPPNLEVSSTPETKMEGSTGVIIVNPNCRSPSNKSAHLRETTTVLQQSLNPSKLPETATDLSVHSSDENIPVSHLSEKIVSSTSSENSSVPMLFNKNSVPVSVCSTAISGAIKEHPFVSSVDKSSVLMSVDSANTTISACNISMLKTIQGTDTPCIAIIPKCIESTPISATTEGSSISSSMDDKQLLISSSSASNLVSTQYTSVPTPSIGNNLPNLSTSSVLIPPMGINNRFPSEKIAIPGSEEQATVSMGTTVRAALSCSDSVAVTDSLVAHPTVAMFTGNMLTINSYDSPPKLSAESLDKNSGPRNRADNSGKPQQPPGGFAPAAINRSIPCKVIVDHSTTLTSSLSLTVSVESSEASLDLQGRPVRTEASVQPVACPQVSVISRPEPVANEGIDHSSTFIAASAAKQDSKTLPATCTSLRELPLVPDKLNEPTAPSHNFAEQARGPAPFKSEADTTCSNQYNPSNRICWNDDGMRSTGQPLVTHSGSSKQKEYLEQSCPKAIKTEHANYLNVSELHPRNLVTNVALPVKSELHEADKGFRMDTEDFPGPELPPPAAEGASSVQQTQNMKASTSSPMEEAISLATDALKRVPGAGSSGCRLSSVEANNPLVTQLLQGNLPLEKVLPQPRLGAKLEINRLPLPLQTTSVGKTAPERNVEIPPSSPNPDGKGYLAGTLAPLQMRKRENHPKKRVARTVGEHTQVKCEPGKLLVEPDVKGVPCVISSGISQLGHSQPFKQEWLNKHSMQNRIVHSPEVKQQKRLLPSCSFQQNLFHVDKNGGFHTDAGTSHRQQFYQMPVAARGPIPTAALLQASSKTPVGCNAFAFNRHLEQKGLGEVSLSSAPHQLRLANMLSPNMPMKEGDEVGGTAHTMPNKALVHSLMQKSHLIKNNLQLPWKPLRDLVGHSPRAYVAI

SEQ ID NO: 10444 - DNA, 1189 bp, Homo sapiens
agcgattatctccgggagccccgcgtccgggaccgcccgggacacttctccccgtacttcgctctcggggctctgctgtgccttctccacggagtaggatgtgatgtcatagagaaggggacagggctatccaaattctctcaattgctgggaggagctgcccaggtgtgctgaggggcctgtactcaggaagagaaacagggaatcctccacagcactagaaaaacaccccaactcaccaatgacagcaaagcagatattggaagtcattcagaaagaagggttaaaagaaacaagtctggtttcagaccccggcatggcttggagacagcgttggtgtgtatgaaggatcttcctccaatgaaggatttgggacaactttccatgatgattatattagagcctcagctgctttcgtgttggtcatgaggtgatgctgaaccgaatgcttgaactagcaggagtggctgggattgcattggagtggttccgttcattccttccggtttgttcgaagcaggtaactgatgaagcatcttccactcgagattcaagccttactaacacagcagtgcaaagcaagttagtgtcttccttccagcagcacaccaaaaaggctcttaaacaggctttgaggcagcagcagaaaagaagaaatggagtctcaatgatggtaaacaagactgttcctcgtgttgttttgacaccattaaaggtgtctgatgagcagtcggattcgccttcaggatctgaatctaaaaatggtgaagcagacagttcagataaagaaatgaaacatgggcaaaaatctcccactggaaaacaaacaagtcagcacttaaaacgattaaaaaagtctggtttagggcacttgaaatggaccaaagctgaggacattgacatagaaaccccaggatctattcttgtcaacactaacttgagggcattaataaataaacatacgtttgcttccttacctcagcattttcaacaatacctcctgcttttgctcccagaagtggataggcagatgggaagtgatggaattttacgcctcagtacttcagctctaaataatgaattctttgcatatgcagcacaagggtggaaacagcgactggcagaaggtaaatttgtattttctattattatgtgacatattggagtacacataccgtactgagcttgt

SEQ ID NO: 10445 - protein, 240 aa, Homo sapiens
MLNRMLELAGVAGIALEWFRSFLPVCSKQVTDEASSTRDSSLTNTAVQSKLVSSFQQHTKKALKQALRQQQKRRNGVSMMVNKTVPRVVLTPLKVSDEQSDSPSGSESKNGEADSSDKEMKHGQKSPTGKQTSQHLKRLKKSGLGHLKWTKAEDIDIETPGSILVNTNLRALINKHTFASLPQHFQQYLLLLLPEVDRQMGSDGILRLSTSALNNEFFAYAAQGWKQRLAEGKFVFSIIM

SEQ ID NO: 10446 - DNA, 653 bp, Homo sapiens
gggaggagctgcccaggtgtgctgaggggcctgtactcaggaagagaaacagggaatcctccacagcactagaaaaacaccccaactcaccaatgacagcaaagcagatattggaagtcattcagaaagaagggttaaaagaaacaagttctggaagacagaaagcccagattaaggttggcagtgtccgtttctgaccccggcatggcttggagacagcgttggtgtgtatgaaggatcttcctccaatgaaggatttgggacaactttccatgatgattatattagagcctcagctgctttcgtgttggtcatgaggtgatgctgaaccgaatgcttgaactagcaggagtggctgggattgcattggagtggttccgttcattccttccggtggaacctctccattagcctgtctgaatgcaatgcttcacactaacactcgaataggggatggaacattcttcaaaatccctggaaagtcaggcctctatgctctcaaaaaagaggagtcgtcatgcccagcagatggcacgttggatttagtctgtgaatctgaattggatggtacagatatggccgaggcaaatgcccatggagaagaaaatggagtcatgttcgggaccactctacaagtacagaagatgtgtata

SEQ ID NO: 10447 - protein, 75 aa, Homo sapiens
MLHTNTRIGDGTFFKIPGKSGLYALKKEESSCPADGTLDLVCESELDGTDMAEANAHGEENGVMFGTTLQVQKMC

SEQ ID NO: 10448 - DNA, 5721 bp, Homo sapiens
gtagtacggttccaactcccagctcgcacaccgctggcggacaccccagtaacaagtgagagcgctccaccccgcagtcccccccgcctctcctccctgggtcccctcggctctcggaagaaaaaccaacagcatctccagctctcgcgcggaattgtctcttcaactttacccaaccgacgacaaggaaccagcctcaaccttttaatgcacagcccggccacaggattgccttccatctcctcttggtccctcctggatgtggtttattgatgacttgcgagcccctcagagagctgtcttccctcctctggctccctccgtttccttgagttagttttctaaggttttaccggggctcgggatctcttggaccgaatggaactttttgctgcctgcttttgctgctgattctgtcagtggacaaggaaaaaggcttcgaaggcagcagaggcgcaggggaggtggagaaagaggtggaggaagaggacgaggaggaggaggaagccgaaggggctcggcgcgtgtgtgtgcatgtgtgcatgcgtgtgtgagtgcatgtgtgtgagtgctgccgctgcccgcgacccctggccccgaaggtgttggctgaaatatggagaatagtcttagatgtgtttgggtacccaagctggcttttgtactcttcggagcttccttgttcagcgcgcatcttcaagtaaccggttttcaaattaaagctttcacagcactgcgcttcctctcagaaccttctgatgccgtcacaatgcggggaggaaatgtcctcctcgactgctccgcggagtccgaccgaggagttccagtgatcaagtggaagaaagatggcattcatctggccttgggaatggatgaaaggaagcagcaactttcaaatgggtctctgctgatacaaaacatacttcattccagacaccacaagccagatgagggactttaccaatgtgaggcatctttaggagattctggctcaattattagtcggacagcaaaagttgcagtagcaggaccactgaggttcctttcacagacagaatctgtcacagccttcatgggagacacagtgctactcaagtgtgaagtcattggggagcccatgccaacaatccactggcagaagaaccaacaagacctgactccaatcccaggtgactcccgagtggtggtcttgccctctggagcattgcagatcagccgactccaaccgggggacattggaatttaccgatgctcagctcgaaatccagccagctcaagaacaggaaatgaagcagaagtcagaattttatcagatccaggactgcatagacagctgtattttctgcaaagaccatccaatgtagtagccattgaaggaaaagatgctgtcctggaatgttgtgtttctggctatcctccaccaagttttacctggttacgaggcgaggaagtcatccaactcaggtctaaaaagtattctttattgggtggaagcaacttgcttatctccaatgtgacagatgatgacagtggaatgtatacctgtgttgtcacatataaaaatgagaatattagtgcctctgcagagctcacagtcttggttccgccatggtttttaaatcatccttccaacctgtatgcctatgaaagcatggatattgagtttgaatgtacagtctctggaaagcctgtgcccactgtgaattggatgaagaatggagatgtggtcattcctagtgattattttcagatagtgggaggaagcaacttacggatacttggggtggtgaagtcagatgaaggcttttatcaatgtgtggctgaaaatgaggctggaaatgcccagaccagtgcacagctcattgtccctaagcctgctatcccaagctccagtgtcctcccttcggctcccagagatgtggtccctgtcttggtttccagccgatttgtccgtctcagctggcgcccacctgcagaagcgaaagggaacattcaaactttcacggtctttttctccagagaaggtgacaacagggaacgagcattgaatacaacacagcctgggtcccttcagctcactgtgggaaacctgaagccagaagccatgtacacctttcgagttgtggcttacaatgaatggggaccgggagagagttctcaacccatcaaggtggccacacagcctgagttgcaagttccagggccagtagaaaacctgcaagctgtatctacctcacctacctcaattcttattacctgggaaccccctgcctatgcaaacggtccagtccaaggttacagattgttctgcactgaggtgtccacaggaaaagaacagaatatagaggttgatggactatcttataaactggaaggcctgaaaaaattcaccgaatatagtcttcgattcttagcttataatcgctatggtccgggcgtctctactgatgatataacagtggttacactttctgacgtgccaagtgccccgcctcagaacgtctccctggaagtggtcaattcaagaagtatcaaagttagctggctgcctcctccatcaggaacacaaaatggatttattaccggctataaaattcgacacagaaagacgacccgcaggggtgagatggaaacactggagccaaacaacctctggtacctattcacaggactggagaaaggaagtcagtacagtttccaggtgtcagccatgacagtcaatggtactggaccaccttccaactggtatactgcagagactccagagaatgatctagatgaatctcaagttcctgatcaaccaagctctcttcatgtgaggccccagactaactgcatcatcatgagttggactcctcccttgaacccaaacatcgtggtgcgaggttatattatcggttatggcgttgggagcccttacgctgagacagtgcgtgtggacagcaagcagcgatattattccattgagaggttagagtcaagttcccattatgtaatctccctaaaagcttttaacaatgccggagaaggagttcctctttatgaaagtgccaccaccaggtctataaccgatcccactgacccagttgattattatcctttgcttgatgatttccccacctcggtcccagatctctccacccccatgctcccaccagtaggtgtacaggctgtggctcttacccatgatgctgtgagggtcagctgggcagacaactctgtccctaagaaccaaaagacgtctgaggtgcgactttacaccgtccggtggagaaccagcttttctgcaagtgcaaaatacaagtcagaagacacaacatctctaagttacacagcaacaggcctcaaaccaaacacaatgtatgaattctcggtcatggtaacaaaaaacagaaggtccagtacttggagcatgactgcacatgccaccacgtatgaagcagcccccacctctgctcccaaggacttgacagtcattactagggaagggaagcctcgtgccgtcattgtgagttggcagcctcccttggaagccaatgggaaaattactgcttacatcttattttataccttggacaagaacatcccaattgatgactggattatggaaacaatcagtggtgataggcttactcatcaaatcatggatctcaaccttgatactatgtattactttcgaattcaagcacgaaattcaaaaggagtggggccactctctgatcctatcctcttcaggactctgaaagtggaacaccctgacaaaatggctaatgaccaaggtcgtcatggagatggaggttattggccagttgatactaatttgattgatagaagcaccctaaatgagccgccaattggacaaatgcaccccccgcatggcagtgtcactcctcagaagaacagcaacctgcttgtgatcattgtggtcaccgttggtgtcatcacagtgctggtagtggtcatcgtggctgtgatttgcacccgacgctcttcagcccagcagagaaagaaacgggccacccacagtgctggcaaaaggaagggcagccagaaggacctccgaccccctgatctttggatccatcatgaagaaatggagatgaaaaatattgaaaagccatctggcactgaccctgcaggaagggactctcccatccaaagttgccaagacctcacaccagtcagccacagccagtcagaaacccaactgggaagcaaaagcacctctcattcaggtcaagacactgaggaagcagggagctctatgtccactctggagaggtcgctggctgcacgccgagccccccgggccaagctcatgattcccatggatgcccagtccaacaatcctgctgtcgtgagcgccatcccggtgccaacgctagaaagtgcccagtacccaggaatcctcccgtctcccacctgtggatatccccacccgcagttcactctccggcctgtgccattcccaacactctcagtggaccgaggtttcggagcaggaagaagtcagtcagtgagtgaaggaccaactacccaacaaccacctatgctgcccccatctcagcctgagcattctagcagcgaggaggcaccaagcagaaccatccccacagcttgtgttcgaccaactcacccactccgcagctttgctaatcctttgctacctccaccaatgagtgcaatagaaccgaaagtcccttacacaccacttttgtctcagccagggcccactcttcctaagacccatgtgaaaacagcctcccttgggttggctggaaaagcaagatcccctttgcttcctgtgtctgtgccaacagcccctgaagtgtctgaggagagccacaaaccaacagaggattcagccaatgtgtatgaacaggatgatctgagtgaacaaatggcaagtttggaaggactcatgaagcagcttaatgccatcacaggctcagccttttaacatgtatttctgaatggatgaggtgaattttccgggaactttgcagcataccaattacccataaacagcacacctgtgtccaagaactctaaccagtgtacaggtcacccatcaggaccactcagttaaggaagatcctgaagcagttcagaaggaataagcattccttctttcacaggcatcaggaattgtcaaatgatgattatgagttccctaaacaaaagcaaagatgcattttcactgcaatgtcaaagtttaagctgctagaatagtcatgggcctttgtcactgcagtgaccacactgtcataactaatacctatgttttcctttgtcaaggcctgttgtttaatgtgtaggtctagtcttacaaaatgcaagtgcattatttaagcctgtaccatgccatggcaaaccagtgcaagctcactattttgttttcaacttaaacatacaaagcacccatgggaatctctcatgccatagcaccaaaggattggatgttttccttacagcacaaaaagtaaatagtaaacaaacaaaaggcagagaatgcttatgtttgtaactcagtcattcatcttgcacaagtggtggatattagtgagtggctaaaaattcacctattttggcaagtatttgtaaatccacccttggttaatatgtatgtctggagtccaggaatataaaaatctgcaactagtggcattctgccagcagcagtacatttctggaaagaggatataatatgcaatcttctca

SEQ ID NO: 10449 - protein, 1447 aa, Homo sapiens; identical to SEQ ID NO: 1761

SEQ ID NO: 10450 - DNA, 6337 bp, Homo sapiens
tgacagtgttgtggtactaaaagcacaagcgtctgtaactctgggcaatggggcacatcgagagtttgctgagaagactgtgaagcaaaaagaagaaagtttttcctactcttccttatgtgtccaacacgaagtttgctgttcagttttcacagaacttctagaagttgaagttacaaaggtatatagaaggtacacagaatcagaaaagattataaaagaaagcaagatttttgttagtgacgtcctgtttcctctgaagagtaatagttggaatcaaaagagtcaacgcaatgaactgttatttactgctgcgttttatgttgggaattcctctcctatggccttgtcttggagcaacagaaaactctcaaacaaagaaagtcaagcagccagtgcgatctcatttgagagtgaagcgtggctgggtgtggaaccaattttttgtaccagaggaaatgaatacgactagtcatcacatcggccagctaagatctgatttagacaatggaaacaattctttccagtacaagcttttgggagctggagctggaagtacttttatcattgatgaaagaacaggtgacatatatgccatacagaagcttgatagagaggagcgatccctctacatcttaagagcccaggtaatagacatcgctactggaagggctgtggaacctgagtctgagtttgtcatcaaagtttcggatatcaatgacaatgaaccaaaattcctagatgaaccttatgaggccattgtaccagagatgtctccagaaggaacattagttatccaggtgacagcaagtgatgctgacgatccctcaagtggtaataatgctcgtctcctctacagcttacttcaaggccagccatatttttctgttgaaccaacaacaggagtcataagaatatcttctaaaatggatagagaactgcaagatgagtattgggtaatcattcaagccaaggacatgattggtcagccaggagcgttgtctggaacaacaagtgtattaattaaactttcagatgttaatgacaataagcctatatttaaagaaagtttataccgcttgactgtctctgaatctgcacccactgggacttctataggaacaatcatggcatatgataatgacataggagagaatgcagaaatggattacagcattgaagaggatgattcgcaaacatttgacattattactaatcatgaaactcaagaaggaatagttatattaaaaaagaaagtggattttgagcaccagaaccactacggtattagagcaaaagttaaaaaccatcatgttcctgagcagctcatgaagtaccacactgaggcttccaccactttcattaagatccaggtggaagatgttgatgagcctcctcttttcctccttccatattatgtatttgaagtttttgaagaaaccccacagggatcatttgtaggcgtggtgtctgccacagacccagacaataggaaatctcctatcaggtattctattactaggagcaaagtgttcaatatcaatgataatggtacaatcactacaagtaactcactggatcgtgaaatcagtgcttggtacaacctaagtattacagccacagaaaaatacaatatagaacagatctcttcgatcccactgtatgtgcaagttcttaacatcaatgatcatgctcctgagttctctcaatactatgagacttatgtttgtgaaaatgcaggctctggtcaggtaattcagactatcagtgcagtggatagagatgaatccatagaagagcaccatttttactttaatctatctgtagaagacactaacaattcaagttttacaatcatagataatcaagataacacagctgtcattttgactaatagaactggttttaaccttcaagaagaacctgtcttctacatctccatcttaattgccgacaatggaatcccgtcacttacaagtacaaacacccttaccatccatgtctgtgactgtggtgacagtgggagcacacagacctgccagtaccaggagcttgtgctttccatgggattcaagacagaagtcatcattgctattctcatttgcattatgatcatatttgggtttatttttttgactttgggtttaaaacaacggagaaaacagattctatttcctgagaaaagtgaagatttcagagagaatatattccaatatgatgatgaagggggtggagaagaagatacagaggcctttgatatagcagagctgaggagtagtaccataatgcgggaacgcaagactcggaaaaccacaagcgctgagatcaggagcctatacaggcagtctttgcaagttggccccgacagtgccatattcaggaaattcattctggaaaagctcgaagaagctaatactgatccgtgtgcccctccttttgattccctccagacctacgcttttgagggaacagggtcattagctggatccctgagctccttagaatcagcagtctctgatcaggatgaaagctatgattaccttaatgagttgggacctcgctttaaaagattagcatgcatgtttggttctgcagtgcagtcaaataattagggctttttaccatcaaaatttttaaaagtgctaatgtgtattcgaacccaatggtagtcttaaagagttttgtgccctggctctatggcggggaaagccctagtctatggagttttctgatttccctggagtaaatactccatggttattttaagctacctacatgctgtcattgaacagagatgtggggagaaatgtaaacaatcagctcacaggcatcaatacaaccagatttgaagtaaaataatttaggaagatattaaaagtagatgagaggacacaagatgtagtcgatccttatgcgattatatcattatttacttaggaaagagtaaaaataccaaacgagaaaatttaaaggagcaaaaatttgcaagtcaaatagaaatgtacaaatcgagataacatttacatttctatcatattgacatgaaaattgaaaatgtatagtcagagaaattttcatgaattattccatgaagtattgtttcctttatttaaaaaaaaaaaaaaaaaaaaagaatgctaggtaatcttcgtagaaaactagaaagtatgataaacaacagttggaggaatccatggaaaatagacgagaaaatgtaaataaggctttctggggatcacagaacttttgtatgaataaaagccttataaaaccagctctggcatatgactaaaatattcctctactatttttcaatgtcatctaatgcaaacgctcaacctttttaaatggttaatgtgagaaaggcactgaattaagatatcttagtgttattttatttactcaattttcatctttcacactgtaagaataaaatgtttttgtggttaagttcctgatactatatagagataaactttaaaactttaacacctaggataatgtgggtgattacataaatgtttaaaaacatttaccttatatggaaagcagatttctgactaagatgccatgattcattctagtttgatattttaaaactttgccaagagcactctttaaaactgatttcaaatttgaacagatacttggtgtatacaaattaatcagagttatatagtataaatttgtattatttttgatattacaactttgtattaaaaaggaaaatatatttaggtgtttgtcatagattttttttcatatgcaactcaaaacacattcttatgtcaaaatacaatagcaaaatacaagtcaatatttactcataattaaatgcaaactttatgaaactggtggaaagtgtggaaaaatttaagtaaatttttacctctactaaaaattatttagacaacttaaaggaatactggattcaaacttcagttactattcactgtaaatattatgatcaactgaactgacttaccattcatgggataaaacatgatacaattctcagtatttgcttttctgttaagagcttggaatatgactgatgcttcagtgtcatttttttattattgaatataaaattaggtgcaatagatacatttattgtagccttaagaaggaaatcaatgctaagctgttgggcataaaactttacagtaacattagataacaagataataaaacactttaattttaatcgaccttttaagaatgatctttattattctatccaaatcaaggtagacttcaaaatttatggtttgaacaggaagaaagtagtgaatacaaaattcttaaaattggttcatatgatcatttttttattaatagcatgtgagactaagctgaaccaaactggccatatatgttaaatcaaataatttgagtaattttgaaatattgatgaagtagttaaatggttataatatattttattggtactttgaaatttaaacatctatatcacataataaagaaagtttttcatcaatctgaaacaggcaccattaaattggtgacacaaatattatcatttcacaaaagcttgagaaaaccagatttgaagtgaaataatttaggaagatattaaaagtggatgagaggacataagatgtagtcaatccttaacgcaatgataccattattaggaaagaggaaaaataccaaacaagagaaaatttaaaggagcaaaaatttgcaagtcaaatagaaatgcacaaatcgagagaacatttacatttctatcacattgacatgaaaattgaaaatgtatagtcagagaaattttcatgaattattccatgaagtgttgtttcctttatttaaaaagaatgctaggtaatcttagtagaaaactaaaaagtatgataaacaacagatggaagaattcatggaaaatagacgagaaaaagtaaataaggctttctggagatgacggaaattttgtatgaataaaagccttataaacaatgaatacatttggataaacaactcattaaaatgcacattaatggaatacctgtacaaatagttttaatacttgtgtccagtggcactaaagagatatattaaaatagattctggttgagttgattataagattgtcaatcataggatacacagggaaagcacagacacgattgctcatctctttggtagtctaaaatatgttccttttaaccacatcaaaagatactatctgattctaatacagaaggtgcaacttcctaggaattatactttgtattatattcaataattattttatgttttgcatcacatgggtgttgcaagaacacagctcttaaactaaaaaggcattacattaagaatttatttttgtaaattttaataaactctaaattaatgcaaaatatttatgaaaatagcacagcttcacattaatacccacagtacttaaatatctcccttagttgactcacagctttgtatgtaagcttcaaatttttaatggtaaaaataagaaaattaggactagcgaactgctagttgttccctcagtgcatgtgcttgagcctaacagatctttgtttgaattagttactttcaattaagcgaacatataatatttgttaaactgcttaatctttccagatctcactttgtaaaatgacgtccaatcaacctatttcacatggttgttatgaagaattaataataagatatgtaaaaccagcagcaccaatagtgcctgacaaaatataactgctcaataaataacagtgaattattataacaacagctaatggtattctattggaacacatggtctgtttcttttccaattctgagtgatctcaacagcctcacggcacattgaaaataaaagtcaacttcctcaccttccccataggccatggactttcccatctctacccacttgtgcagtttctcctctttcctctctcctcctcagttactaaagcaatcttccttcaaacacttctattttccattacatcacttcattcaggttggtgatcagctgcaacttcctcagaaagaccactgctgcttccagtgaccctggctttgtcttgctttgtattagattactcagctccctggtattattgttgtctttatcgcttattagaatgtaacccttaatgggcaagaaattgtcagtcttgttcatttatcatcgtataaaaaatgtttctagcacacagaaagtgaccaataaatatttctggaattaatgtagtaatgaatccaatctattttacttagtgacttgtagaaattcttttggtttccattgactatttttatagaatattaatatggaattaaagtatttttc

SEQ ID NO: 10451 - protein, 772 aa, Homo sapiens; identical to SEQ ID NO: 1763

SEQ ID NO: 10452 - DNA, 1892 bp, Homo sapiens
agagaacccaaaatagcattgagtaagcagtgacatactgacagtgttgtggtactaaaagcacaagcgtctgtaactctgggcaatggggcacatcgagagtttgctgagaagactgtgaagcaaaaagaagaaagtttttcctactcttccttatgtgtccaacacgaagtttgctgttcagttttcacagaacttctagaagttgaagttacaaaggaattcctctcctatggccttgtcttggagcaacagaaaactctcaaacaaagaaagtcaagcagccagtgcgatctcatttgagagtgaagcgtggctgggtgtggaaccaattttttgtaccagaggaaatgaatacgactagtcatcacatcggccagctaagatctgatttagacaatggaaacaattctttccagtacaagcttttgggagctggagctggaagtacttttatcattgatgaaagaacaggtgacatatatgccatacagaagcttgatagagaggagcgatccctctacatcttaagagcccaggtaatagacatcgctactggaagggctgtggaacctgagtctgagtttgtcatcaaagtttcggatatcaatgacaatgaaccaaaattcctagatgaaccttatgaggccattgtaccagagatgtctccagaaggaacattagttatccaggtgacagcaagtgatgctgacgatccctcaagtggtaataatgctcgtctcctctacagcttacttcaaggccagccatatttttctgttgaaccaacaacaggagtcataagaatatcttctaaaatggatagagaactgcaagatgagtattgggtaatcattcaagccaaggacatgattggtcagccaggagcgttgtctggaacaacaagtgtattaattaaactttcagatgttaatgacaataagcctatatttaaagaaagtttataccgcttgactgtctctgaatctgcacccactgggacttctataggaacaatcatggcatatgataatgacataggagagaatgcagaaatggattacagcattgaagaggatgattcgcaaacatttgacattattactaatcatgaaactcaagaaggaatagttatattaaaaaagaaagtggattttgagcaccagaaccactacggtattagagcaaaagttaaaaaccatcatgttcctgagcagctcatgaagtaccacactgaggcttccaccactttcattaagatccaggtggaagatgttgatgagcctcctcttttcctccttccatattatgtatttgaagtttttgaagaaaccccacagggatcatttgtaggcgtggtgtctgccacagacccagacaataggaaatctcctatcaggtattctattactaggagcaaagtgttcaatatcaatgataatggtacaatcactacaagtaactcactggatcgtgaaatcagtgcttggtacaacctaagtattacagccacagaaaaatgatatagggatgctgtattccttgaagattacatttcaaagagatggtcaccattacttgataaatacaatcctggatcctaaagcttccaagaaacttgttgaacttttgaaagatttccatacgcttcaaagggacaaagaaaaaacttacatacaaagctttttttttccctctctctctctctttctctgtgtgtgtgtgtgtgtgtgtgtgtgtgtgtatgaatgctctgagaaaaggaaggaaagaaaaaatattttcccttgctttcaacaagtacaaggcctctaatttttaatttgttttgttctttcaaattatcattgcaaatagtacatatattttaaataaaaacactaaaacaaact

SEQ ID NO: 10453 - protein, 390 aa, Homo sapiens
MNTTSHHIGQLRSDLDNGNNSFQYKLLGAGAGSTFIIDERTGDIYAIQKLDREERSLYILRAQVIDIATGRAVEPESEFVIKVSDINDNEPKFLDEPYEAIVPEMSPEGTLVIQVTASDADDPSSGNNARLLYSLLQGQPYFSVEPTTGVIRISSKMDRELQDEYWVIIQAKDMIGQPGALSGTTSVLIKLSDVNDNKPIFKESLYRLTVSESAPTGTSIGTIMAYDNDIGENAEMDYSIEEDDSQTFDIITNHETQEGIVILKKKVDFEHQNHYGIRAKVKNHHVPEQLMKYHTEASTTFIKIQVEDVDEPPLFLLPYYVFEVFEETPQGSFVGVVSATDPDNRKSPIRYSITRSKVFNINDNGTITTSNSLDREISAWYNLSITATEK

SEQ ID NO: 10454 - DNA, 374 bp, Homo sapiens
gagcaacatgtggtctggtactgctagattcatgagtccccatctgctcagaattcaagatgggatctctgctcttagcatcaagaccctttttgatgaatgcaaatggtggctgacagaatgtgactcagaggaaagactgacagtctacatcagtctcctgatttacagcacatttaactctcctgagtcaacacaaagaaaaagaaacaggatattagtaacgagaagaaaagccatgtgaatccatagggagaaggcagctgtctgcataccaggaggagagctcccacccgaacccaaccatagtgccaccctgatcttgtacttccagcctctcagctgtgagaaaataaatgtctgttgtttaagac

SEQ ID NO: 10455 - protein, 78 aa, Homo sapiens
MWSGTARFMSPHLLRIQDGISALSIKTLFDECKWWLTECDSEERLTVYISLLIYSTFNSPESTQRKRNRILVTRRKAM

SEQ ID NO: 10456 - DNA, 8626 bp, Homo sapiens
cggggcgtgcgcgtcctcctccccaggcccgccgcctccctgccaagaatctgagagaggccgagtggagttcggtccttctctgaacacttttagctgagagtaccagcatccaactgggagcgttgtcattgcatttccacattcccaggaaagcccaggtgctggctgccagctgctgcgccccccatgtagaaggtgcacctcctgggagcaggcacgtcttttggctcttctgaccatggagagataggacggtccctgcagcccgcgcgacagaaagctgtgccgccaccaccggccgcgcccgtccttcggatggatcgcaacagagaggccgagatggagctgaggcgaggccccagccccaccagggccggccggggccacgaggtggatggggacaaggctacctgccacacctgctgcatctgcggcaagagcttccccttccagagctcgctttcgcagcacatgcgcaagcacacgggcgagaagccctacaagtgtccctactgcgaccaccgggcttcccagaagggcaacctgaagattcacatccggagccaccgcacggggactctgattcagggacacgagccggaggcgggcgaggcgccgctgggtgagatgcgcgcctccgagggcctggacgcctgcgccagccccaccaagagcgcctcggcctgcaaccggctgctgaacggggcctcgcaggccgacggcgccagggtcctgaacggggcctcgcaggccgacagcggcagagtcctgctgcggagcagcaagaagggggcagaggggtccgcatgcgccccgggggaggccaaggcagcggtccagtgctccttctgcaagagccagttcgagcgtaagaaggacctggagctgcacgtgcaccaggcgcacaagccgttcaagtgcaggctgtgcagctacgcgacgctgcgggaggagtcgctgctgagccacatcgagagggaccacatcaccgcgcaggggcccggcagcggcgaggcctgcgtggagaacggcaagcccgagctgagccccggggagttcccgtgcgaggtgtgtggccaggccttcagccagacctggttcctgaaggcgcacatgaagaagcaccggggctccttcgaccacggctgccacatctgcggccgtaggttcaaggagccctggttcctcaagaaccacatgaaggcgcacggccccaagacgggcagcaagaacaggcccaagagtgagctggaccccatcgccaccatcaacaacgtggtccaggaggaggtgatcgtcgccggcctgagcctctacgaggtctgcgccaagtgcgggaacctgtttacaaacctggacagcttgaacgcccacaatgccatccaccgcagagtcgaggccagccgcacgcgcgccccggccgaggagggggcggaggggccctcggacaccaagcagttcttcctccagtgcctgaacctgaggccgtcggcggccggcgactcgtgccctggcacgcaggccggacggcgggtggctgagctggacccggtcaacagctaccaggcctggcagctggccacgcggggtaaggtggccgagccggccgagtacctcaagtacggggcctgggacgaggcgctggccggggacgtggccttcgacaaggacaggcgcgagtacgtcctggtgagccaggagaagcgcaagcgtgagcaggatgcaccagccgcgcaggggcccccgcggaagcgcgcgagcgggcctggggaccccgcgcccgccggccacctcgatccccgctcggccgcgcgccccaaccgcagggccgcagccaccaccggccagggcaagtcctccgagtgcttcgagtgcggcaagatcttccgcacctatcatcagatggtgctgcactcacgcgtgcatcgccgcgcgcgccgcgagagggacagtgacggggacagggcggcgcgggcccgctgcggatcactcagtgagggtgactcggcctcccagcccagcagccctggctccgcctgtgccgctgctgactccccgggctctggcctggccgacgaggctgccgaagacagtggtgaggagggcgcccctgaacctgcaccagggggacagccgcgccgctgctgcttttccgaagaggtgacttcgaccgagctctccagtggagaccagagtcacaagatgggagataacgcctcggaaagagacaccggcgagtccaaggcagggatcgcagcttctgtgtccatacttgaaaacagtagcagagagacttctagaaggcaagagcagcacagattttctatggacttaaagatgccagcatttcaccccaagcaggaggtgcccgtccctggtgatggtgtggagttcccttccagtacgggagcggagggccagacgggtcaccctgcagaaaagctgtccgatttgcacaacaaggaacactctgggggagggaagcgggcgctggccccagacctcatgccgctagatttaagtgcgaggtcgacgcgggatgaccccagcaataaggagacggcctcctccctgcaggcggctttagtcgttcacccgtgtccttactgcagccacaagacctactaccccgaggtcctgtggatgcacaaacgcatctggcaccgcgtcagctgcaactccgtggctcccccgtggattcagcccaatggttacaaaagcatcagaagcaatttggttttcctttcccggagcggacgcacgggccccccgcctgccctcggtggcaaagaatgccagcctttgctccttgctcggttcacccgcactcaggtgccaggggggatgccggggtccaaaagtggctcttctcccctgggagtggtcacaaaagccgctagcatgcctaagaataaggagagccattccggaggtccctgcgctctgtgggcgcccggccctgacgggtatcgacagaccaaaccttgtcacggccaggagccacatggcgcggccacacaggggcccctggccaagcccaggcaggaggctagctccaaaccggtgcctgccccgggtggcgggggcttcagcaggagcgccacccctacgcccaccgtcatcgcccgggctggcgcgcagccctcggccaatagcaagcctgtggagaagtttggggtccccccagcgggggctggctttgcccccacaaataagcacagtgccccggactccctgaaagccaaattcagtgctcagcctcagggtccacctcctgcaaagggcgaagggggcgctcctcctctacctccccgcgagcccccctcgaaggcagcccaggagctgaggactctggccacctgtgctgcggggtccaggggcgacgcggccttgcaggcccagcccggcgtggctggggcgcccccccgtcctacactccatcaaacaggagccggtggccgaggggcatgagaagcgcctggacatcctcaacatctttaagacgtacattccaaaggactttgcgaccctctaccagggatggggtgtcagcggccctgggttggagcacagagggacactccggacgcaggcccggccaggagagttcgtctgcatcgagtgcggaaagagcttccaccagcccggccacctcagggcccacatgcgggcacactcagtggtgtttgagtccgatgggcctcggggttctgaagttcataccacctccgcagacgcccccaaacaagggagagaccattctaacacaggtaccgtccagacagtgcctctgagaaagggaacctaaaggcgtgtttccgacgcaccccaggtccccgtaacggccattagcagtaccctcacgatgtcccagcagcctcccacctgtgacctggccgctccatggaagaacagccggggaactcctgagcagacacctcacatcccgagccgctgcgctggagtggaaactgaaggcagatgcctctccttgttaaacgttcagaaataaatgaagatgctatattctagaaatacatgtagatactatatacgcatttacgtgctcatcgtccatagtcccatattttcttataataaacagtagtactggcaggcacagtaggggcacaaggcatctgtcttattcaagacaagtttgagacactggaaaaaaagatacttgttgtgtgtgttggacagagtggcgaggctgagcactgtcacaggggcctcccatgttaagagggactgtggggatgatgtcagaacaagacgtggtggatttgaggttgatcgagtattaatactactgcctctccttgtcttagtgggtatttaaaatagtaaataagagagaggaaggaggtgacgttcaggtgctgtgggaagcaggcttggcggaggggtatgatgatgagaccctcattgttcactggctccatcgcactcctccctggggccgtgtgcctgttccattcttcccaccattcgaactgagcgaatctggcaaaggagacacgtctgtgggaatgcgtagattccgcctcggaagagagctagcgcaacactaagaaaagcaggcttcttgtttattctcaggacctttttgtaacagggctacattctgcaaactgcttacaaaggaagactatacgtcttaacaaattatttagccactgagtcctcccgattcggacctgttttagtaatggcagaagaatccctgagcaggttcaggtgccctagatgactagggtgctgagctctggcgccttctgtccccactctttgcctccccgccccttccctgagccaccccagcaagtgggtgtcttttctccctgggcctggtgacctccacaggatgagtgactttgttcataaagggtggggatcaccagccccttgggtgggggacggcttcatatacctcttcctcagtaatgcaaatgcgagtttttgtggtgggggttaaggcccataacaaaggatcttaaaccatgcagtgtacgcaattgaaatggtattccacagatataaatattttcttttcccattgccgtgacactatgtgtgatggtaatatttctgagagtttcagatttttgcacatatgattttatgcattatcaaaagttactgctgccttgaatgaaaatgttctgtgaaattttttgcaaaagctttactaggtttttttttaattgtgaaattttgtaaaggcaggaaatggattaaaacgagcatgctaaatatatttttcaaaaaagcaataattttacatgtacagaaattatcctaacctttaatactggcgagagcaacagtttacttaatacggtaatggactagtgcagtttttgtagacagtgggcttctgatacaaagtcttgtttaaacacagacacacacacacacaaacacacacacacaccctaaagtgtgggtttcctgttctaatgatttgttgaatattattatattattattattattattattattattgttattgttattagtaatgtttggttctggattctacttgttactgagtttaaattacttgacggttcaggttactttgcaacactttcaaacgatgcaatgtaactggctagcttatatatatatatatatatatatatatatatatttttttttttttttacttatttttttctgatattcttacaccagatatgtacgaaaatgatctgtcctgttggtgtaattaggaatgtccatgcagatacagttaaacaactgtaattgactgttctgtaaagttattttgggcaaagttgcggagacacattcctctgtccacctaagaaatcagaagactcttctgttgatttatgtttaatcatttcagtagtttccccacagtgatcatttctgcattttctggcttttgttttcttggctgaaagtgaatggtgactgttaggaatgtcagggactagtgacccagtcctgtttctctgtgttttagttattaaaaagaaattctgtacccaaagtgacacgaaagtgtagtctacatttttactgtttcagaagcggcatggaaaagtgcagttggcctttggagctggaagtgtcttgctggtgaggctccatcctggaggctctggtggggagtgggctggcgctggggccctgccggccgcgtgctggatccttcctggcttgcaggagagcaggcgtggaggacagtcagcttgcggggccgcgcagggtgcacagagtgcaggaggaaggttttcacccagttaaacagactggggagcccccccaagaacgccatcccttgaggccagctgtgggcaggcctggatgtgtggtcccttccttccacccatcgtcagtattgtgttggtttgttaatttgttgatttggtcatagtatttaatatgatttgtgtttccttatttatttagccaccgttttgattgcctttttttttccgaatggtaatttctgcatgatacacttctgtacgttgtcttctgactgttacagactttctactacctctcccgatctgctgtttccttgtttcttaacaggattttttacagtgttgcgtctaatgtaacttagacaataaagggtttggttgtctacactgcagcttctcggtgtctctcccctgctttccgctcgctgcttcccgctctgcccctgctggggcctggctgcaccctggcctgccttcctatactctcctgtttcctgctcatatctcttcctcatttttgcgttcaaataacacacagctaatgagcttctaaaaatcttttcaggttgttcacttgtattccttaatttgaagaatgaatatttaaattctctcaaaagtcagatattgaggatcttctctgggaaattggccactgtacctgcccacctttctgcctggttccctggaaggtcttattgtcatcttagacggacagatttcattctcagcaccatacagatttggcttcaaagccaggtgaattttgcctttgaggctctgaaaagtattaagtgttttaagaggtcccccaatatttacttatttattttttaaaccaagaaagacactggttccctgaaaagcaggtgcttcaggaagtagcaattgggagttgcatacagttacttcgtcagagaaaggagcgcccagtatgacaggcccccacccctgatccggccactgtgcacaggtcgctgagggtgtgagaacacctctgcaggggctccggcacatgtgggtttcatcgtctcacactccttcaggctgcaggggttgagtgcagaaagggcaagcttcatctccatggtgcctctccaggctggcaactctggtcggcctctgttctttggacagagagggtgtaggttacagggtcagtagggatgctttctggatcaaagaaagtgggtgtagtgcttagtctgttgtgtggaagagggcacctcctgggctttcgtggctggagactgtctaccaacattccttccttcaaactagacaaaccctcctctgccacccccagcaaattctcagaggtttccaagctgtagaaaaaggaaggaaggaaggacggcattcacatagctttactttctgcttcaaaatgtcttaagtagcatatgttgttttactgcttttaactttggtgagttctaatttcagaacgttttgttcactgagcaaaaaaacagatgaaacaaccacaggccaggacttcaagtgaggaggacgcctttgtttgccgtggttggtgggagcacacgccggagcccggtaacgtgcctgtgggagtgaccaagggccacccgcccaagggaaaatgttcattcttcatcagctttgctaattctgctttgaggcagtaaaatgcaaaagaccatagaatttgtatttctttttttaaaatacaatttataacattatattttgtactctttatattagaatttgtaactagattgatgtatttaactatttctgaaaaagtaattcaatgttttagttgtgtgataaaaatatttagataaaacatattcattctattggaatttgaaataaataaaaacatcttggagttctgagatttgtaagacatttttccccaatttcagagggtggcgtaaatcgtttgacagcccgctttggtctgtggttatttatttttgttggctgaacataaaccaaagtgttaatgctctttatttatggaagagttttagggtaattcacaagatcgttcatctgaacagatgcccagatggcccgagtggtttttttccaactcttttgtggactcgaggacatacagttttttaatggagacgctgtgtttttctcattttctttcacagcacacatgttatttccccactgaatacacccactgttcttacccttgcactgtcacccatacaggacgcacagggatggacgcggacggaattctgactcagccacacctggaggaaattattgtgtcaaaaatgtggggacacaagggctggcactgtggtttgcaatggtttactgatgagacagcaaaaatgagacaggaccatcagatgcaataaagattctaatttaaaaag

SEQ ID NO: 10457 - protein, 1051 aa, Homo sapiens
MDRNREAEMELRRGPSPTRAGRGHEVDGDKATCHTCCICGKSFPFQSSLSQHMRKHTGEKPYKCPYCDHRASQKGNLKIHIRSHRTGTLIQGHEPEAGEAPLGEMRASEGLDACASPTKSASACNRLLNGASQADGARVLNGASQADSGRVLLRSSKKGAEGSACAPGEAKAAVQCSFCKSQFERKKDLELHVHQAHKPFKCRLCSYATLREESLLSHIERDHITAQGPGSGEACVENGKPELSPGEFPCEVCGQAFSQTWFLKAHMKKHRGSFDHGCHICGRRFKEPWFLKNHMKAHGPKTGSKNRPKSELDPIATINNVVQEEVIVAGLSLYEVCAKCGNLFTNLDSLNAHNAIHRRVEASRTRAPAEEGAEGPSDTKQFFLQCLNLRPSAAGDSCPGTQAGRRVAELDPVNSYQAWQLATRGKVAEPAEYLKYGAWDEALAGDVAFDKDRREYVLVSQEKRKREQDAPAAQGPPRKRASGPGDPAPAGHLDPRSAARPNRRAAATTGQGKSSECFECGKIFRTYHQMVLHSRVHRRARRERDSDGDRAARARCGSLSEGDSASQPSSPGSACAAADSPGSGLADEAAEDSGEEGAPEPAPGGQPRRCCFSEEVTSTELSSGDQSHKMGDNASERDTGESKAGIAASVSILENSSRETSRRQEQHRFSMDLKMPAFHPKQEVPVPGDGVEFPSSTGAEGQTGHPAEKLSDLHNKEHSGGGKRALAPDLMPLDLSARSTRDDPSNKETASSLQAALVVHPCPYCSHKTYYPEVLWMHKRIWHRVSCNSVAPPWIQPNGYKSIRSNLVFLSRSGRTGPPPALGGKECQPLLLARFTRTQVPGGMPGSKSGSSPLGVVTKAASMPKNKESHSGGPCALWAPGPDGYRQTKPCHGQEPHGAATQGPLAKPRQEASSKPVPAPGGGGFSRSATPTPTVIARAGAQPSANSKPVEKFGVPPAGAGFAPTNKHSAPDSLKAKFSAQPQGPPPAKGEGGAPPLPPREPPSKAAQELRTLATCAAGSRGDAALQAQPGVAGAPPRPTLHQTGAGGRGA

SEQ ID NO: 10458 - DNA, 8126 bp, Homo sapiens
cggggcgtgcgcgtcctcctccccaggcccgccgcctccctgccaagaatctgagagaggccgagtggagttcggtccttctctgaacacttttagctgagagtaccagcatccaactgggagcgttgtcattgcatttccacattcccaggaaagcccaggtgctggctgccagctgctgcgccccccatgtagaaggtgcacctcctgggagcaggcacgtcttttggctcttctgaccatggagagataggacggtccctgcagcccgcgcgacagaaagctgtgccgccaccaccggccgcgcccgtccttcggatggatcgcaacagagaggccgagatggagctgaggcgaggccccagccccaccagggccggccggggccacgaggtggatggggacaaggctacctgccacacctgctgcatctgcggcaagagcttccccttccagagctcgctttcgcagcacatgcgcaagcacacgggcgagaagccctacaagtgtccctactgcgaccaccgggcttcccagaagggcaacctgaagattcacatccggagccaccgcacggggactctgattcagggacacgagccggaggcgggcgaggcgccgctgggtgagatgcgcgcctccgagggcctggacgcctgcgccagccccaccaagagcgcctcggcctgcaaccggctgctgaacggggcctcgcaggccgacggcgccagggtcctgaacggggcctcgcaggccgacagcggcagagtcctgctgcggagcagcaagaagggggcagaggggtccgcatgcgccccgggggaggccaaggcagcggtccagtgctccttctgcaagagccagttcgagcgtaagaaggacctggagctgcacgtgcaccaggcgcacaagccgttcaagtgcaggctgtgcagctacgcgacgctgcgggaggagtcgctgctgagccacatcgagagggaccacatcaccgcgcaggggcccggcagcggcgaggcctgcgtggagaacggcaagcccgagctgagccccggggagttcccgtgcgaggtgtgtggccaggccttcagccagacctggttcctgaaggcgcacatgaagaagcaccggggctccttcgaccacggctgccacatctgcggccgtaggttcaaggagccctggttcctcaagaaccacatgaaggcgcacggccccaagacgggcagcaagaacaggcccaagagtgagctggaccccatcgccaccatcaacaacgtggtccaggaggaggtgatcgtcgccggcctgagcctctacgaggtctgcgccaagtgcgggaacctgtttacaaacctggacagcttgaacgcccacaatgccatccaccgcagagtcgaggccagccgcacgcgcgccccggccgaggagggggcggaggggccctcggacaccaagcagttcttcctccagtgcctgaacctgaggccgtcggcggccggcgactcgtgccctggcacgcaggccggacggcgggtggctgagctggacccggtcaacagctaccaggcctggcagctggccacgcggggtaaggtggccgagccggccgagtacctcaagtacggggcctgggacgaggcgctggccggggacgtggccttcgacaaggacaggcgcgagtacgtcctggtgagccaggagaagcgcaagcgtgagcaggatgcaccagccgcgcaggggcccccgcggaagcgcgcgagcgggcctggggaccccgcgcccgccggccacctcgatccccgctcggccgcgcgccccaaccgcagggccgcagccaccaccggccagggcaagtcctccgagtgcttcgagtgcggcaagatcttccgcacctatcatcagatggtgctgcactcacgcgtgcatcgccgcgcgcgccgcgagagggacagtgacggggacagggcggcgcgggcccgctgcggatcactcagtgagggtgactcggcctcccagcccagcagccctggctccgcctgtgccgctgctgactccccgggctctggcctggccgacgaggctgccgaagacagtggtgaggagggcgcccctgaacctgcaccagggggacagccgcgccgctgctgcttttccgaagaggtgacttcgaccgagctctccagtggagaccagagtcacaagatgggagataacgcctcggaaagagacaccggcgagtccaaggcagggatcgcagcttctgtgtccatacttgaaaacagtagcagagagacttctagaaggcaagagcagcacagattttctatggacttaaagatgccagcatttcaccccaagcaggaggtgcccgtccctggtgatggtgtggagttcccttccagtacgggagcggagggccagacgggtcaccctgcagaaaagctgtccgatttgcacaacaaggaacactctgggggagggaagcgggcgctggccccagacctcatgccgctagatttaagtgcgaggtcgacgcgggatgaccccagcaataaggagacggcctcctccctgcaggcggctttagtcgttcacccgtgtccttactgcagccacaagacctactaccccgaggtcctgtggatgcacaaacgcatctggcaccgcgtcagctgcaactccgtggctcccccgtggattcagcccaatggttacaaaagcatcagaagcaatttggttttcctttcccggagcggacgcacgggccccccgcctgccctcggtggcaaagaatgccagcctttgctccttgctcggttcacccgcactcaggtgccaggggggatgccggggtccaaaagtggctcttctcccctgggagtggtcacaaaagccgctagcatgcctaagaataaggagagccattccggaggtccctgcgctctgtgggcgcccggccctgacgggtatcgacagaccaaaccttgtcacggccaggagccacatggcgcggccacacaggggcccctggccaagcccaggcaggaggctagctccaaaccggtgcctgccccgggtggcgggggcttcagcaggagcgccacccctacgcccaccgtcatcgcccgggctggcgcgcagccctcggccaatagcaagcctgtggagaagtttggggtccccccagcgggggctggctttgcccccacaaataagcacagtgccccggactccctgaaagccaaattcagtgctcagcctcagggtccacctcctgcaaagggcgaagggggcgctcctcctctacctccccgcgagcccccctcgaaggcagcccaggagctgaggactctggccacctgtgctgcggggtccaggggcgacgcggccttgcaggcccagcccggcgtggctggggcgcccccccgtcctacactccatcaaacaggagccggtggccgaggggcatgagaagcgcctggacatcctcaacatctttaagacgtacattccaaaggactttgcgaccctctaccagggatggggtgtcagcggccctgggttggagcacagagggacactccggacgcaggcccggccaggagagttcgtctgcatcgagtgcggaaagagcttccaccagcccggccacctcagggcccacatgcgggcacactcagtggtgtttgagtccgatgggcctcggggttctgaagttcataccacctccgcagacgcccccaaacaagggagagaccattctaacacaggtaccgtccagacagtgcctctgagaaagggaacctaaaggcgtgtttccgacgcaccccaggtccccgtaacggccattagcagtaccctcacgatgtcccagcagcctcccacctgtgacctggccgctccatggaagaacagccggggaactcctgagcagacacctcacatcccgagccgctgcgctggagtggaaactgaaggcagatgcctctccttgttaaacgttcagaaataaatgaagatgctatattctagaaatacatgtagatactatatacgcatttacgtgctcatcgtccatagtcccatattttcttataataaacagtagtactggcaggcacagtaggggcacaaggcatctgtcttattcaagacaagtttgagacactggaaaaaaagatacttgttgtgtgtgttggacagagtggcgaggctgagcactgtcacaggggcctcccatgttaagagggactgtggggatgatgtcagaacaagacgtggtggatttgaggttgatcgagtattaatactactgcctctccttgtcttagtgggtatttaaaatagtaaataagagagaggaaggaggtgacgttcaggtgctgtgggaagcaggcttggcggaggggtatgatgatgagaccctcattgttcactggctccatcgcactcctccctggggccgtgtgcctgttccattcttcccaccattcgaactgagcgaatctggcaaaggagacacgtctgtgggaatgcgtagattccgcctcggaagagagctagcgcaacactaagaaaagcaggcttcttgtttattctcaggacctttttgtaacagggctacattctgcaaactgcttacaaaggaagactatacgtcttaacaaattatttagccactgagtcctcccgattcggacctgttttagtaatggcagaagaatccctgagcaggttcaggtgccctagatgactagggtgctgagctctggcgccttctgtccccactctttgcctccccgccccttccctgagccaccccagcaagtgggtgtcttttctccctgggcctggtgacctccacaggatgagtgactttgttcataaagggtggggatcaccagccccttgggtgggggacggcttcatatacctcttcctcagtaatgcaaatgcgagtttttgtggtgggggttaaggcccataacaaaggatcttaaaccatgcagtgtacgcaattgaaatggtattccacagatataaatattttcttttcccattgccgtgacactatgtgtgatggtaatatttctgagagtttcagatttttgcacatatgattttatgcattatcaaaagttactgctgccttgaatgaaaatgttctgtgaaattttttgcaaaagctttactaggtttttttttaattgtgaaattttgtaaaggcaggaaatggattaaaacgagcatgctaaatatatttttcaaaaaagcaataattttacatgtacagaaattatcctaacctttaatactggcgagagcaacagtttacttaatacggtaatggactagtgcagtttttgtagacagtgggcttctgatacaaagtcttgtttaaacacagacacacacacacacaaacacacacacacaccctaaagtgtgggtttcctgttctaatgatttgttgaatattattatattattattattattattattattattgttattgttattagtaatgtttggttctggattctacttgttactgagtttaaattacttgacggttcaggttactttgcaacactttcaaacgatgcaatgtaactggctagcttatatatatatatatatatatatatatatatatttttttttttttttacttatttttttctgatattcttacaccagatatgtacgaaaatgatctgtcctgttggtgtaattaggaatgtccatgcagatacagttaaacaactgtaattgactgttctgtaaagttattttgggcaaagttgcggagacacattcctctgtccacctaagaaatcagaagactcttctgttgatttatgtttaatcatttcagtagtttccccacagtgatcatttctgcattttctggcttttgttttcttggctgaaagtgaatggtgactgttaggaatgtcagggactagtgacccagtcctgtttctctgtgttttagttattaaaaagaaattctgtacccaaagtgacacgaaagtgtagtctacatttttactgtttcagaagcggcatggaaaagtgcagttggcctttggagctggaagtgtcttgctggtgaggctccatcctggaggctctggtggggagtgggctggcgctggggccctgccggccgcgtgctggatccttcctggcttgcaggagagcaggcgtggaggacagtcagcttgcggggccgcgcagggtgcacagagtgcaggaggaaggttttcacccagttaaacagactggggagcccccccaagaacgccatcccttgaggccagctgtgggcaggcctggatgtgtggtcccttccttccacccatcgtcagtattgtgttggtttgttaatttgttgatttggtcatagtatttaatatgatttgtgtttccttatttatttagccaccgttttgattgcctttttttttccgaatggtaatttctgcatgatacacttctgtacgttgtcttctgactgttacagactttctactacctctcccgatctgctgtttccttgtttcttaacaggattttttacagtgttgcgtctaatgtaacttagacaataaagggtttggttgtctacactgcagcttctcggtgtctctcccctgctttccgctcgctgcttcccgctctgcccctgctggggcctggctgcaccctggcctgccttcctatactctcctgtttcctgctcatatctcttcctcatttttgcgttcaaataacacacagctaatgagcttctaaaaatcttttcaggttgttcacttgtattccttaatttgaagaatgaatatttaaattctctcaaaagtcagatattgaggatcttctctgggaaattggccactgtacctgcccacctttctgcctggttccctggaaggtcttattgtcatcttagacggacagatttcattctcagcaccatacagatttggcttcaaagccaggtgaattttgcctttgaggctctgaaaagtattaagtgttttaagaggtcccccaatatttacttatttattttttaaaccaagaaagacactggttccctgaaaagcaggtgcttcaggaagtagcaattgggagttgcatacagttacttcgtcagagaaaggagcgcccagtatgacaggcccccacccctgatccggccactgtgcacaggtcgctgagggtgtgagaacacctctgcaggggctccggcacatgtgggtttcatcgtctcacactccttcaggctgcaggggttgagtgcagaaagggcaagcttcatctccatggtgcctctccaggctggcaactctggtcggcctctgttctttggacagagagggtgtaggttacagggtcagtagggatgctttctggatcaaagaaagtgggtgtagtgcttagtctgttgtgtggaagagggcacctcctgggctttcgtggctggagactgtctaccaacattccttccttcaaactagacaaaccctcctctgccacccccagcaaattctcagaggtttccaagctgtagaaaaaggaaggaaggaaggacggcattcacatagctttactttctgcttcaaaatgtcttaagtagcatatgttgttttactgcttttaactttggtgagttctaatttcagaacgttttgttcactgagcaaaaaaacagatgaaacaaccacaggccaggacttcaagtgaggaggacgcctttgtttgccgtggttggtgggagcacacgccggagcccggtaacgtgcctgtgggagtgaccaagggccacccgcccaagggaaaatgttcattcttcatcagctttgctaattctgctttgaggcagtaaaatgcaaaagaccatagaatttgtatttctttttttaaaatacaatttataacattatattttgtactctttatattagaatttgtaactagattgatgtatttaactatttctgaaaaagtaattcaatgttttagttgtgtgataaaaatatttagataaaacatattcattctattggaatttgaaataaataaaaacatcttggagttctgagatttgt

SEQ ID NO: 10459 - protein, 1051 aa, Homo sapiens; identical to SEQ ID NO: 10457

SEQ ID NO: 10460 - DNA, 1203 bp, Homo sapiens
gcagcccagcaacaagcggccaccgcccccaccccggggcgggcaggttccgacctgaatctgaaagtgcttctaaaccccatgcttcacagaacgttcggagggggaggcgctccgtgggggctgctgcgtgcccatgtagccgaactgactcgaataaaagcgtgtccacgtctacatcacacatctgtgtaaatgcagaagcctgcggatgcgcggggctggccagacttcacagtgtgcagacacatgggctcatgcacgcgcacgcgcgcgctcacacacacaccccaaattacctccgggatggagaaagccgctgcggattggccagcagagccgtcactcacgcccagggggcagggagacttcgcaaagctgtttccttttttttttttcctcctctcctccctaccgtttcatttaatggtaaaacaacagcagagctctgaaagttagccatctgcgcagagtttgccttctttaaggagggaggcgtcagacgatatccatttaaatatattttgtacttccacaaaggatggaaagggaaattcacgaagggagtggaggcggaaagggagctccgagaaagaaggaggggtcattccgcggggggcgggggggggggcgggggccgacgcaggggaaagagttgctctctacaccgaaaagggactttgaccttccattgatctcgaaattcaaaaacgtttcttcacaggtcagattgtaacaaacactcgttcctaatttatgaactcgccgttttgattttattatttaagcatgcgccagcaatcgtgtttccttaagaaagaactgacctatttttggctggagataaacgatcatgttaacagatgttaatcttgtaatctgtttttcctgtaagcactttacctagccgggtttcagaccttaaaaataacatcttttccaaaaagacctgacgtcacaattcactccctgaaaaatcacactccccctccagtttcttcccctgcaatgatttcaaagacattaaatcttttccactttataaatgctgatctgttctgcctctactcccacaggctcttatttgcatttcaaattccacaggttacaccagtcgccttttcaaaaaatgtaaaccaacaatgcagcagcaaatggctttttgtgcatctggattaaataaagcacagaatgaatatattt

SEQ ID NO: 10461 - protein, 87 aa, Homo sapiens [sequence omitted]

SEQ ID NO: 10462 - DNA, 2077 bp, Homo sapiens
cacactgaggggacagtctggaggcttgcagtgactcagacacagccaattcctcccctaatagcactgaatcacggttccagcggccagtggtcgcccctcgtcaaggtctaaggctgctgcagccccggctcccggaggccgtttccgcgcgcacacgcgcatccatacgtacagacgtgctcgggatgcgggtcccgccggcgggtacctgggcactgcgccccatctggactgaaatggggacaccccttcgggggtcccaggctcctggccgtattgttctccttctcctcgtgataactccgcagtggaggtggattccgtccaagacgcccaacgtggctccgcgtagcaatcagcgctgcaatcctggcggttacctcagcggcggcgtctctctctgcgcctcacactcgcagcccgcggccctccccaacttagggcgtttacaaaagaaactactccagacgcgctgcaaagggaggcgcatgtgcccgaaagctggcgatcagacgggggggggcattctgcatgtgtgatgtttctgggggcggtggggagtgtgtgtcggggtcggggggcgggggggagtcaggcagaaggacagggacaacctccgctatgaaggatccgcgagtcctcaaatgtaagctccgtgtgactaacgacctgcactgatttggagagcgggcatgttaaaggtcacggacaattgttgctggcttcagcatgaatgcctaagtgggatgtattcttcagcaatcatgtttaagtctgattcaccgaaaagtattgacgtgcccaccattcatttcagtacactgtgaaaatgcacaaagaaagtatccccaaattcagttaattacaaagccgtaaatgtccttgtatacacatattattacatacatgtaggtaacaacaaagattaaaatttgaagacactttaatagctttttggtaggattttggaatgaatatcagtcctgtaaacctacgttcatctgcattcttgggtctattttaaagtacaaacttgcgctaacaatttccatgtgttgaaaatggacaaggtagatcattgaatggtgatcaagacttccaaacccctccacataaaactgttcatgacttgcttcctttttctagccggtttagggccctgtcttaagtcacccacatgtgatttcactcagggcattgtctgtctacaataatattgtgcttttaaaccatttcctttcttacacgtttatctacagtgcatgcgaaatctgagagcgtaatttgatggatgggcaaagagttaagtcctggtgtctggtgtggcagacctagaaaatggcagctggagggccagcatcattttgttactgacaattgaaacgtgttcacattgattgtacacaagtcactggtggttgttcatttgtcaatgcactattcctagctcactccacacacacaaaaaaggtataaaaatcaaatgtttaatacaagtttccatactattcctgtaaccatatttagcattgccaacatttcaactgttttaatagcttcaaacacttaaagtaaccattagggattaagggcaccgtttgcccctggaatggcccaggagagcttctcctattttgaaaggtttacgtaaattatagtatttggatggagcaaagtcagcagtattaatggttgaatattaatggttgattttggctacttgttttattttagtgatatgtgatattttacacatgtatggggtacgtgtatttgttacaagcgtagaatgtgtaatgatcaagtcggggcacttagggtactcatcagctggggtatttattgtttctatgcgttgggaacatttcaagttctgtcttctatctattttgaaatacacaatccattgttattaactgtagtcactgtagtctgctatcaaatattagaactactccttctatctaactgtatgtttgtacccattcactaacttcattcccccccaccctctatttataattttataacagacaataattttggttaatgaaataaatgggggaaagaaagc

SEQ ID NO: 10463 - protein, 117 aa, Homo sapiens
MRVPPAGTWALRPIWTEMGTPLRGSQAPGRIVLLLLVITPQWRWIPSKTPNVAPRSNQRCNPGGYLSGGVSLCASHSQPAALPNLGRLQKKLLQTRCKGRRMCPKAGDQTGGGILHV

SEQ ID NO: 10464 - DNA, 2639 bp, Homo sapiens
gcagccacaaaatggcggcgggtgggagcggcgggcgtgcgtcgtgcccgccgggggtcggggtcggcccgggcacggggggcagtcccgggcccagcgccaacgccgccgccaccccggcccccggcaacgcggccgccgccgccgccgccgccgccgccgccgccgccgcccctgggccgacgccgcccgccccgccgggccccgggacagacgcgcaggccgcgggcgcggagcgggcggaggaggcggcgggcccgggggcggcggcgctgcagcgcgaggccgcgtacaactggcaggccagcaagcccaccgtgcaggagcgcttcgccttcctcttcaacaacgaggtgctgtgcgacgtgcacttcctggtgggcaaggggctcagctcgcagcgcatccccgcgcacaggttcgtgctggccgtgggcagcgccgtctttgatgccatgttcaacgggggaatggccacaacatccacggagattgagctgcccgacgtggaacccgctgccttcctcgcactgctcaagtttctctactcggacgaggtgcagattggcccggagacggtgatgaccacgctatacaccgccaagaagtacgcggtgccagcgctcgaggcccattgcgtggagttcctgaagaagaacctgcgagccgacaacgccttcatgctgctcacgcaggcgcgactcttcgatgaaccgcagctggccagcctgtgcctggagaacatcgacaaaaacactgcagacgccatcaccgcggagggcttcaccgacattgacctggacacgctggtggctgtcctggagcgcgacacactgggcatccgtgaggtgcggctgttcaatgccgttgtccgctggtccgaggccgagtgtcagcggcagcagctgcaggtgacgccagagaacaggcggaaggttctgggcaaggccctgggcctcattcgcttcccgctcatgaccatcgaggagttcgctgcaggtcccgcacagtcgggcatcctggtggaccgcgaggtggtcagcctcttcctgcacttcaccgtcaaccccaagccacgagtggagttcattgaccggccccgctgctgcctgcgtgggaaggagtgcagcatcaaccgcttccagcaggtggagagtcgctggggctacagcgggaccagtgaccgcatcaggttctcagtcaacaagcgcatcttcgtggtgggatttgggctgtatggatccatccacgggcccaccgactaccaagtgaacatccagattattcacaccgatagcaacaccgtcttgggccagaacgacacgggcttcagctgcgacggctcagccagcaccttccgcgtcatgttcaaggagccggtggaggtgctgcccaacgtcaactacacggcctgtgccacgctcaagggcccagactcccactacggcaccaaaggcctgcgcaaggtgacacacgagtcgcccaccacgggcgccaagacctgcttcaccttttgctacgcggccgggaacaacaatggcacatccgtggaggacggccagatccccgaggtcatcttctacacctaggctgcccgacaccgacaccgccctccctccgtggggatagccgcagccccaggccatcatctgctgctggggcccccccaccacgcggtgccaggcccagtgtcccccaggccgtctgtccactccatgccacctttctcagcatcaggacggggttgccctgtgttcaccacgagtgtggctgctggatcagggcagccggggaggtggccaggccagtggccaggccctgtggagacaatccctcaggactagggacagggctgtgccggcctgggccagggcccacggacccgcagctcagggcgcctgcccacgtcgtctgccggcggtgcgccgcgggcgtccctcgcgtctcttcactgcacattgcaatgcatttgcgattcccatttctctgctaggagccagcctgggtggcgctgctcccagagccgtgggtcccagaccttgcgttccttttgttcctgtccgtttatcaggacacgggccccacctgtcacgtgcccgaggccacccaagcccagcctgcggggcgttcccactgcctggatgccggcttgagttctgcgcacgcaggattcagtgtggggacggcccctgccggataggcctagccctggcccaggtggtgagcggtttgcagtgtccgttctcatccacctgatgggcccagataaaggcccccgctgtccagcctccctggacggccctcgcggtccctgcagcccaagatgggactcagaccctgtgccccagagctcccctgccgcagaatggggccccagccggccccgaccgggtccaggagcactgctcgcctgtacatactgttgccctagcccacctggtgccgtgggagccacccccaggtgctgggggcacagcccctccccactccggccacgcccccacccaccccgcgtgtttctgccctgtgactcctggaacctgcgtcctccccaaagccatgggaggggtgtcctcctcagaccatgcccccagatgatttttttaaataaagaaacaaatgcacctgccttgagcgca

SEQ ID NO: 10465 - protein, 525 aa, Homo sapiens; identical to SEQ ID NO: 1765

SEQ ID NO: 10466 - DNA, 2641 bp, Homo sapiens
tcagcgaggaggctagcatctacgacaagcgctgcgacctaacatgctgtttgagagcatccaggagggcaagtacgagttccccgacaaggactgggcccacatctcctgcgctgccaaagacctcatctccaagctgctggtccgtgacgccaagcagaggctgagtgccgcccaagtcctgcagcacccctgggttcaggggtgcgccccggagaacaccttgcccactcccatggtcctgcagaggaacagctgtgccaaagacctcacgtccttcgcggctgaggccattgccatgaaccggcagctggcccagcacgacgaggacctggctgaggaggaggccgcggggcagggccagcccgtcctggtccgagctacctcacgctgcctgcagctgtctccaccctcccagtccaagctggcgcagcggcggcaaagggccagtctgtcctcggccccagtggtcctggtgggagaccacgcctgaccctcccatctcccctctgtacataggtcacccgtcccccaatcaaatctaaaggttttttaagctatcgccagccggtgtccagcgggctgcccctcctctgcctggattcccaggcactaagctcagctgaggggggtgttttatagaaggtttttgcttttgggttttttttttcctgtttccacccctccccgttattttttcctttggatggttaaaagcattgcaggcacccgggaaggtgagcagagggtaggtgggtgggcttgtcccctccccggtcccccgccctgctcacctctactatgaaggtgcccccaggtcacctgtgctgcccgccatctgcccacgtggcttgcagtgactcaggagagcaggcccacagcgtttgccatcttgcagagctggggaggggcacaggaccctgccctcgtgttccctcccagcccgcagtatttcagggacaggctcttcccctctatccctcaccctgagagcacccctggtggcttggttggggaagggaggggctgcctgtctctggaggtgtcaggcaggcaggtggcaggcagctcacccacccaccccatgggatcccccagcccttcacccgcgcctgccttgtccccatgatagttgacaatcggggcttcctgcaaggcccgtctgtctgtccaggactcctggtggccagattcggcctccgaccttgaccttaaactgcagctgaccccaggggctcgccgctgcccctcccctccacaccaaggcctgagacagcaggagccccgcctggcccgaagccgtttccaccgcagcaggcagaggggctggacaggcactgtcagccaatgtggggggtcctgaagacacccccttggggcacccgagtgccccttctcagggctcagtctgaccgtagccacgtcctgcctcgcgccgcccctcgggcctgacctggaagctccgtcagctccgtccttgtccttagagctgagcccagaccccggggtctggccgaatcctcacccccagggcagtgtttttggtctgccaccttcaggaaaacggctgcggcctcggcctcccttcgggcacccaggaatgcgggggtctgctcagtccccccaccctccatgctccaacccccgggggctgcggagcctgctgccccctccccgcgggtggggacgttctatgcaatacagggttccactttagaagtgcgcgcggctagggtcaccgcccgcccttcccggcgcagcccccgagctccacagctggggcagcccctctggcttctaaatccgcggtcgggattcttcctcctgtttagttttttagtttttccttaaaaaaaaacaacacatcgatggactttgcttccctgttcttgaagaatacttgaatgtcggggggcctgggggtgggggcctcggagaccgtctgcctggccctgctgcccctcctgaatctcgtatgatggtcacagtccggtggccgtgggggtgctctgccttccctggtccccactgcccatatctgtggactgccccttccaaagacccctggggggggtggggcattccgcccacccctttcccccatcacttctcgcctgtcagtgattccatgtttcgtaacgggggattctctgcctttttgtatcaaagaacaagcaaatggacccccgcccgctgcaggcgcccatagccatcgggtctctaaagctgagtggctagcagcgtttgtttgtttgtttttttttttttttctgaaggtgggacagtcacttcctcctccctccccacccctgtcgcatccacgtgcgacctggaggactggtcagaaccgttactgtgaatgagtgaagatcctggaggaccctgggccccaggccagctcccatcgctgggggacggtgaacggccatgtgttaatgttacgatgtttttaaaagacaaaaaaaaaaaaaaaacctcaaaagtttttttaaagtgggggaaaaacatccaagcactttaattccaatgtaccaggtgaactgacggagctcagaagttttcctttacaccaactgtcaatgccggaattttgtattctgttttgtaaagatttaataaaagtcaaaaaacttgctgtgtg

SEQ ID NO: 10467 - protein, 149 aa, Homo sapiens
MLFESIQEGKYEFPDKDWAHISCAAKDLISKLLVRDAKQRLSAAQVLQHPWVQGCAPENTLPTPMVLQRNSCAKDLTSFAAEAIAMNRQLAQHDEDLAEEEAAGQGQPVLVRATSRCLQLSPPSQSKLAQRRQRASLSSAPVVLVGDHA

SEQ ID NO: 10468 - DNA, 3121 bp, Homo sapiens
acgtaatgctgggaaaccccggctgacgcgcccctcccccgcccgcagtgcggctcggcggagtacatggccccggaggtagtggaggccttcagcgaggaggctagcatctacgacaagcgctgcgacctgtggagcctgggcgtcatcttgtatatcctactcagcggctacccgcccttcgtgggccgctgtggcagcgactgcggctgggaccgcggcgaggcctgccctgcctgccagaacatgctgtttgagagcatccaggagggcaagtacgagttccccgacaaggactgggcccacatctcctgcgctgccaaagacctcatctccaagctgctggtccgtgacgccaagcagaggctgagtgccgcccaagtcctgcagcacccctgggttcaggggtgcgccccggagaacaccttgcccactcccatggtcctgcagaggtaaggcccgcaggggtgctcgggacccctgagtccagggggcggggtttccaggttaagacatttgtgaaagacccggagaactgctttggggtcggggaggcaggcaagcctggtgactcagtgaagctcccggtggggccctggtgctcagaggagccccagggtgggggctgggaggggggcatgaagccccttcccccagggccttcacagaccccaggggtcccctgaggggtgcctcttggtgaccacctacccccaccccgtttcccaggaacagctgtgccaaagacctcacgtccttcgcggctgaggccattgccatgaaccggcagctggcccagcacgacgaggacctggctgaggaggaggccgcggggcagggccagcccgtcctggtccgagctacctcacgctgcctgcagctgtctccaccctcccagtccaagctggcgcagcggcggcaaagggccagtctgtcctcggccccagtggtcctggtgggagaccacgcctgaccctcccatctcccctctgtacataggtcacccgtcccccaatcaaatctaaaggttttttaagctatcgccagccggtgtccagcgggctgcccctcctctgcctggattcccaggcactaagctcagctgaggggggtgttttatagaaggtttttgcttttgggttttttttttcctgtttccacccctccccgttattttttcctttggatggttaaaagcattgcaggcacccgggaaggtgagcagagggtaggtgggtgggcttgtcccctccccggtcccccgccctgctcacctctactatgaaggtgcccccaggtcacctgtgctgcccgccatctgcccacgtggcttgcagtgactcaggagagcaggcccacagcgtttgccatcttgcagagctggggaggggcacaggaccctgccctcgtgttccctcccagcccgcagtatttcagggacaggctcttcccctctatccctcaccctgagagcacccctggtggcttggttggggaagggaggggctgcctgtctctggaggtgtcaggcaggcaggtggcaggcagctcacccacccaccccatgggatcccccagcccttcacccgcgcctgccttgtccccatgatagttgacaatcggggcttcctgcaaggcccgtctgtctgtccaggactcctggtggccagattcggcctccgaccttgaccttaaactgcagctgaccccaggggctcgccgctgcccctcccctccacaccaaggcctgagacagcaggagccccgcctggcccgaagccgtttccaccgcagcaggcagaggggctggacaggcactgtcagccaatgtggggggtcctgaagacacccccttggggcacccgagtgccccttctcagggctcagtctgaccgtagccacgtcctgcctcgcgccgcccctcgggcctgacctggaagctccgtcagctccgtccttgtccttagagctgagcccagaccccggggtctggccgaatcctcacccccagggcagtgtttttggtctgccaccttcaggaaaacggctgcggcctcggcctcccttcgggcacccaggaatgcgggggtctgctcagtccccccaccctccatgctccaacccccgggggctgcggagcctgctgccccctccccgcgggtggggacgttctatgcaatacagggttccactttagaagtgcgcgcggctagggtcaccgcccgcccttcccggcgcagcccccgagctccacagctggggcagcccctctggcttctaaatccgcggtcgggattcttcctcctgtttagttttttagtttttccttaaaaaaaaacaacacatcgatggactttgcttccctgttcttgaagaatacttgaatgtcggggggcctgggggtgggggcctcggagaccgtctgcctggccctgctgcccctcctgaatctcgtatgatggtcacagtccggtggccgtgggggtgctctgccttccctggtccccactgcccatatctgtggactgccccttccaaagacccctggggggggtggggcattccgcccacccctttcccccatcacttctcgcctgtcagtgattccatgtttcgtaacgggggattctctgcctttttgtatcaaagaacaagcaaatggacccccgcccgctgcaggcgcccatagccatcgggtctctaaagctgagtggctagcagcgtttgtttgtttgtttttttttttttttctgaaggtgggacagtcacttcctcctccctccccacccctgtcgcatccacgtgcgacctggaggactggtcagaaccgttactgtgaatgagtgaagatcctggaggaccctgggccccaggccagctcccatcgctgggggacggtgaacggccatgtgttaatgttacgatgtttttaaaagacaaaaaaaaaaaaaaaacctcaaaagtttttttaaagtgggggaaaaacatccaagcactttaattccaatgtaccaggtgaactgacggagctcagaagttttcctttacaccaactgtcaatgccggaattttgtattctgttttgtaaagatttaataaaagtcaaaaaacttgctgtgtg

SEQ ID NO: 10469 - protein, 129 aa, Homo sapiens
MAPEVVEAFSEEASIYDKRCDLWSLGVILYILLSGYPPFVGRCGSDCGWDRGEACPACQNMLFESIQEGKYEFPDKDWAHISCAAKDLISKLLVRDAKQRLSAAQVLQHPWVQGCAPENTLPTPMVLQR

SEQ ID NO: 10470 - DNA, 875 bp, Homo sapiens
ggggcggggtccgagccggctggcgcaggtgacccgcagttacccgggctcggttcccacgtaatgctgggaaaccccggctgacgcgcccctcccccgcccgcagtgcggctcggcggagtacatggccccggaggtagtggaggccttcagcgaggaggctagcatctacgacaagcgctgcgacctgtggagcctgggcgtcatcttgtatatcctactcagcggctacccgcccttcgtgggccgctgtggcagcgactgcggctgggaccgcggcgaggcctgccctgcctgccagaacatgctgtttgagagcatccaggagggcaagtacgagttccccgacaaggactgggcccacatctcctgcgctgccaaagacctcatctccaagctgctggtccgtgacgccaagcagaggctgagtgccgcccaagtcctgcagcacccctgggttcaggggtgcgccccggagaacaccttgcccactcccatggtcctgcagaggtgggacagtcacttcctcctccctccccacccctgtcgcatccacgtgcgacctggaggactggtcagaaccgttactgtgaatgagtgaagatcctggaggaccctgggccccaggccagctcccatcgctgggggacggtgaacggccatgtgttaatgttacgatgtttttaaaagacaaaaaaaaaaaaaaaacctcaaaagtttttttaaagtgggggaaaaacatccaagcactttaattccaatgtaccaggtgaactgacggagctcagaagttttcctttacaccaactgtcaatgccggaattttgtattctgttttgtaaagatttaataaaagtcaaaaaacttgctgtgtg

SEQ ID NO: 10471 - protein, 158 aa, Homo sapiens
MAPEVVEAFSEEASIYDKRCDLWSLGVILYILLSGYPPFVGRCGSDCGWDRGEACPACQNMLFESIQEGKYEFPDKDWAHISCAAKDLISKLLVRDAKQRLSAAQVLQHPWVQGCAPENTLPTPMVLQRWDSHFLLPPHPCRIHVRPGGLVRTVTVNE

SEQ ID NO: 10472 - DNA, 476 bp, Homo sapiens
agatcattgagaagcagccaggccacattcggagcagggttttcagggaggtggagatgctctgagtggctagcagcgtttgtttgtttgtttttttttttttttctgaaggtgggacagtcacttcctcctccctccccacccctgtcgcatccacgtgcgacctggaggactggtcagaaccgttactgtgaatgagtgaagatcctggaggaccctgggccccaggccagctcccatcgctgggggacggtgaacggccatgtgttaatgttacgatgtttttaaaagacaaaaaaaaaaaaaaaacctcaaaagtttttttaaagtgggggaaaaacatccaagcactttaattccaatgtaccaggtgaactgacggagctcagaagttttcctttacaccaactgtcaatgccggaattttgtattctgttttgtaaagatttaataaaagtcaaaaaacttgctgtgtg

SEQ ID NO: 10473 - protein, 53 aa, Homo sapiens
MSEDPGGPWAPGQLPSLGDGERPCVNVTMFLKDKKKKKTSKVFLKWGKNIQAL

SEQ ID NO: 10474 - DNA, 3783 bp, Homo sapiens
ctcagcggcggtggcccaggtagaggggtccgcgctggcggcggcggcggcgctgttccccgcgcggtccgcggagcggggtccgggctgcgcgacgtggggcggcggcggcactgcggccccggcccaagcccgaccccgggtcccctcctcggccgccccccgcccggccgcccgccctcgggcctccccccgggccctcggtcccctcccccgctggcggggcccggacagaagatggtgcagaagaaaccagccgaacttcagggtttccaccgttcgttcaaggggcagaaccccttcgagctggccttctccctagaccagcccgaccacggagactctgactttggcctgcagtgctcagcccgccctgacatgcccgccagccagcccattgacatcccggacgccaagaagaggggcaagaagaagaagcgcggccgggccaccgacagcttctcgggcaggtttgaagacgtctaccagctgcaggaagatgtgctgggggagggcgctcatgcccgagtgcagacctgcatcaacctgatcaccagccaggagtacgccgtcaagatcattgagaagcagccaggccacattcggagcagggttttcagggaggtggagatgctgtaccagtgccagggacacaggaacgtcctagagctgattgagttcttcgaggaggaggaccgcttctacctggtgtttgagaagatgcggggaggctccatcctgagccacatccacaagcgccggcacttcaacgagctggaggccagcgtggtggtgcaggacgtggccagcgccttggactttctgcataacaaaggcatcgcccacagggacctaaagccggaaaacatcctctgtgagcaccccaaccaggtctcccccgtgaagatctgtgacttcgacctgggcagcggcatcaaactcaacggggactgctcccctatctccaccccggagctgctcactccgtgcggctcggcggagtacatggccccggaggtagtggaggccttcagcgaggaggctagcatctacgacaagcgctgcgacctgtggagcctgggcgtcatcttgtatatcctactcagcggctacccgcccttcgtgggccgctgtggcagcgactgcggctgggaccgcggcgaggcctgccctgcctgccagaacatgctgtttgagagcatccaggagggcaagtacgagttccccgacaaggactgggcccacatctcctgcgctgccaaagacctcatctccaagctgctggtccgtgacgccaagcagaggctgagtgccgcccaagtcctgcagcacccctgggttcaggggtgcgccccggagaacaccttgcccactcccatggtcctgcagaggaacagctgtgccaaagacctcacgtccttcgcggctgaggccattgccatgaaccggcagctggcccagcacgacgaggacctggctgaggaggaggccgcggggcagggccagcccgtcctggtccgagctacctcacgctgcctgcagctgtctccaccctcccagtccaagctggcgcagcggcggcaaagggccagtctgtcctcggccccagtggtcctggtgggagaccacgcctgaccctcccatctcccctctgtacataggtcacccgtcccccaatcaaatctaaaggttttttaagctatcgccagccggtgtccagcgggctgcccctcctctgcctggattcccaggcactaagctcagctgaggggggtgttttatagaaggtttttgcttttgggttttttttttcctgtttccacccctccccgttattttttcctttggatggttaaaagcattgcaggcacccgggaaggtgagcagagggtaggtgggtgggcttgtcccctccccggtcccccgccctgctcacctctactatgaaggtgcccccaggtcacctgtgctgcccgccatctgcccacgtggcttgcagtgactcaggagagcaggcccacagcgtttgccatcttgcagagctggggaggggcacaggaccctgccctcgtgttccctcccagcccgcagtatttcagggacaggctcttcccctctatccctcaccctgagagcacccctggtggcttggttggggaagggaggggctgcctgtctctggaggtgtcaggcaggcaggtggcaggcagctcacccacccaccccatgggatcccccagcccttcacccgcgcctgccttgtccccatgatagttgacaatcggggcttcctgcaaggcccgtctgtctgtccaggactcctggtggccagattcggcctccgaccttgaccttaaactgcagctgaccccaggggctcgccgctgcccctcccctccacaccaaggcctgagacagcaggagccccgcctggcccgaagccgtttccaccgcagcaggcagaggggctggacaggcactgtcagccaatgtggggggtcctgaagacacccccttggggcacccgagtgccccttctcagggctcagtctgaccgtagccacgtcctgcctcgcgccgcccctcgggcctgacctggaagctccgtcagctccgtccttgtccttagagctgagcccagaccccggggtctggccgaatcctcacccccagggcagtgtttttggtctgccaccttcaggaaaacggctgcggcctcggcctcccttcgggcacccaggaatgcgggggtctgctcagtccccccaccctccatgctccaacccccgggggctgcggagcctgctgccccctccccgcgggtggggacgttctatgcaatacagggttccactttagaagtgcgcgcggctagggtcaccgcccgcccttcccggcgcagcccccgagctccacagctggggcagcccctctggcttctaaatccgcggtcgggattcttcctcctgtttagttttttagtttttccttaaaaaaaaacaacacatcgatggactttgcttccctgttcttgaagaatacttgaatgtcggggggcctgggggtgggggcctcggagaccgtctgcctggccctgctgcccctcctgaatctcgtatgatggtcacagtccggtggccgtgggggtgctctgccttccctggtccccactgcccatatctgtggactgccccttccaaagacccctggggggggtggggcattccgcccacccctttcccccatcacttctcgcctgtcagtgattccatgtttcgtaacgggggattctctgcctttttgtatcaaagaacaagcaaatggacccccgcccgctgcaggcgcccatagccatcgggtctctaaagctgagtggctagcagcgtttgtttgtttgtttttttttttttttctgaaggtgggacagtcacttcctcctccctccccacccctgtcgcatccacgtgcgacctggaggactggtcagaaccgttactgtgaatgagtgaagatcctggaggaccctgggccccaggccagctcccatcgctgggggacggtgaacggccatgtgttaatgttacgatgtttttaaaagacaaaaaaaaaaaaaaaacctcaaaagtttttttaaagtgggggaaaaacatccaagcactttaattccaatgtaccaggtgaactgacggagctcagaagttttcctttacaccaactgtcaatgccggaattttgtattctgttttgtaaagatttaataaaagtcaaaaaacttgctgtgtg

SEQ ID NO: 10475 - protein, 465 aa, Homo sapiens; identical to SEQ ID NO: 1769

SEQ ID NO: 10476 - DNA, 1756 bp, Homo sapiens
ctcagcggcggtggcccaggtagaggggtccgcgctggcggcggcggcggcgctgttccccgcgcggtccgcggagcggggtccgggctgcgcgacgtggggcggcggcggcactgcggccccggcccaagcccgaccccgggtcccctcctcggccgccccccgcccggccgcccgccctcgggcctccccccgggccctcggtcccctcccccgctggcggggcccggacagaagatggtgcagaagaaaccagccgaacttcagggtttccaccgttcgttcaaggggcagaaccccttcgagctggccttctccctagaccagcccgaccacggagactctgactttggcctgcagtgctcagcccgccctgacatgcccgccagccagcccattgacatcccggacgccaagaagaggggcaagaagaagaagcgcggccgggccaccgacagcttctcgggcaggtttgaagacgtctaccagctgcaggaagatgtgctgggggagggcgctcatgcccgagtgcagacctgcatcaacctgatcaccagccaggagtacgccgtcaagatcattgagaagcagccaggccacattcggagcagggttttcagggaggtggagatgctgtaccagtgccagggacacaggaacgtcctagagctgattgagttcttcgaggaggaggaccgcttctacctggtgtttgagaagatgcggggaggctccatcctgagccacatccacaagcgccggcacttcaacgagctggaggccagcgtggtggtgcaggacgtggccagcgccttggactttctgcataacaaaggcatcgcccacagggacctaaagccggaaaacatcctctgtgagcaccccaaccaggtctcccccgtgaagatctgtgacttcgacctgggcagcggcatcaaactcaacggggactgctcccctatctccaccccggagctgctcactccgtgcggctcggcggagtacatggccccggaggtagtggaggccttcagcgaggaggctagcatctacgacaagcgctgcgacctgtggagcctgggcgtcatcttgtatatcctactcagcggctacccgcccttcgtgggccgctgtggcagcgactgcggctgggaccgcggcgaggcctgccctgcctgccagaacatgctgtttgagagcatccaggagggcaagtacgagttccccgacaaggactgggcccacatctcctgcgctgccaaagacctcatctccaagctgctggtccgtgacgccaagcagaggctgagtgccgcccaagtcctgcagcacccctgggttcaggggtgcgccccggagaacaccttgcccactcccatggtcctgcagaggtgggacagtcacttcctcctccctccccacccctgtcgcatccacgtgcgacctggaggactggtcagaaccgttactgtgaatgagtgaagatcctggaggaccctgggccccaggccagctcccatcgctgggggacggtgaacggccatgtgttaatgttacgatgtttttaaaagacaaaaaaaaaaaaaaaacctcaaaagtttttttaaagtgggggaaaaacatccaagcactttaattccaatgtaccaggtgaactgacggagctcagaagttttcctttacaccaactgtcaatgccggaattttgtattctgttttgtaaagatttaataaaagtcaaaaaacttgctgtgtg

SEQ ID NO: 10477 - protein, 414 aa, Homo sapiens; identical to SEQ ID NO: 1767

SEQ ID NO: 10478 - DNA, 1039 bp, Homo sapiens
aaggtttttgcttttgggttttttttttcctgtttccacccctccccgttattttttcctttggatggttaaaagcattgcaggcacccgggaaggtgagcagagggtaggtgggtgggcttgtcccctccccggtcccccgccctgctcacctctactatgaaggtgcccccaggtcacctgtgctgcccgccatctgcccacgtggcttgcagtgactcaggagagcaggcccacagcgtttgccatcttgcagagctggggaggggcacaggaccctgccctcgtgttccctcccagcccgcagtatttcagggacaggctcttcccctctatccctcaccctgagagcacccctggtggcttggttggggaagggaggggctgcctgtctctggaggtgtcaggcaggcaggtggcaggcagctcacccacccaccccatgggatcccccagcccttcacccgcgcctgccttgtccccatgatagttgacaatcggggcttcctgcaaggcccgtctgtctgtccaggactcctggtggccagattcggcctccgaccttgaccttaaactgcagctgaccccaggggctcgccgctgcccctcccctccacaccaaggcctgagacagcaggagccccgcctggcccgaagccgtttccaccgcagcaggcagaggggctggacaggcactgtcagccaatgtggggggtcctgaagacacccccttggggcacccgagtgccccttctcagggctcagtctgaccgtagccacgtcctgcctcgcgccgcccctcgggcctgacctggaagctccgtcagggccatgtgttaatgttacgatgtttttaaaagacaaaaaaaaaaaaaaaacctcaaaagtttttttaaagtgggggaaaaacatccaagcactttaattccaatgtaccaggtgaactgacggagctcagaagttttcctttacaccaactgtcaatgccggaattttgtattctgttttgtaaagatttaataaaagtcaaaaaacttgc

SEQ ID NO: 10479 - protein, 62 aa, Homo sapiens
MKVPPGHLCCPPSAHVACSDSGEQAHSVCHLAELGRGTGPCPRVPSQPAVFQGQALPLYPSP

SEQ ID NO: 10480 - DNA, 780 bp, Homo sapiens
catggtcctgcagaggtaaggcccgcaggggtgctcgggacccctgagtccagggggcggggtttccaggttaagacatttgtgaaagacccggagaactgctttggggtcggggaggcaggcaagcctggtgactcagtgaagctcccggtggggccctggtgctcagaggagccccagggtgggggctgggaggggggcatgaagccccttcccccagggccttcacagaccccaggggtcccctgaggggtgcctcttggtgaccacctacccccaccccgtttcccaggaacagctgtgccaaagacctcacgtccttcgcggctgaggccattgccatgaaccggcagctggcccagcacgacgaggacctggctgaggaggaggccgcggggcagggccagcccgtcctggtccgagctacctcacgctgcctgcagctgtctccaccctcccagtccaagctggcgcagcggcggcaaagggccagtctgtcctcggccccagtggtcctggtgggagaccacgcctgaccctcccatctcccctctgtacataggtgaacggccatgtgttaatgttacgatgtttttaaaagacaaaaaaaaaaaaaaaacctcaaaagtttttttaaagtgggggaaaaacatccaagcactttaattccaatgtaccaggtgaactgacggagctcagaagttttcctttacaccaactgtcaatgccggaattttgtattctgttttgtaaagatttaataaaagtcaaaaaacttgc

SEQ ID NO: 10481 - protein, 64 aa, Homo sapiens [sequence omitted]

SEQ ID NO: 10482 - DNA, 930 bp, Homo sapiens
ggggacccgaggaccacctcaagaggctgctacgtgatgtgaacccacactcctcatccacacacctttctttacccagagccactgaaaactatttttatatcattggctttctttagttcttgatacatttctagagaatttctaagcgaactgccagaacgtgtgggtgggtctcccccagccctccctcctggcgggtctcctccagcctcacttcgctgccacttcgccgctgccccggagacttttcaatcccaccccactcctcatctcaccatttggtcaaattggaagcccagggccaggacccggaggtttagaagatgcttgggcttggagggaggagggccggcgaggctagcgaggggacaggagacggccctgctgcggacggagcgcggaaactgcgtaggaattcagtggtggtgggtttttttaaggctttctacaaaaccaaattcagaatccaggcgtcgacctggtggggcccggggccaagcctgcattctggctgcccagcttcggacagcgggaactcctcaggcagccacgcagcgggtgtgggccagcatggggatggcgtggcccccagggcgggttttcactccgctgcctgggcttccagattcccgttctggcagcgcaccggccgggtttctcggaccgttgactttatttgggggagttttcccgcagttcagttcctgaggtgaacggccatgtgttaatgttacgatgtttttaaaagacaaaaaaaaaaaaaaaacctcaaaagtttttttaaagtgggggaaaaacatccaagcactttaattccaatgtaccaggtgaactgacggagctcagaagttttcctttacaccaactgtcaatgccggaattttgtattctgttttgtaaagatttaataaaagtcaaaaaacttgc

SEQ ID NO: 10483 - protein, 129 aa, Homo sapiens [sequence omitted]

SEQ ID NO: 10484 - DNA, 1135 bp, Homo sapiens
aatgctgggaaaccccggctgacgcgcccctcccccgcccgcagtgcggctcggcggagtacatggccccggaggtagtggaggccttcagcgaggaggctagcatctacgacaagcgctgcgacctgtggagcctgggcgtcatcttgtatatcctactcagcggctacccgcccttcgtgggccgctgtggcagcgactgcggctgggaccgcggcgaggcctgccctgcctgccagaacatgctgtttgagagcatccaggagggcaagtacgagttccccgacaaggactgggcccacatctcctgcgctgccaaagacctcatctccaagctgctggtccgtgacgccaagcagaggctgagtgccgcccaagtcctgcagcacccctgggttcagggggtgagtaccagccgcacgggcggcaggaggggtatgggggcgctgcagggtggcctcagagcgagcatgggaagccctgagggtgtagcctggacaccctgagatgcactgaggcttgagagcacaggctctgccctgggatgaggggtgcagccgaaatccccaccgcccgcctgtgcacggtgcccgctggccagccaggcggctcccaggagcagctactcagagaaccttcctggagggtggtggggacccacagcctgcagcaggctggagcgaagcgggcagcgagcccagctcacatagaccccagcctagcctgccgtcagtctcaagcccaggctgtgcctccacccttccctgtgtggcctccagtcgaggaggagtcgggtgtttctcctgccagaggtcatctgagctgagctgccaccccagggagtgaggatttactaaaaatagaagctggggtcactctgtgtccccaggcgaggggctgggggcctccaatctccttgcagaagcatccagagacccatgggttaagaggggggcggaggtgggtttgggctgggaacagccgggagagatggggcttggggctctgcccccaccctcactgggtcctgtaacaccaggcctcagcctggcccagcctcgggttccctgggcagggggacatggagcctcaccatagggacctcggggtgggcgcttggctcccggggcaccca

SEQ ID NO: 10485 - protein, 147 aa, Homo sapiens
MAPEVVEAFSEEASIYDKRCDLWSLGVILYILLSGYPPFVGRCGSDCGWDRGEACPACQNMLFESIQEGKYEFPDKDWAHISCAAKDLISKLLVRDAKQRLSAAQVLQHPWVQGVSTSRTGGRRGMGALQGGLRASMGSPEGVAWTP

SEQ ID NO: 10486 - DNA, 349 bp, Homo sapiens
cggctcctctcagcggcggtggcccagggtcccctcctcggccgccccccgcccggccgcccgccctcgggcctccccccgggccctcggtcccctcccccgctggcggggcccggacagaagatggtgcagaagaaaccagccgaacttcagggtttccaccgttcgttcaaggggcagaaccccttcgagctggccttctccctagaccagcccgaccacggagactctgactttggcctgcagtgctcagcccgccctggtgaggggcccgagggggaggagggcacagggcagctgctgtcgctgccatggcagtggccagcccctgcaggggggtgggggccgg

SEQ ID NO: 10487 - protein, 74 aa, Homo sapiens
MVQKKPAELQGFHRSFKGQNPFELAFSLDQPDHGDSDFGLQCSARPGEGPEGEEGTGQLLSLPWQWPAPAGGWG

SEQ ID NO: 10488 - DNA, 436 bp, Homo sapiens
ggggtccgcgctggcggcggcggcggcgctgttccccgcgcggtccgcggagcggggtccgggctgcgcgacgtggggcggcggcggcactgcggccccggcccaagcccgaccccgggtcccctcctcggccgccccccgcccggccgcccgccctcgggcctccccccgggccctcggtcccctcccccgctggcggggcccggacagaagatggtgcagaagaaaccagccgaacttcagggtttccaccgttcgttcaaggggcagaaccccttcgagctggccttctccctagaccagcccgaccacggagactctgactttggcctgcagtgctcagcccgccctggtgaggggcccgagggggaggagggcacagggcagctgctgtcgctgccatggcagtggccagcccctgcaggggggtgggggc

SEQ ID NO: 10489 - protein, 73 aa, Homo sapiens
MVQKKPAELQGFHRSFKGQNPFELAFSLDQPDHGDSDFGLQCSARPGEGPEGEEGTGQLLSLPWQWPAPAGGW

SEQ ID NO: 10490 - DNA, 1778 bp, Homo sapiens
cttgcttgctctttacagaaagaaatgaccgcccggatgtgccactgagagccccgcgggtctcccggtgcccgaaccgccgctggggcctcggagacttggaggaggacgctctggaaccatcatcccgcttctctccggcctgagcatctcagggagaccaggggccgagccgctgagcaggtgttggtcctcaggagctccaaccccggacggcagatgccttcctcagtctcgagcctcagtctcccgtctgggactaaaacgtgaactctgtaattctatgtgttactagcaaccggaaaagcccactgtgtttttaaaccacttccactttccaggaggctggatggcttccagggtcactccttgccctgggtggctcccaggctcctggaacttctgcctccacctcgctggggagcccccagggctgctgtggccacagccctgcctgggcctgtctctcaagggcacccagcttgctcggcctcctacatgtctcccgttggggaggcaagaggctgaggggcttccgagcccctgagagcggacatctcctcccgcaggcctttactccgcactccccactggcagccgctggtgtctcttcacacagaggcacaacctggacccaggcagcctctttcctccctccccaatctcttccatttttctacagatttttttttttttggtcatactagagacaggggtctcgctgaactcctggcctccagtgatcctccatcctcggcctcccaaagtgctggaatcacaggggtgagccaccgcacccagccctctctcttcctcaatgcactctgcttcttccgttcttccgaaacattcagctgactgtatccagggcttcctggactcctgggaccccacgtcctgcaccccggcttcaagaatttttttatcgataacatagtgagctctctgcctcttcggaacgatgtccactttgcttatgatcaacccaagcaggactcttctctccctggacgcctctcccctggtctggaatcttccagttctgccagaattggcctttcccagatgctgcaaacttccagttgaacccctttttctgtgtggcccctggggctgcgagaccaaaatccatgagttctgtgtaccctagacctttggaaggtgagagcagggccctgagaaaaggcagccacctcctctccctggctgaacccctgccaccctactcctcaccagaattgtcagtggcctttcaccacagtggtccttcctgcctgagccctgcactgtcccagaccacacagaagtctggtcacctctgggcgcctgggatggtcaccgaagagaagcacgctgtccccgtctctcctggcttctgccagaaaatcgaacaagtgcaattaacacactgttactgccgaagcctgaaactcccaggacttgtccttgatccttccagaaaccaccaggtccggcacttggagccccccggagagggacctcccagccgagccctcaaagaactccatgaaatcaggaactgcttgatgaaatgtatctccttgtacctggaagatgaagcccaaacacccacacctctgtctcccccagggctcgggatgtctccagcagcccggccacgcagcttcccaggtgggctcggggaggtgggagcagggaccatctctgtcccctccaccctcactccatccacctcggagaccaccctcccccagccagatacggaataaaactacagacgcagacgtcggaataaa

SEQ ID NO: 10491 - protein, 39 aa, Homo sapiens
MHSASSVLPKHSADCIQGFLDSWDPTSCTPASRIFLSIT

SEQ ID NO: 10492 - DNA, 2572 bp, Homo sapiens
gtcatttcacctttcatttctctagaagtttccaagggtcacttgtgtctcgtccgtgggaagaccgggggagcccagaaggccttggtgtggaattctgagagctgattcctgccttgtcttctccactgttcctggaggaatccgagaagagcagagcggagggagccccagacacgaaagaaatgaccgcccggatgtgccactgagagccccgcgggtctcccggtgcccgaaccgccgctggggcctcggagacttggaggaggacgctctggaaccatcatcccgcttctctccggcctgagcatctcagggagaccaggggccgagccgctgagcaggtgttggtcctcaggagctccaaccccggacggcagatgccttcctcagtctcgagcctcagtctcccgtctgggactaaaacgtgaactctgtaattctatgtgttactagcaaccggaaaagcccactgtgtttttaaaccacttccactttccaggaggctggatggcttccagggtcactccttgccctgggtggctcccaggctcctggaacttctgcctccacctcgctggggagcccccagggctgctgtggccacagccctgcctgggcctgtctctcaagggcacccagcttgctcggcctcctacatgtctcccgttggggaggcaagaggctgaggggcttccgagcccctgagagcggacatctcctcccgcaggcctttactccgcactccccactggcagccgctggtgtctcttcacacagaggcacaacctggacccaggcagcctctttcctccctccccaatctcttccatttttctacagatttttttttttttggtcatactagagacaggggtctcgctgaactcctggcctccagtgatcctccatcctcggcctcccaaagtgctggaatcacaggggtgagccaccgcacccagccctctctcttcctcaatgcactctgcttcttccgttcttccgaaacattcagctgactgtatccagggcttcctggactcctgggaccccacgtcctgcaccccggcttctgactcatttcctaagggcccctttgtgtatcataaagggtttgatttttatagtcacatttacaaccatcttgagatttttattttttttgaacggagtctcccactgtcgcccagactggagtccagtggcacaatctcggctcactgcatcctccacctcctgggttcaagtgattctcctgcttcagcctcccaagtagctgggattacaggtgtgcgccaccacgcccaggaaattattgtagttttagtagagacaagatttcaccatgttggccaggctggtctcaaactcctgacttcaggtgatccgcctaccttggcctccaaaagtgctgggattacaggcatgagctactgcacccggcctaaccaggctggagtgcagtggtgggatctcggctcactgcaagctccgcctcccagattcacgccattctcctgcctcagcctccccagcagctgggactacaggcacccaccgtcacacccggctaatttttttgtattttagtagagacagggtttcaccgtgttagccaggatggtcttgatctcctgaccttgtgatccaccagcctcagcctcccaaagtgctgggattacaggcgtgagccactgtgcccggccaagaatttttttatcgataacatagtgagctctctgcctcttcggaacgatgtccactttgcttatgatcaacccaagcaggactcttctctccctggacgcctctcccctggtctggaatcttccagttctgccagaattggcctttcccagatgctgcaaacttccagttgaacccctttttctgtgtggcccctggggctgcgagaccaaaatccatgagttctgtgtaccctagacctttggaaggtgagagcagggccctgagaaaaggcagccacctcctctccctggctgaacccctgccaccctactcctcaccagaattgtcagtggcctttcaccacagtggtccttcctgcctgagccctgcactgtcccagaccacacagaagtctggtcacctctgggcgcctgggatggtcaccgaagagaagcacgctgtccccgtctctcctggcttctgccagaaaatcgaacaagtgcaattaacacactgttactgccgaagcctgaaactcccaggacttgtccttgatccttccagaaaccaccaggtccggcacttggagccccccggagagggacctcccagccgagccctcaaagaactccatgaaatcaggaactgcttgatgaaatgtatctccttgtacctggaagatgaagcccaaacacccacacctctgtctcccccagggctcgggatgtctccagcagcccggccacgcagcttcccaggtgggctcggggaggtgggagcagggaccatctctgtcccctccaccctcactccatccacctcggagaccaccctcccccagccagatacggaataaaactacagacgcagacgtcggaataaa

SEQ ID NO: 10493 - protein, 206 aa, Homo sapiens
MSSVYPRPLEGESRALRKGSHLLSLAEPLPPYSSPELSVAFHHSGPSCLSPALSQTTQKSGHLWAPGMVTEEKHAVPVSPGFCQKIEQVQLTHCYCRSLKLPGLVLDPSRNHQVRHLEPPGEGPPSRALKELHEIRNCLMKCISLYLEDEAQTPTPLSPPGLGMSPAARPRSFPGGLGEVGAGTISVPSTLTPSTSETTLPQPDTE

SEQ ID NO: 10494 - DNA, 2982 bp, Homo sapiens
gcggctgaggcggccgaggcggccagttgggtaccgggaggggcgaaggcgggcggcagaggcgatcagaagtttccaagggtcacttgtgtctcgtccgtgggaagaccgggggagcccagaaggccttggtgtggaattctgagagctgattcctgccttgtcttctccactgttcctggaggaatccgagaagagcagagcggagggagccccagacacggtccgcgggagagctgtggggcttggtgagtgtttcgtggcctctcgggttggtcagcacccccagccagctggcccaggacccctctacagaagtccaggagagcaggcgtcaccaagatgtccaaccccttcctgaagcaagtcttcaacaaggacaagacattccgccccaagcgcaagtttgagccaggcacccagcgcttcgagctgcacaagaaggcgcaggcgtcgctgaacgccgggctggacctgcggctggccgtgcagttgcccccgggcgaggacctgaacgactggctacaagcacttctactatttcgtcaaggagttcggcctcatcgacaccaaggagctggagccactgaaagaaatgaccgcccggatgtgccactgagagccccgcgggtctcccggtgcccgaaccgccgctggggcctcggagacttggaggaggacgctctggaaccatcatcccgcttctctccggcctgagcatctcagggagaccaggggccgagccgctgagcaggtgttggtcctcaggagctccaaccccggacggcagatgccttcctcagtctcgagcctcagtctcccgtctgggactaaaacgtgaactctgtaattctatgtgttactagcaaccggaaaagcccactgtgtttttaaaccacttccactttccaggaggctggatggcttccagggtcactccttgccctgggtggctcccaggctcctggaacttctgcctccacctcgctggggagcccccagggctgctgtggccacagccctgcctgggcctgtctctcaagggcacccagcttgctcggcctcctacatgtctcccgttggggaggcaagaggctgaggggcttccgagcccctgagagcggacatctcctcccgcaggcctttactccgcactccccactggcagccgctggtgtctcttcacacagaggcacaacctggacccaggcagcctctttcctccctccccaatctcttccatttttctacagatttttttttttttggtcatactagagacaggggtctcgctgaactcctggcctccagtgatcctccatcctcggcctcccaaagtgctggaatcacaggggtgagccaccgcacccagccctctctcttcctcaatgcactctgcttcttccgttcttccgaaacattcagctgactgtatccagggcttcctggactcctgggaccccacgtcctgcaccccggcttctgactcatttcctaagggcccctttgtgtatcataaagggtttgatttttatagtcacatttacaaccatcttgagatttttattttttttgaacggagtctcccactgtcgcccagactggagtccagtggcacaatctcggctcactgcatcctccacctcctgggttcaagtgattctcctgcttcagcctcccaagtagctgggattacaggtgtgcgccaccacgcccaggaaattattgtagttttagtagagacaagatttcaccatgttggccaggctggtctcaaactcctgacttcaggtgatccgcctaccttggcctccaaaagtgctgggattacaggcatgagctactgcacccggcctaaccaggctggagtgcagtggtgggatctcggctcactgcaagctccgcctcccagattcacgccattctcctgcctcagcctccccagcagctgggactacaggcacccaccgtcacacccggctaatttttttgtattttagtagagacagggtttcaccgtgttagccaggatggtcttgatctcctgaccttgtgatccaccagcctcagcctcccaaagtgctgggattacaggcgtgagccactgtgcccggccaagaatttttttatcgataacatagtgagctctctgcctcttcggaacgatgtccactttgcttatgatcaacccaagcaggactcttctctccctggacgcctctcccctggtctggaatcttccagttctgccagaattggcctttcccagatgctgcaaacttccagttgaacccctttttctgtgtggcccctggggctgcgagaccaaaatccatgagttctgtgtaccctagacctttggaaggtgagagcagggccctgagaaaaggcagccacctcctctccctggctgaacccctgccaccctactcctcaccagaattgtcagtggcctttcaccacagtggtccttcctgcctgagccctgcactgtcccagaccacacagaagtctggtcacctctgggcgcctgggatggtcaccgaagagaagcacgctgtccccgtctctcctggcttctgccagaaaatcgaacaagtgcaattaacacactgttactgccgaagcctgaaactcccaggacttgtccttgatccttccagaaaccaccaggtccggcacttggagccccccggagagggacctcccagccgagccctcaaagaactccatgaaatcaggaactgcttgatgaaatgtatctccttgtacctggaagatgaagcccaaacacccacacctctgtctcccccagggctcgggatgtctccagcagcccggccacgcagcttcccaggtgggctcggggaggtgggagcagggaccatctctgtcccctccaccctcactccatccacctcggagaccaccctcccccagccagatacggaataaaactacagacgcagacgtcggaataaa

SEQ ID NO: 10495 - protein, 124 aa, Homo sapiens
MSNPFLKQVFNKDKTFRPKRKFEPGTQRFELHKKAQASLNAGLDLRLAVQLPPGEDLNDWLQALLLFRQGVRPHRHQGAGATERNDRPDVPLRAPRVSRCPNRRWGLGDLEEDALEPSSRFSPA

SEQ ID NO: 10496 - DNA, 3370 bp, Homo sapiens
gaggcggtgcggcggctgaggcggccgaggcggccagttgggtaccgggaggggcgaaggcgggcggcagaggcgatcagaagtttccaagggtcacttgtgtctcgtccgtgggaagaccgggggagcccagaaggccttggtgtggaattctgagagctgattcctgccttgtcttctccactgttcctggaggaatccgagaagagcagagcggagggagccccagacacggtccgcgggagagctgtggggcttggtgagtgtttcgtggcctctcgggttggtcagcacccccagccagctggcccaggacccctctacagaagtccaggagagcaggcgtcaccaagatgtccaaccccttcctgaagcaagtcttcaacaaggacaagacattccgccccaagcgcaagtttgagccaggcacccagcgcttcgagctgcacaagaaggcgcaggcgtcgctgaacgccgggctggacctgcggctggccgtgcagttgcccccgggcgaggacctgaacgactgggtggctgttcacgtggtggacttctttaaccgcgtcaacctcatctacggcaccatcagcgacggctgcacggagcagtcctgccccgtcatgtcggggggccccaagtatgagtaccgctggcaggatgagcataagttccggaagcccacggcactctccgcgcccaggtacatggacctgctgatggactggatcgaggcgcagatcaacaacgaggacctcttccccaccaacgttggcactccgtttcccaagaacttcctgcagacggtgcggaagatcctgtcgcggctgttccgcgtgttcgtgcacgtctacatccaccactttgaccgcatcgcgcagatgggctccgaggcccacgtgaacacctgctacaagcacttctactatttcgtcaaggagttcggcctcatcgacaccaaggagctggagccactgaaagaaatgaccgcccggatgtgccactgagagccccgcgggtctcccggtgcccgaaccgccgctggggcctcggagacttggaggaggacgctctggaaccatcatcccgcttctctccggcctgagcatctcagggagaccaggggccgagccgctgagcaggtgttggtcctcaggagctccaaccccggacggcagatgccttcctcagtctcgagcctcagtctcccgtctgggactaaaacgtgaactctgtaattctatgtgttactagcaaccggaaaagcccactgtgtttttaaaccacttccactttccaggaggctggatggcttccagggtcactccttgccctgggtggctcccaggctcctggaacttctgcctccacctcgctggggagcccccagggctgctgtggccacagccctgcctgggcctgtctctcaagggcacccagcttgctcggcctcctacatgtctcccgttggggaggcaagaggctgaggggcttccgagcccctgagagcggacatctcctcccgcaggcctttactccgcactccccactggcagccgctggtgtctcttcacacagaggcacaacctggacccaggcagcctctttcctccctccccaatctcttccatttttctacagatttttttttttttggtcatactagagacaggggtctcgctgaactcctggcctccagtgatcctccatcctcggcctcccaaagtgctggaatcacaggggtgagccaccgcacccagccctctctcttcctcaatgcactctgcttcttccgttcttccgaaacattcagctgactgtatccagggcttcctggactcctgggaccccacgtcctgcaccccggcttctgactcatttcctaagggcccctttgtgtatcataaagggtttgatttttatagtcacatttacaaccatcttgagatttttattttttttgaacggagtctcccactgtcgcccagactggagtccagtggcacaatctcggctcactgcatcctccacctcctgggttcaagtgattctcctgcttcagcctcccaagtagctgggattacaggtgtgcgccaccacgcccaggaaattattgtagttttagtagagacaagatttcaccatgttggccaggctggtctcaaactcctgacttcaggtgatccgcctaccttggcctccaaaagtgctgggattacaggcatgagctactgcacccggcctaaccaggctggagtgcagtggtgggatctcggctcactgcaagctccgcctcccagattcacgccattctcctgcctcagcctccccagcagctgggactacaggcacccaccgtcacacccggctaatttttttgtattttagtagagacagggtttcaccgtgttagccaggatggtcttgatctcctgaccttgtgatccaccagcctcagcctcccaaagtgctgggattacaggcgtgagccactgtgcccggccaagaatttttttatcgataacatagtgagctctctgcctcttcggaacgatgtccactttgcttatgatcaacccaagcaggactcttctctccctggacgcctctcccctggtctggaatcttccagttctgccagaattggcctttcccagatgctgcaaacttccagttgaacccctttttctgtgtggcccctggggctgcgagaccaaaatccatgagttctgtgtaccctagacctttggaaggtgagagcagggccctgagaaaaggcagccacctcctctccctggctgaacccctgccaccctactcctcaccagaattgtcagtggcctttcaccacagtggtccttcctgcctgagccctgcactgtcccagaccacacagaagtctggtcacctctgggcgcctgggatggtcaccgaagagaagcacgctgtccccgtctctcctggcttctgccagaaaatcgaacaagtgcaattaacacactgttactgccgaagcctgaaactcccaggacttgtccttgatccttccagaaaccaccaggtccggcacttggagccccccggagagggacctcccagccgagccctcaaagaactccatgaaatcaggaactgcttgatgaaatgtatctccttgtacctggaagatgaagcccaaacacccacacctctgtctcccccagggctcgggatgtctccagcagcccggccacgcagcttcccaggtgggctcggggaggtgggagcagggaccatctctgtcccctccaccctcactccatccacctcggagaccaccctcccccagccagatacggaataaaactacagacgcagacgtcggaataaa

SEQ ID NO: 10497 - protein, 217 aa, Homo sapiens; identical to SEQ ID NO: 1771

SEQ ID NO: 10498 - DNA, 1192 bp, Homo sapiens
aacggagtctcccactgtcgcccagactggagtccagtggcacaatctcggctcactgcatcctccacctcctgggttcaagtgattctcctgcttcagcctcccaagtagctgggattacaggtgtgcgccaccacgcccaggaaattattgtagttttagtagagacaagatttcaccatgttggccaggctggtctcaaactcctgacttcaggtgatccgcctaccttggcctccaaaagtgctgggattacaggcatgagctactgcacccggcctaaccaggctggagtgcagtggtgggatctcggctcactgcaagctccgcctcccagattcacgccattctcctgcctcagcctccccagcagctgggactacaggcacccaccgtcacacccggctaatttttttgtattttagtagagacagggtttcaccgtgttagccaggatggtcttgatctcctgaccttgtgatccaccagcctcagcctcccaaagtgctgggattacaggcgtgagccactgtgcccggccaagaatttttttatcgataacatagtgagctctctgcctcttcggaacgatgtccactttgcttatgatcaacccaagcaggactcttctctccctggacgcctctcccctggtctggaatcttccagttctgccagaattggcctttcccagatccctgcactgtcccagaccacacagaagtctggtcacctctgggcgcctgggatggtcaccgaagagaagcacgctgtccccgtctctcctggcttctgccagaaaatcgaacaagtgcaattaacacactgttactgccgaagcctgaaactcccaggacttgtccttgatccttccagaaaccaccaggtccggcacttggagccccccggagagggacctcccagccgagccctcaaagaactccatgaaatcaggaactgcttgatgaaatgtatctccttgtacctggaagatgaagcccaaacacccacacctctgtctcccccagggctcgggatgtctccagcagcccggccacgcagcttcccaggtgggctcggggaggtgggagcagggaccatctctgtcccctccaccctcactccatccacctcggagaccaccctcccccagccagatacggaataaaactacagacgcagacgtcggaat

SEQ ID NO: 10499 - protein, 76 aa, Homo sapiens [sequence omitted]

SEQ ID NO: 10500 - DNA, 1074 bp, Homo sapiens
gaaattctgtcgcctccagcaggtcatgattcccctgtgtatttcaggtccgcgggagagctgtggggcttggtgagtgtttcgtggcctctcgggttggtcagcacccccagccagctggcccaggacccctctacagaagtccaggagagcaggcgtcaccaagatgtccaaccccttcctgaagcaagtcttcaacaaggacaagacattccgccccaagcgcaagtttgagccaggcacccagcgcttcgagctgcacaagaaggcgcaggcgtcgctgaacgccgggctggacctgcggctggccgtgcagttgcccccgggcgaggacctgaacgactgggtggctgttcacgtggtggacttctttaaccgcgtcaacctcatctacggcaccatcagcgacggctgcacggagcagtcctgccccgtcatgtcggggggccccaagtatgagtaccgctggcaggatgagcataagttccggaagcccacggcactctccgcgcccaggtacatggacctgctgatggactggatcgaggcgcagatcaacaacgaggacctcttccccaccaacgttggcactccgtttcccaagaacttcctgcagacggtgcggaagatcctgtcgcggctgttccgcgtgttcgtgcacgtctacatccaccactttgaccgcatcgcgcagatgggctccgaggcccacgtgaacacctgctacaagcacttctactatttcgtcaaggagttcggcctcatcgacaccaaggagctggagccactgaaagaaatgaccgcccggatgtgccactgagagccccgcgggtctcccggtgcccgaaccgccgctggggcctcggagacttggaggaggacgctctggaaccatcatcccgcttctctccggcctgagcatctcagggagaccaggggccgagccgctgagcaggtgttggtcctcaggagctccaaccccggacggcagatgccttcctcagtctcgagcctcagtctcccgtctgggactaaaacgtgaactctgtaattctatgtgttactagcaaccgg

SEQ ID NO: 10501 - protein, 217 aa, Homo sapiens; identical to SEQ ID NO: 1771

SEQ ID NO: 10502 - DNA, 466 bp, Homo sapiens
gggcggcgcggaggaaactgcacctgtcgccggcatttgttccgtgggagaacgcaggatccctcccagctacctcaccacttgtcccatcagcagggtccccggggcccaactccagccggggccgccagctgctgggccgaccgcaagcagtcagggtcctggccccggaagggttcctctgccacgggccaccagccccaccgtaaccgcacgccctcagccccaagcccgcgcaccagtggctccagctccttggtgtcgatgaggccgaactccttgacgaaatagtagaagtgcttgtagcaggtgttcacgtgggcctcggagcccatctgcgcgatgcggtcaaagtggtggggaagaggtcctcgttgttgatctgcgcctcgatccagtccatcagcaggtccatgtacctgggcgcggagagtgccgtgggcttccggaacttatgctcatcctg

SEQ ID NO: 10503 - protein, 88 aa, Homo sapiens
GGAEETAPVAGICSVGERRIPPSYLTTCPISRVPGAQLQPGPPAAGPTASSQGPGPGRVPLPRATSPTVTARPQPQARAPVAPAPWCR

SEQ ID NO: 10504 - DNA, 993 bp, Homo sapiens
agcatcttccagccaagtatgagggctgggctgccaggccgggagccagtgttgtgcactgacctagaacatatggaactgacttctccactcagggcttgtctctcaggcgcctcccgtgctctggggcagcggtccccgaggcagtggcaggatgtggaaacctccggaaggaaaagtttccaagggtcacttgtgtctcgtccgtgggaagaccgggggagcccagaaggccttggtgtggaattctgagagctgattcctgccttgtcttctccactgttcctggaggaatccgagaagagcagagcggagggagccccagacacggtccgcgggagagctgtggggcttggtgagtgtttcgtggcctctcgggttggtcagcacccccagccagctggcccaggacccctctacagaagtccaggagagcaggcgtcaccaagatgtccaaccccttcctgaagcaagtcttcaacaaggacaagacattccgccccaagcgcaagtttgagccaggcacccagcgcttcgagctgcacaagaaggcgcaggcgtcgctgaacgccgggctggacctgcggctggccgtgcagttgcccccgggcgaggacctgaacgactgggtggctgttcacgtggtggacttctttaaccgcgtcaacctcatctacggcaccatcagcgacggctgcacggagcagtcctgccccgtcatgtcggggggccccaagtatgagtaccgctggcaggatgagcataagttccggaagcccacggcactctccgcgcccaggtacatggacctgctgatggactggatcgaggcgcagatcaacaacgaggacctcttccccaccaacgttggtgagtcagagctggcaggggctcggggatacagagccttccagaaaagtcagggaggccgagcacagtggctcacacccgtaatgccagcgctttgggaggccgagcccagggatcgcttga

SEQ ID NO: 10505 - protein, 77 aa, Homo sapiens
MRAGLPGREPVLCTDLEHMELTSPLRACLSGASRALGQRSPRQWQDVETSGRKSFQGSLVSRPWEDRGSPEGLGVEF

SEQ ID NO: 10506 - DNA, 945 bp, Homo sapiens
agttgggtaccgggaggggcgaaggcgggcggcagaggcgatcaggagtcactgagaggggaggggaaattggaaaatgcagtcacagagcagaaaatcagtgctccaagccgcagctcatcctggggaagtttccaagggtcacttgtgtctcgtccgtgggaagaccgggggagcccagaaggccttggtgtggaattctgagagctgattcctgccttgtcttctccactgttcctggaggaatccgagaagagcagagcggagggagccccagacacggtccgcgggagagctgtggggcttggtgagtgtttcgtggcctctcgggttggtcagcacccccagccagctggcccaggacccctctacagaagtccaggagagcaggcgtcaccaagatgtccaaccccttcctgaagcaagtcttcaacaaggacaagacattccgccccaagcgcaagtttgagccaggcacccagcgcttcgagctgcacaagaaggcgcaggcgtcgctgaacgccgggctggacctgcggctggccgtgcagttgcccccgggcgaggacctgaacgactgggtggctgttcacgtggtggacttctttaaccgcgtcaacctcatctacggcaccatcagcgacggctgcacggagcagtcctgccccgtcatgtcggggggccccaagtatgagtaccgctggcaggatgagcataagttccggaagcccacggcactctccgcgcccaggtacatggacctgctgatggactggatcgaggcgcagatcaacaacgaggacctcttccccaccaacgttggtgagtcagagctggcaggggctcggggatacagagccttccagaaaagtcagggaggccgagcacagtggctcacacccgtaatgccagcgctttgggaggccgagcccagggatcgcttga

SEQ ID NO: 10507 - protein, 44 aa, Homo sapiens
MQSQSRKSVLQAAAHPGEVSKGHLCLVRGKTGGAQKALVWNSES

SEQ ID NO: 10508 - DNA, 1110 bp, Homo sapiens
gcatgcgccaatggcccgtgcctgtgccaatggccggtgcccgctcctcggccggctcccgctgaggccccgccccgtgtcgcagccacggtgcaggctccgcccacaggccgcggccccggttgctaggcaacggagacctccgcccggcccggctcagggcatcccagggctgctgcccggaacttggctccgtgcgccttcgccgcccgggccccttaaagcccgcgggaccgagtctgggagacccctgcacgccgcttctgcgcggagccccgggccctttaaggaaaaagtttccaagggtcacttgtgtctcgtccgtgggaagaccgggggagcccagaaggccttggtgtggaattctgagagctgattcctgccttgtcttctccactgttcctggaggaatccgagaagagcagagcggagggagccccagacacggtccgcgggagagctgtggggcttggtgagtgtttcgtggcctctcgggttggtcagcacccccagccagctggcccaggacccctctacagaagtccaggagagcaggcgtcaccaagatgtccaaccccttcctgaagcaagtcttcaacaaggacaagacattccgccccaagcgcaagtttgagccaggcacccagcgcttcgagctgcacaagaaggcgcaggcgtcgctgaacgccgggctggacctgcggctggccgtgcagttgcccccgggcgaggacctgaacgactgggtggctgttcacgtggtggacttctttaaccgcgtcaacctcatctacggcaccatcagcgacggctgcacggagcagtcctgccccgtcatgtcggggggccccaagtatgagtaccgctggcaggatgagcataagttccggaagcccacggcactctccgcgcccaggtacatggacctgctgatggactggatcgaggcgcagatcaacaacgaggacctcttccccaccaacgttggtgagtcagagctggcaggggctcggggatacagagccttccagaaaagtcagggaggccgagcacagtggctcacacccgtaatgccagcgctttgggaggccgagcccagggatcgcttga

SEQ ID NO: 10509 - protein, 121 aa, Homo sapiens
MARACANGRCPLLGRLPLRPRPVSQPRCRLRPQAAAPVARQRRPPPGPAQGIPGLLPGTWLRAPSPPGPLKARGTESGRPLHAASARSPGPFKEKVSKGHLCLVRGKTGGAQKALVWNSES

SEQ ID NO: 10510 - DNA, 306 bp, Homo sapiens
aaaggagtgtggccctgggttgggatggtagcttggggcgttcctccctgtggcttcctctttctgacacttggtctcttgtctcttgaaactttgggctgagtcctctgaagcaggcaccacaggtgtccgtgacgtctcatcactgtaactgtcccctaggtgacacgatcttagctttgttttgagacagggtcttactttgtcccccaggctgcagtgagctgtgattgcactactgcactccagcctgggcaacagagcaagaccctgtctctaaaaaaaacaaaaatgtaaaccagacaa

SEQ ID NO: 10511 - protein, 32 aa, Homo sapiens
NFGLSPLKQAPQVSVTSHHCNCPLGDTILALF

SEQ ID NO: 10512 - DNA, 1307 bp, Homo sapiens
tttccttaaagggcccggggctccgcgcagaagcggcgtgcaggggtctcccagactcggtcccgcgggctttaaggggcccgggcggcgaaggcgcacggagccaagttccgggcagcagccctgggatgccctgagccgggccgggcggaggtctccgttgcctagcaaccggggccgcggcctgtgggcggagcctgcaccgtggctgcgacacggggcggggcctcagcgggagccggccgaggagcgggcaccggccattggcacaggcacgggccattggcgcatgcgtagggcgcggccttggggcggggcccacccagtggcggagtcttctgaggggcgggtcgtgggcggggcctggaggcggagccggcgccgtcagtagtcggctgaggacggaggcggggctgggcctgggatggggcggggcctgcgctggtggggcgggcgggggaggagacacggccaagcgcccgagtgggggccgttggttggtgcgcggctgaagggtgtggcgcgagcagcgtcgttggttggccggcggcgggccgggacgggcatggccctgctgctgtgcctggtgtgcctgacggcggcgctggcccacggctgtctgcactgccacagcaacttctccaagaagttctccttctaccgccaccatgtgaacttcaagtcctggtgggtgggcgacatccccgtgtcaggggcgctgctcaccgactggagcgacgacacgatgaaggagctgcacctggccatccccgccaagatcacccgggagaagctggaccaagtggcgacagcagtgtaccagatgatggatcagctgtaccaggggaagatgtacttccccgggtatttccccaacgagctgcgaaacatcttccgggagcaggtgcacctcatccagaacgccatcatcgaaagccgcatcgactgtcagcaccgctgtggtaagcaaggctccgtccaggctgaggggcgtgccggtggcagctcggggccctggaggctgaggggagccctggcggctcttgtacgtgtttcaggcatcttccagtacgagaccatctcctgcaacaactgcacagactcgcacgtcgcctgctttggctataactgcgagtcctcggcgcagtggaagtcagctgtccagggcctcctgaactacataaataactggcacaaacaggacacgagcatgagaccacgctcctctgccttctcctggcctgggacacacagagccaccccggccttgtgagtgacccagagaagggaggcctcgggagaagggg

SEQ ID NO: 10513 - protein, 282 aa, Homo sapiens
MGRGLRWWGGRGRRHGQAPEWGPLVGARLKGVARAASLVGRRRAGTGMALLLCLVCLTAALAHGCLHCHSNFSKKFSFYRHHVNFKSWWVGDIPVSGALLTDWSDDTMKELHLAIPAKITREKLDQVATAVYQMMDQLYQGKMYFPGYFPNELRNIFREQVHLIQNAIIESRIDCQHRCGKQGSVQAEGRAGGSSGPWRLRGALAALVRVSGIFQYETISCNNCTDSHVACFGYNCESSAQWKSAVQGLLNYINNWHKQDTSMRPRSSAFSWPGTHRATPAL

SEQ ID NO: 10514 - DNA, 1939 bp, Homo sapiens
ggagacacggccaagcgcccgagtgggggccgttggttggtgcgcggctgaagggtgtggcgcgagcagcgtcgttggttggccggcggcgggccgggacgggcatggccctgctgctgtgcctggtgtgcctgacggcggcgctggcccacggctgtctgcactgccacagcaacttctccaagaagttctccttctaccgccaccatgtgaacttcaagtcctggtgggtgggcgacatccccgtgtcaggggcgctgctcaccgactggagcgacgacacgatgaaggagctgcacctggccatccccgccaagatcacccgggagaagctggaccaagtggcgacagcagtgtaccagatgatggatcagctgtaccaggggaagatgtacttccccgggtatttccccaacgagctgcgaaacatcttccgggagcaggtgcacctcatccagaacgccatcatcgaaagccgcatcgactgtcagcaccgctgtggcatcttccagtacgagaccatctcctgcaacaactgcacagactcgcacgtcgcctgctttggctataactgcgagtagggctcaggcatcacacccacccgtgccagggccctactgtccctggggtcccaggctctccttggagggggctccccgccttccacctggctgtcatcgggtagggcggggccgtgggttcaggggcgcaccacttccaagcctgtgtcccacaggtcctcggcgcagtggaagtcagctgtccagggcctcctgaactacataaataactggcacaagtaagtcccctcctcaaaccaacacaggcagtgtgtgtatgtgagcacctcgtgggtgagtatgtgtggggcacaggctggctccctcagctcccacgtcctagaggggctcccgaggaggtggaacctcaacccagctctgcgcaggaggcggctgcagtccttttctccctcaaaggtctccgaccctcagctggaggcgggcatctttcctaaagggtccccatagggtctggttccaccccatcccaggtctgtggtcagagcctgggagggttccctacgatggttaggggtgccccatggaggggctgactgccccacattgcctttcagacaggacacgagcatgaggtaaggccgccctgacctggacttcagggggagggggtaaagggagagaggaggggggctagggggtcctctagatcagtgggggcactgcaggtggggctctccctatacctgggacacctgctggatgtcacctctgcaaccacacccatgtggtggtttcatgaacagaccacgctcctctgccttctcctggcctgggacacacagagccaccccggccttgtgagtgacccagagaagggaggcctcgggagaaggggtgctcgtaagccaacaccagcgtgccgcggcctgcacaccctgctgacatcccaggcacgagggtgtcgtggatgtggccacacataggaccacacgtcccagctgggaggagaggcctggggcccccagggagggaggcagggggtgggggacatggagagctgaggcagcctcgtctccccgcagcctggtatcgccagccttaaggtgtctggagcccccacacttggccaacctgaccttggaagatgctgctgagtgtctcaagcagcactgacagcagctgggcctgccccagggcaacgtgggggcggagactcagctggacagcccctgcctgtcactctggagctgggctgctgctgcctcaggaccccctctccgaccccggacagagctgagctggccagggccaggagggcgggagggagggaatgggggtgggctgtgcgcagcatcagcgcctgggcaggtccgcagagctgcgggatgtgattaaagtccctgatgtttctctttgca

SEQ ID NO: 10515 - protein, 158 aa, Homo sapiens
MALLLCLVCLTAALAHGCLHCHSNFSKKFSFYRHHVNFKSWWVGDIPVSGALLTDWSDDTMKELHLAIPAKITREKLDQVATAVYQMMDQLYQGKMYFPGYFPNELRNIFREQVHLIQNAIIESRIDCQHRCGIFQYETISCNNCTDSHVACFGYNCE

SEQ ID NO: 10516 - DNA, 1207 bp, Homo sapiens
ggagacacggccaagcgcccgagtgggggccgttggttggtgcgcggctgaagggtgtggcgcgagcagcgtcgttggttggccggcggcgggccgggacgggcatggccctgctgctgtgcctggtgtgcctgacggcggcgctggcccacggctgtctgcactgccacagcaacttctccaagaagttctccttctaccgccaccatgtgaacttcaagtcctggtgggtgggcgacatccccgtgtcaggggcgctgctcaccgactggagcgacgacacgatgaaggagctgcacctggccatccccgccaagatcacccgggagaagctggaccaagtggcgacagcagtgtaccagatgatggatcagctgtaccaggggaagatgtacttccccgggtatttccccaacgagctgcgaaacatcttccgggagcaggtgcacctcatccagaacgccatcatcgaaagccgcatcgactgtcagcaccgctgtggcatcttccagtacgagaccatctcctgcaacaactgcacagactcgcacgtcgcctgctttggctataactgcgagtagggctcaggcatcacacccacccgtgccagggccctactgtccctggggtcccaggctctccttggagggggctccccgccttccacctggctgtcatcgggtagggcggggccgtgggttcaggggcgcaccacttccaagcctgtgtcccacaggtcctcggcgcagtggaagtcagctgtccagggcctcctgaactacataaataactggcacaaacaggacacgagcatgagaccacgctcctctgccttctcctggcctgggacacacagagccaccccggccttcctggtatcgccagccttaaggtgtctggagcccccacacttggccaacctgaccttggaagatgctgctgagtgtctcaagcagcactgacagcagctgggcctgccccagggcaacgtgggggcggagactcagctggacagcccctgcctgtcactctggagctgggctgctgctgcctcaggaccccctctccgaccccggacagagctgagctggccagggccaggagggcgggagggagggaatgggggtgggctgtgcgcagcatcagcgcctgggcaggtccgcagagctgcgggatgtgattaaagtccctgatgtttctctttgca

SEQ ID NO: 10517 - protein, 158 aa, Homo sapiens; identical to SEQ ID NO: 10515

SEQ ID NO: 10518 - DNA, 2140 bp, Homo sapiens
ggccgttggttggtgcgcggctgaagggtgtggcgcgagcagcgtcgttggttggccggcggcgggccgggacgggcatggccctgctgctgtgcctggtgtgcctgacggcggcgctggcccacggctgtctgcactgccacagcaacttctccaagaagttctccttctaccgccaccatgtgaacttcaagtcctggtgggtgggcgacatccccgtgtcaggggcgctgctcaccgactggagcgacgacacgatgaaggagctgcacctggccatccccgccaagatcacccgggagaagctggaccaagtggcgacagcagtgtaccagatgatggatcagctgtaccaggggaagatgtacttccccgggtatttccccaacgagctgcgaaacatcttccgggagcaggtgcacctcatccagaacgccatcatcgaaaggcacctggcaccaggcagctggggaggagggcagctctccagggagggacccagcctagcacctgaaggatcaatgccatcaccccgcggggacctcccctaagtagcccccagaggcgctgggagtgttgccaccgccctcccctgaagtttgctccatctcacgctgggggtcaacctggggaccccttccctccgggccatggacacacatacatgaaaaccaggccgcatcgactgtcagcaccgctgtggcatcttccagtacgagaccatctcctgcaacaactgcacagactcgcacgtcgcctgctttggctataactgcgagtagggctcaggcatcacacccacccgtgccagggccctactgtccctggggtcccaggctctccttggagggggctccccgccttccacctggctgtcatcgggtagggcggggccgtgggttcaggggcgcaccacttccaagcctgtgtcccacaggtcctcggcgcagtggaagtcagctgtccagggcctcctgaactacataaataactggcacaagtaagtcccctcctcaaaccaacacaggcagtgtgtgtatgtgagcacctcgtgggtgagtatgtgtggggcacaggctggctccctcagctcccacgtcctagaggggctcccgaggaggtggaacctcaacccagctctgcgcaggaggcggctgcagtccttttctccctcaaaggtctccgaccctcagctggaggcgggcatctttcctaaagggtccccatagggtctggttccaccccatcccaggtctgtggtcagagcctgggagggttccctacgatggttaggggtgccccatggaggggctgactgccccacattgcctttcagacaggacacgagcatgaggtaaggccgccctgacctggacttcagggggagggggtaaagggagagaggaggggggctagggggtcctctagatcagtgggggcactgcaggtggggctctccctatacctgggacacctgctggatgtcacctctgcaaccacacccatgtggtggtttcatgaacagaccacgctcctctgccttctcctggcctgggacacacagagccaccccggccttgtgagtgacccagagaagggaggcctcgggagaaggggtgctcgtaagccaacaccagcgtgccgcggcctgcacaccctgctgacatcccaggcacgagggtgtcgtggatgtggccacacataggaccacacgtcccagctgggaggagaggcctggggcccccagggagggaggcagggggtgggggacatggagagctgaggcagcctcgtctccccgcagcctggtatcgccagccttaaggtgtctggagcccccacacttggccaacctgaccttggaagatgctgctgagtgtctcaagcagcactgacagcagctgggcctgccccagggcaacgtgggggcggagactcagctggacagcccctgcctgtcactctggagctgggctgctgctgcctcaggaccccctctccgaccccggacagagctgagctggccagggccaggagggcgggagggagggaatgggggtgggctgtgcgcagcatcagcgcctgggcaggtccgcagagctgcgggatgtgattaaagtccctgatgtttctctttgca

SEQ ID NO: 10519 - protein, 157 aa, Homo sapiens
MALLLCLVCLTAALAHGCLHCHSNFSKKFSFYRHHVNFKSWWVGDIPVSGALLTDWSDDTMKELHLAIPAKITREKLDQVATAVYQMMDQLYQGKMYFPGYFPNELRNIFREQVHLIQNAIIERHLAPGSWGGGQLSREGPSLAPEGSMPSPRGDLP

SEQ ID NO: 10520 - DNA, 1021 bp, Homo sapiens
ggccgttggttggtgcgcggctgaagggtgtggcgcgagcagcgtcgttggttggccggcggcgggccgggacgggcatggccctgctgctgtgcctggtgtgcctgacggcggcgctggcccacggctgtctgcactgccacagcaacttctccaagaagttctccttctaccgccaccatgtgaacttcaagtcctggtgggtgggcgacatccccgtgtcaggggcgctgctcaccgactggagcgacgacacgatgaaggagctgcacctggccatccccgccaagatcacccgggagaagctggaccaagtggcgacagcagtgtaccagatgatggatcagctgtaccaggggaagatgtacttccccgggtatttccccaacgagctgcgaaacatcttccgggagcaggtgcacctcatccagaacgccatcatcgaaagccgcatcgactgtcagcaccgctgtggcatcttccagtacgagaccatctcctgcaacaactgcacagactcgcacgtcgcctgctttggctataactgcgagtcctcggcgcagtggaagtcagctgtccagggcctcctgaactacataaataactggcacaaacaggacacgagcatgagaccacgctcctctgccttctcctggcctgggacacacagagccaccccggccttcctggtatcgccagccttaaggtgtctggagcccccacacttggccaacctgaccttggaagatgctgctgagtgtctcaagcagcactgacagcagctgggcctgccccagggcaacgtgggggcggagactcagctggacagcccctgcctgtcactctggagctgggctgctgctgcctcaggaccccctctccgaccccggacagagctgagctggccagggccaggagggcgggagggagggaatgggggtgggctgtgcgcagcatcagcgcctgggcaggtccgcagagctgcgggatgtgattaaagtccctgatgtttctctttgca

SEQ ID NO: 10521 - protein, 232 aa, Homo sapiens; identical to SEQ ID NO: 1775

SEQ ID NO: 10522 - DNA, 1074 bp, Homo sapiens
ggctgaagggtgtggcgcgagcagcgtcgttggttggccggcggcgggccgggacgggcatggccctgctgctgtgcctggtgtgcctgacggcggcgctggcccacggctgtctgcactgccacagcaacttctccaagaagttctccttctaccgccaccatgtgaacttcaagtcctggtgggtgggcgacatccccgtgtcaggggcgctgctcaccgactggagcgacgacacgatgaaggagctgcacctggccatccccgccaagatcacccgggagaagctggaccaagtggcgacagcagtgtaccagatgatggatcagctgtaccaggggaagatgtacttccccgggtatttccccaacgagctgcgaaacatcttccgggagcaggtgcacctcatccagaacgccatcatcgaaagccgcatcgactgtcagcaccgctgtggtaagcaaggctccgtccaggctgaggggcgtgccggtggcagctcggggccctggaggctgaggggagccctggcggctcttgtacgtgtttcaggcatcttccagtacgagaccatctcctgcaacaactgcacagactcgcacgtcgcctgctttggctataactgcgagtagggctcaggcatcacacccacccgtgccagggccctactgtccctggggtcccaggctctccttggagggggctccccgccttccacctggctgtcatcgggtagggcggggccgtgggttcaggggcgcaccacttccaagcctgtgtcccacaggtcctcggcgcagtggaagtcagctgtccagggcctcctgaactacataaataactggcacaagtaagtcccctcctcaaaccaacacaggcagtgtgtgtatgtgagcacctcgtgggtgagtatgtgtggggcacaggctggctccctcagctcccacgtcctagaggggctcccgaggaggtggaacctcaacccagctctgcgcaggaggcggctgcagtccttttctccctcaaaggtctccgaccctcagctggaggcgggcatctttcctaaagggtccc

SEQ ID NO: 10523 - protein, 190 aa, Homo sapiens
MALLLCLVCLTAALAHGCLHCHSNFSKKFSFYRHHVNFKSWWVGDIPVSGALLTDWSDDTMKELHLAIPAKITREKLDQVATAVYQMMDQLYQGKMYFPGYFPNELRNIFREQVHLIQNAIIESRIDCQHRCGKQGSVQAEGRAGGSSGPWRLRGALAALVRVSGIFQYETISCNNCTDSHVACFGYNCE

SEQ ID NO: 10524 - DNA, 1009 bp, Homo sapiens
tgtggcgcgagcagcgtcgttggttggccggcggcgggccgggacgggcatggccctgctgctgtgcctggtgtgcctgacggcggcgctggcccacggctgtctgcactgccacagcaacttctccaagaagttctccttctaccgccaccatgtgaacttcaagtcctggtgggtgggcgacatccccgtgtcaggggcgctgctcaccgactggagcgacgacacgatgaaggagctgcacctggccatccccgccaagatcacccgggagaagctggaccaagtggcgacagcagtgtaccagatgatggatcagctgtaccaggggaagatgtacttccccgggtatttccccaacgagctgcgaaacatcttccgggagcaggtgcacctcatccagaacgccatcatcgaaagccgcatcgactgtcagcaccgctgtggcatcttccagtacgagaccatctcctgcaacaactgcacagactcgcacgtcgcctgctttggctataactgcgagtcctcggcgcagtggaagtcagctgtccagggcctcctgaactacataaataactggcacaagtaagtcccctcctcaaaccaacacaggcagtgtgtgtatgtgagcacctcgtgggtgagtatgtgtggggcacaggctggctccctcagctcccacgtcctagaggggctcccgaggaggtggaacctcaacccagctctgcgcaggaggcggctgcagtccttttctccctcaaaggtctccgaccctcagctggaggcgggcatctttcctaaagggtccccatagggtctggttccaccccatcccaggtctgtggtcagagcctgggagggttccctacgatggttaggggtgccccatggaggggctgactgccccacattgcctttcagacaggacacgagcatgaggtaaggccgccctgacctggacttcagggggagggggtaaagggagagaggaggggggctagggggtcct

SEQ ID NO: 10525 - protein, 179 aa, Homo sapiens
MALLLCLVCLTAALAHGCLHCHSNFSKKFSFYRHHVNFKSWWVGDIPVSGALLTDWSDDTMKELHLAIPAKITREKLDQVATAVYQMMDQLYQGKMYFPGYFPNELRNIFREQVHLIQNAIIESRIDCQHRCGIFQYETISCNNCTDSHVACFGYNCESSAQWKSAVQGLLNYINNWHK

SEQ ID NO: 10526 - DNA, 1084 bp, Homo sapiens
tggcgcgagcagcgtcgttggttggccggcggcgggccgggacgggcatggccctgctgctgtgcctggtgtgcctgacggcggcgctggcccacggctgtctgcactgccacagcaacttctccaagaagttctccttctaccgccaccatgtgaacttcaagtcctggtgggtgggcgacatccccgtgtcaggggcgctgctcaccgactggagcgacgacacgatgaaggagctgcacctggccatccccgccaagatcacccgggagaagctggaccaagtggcgacagcagtgtaccagatgatggatcagctgtaccaggggaagatgtacttccccgggtatttccccaacgagctgcgaaacatcttccgggagcaggtgcacctcatccagaacgccatcatcgaaagccgcatcgactgtcagcaccgctgtggcatcttccagtacgagaccatctcctgcaacaactgcacagactcgcacgtcgcctgctttggctataactgcgagtcctcggcgcagtggaagtcagctgtccagggcctcctgaactacataaataactggcacaaacaggacacgagcatgagaccacgctcctctgccttctcctggcctgggacacacagagccaccccggccttgtgagtgacccagagaagggaggcctcgggagaaggggtgctcgtaagccaacaccagcgtgccgcggcctgcacaccctgctgacatcccagcctggtatcgccagccttaaggtgtctggagcccccacacttggccaacctgaccttggaagatgctgctgagtgtctcaagcagcactgacagcagctgggcctgccccagggcaacgtgggggcggagactcagctggacagcccctgcctgtcactctggagctgggctgctgctgcctcaggaccccctctccgaccccggacagagctgagctggccagggccaggagggcgggagggagggaatgggggtgggctgtgcgcagcatcagcgcctgggcaggtccgcagagctgcgggatgtgattaaagtccctgatgtttctctttgca

SEQ ID NO: 10527 - protein, 203 aa, Homo sapiens
MALLLCLVCLTAALAHGCLHCHSNFSKKFSFYRHHVNFKSWWVGDIPVSGALLTDWSDDTMKELHLAIPAKITREKLDQVATAVYQMMDQLYQGKMYFPGYFPNELRNIFREQVHLIQNAIIESRIDCQHRCGIFQYETISCNNCTDSHVACFGYNCESSAQWKSAVQGLLNYINNWHKQDTSMRPRSSAFSWPGTHRATPAL

SEQ ID NO: 10528 - DNA, 929 bp, Homo sapiens
gcagcgtcgttggttggccggcggcgggccgggacgggcatggccctgctgctgtgcctggtgtgcctgacggcggcgctggcccacggctgtctgcactgccacagcaacttctccaagaagttctccttctaccgccaccatgtgaacttcaagtcctggtgggtgggcgacatccccgtgtcaggggcgctgctcaccgactggagcgacgacacgatgaaggagctgcacctggccatccccgccaagatcacccgggagaagctggaccaagtggcgacagcagtgtaccagatgatggatcagctgtaccaggggaagatgtacttccccgggtatttccccaacgagctgcgaaacatcttccgggagcaggtgcacctcatccagaacgccatcatcgaaagccgcatcgactgtcagcaccgctgtggcatcttccagtacgagaccatctcctgcaacaactgcacagactcgcacgtcgcctgctttggctataactgcgagtcctcggcgcagtggaagtcagctgtccagggcctcctgaactacataaataactggcacaaacaggacacgagcatgagcctggtatcgccagccttaaggtgtctggagcccccacacttggccaacctgaccttggaagatgctgctgagtgtctcaagcagcactgacagcagctgggcctgccccagggcaacgtgggggcggagactcagctggacagcccctgcctgtcactctggagctgggctgctgctgcctcaggaccccctctccgaccccggacagagctgagctggccagggccaggagggcgggagggagggaatgggggtgggctgtgcgcagcatcagcgcctgggcaggtccgcagagctgcgggatgtgattaaagtccctgatgtttctctttgca

SEQ ID NO: 10529 - protein, 214 aa, Homo sapiens; identical to SEQ ID NO: 1773

SEQ ID NO: 10530 - DNA, 910 bp, Homo sapiens
cagcgtcgttggttggccggcggcgggccgggacgggcatggccctgctgctgtgcctggtgtgcctgacggcggcgctggcccacggctgtctgcactgccacagcaacttctccaagaagttctccttctaccgccaccatgtgaacttcaagtcctggtgggtgggcgacatccccgtgtcaggggcgctgctcaccgactggagcgacgacacgatgaaggagctgcacctggccatccccgccaagatcacccgggagaagctggaccaagtggcgacagcagtgtaccagatgatggatcagctgtaccaggggaagatgtacttccccgggtatttccccaacgagctgcgaaacatcttccgggagcaggtgcacctcatccagaacgccatcatcgaaagccgcatcgactgtcagcaccgctgtggcatcttccagtacgagaccatctcctgcaacaactgcacagactcgcacgtcgcctgctttggctataactgcgagtcctcggcgcagtggaagtcagctgtccagggcctcctgaactacataaataactggcacaacctggtatcgccagccttaaggtgtctggagcccccacacttggccaacctgaccttggaagatgctgctgagtgtctcaagcagcactgacagcagctgggcctgccccagggcaacgtgggggcggagactcagctggacagcccctgcctgtcactctggagctgggctgctgctgcctcaggaccccctctccgaccccggacagagctgagctggccagggccaggagggcgggagggagggaatgggggtgggctgtgcgcagcatcagcgcctgggcaggtccgcagagctgcgggatgtgattaaagtccctgatgtttctctttgca

SEQ ID NO: 10531 - protein, 208 aa, Homo sapiens
MALLLCLVCLTAALAHGCLHCHSNFSKKFSFYRHHVNFKSWWVGDIPVSGALLTDWSDDTMKELHLAIPAKITREKLDQVATAVYQMMDQLYQGKMYFPGYFPNELRNIFREQVHLIQNAIIESRIDCQHRCGIFQYETISCNNCTDSHVACFGYNCESSAQWKSAVQGLLNYINNWHNLVSPALRCLEPPHLANLTLEDAAECLKQH

SEQ ID NO: 10532 - DNA, 925 bp, Homo sapiens
ccctgctgctgtgcctggtgtgcctgacggcggcgctggcccacggctgtctgcactgccacagcaacttctccaagaagttctccttctaccgccaccatgtgaacttcaagtcctggtgggtgggcgacatccccgtgtcaggggcgctgctcaccgactggagcgacgacacgatgaaggagctgcacctggccatccccgccaagatcacccgggagaagctggaccaagtggcgacagcagtgtaccagatgatggatcagctgtaccaggggaagatgtacttccccgggtatttccccaacgagctgcgaaacatcttccgggagcaggtgcacctcatccagaacgccatcatcgaaagccgcatcgactgtcagcaccgctgtggcatcttccagtacgagaccatctcctgcaacaactgcacagactcgcacgtcgcctgctttggctataactgcgagtcctcggcgcagtggaagtcagctgtccagggcctcctgaactacatacaggacacgagcatgagaccacgctcctctgccttctcctggcctgggacacacagagccaccccggccttcctggtatcgccagccttaaggtgtctggagcccccacacttggccaacctgaccttggaagatgctgctgagtgtctcaagcagcactgacagcagctgggcctgccccagggcaacgtgggggcggagactcagctggacagcccctgcctgtcactctggagctgggctgctgctgcctcaggaccccctctccgaccccggacagagctgagctggccagggccaggagggcgggagggagggaatgggggtgggctgtgcgcagcatcagcgcctgggcaggtccgcagagctgcgggatgtgattaaagtccctgatgtttctctttgca

SEQ ID NO: 10533 - protein, 167 aa, Homo sapiens
MKELHLAIPAKITREKLDQVATAVYQMMDQLYQGKMYFPGYFPNELRNIFREQVHLIQNAIIESRIDCQHRCGIFQYETISCNNCTDSHVACFGYNCESSAQWKSAVQGLLNYIQDTSMRPRSSAFSWPGTHRATPAFLVSPALRCLEPPHLANLTLEDAAECLKQH

SEQ ID NO: 10534 - DNA, 938 bp, Homo sapiens
cgctggcccacggctgtctgcactgccacagcaacttctccaagaagttctccttctaccgccaccatgtgaacttcaagtcctggtgggtgggcgacatccccgtgtcaggggcgctgctcaccgactggagcgacgacacgatgaaggagctgcacctggccatccccgccaagatcacccgggagaagctggaccaagtggcgacagcagtgtaccagatgatggatcagctgtaccaggggaagatgtacttccccggtaaggggcgcgaaaccgaggcggggcccccccaccccgggacaccccgcccaccgcctgagcctgaccttctcctgcctcgacgactcagggtatttccccaacgagctgcgaaacatcttccgggagcaggtgcacctcatccagaacgccatcatcgaaagccgcatcgactgtcagcaccgctgtggtcctcggcgcagtggaagtcagctgtccagggcctcctgaactacataaataactggcacaagtaagtcccctcctcaaaccaacacaggcagtgtgtgtatgtgagcacctcgtgggtgagtatgtgtggggcacaggctggctccctcagctcccacgtcctagaggggctcccgaggaggtggaacctcaacccagctctgcgcaggaggcggctgcagtccttttctccctcaaaggtctccgaccctcagctggaggcgggcatctttcctaaagggtccccatagggtctggttccaccccatcccaggtctgtggtcagagcctgggagggttccctacgatggttaggggtgccccatggaggggctgactgccccacattgcctttcagacaggacacgagcatgaggtaaggccgccctgacctggacttcagggggagggggtaaagggagagaggaggggggctagggggtcct

SEQ ID NO: 10535 - protein, 124 aa, Homo sapiens
MKELHLAIPAKITREKLDQVATAVYQMMDQLYQGKMYFPGKGRETEAGPPHPGTPRPPPEPDLLLPRRLRVFPQRAAKHLPGAGAPHPERHHRKPHRLSAPLWSSAQWKSAVQGLLNYINNWHK

SEQ ID NO: 10536 - DNA, 510 bp, Homo sapiens
gccacagcaacttctccaagaagttctccttctaccgccaccatgtgaacttcaagtcctggtgggtgggcgacatccccgtgtcaggggcgctgctcaccgactggagcgacgacacgatgaaggagctgcacctggccatccccgccaagatcacccgggagaagctggaccaagtggcgacagcagtgtaccagatgatggatcagctgtaccaggggaagatgtacttccccgggtatttccccaacgagctgcgaaacatcttccgggagcaggtgcacctcatccagaacgccatcatcgaaagccgcatcgactgtcagcaccgctgtggtcctcggcgcagtggaagtcagctgtccagggcctcctgaactacataaataactggcacaaaccacgctcctctgccttctcctggcctgggacacacagagccaccccggccttgtgagtgacccagagaagggaggcctcgggagaaggggtgctcgtaagccaacacca

SEQ ID NO: 10537 - protein, 85 aa, Homo sapiens
MKELHLAIPAKITREKLDQVATAVYQMMDQLYQGKMYFPGYFPNELRNIFREQVHLIQNAIIESRIDCQHRCGPRRSGSQLSRAS

SEQ ID NO: 10538 - DNA, 704 bp, Homo sapiens
gtgtcaggggcgctgctcaccgactggagcgacgacacgatgaaggagctgcacctggccatccccgccaagatcacccgggagaagctggaccaagtggcgacagcagtgtaccagatgatggatcagctgtaccaggggaagatgtacttccccgggtatttccccaacgagctgcgaaacatcttccgggagcaggtgcacctcatccagaacgccatcatcgaaagcatcttccagtacgagaccatctcctgcaacaactgcacagactcgcacgtcgcctgctttggctataactgcgagtcctcggcgcagtggaagtcagctgtccagggcctcctgaactacataaataactggcacaacctggtatcgccagccttaaggtgtctggagcccccacacttggccaacctgaccttggaagatgctgctgagtgtctcaagcagcactgacagcagctgggcctgccccagggcaacgtgggggcggagactcagctggacagcccctgcctgtcactctggagctgggctgctgctgcctcaggaccccctctccgaccccggacagagctgagctggccagggccaggagggcgggagggagggaatgggggtgggctgtgcgcagcatcagcgcctgggcaggtccgcagagctgcgggatgtgattaaagtccctgatgtttctctttgca

SEQ ID NO: 10539 - protein, 139 aa, Homo sapiens
MKELHLAIPAKITREKLDQVATAVYQMMDQLYQGKMYFPGYFPNELRNIFREQVHLIQNAIIESIFQYETISCNNCTDSHVACFGYNCESSAQWKSAVQGLLNYINNWHNLVSPALRCLEPPHLANLTLEDAAECLKQH

SEQ ID NO: 10540 - DNA, 1948 bp, Homo sapiens
agcggcccccacccgtcccagctcggcttagcccccgcggacccctccaggccgcgaccccagggcgtcctgtgccgccacgccctccatctgtgtgggtcctctgctgggcccgcccctggtcacagccagactgactcagtttccctgggaggtcccgctcgagcccgtccttcccctccctctgcccgcccccagccctcgccccaccctcggcgcccgcacatctgcctgctcagctccagacggcgcccggacccccgggcgcgggatccagccaggtgggagccccgcagatgaggtctctgaaggtgtgcctgaaccagtgccagcctgccctgtctgcagcatcggcctgatggggtggtgactgatccctcagggctccggagccatgtggcccaacggcagttccctggggccctgtttccggcccacaaacattaccctggaggagagacggctgatcgcctcgccctggttcgccgcctccttctgcgtggtgggcctggcctccaacctgctggccctgagcgtgctggcgggcgcgcggcaggggggttcgcacacgcgctcctccttcctcaccttcctctgcggcctcgtcctcaccgacttcctggggctgctggtgaccggtaccatcgtggtgtcccagcacgccgcgctcttcgagtggcacgccgtggaccctggctgccgtctctgtcgcttcatgggcgtcgtcatgatcttcttcggcctgtccccgctgctgctgggggccgccatggcctcagagcgctacctgggtatcacccggcccttctcgcgcccggcggtcgcctcgcagcgccgcgcctgggccaccgtggggctggtgtgggcggccgcgctggcgctgggcctgctgcccctgctgggcgtgggtcgctacaccgtgcaatacccggggtcctggtgcttcctgacgctgggcgccgagtccggggacgtggccttcgggctgctcttctccatgctgggcggcctctcggtcgggctgtccttcctgctgaacacggtcagcgtggccaccctgtgccacgtctaccacgggcaggaggcggcccagcagcgtccccgggactccgaggtggagatgatggctcagctcctggggatcatggtggtggccagcgtgtgttggctgccccttctggtcttcatcgcccagacagtgctgcgaaacccgcctgccatgagccccgccgggcagctgtcccgcaccacggagaaggagctgctcatctacttgcgcgtggccacctggaaccagatcctggacccctgggtgtatatcctgttccgccgcgccgtgctccggcgtctccagcctcgcctcagcacccggcccagacggagtctcactctgtggcccagcctggagtacagtggcacgatctcggctcactgcaacctccgcctcccgggttcaagcgattctcgtgcctcagcctcccgagcagctgggattacaggcgtaagccactgcgcccggccttgcatgctctttgaccctgaatttgacctacttgctggggtacagttgcttccttttgaacctccaacagggaaggctctgtccagaaaggattgaatgtgaacgggggcacccccttttcttgccaaaatatatctctgcctttggttttattttcctttgggtccagaagttttcaatctctggagtttgtgcattgggcctcacccggagcagacgagggcagggctgggaaggatggggagggacatagaggattcggttcctcccccaccttgtttcttgagtgtttcctaatcacttgatgggtggtaccacctagaattcttccagcagcctgtaatgggagggctacaggttagccctggaacctgcaatcaaaccacctttgaatctgtgtgtcattaaaagtagatataaatgggc

SEQ ID NO: 10541 - protein, 407 aa, Homo sapiens
MWPNGSSLGPCFRPTNITLEERRLIASPWFAASFCVVGLASNLLALSVLAGARQGGSHTRSSFLTFLCGLVLTDFLGLLVTGTIVVSQHAALFEWHAVDPGCRLCRFMGVVMIFFGLSPLLLGAAMASERYLGITRPFSRPAVASQRRAWATVGLVWAAALALGLLPLLGVGRYTVQYPGSWCFLTLGAESGDVAFGLLFSMLGGLSVGLSFLLNTVSVATLCHVYHGQEAAQQRPRDSEVEMMAQLLGIMVVASVCWLPLLVFIAQTVLRNPPAMSPAGQLSRTTEKELLIYLRVATWNQILDPWVYILFRRAVLRRLQPRLSTRPRRSLTLWPSLEYSGTISAHCNLRLPGSSDSRASASRAAGITGVSHCARPCMLFDPEFDLLAGVQLLPFEPPTGKALSRKD

SEQ ID NO: 10542 - DNA, 1635 bp, Homo sapiens
agcggcccccacccgtcccagctcggcttagcccccgcggacccctccaggccgcgaccccagggcgtcctgtgccgccacgccctccatctgtgtgggtcctctgctgggcccgcccctggtcacagccagactgactcagtttccctgggaggtcccgctcgagcccgtccttcccctccctctgcccgcccccagccctcgccccaccctcggcgcccgcacatctgcctgctcagctccagacggcgcccggacccccgggcgcgggatccagccaggtgggagccccgcagatgaggtctctgaaggtgtgcctgaaccagtgccagcctgccctgtctgcagcatcggcctgatggggtggtgactgatccctcagggctccggagccatgtggcccaacggcagttccctggggccctgtttccggcccacaaacattaccctggaggagagacggctgatcgcctcgccctggttcgccgcctccttctgcgtggtgggcctggcctccaacctgctggccctgagcgtgctggcgggcgcgcggcaggggggttcgcacacgcgctcctccttcctcaccttcctctgcggcctcgtcctcaccgacttcctggggctgctggtgaccggtaccatcgtggtgtcccagcacgccgcgctcttcgagtggcacgccgtggaccctggctgccgtctctgtcgcttcatgggcgtcgtcatgatcttcttcggcctgtccccgctgctgctgggggccgccatggcctcagagcgctacctgggtatcacccggcccttctcgcgcccggcggtcgcctcgcagcgccgcgcctgggccaccgtggggctggtgtgggcggccgcgctggcgctgggcctgctgcccctgctgggcgtgggtcgctacaccgtgcaatacccggggtcctggtgcttcctgacgctgggcgccgagtccggggacgtggccttcgggctgctcttctccatgctgggcggcctctcggtcgggctgtccttcctgctgaacacggtcagcgtggccaccctgtgccacgtctaccacgggcaggaggcggcccagcagcgtccccgggactccgaggtggagatgatggctcagctcctggggatcatggtggtggccagcgtgtgttggctgccccttctggtcttcatcgcccagacagtgctgcgaaacccgcctgccatgagccccgccgggcagctgtcccgcaccacggagaaggagctgctcatctacttgcgcgtggccacctggaaccagatcctggacccctgggtgtatatcctgttccgccgcgccgtgctccggcgtctccagcctcgcctcagcacccggcccaggtcgctgtccctccagccccagctcacgcagcgctccgggctgcagtaggaagtggacagagcgcccctcccgcgcctttccgcggagcccttggcccctcggacagcccatctgcctgttctgaggattcaggggctgggggtgctggatggacagtgggcatcagcagcagggttttgggttgaccccaatccaacccggggacccccaactcctccctgatccttttaccaagcactctcccttcctcggcccct

SEQ ID NO: 10543 - protein, 343 aa, Homo sapiens; identical to SEQ ID NO: 1777

SEQ ID NO: 10544 - DNA, 977 bp, Homo sapiens
ggagccatgtggcccaacggcagttccctggggccctgtttccggcccacaaacattaccctggaggagagacggctgatcgcctcgccctggttcgccgcctccttctgcgtggtgggcctggcctccaacctgctggccctgagcgtgctggcgggcgcgcggcaggggggttcgcacacgcgctcctccttcctcaccttcctctgcggcctcgtcctcaccgacttcctggggctgctggtgaccggtaccatcgtggtgtcccagcacgccgcgctcttcgagtggcacgccgtggaccctggctgccgtctctgtcgcttcatgggcgtcgtcatgatcttcttcggcctgtccccgctgctgctgggggccgccatggcctcagagcgctacctgggtatcacccggcccttctcgcgcccggcggtcgcctcgcagcgccgcgcctgggccaccgtggggctggtgtgggcggccgcgctggcgctgggcctgctgcccctgctgggcgtgggtcgctacaccgtgcaatacccggggtcctggtgcttcctgacgctgggcgccgagtccggggacgtggccttcgggctgctcttctccatgctgggcggcctctcggtcgggctgtccttcctgctgaacacggtcagcgtggccaccctgtgccacgtctaccacgggcaggaggcggcccagcagcgtccccgggactccgaggtggagatgatggctcagctcctggggatcatggtggtggccagcgtgtgttggctgccccttctgctttgcccaccccatgctgtaactccccggacccagtttccgtctcccgactggactgtgagcctatgagggtgcgccctgggagttcctcagctgctgttgctgcttcattcagcctacaggacctactgctcaggaaatgatttgattgattgattgatttaatttatttagagatggagtct

SEQ ID NO: 10545 - protein, 284 aa, Homo sapiens
MWPNGSSLGPCFRPTNITLEERRLIASPWFAASFCVVGLASNLLALSVLAGARQGGSHTRSSFLTFLCGLVLTDFLGLLVTGTIVVSQHAALFEWHAVDPGCRLCRFMGVVMIFFGLSPLLLGAAMASERYLGITRPFSRPAVASQRRAWATVGLVWAAALALGLLPLLGVGRYTVQYPGSWCFLTLGAESGDVAFGLLFSMLGGLSVGLSFLLNTVSVATLCHVYHGQEAAQQRPRDSEVEMMAQLLGIMVVASVCWLPLLLCPPHAVTPRTQFPSPDWTVSL

SEQ ID NO: 10546 - DNA, 1886 bp, Homo sapiens
aaattcactgggtgcgctggaacgcggcacacagtagtagtatgccctgcttaatacatacaggacatatttgaggccccttccaggggtggggtgggaggacagagggatggggggtgcaccagacgacacagccagactgagaaaggtggtcccagagcagagacagggacctcgacgcatcctccatacccgctgcggggaaatggaccccaccagccagcacggggatgcggcctgaggtgggacgtgaacccgcggccctgcagcccagacagcggccccggagtgaccaccagcttcaccgaagcccctttactgtgcccccgaggacacctgcctgccgttccccagggccgtcaccgccgatagcggtagcgcttgaagtgaaaccacagctggaagatgccgttggcaaactggcagcggaagccgtggcggtgcgagtattcccactcgcggttgacgatcttgaaagcgatgtcctcgtagggcggccccgcgtggaagcgcaggatggcgaaatccttgttgtcggcgcaggcctccaggaagtactcgggcgtggagcgcttgtcgatgaggtcggggtagaagatgttgaacttgtatccctgcacgatcttgggcggtgggttgtcaaagtcgtagtgcgtctggttgtacttgttccactcgaagcccgtgtgcacgcggttgaagaagcgcggcttgcgtggccggtacttgtcggcccacaggacggaggctgcccagggagtgctcggacagcggccggtaaaagcttccaccacctgtggccccaaggccagtgggccagcaagcccaggatgaatgaaggaacgccccagtgcgcgtgcaggtgacggaatgcacgctcagagacccgggggagaagcagcaagcagctccccactgacgccagcggcttcggccgggaaatgaggctggagaagccccgcccccagctcgccccactggccccaccccctggcctccagccccgcccttacccgtgacctggagctgctggcgcgagagctgcaggcgctgcaggtcctcatccggttccagcacgtgcgcgtccagtggcagctcgtgcgccgtgagcagccgcgggctgtacctgccggcgtcgtagtcgtccaggctctgctggatcaggtcctcctccatgagcaccgcctcgccctcgccctcgccctcaccgtccccgtcgccgtcgccctctgtcggggtcgcgccgtccacctcggcctccgcggggccgccctccgaggagggcccgggcggggtgggcgccgcgtcctcaggctccaggctgggaggagagagcgttggaggcgcggaggctgcccacggcccctccatcctgctccgcgtctgcatcggcgtccccggggtgccggccgggcctacctgcggctgggggactggggctcctgcttgaggatggggaacagcggctcgctctccacgccctgctcctgcttcagtttgtacagcttctgccgcagcacgtcctggtggcgctcacgcagcctgggacgcagagccggggtcacccgcatggaggcgaaggggctccgcgccccacccccaccgagattctcacgccccttattgctgcaaggaccctgagaaggtggcgagcagccacggctctggctgggacctttgcccaggcttggtcagttcagggtcaaggcttatgggagagaggacgagaggacgcaggtaccctggtgaaccatcccatggcagggagaggtgggtctctgtctcacgctgcagtctcagtgtcttgtggctggggctggccaggagaaggggcccagcaggacaccagccaacaagcatgataaatttagagacatttacaaatt

SEQ ID NO: 10547 - protein, 211 aa, Homo sapiens
MRPEVGREPAALQPRQRPRSDHQLHRSPFTVPPRTPACRSPGPSPPIAVALEVKPQLEDAVGKLAAEAVAVRVFPLAVDDLESDVLVGRPRVEAQDGEILVVGAGLQEVLGRGALVDEVGVEDVELVSLHDLGRWVVKVVVRLVVLVPLEARVHAVEEARLAWPVLVGPQDGGCPGSARTAAGKSFHHLWPQGQWASKPRMNEGTPQCACR

SEQ ID NO: 10548 - DNA, 2514 bp, Homo sapiens
gatctggccgtggagatgcatgagccctacacgttcctcaacggcctcaccgtggccgacatggaggacctgctggaggatatccaggtctacatggagctggagcagggcaagaacgccgacttctggcgggacatgaccaccatcaccgaggacgagatctccaagctccgcaagctggaggcctcgggcaaggggccagggcatcgagggcaaaatccgcgctggtggccccaacctggacatgggctactgggagagcctcctgcagcagcttcgtgcccacatggcacgggcccggctgcgtgagcgccaccaggacgtgctgcggcagaagctgtacaaactgaagcaggagcagggcgtggagagcgagccgctgttccccatcctcaagcaggagccccagtcccccagccgcagcctggagcctgaggacgcggcgcccaccccgcccgggccctcctcggagggcggccccgcggaggccgaggtggacggcgcgaccccgacagagggcgacggcgacggggacggtgagggcgagggcgagggcgaggcggtgctcatggaggaggacctgatccagcagagcctggacgactacgacgccggcaggtacagcccgcggctgctcacggcgcacgagctgccactggacgcgcacgtgctggaaccggatgaggacctgcagcgcctgcagctctcgcgccagcagctccaggtcacgggagacgccagcgagagcgccgaggacatcttcttccggcgggccaaggagggcatgggccaggacgaggcgcagttcagcgtggagatgccactcaccggcaaggcctacctgtgggccgacaagtaccggccacgcaagccgcgcttcttcaaccgcgtgcacacgggcttcgagtggaacaagtacaaccagacgcactacgactttgacaacccaccgcccaagatcgtgcagggatacaagttcaacatcttctaccccgacctcatcgacaagcgctccacgcccgagtacttcctggaggcctgcgccgacaacaaggatttcgccatcctgcgcttccacgcggggccgccctacgaggacatcgctttcaagatcgtcaaccgcgagtgggaatactcgcaccgccacggcttccgctgccagtttgccaacggcatcttccagctgtggtttcacttcaagcgctaccgctatcggcggtgacggccctggggaacggcaggcaggtgtcctcgggggcacagtaaaggggcttcggtgaagctggtggtcactccggggccgctgtctgggctgcagggccgcgggttcacgtcccacctcaggccgcatctttctttcgccaggcctcagtttcctcctatataaaaggggggtcaccattgagcctgccatggtgagctgaggagacactgggacaggctggcctagggtcctgatgcaacggagggggcgctaggggcatctttcgagcacgagggtggccagcagccgccagctgacctcaccgtccaggcggacactctccaccgcccctcagccaggctgggtggggcccacagggcctgccccaagtggcggccacacagggtgttgtggagatgggccagaggggcctgggcttggcggtgccaggctcgtgagaagcaggaaactcaaggccagccctgccacatcacggggcacccactgggcgtgaggcagagcccgcggctgtggggcagctccagccctgcccacaggccaccctcgcccgcacaggcagcactgaggccgggaccctgctggcgcccgatccgccactgcagaagagaccctctgtggacacccacactctgcagggactggcccccaactcaccccgtgctggctggtggggtccatttccccgcagcgggtatggaggatgcgtcgaggtccctgtctctgtcaaggtcgtgggaaccaaaagtcactgagccgtcctccccccacctctgagcacagggcctggagggcaggggctccccgaaggctgggggttggagaagggtgaggggcttcccccagggatccccccacctggcctgctcacggggccttggagcatgagaccagtgaccccgagttttgcccatatcaggacagtggctccttctcactcccctttctcaggccaggagggccgagggccacacgggtgccacagcccaggtcggagtggcccagccggcaggcttgttcttcagcatccgacgggaacatctccaacagaagcaaaacggaaagtgcctcccggacccccagagggccacccaacctcaccagtcaccagccccagaccacccacagcccctcccagacaccccgcctcatctggaaatagttccgtttgtttctctaaaaagacttgtaggtgggaaaaaaaatcttttgttctcatggaattggcctattggcaagatcgcatgtttttttaataaacgttgtattttagaataatcttaggtttgcag

SEQ ID NO: 10549 - protein, 325 aa, Homo sapiens
MGYWESLLQQLRAHMARARLRERHQDVLRQKLYKLKQEQGVESEPLFPILKQEPQSPSRSLEPEDAAPTPPGPSSEGGPAEAEVDGATPTEGDGDGDGEGEGEGEAVLMEEDLIQQSLDDYDAGRYSPRLLTAHELPLDAHVLEPDEDLQRLQLSRQQLQVTGDASESAEDIFFRRAKEGMGQDEAQFSVEMPLTGKAYLWADKYRPRKPRFFNRVHTGFEWNKYNQTHYDFDNPPPKIVQGYKFNIFYPDLIDKRSTPEYFLEACADNKDFAILRFHAGPPYEDIAFKIVNREWEYSHRHGFRCQFANGIFQLWFHFKRYRYRR

SEQ ID NO: 10550 - DNA, 2816 bp, Homo sapiens
cccagcgcaggcttcggctattggtgttggtgccgcggccactggcccagccgatgggtcgggacacacgctcgcgctcgcggtccgcgggtcgccggggccgaaggcggcagagtcagagcgggagccgaagtcggagcaggagccatgggcggcgaaaccgacggcgccgggaggacgagggacggcgcagacggaggcggcggagccgggagcgcaggtcagattcagaggaagagcggtggcagcgctcagggatgcgaagccggagccccccgcggcccaagtggcactcaagagatgggtcctctcagtcggactcaggagaggagcagtcacggggccagtgggctcgccggcgacggcgcgcacgctcgtggtctcctagctcctcagcatccagctccgcgtctccagggcgatcccagagcccccgggcggccgcggctgccctgagccagcagcagagcctgcaggagcggctgcggctgcgggaggagcggaagcagcaggaggagctgatgaaggccttcgagacgcccgaggagaagcgcgcacggcggctggccaagaaggaggccaaggagcgcaagaagcgggagaagatgggctggggtgaggagtacatgggctacaccaacaccgacaaccccttcggagacaacaacctgctgggcaccttcatctggaataaggccctggagaagaaggggatcagccacctggaggagaaggagctgaaggagcggaacaagaggatccaggaggacaaccggctggagctgcagaaggtgaagcagctgcggctggagcgggagcgggagaaggccatgcgcgagcaggagctggagatgctgcagcgcgagaaggaggcagagcacttcaagacatgggaggagcaggaggacaacttccacctccagcaggccaagctgcgttccaagatccgcatccgggacgggcgggccaagcccatcgacctgctggccaagtacatcagcgctgaggatgacgatctggccgtggagatgcatgagccctacacgttcctcaacggcctcaccgtggccgacatggaggacctgctggaggatatccaggtctacatggagctggagcagggcaagaacgccgacttctggcgggacatgaccaccatcaccgaggacgagatctccaagctccgcaagctggaggcctcgggcaaggggccaggtgagcgccgcgagggggtcaacgcctccgtcagctctgatgtgcagtcggtgttcaaggggaagacatacaaccagctgcaggtcatcttccagggcatcgagggcaaaatccgcgctggtggccccaacctggacatgggctactgggagagcctcctgcagcagcttcgtgcccacatggcacgggcccggctgcgtgagcgccaccaggacgtgctgcggcagaagctgtacaaactgaagcaggagcagggcgtggagagcgagccgctgttccccatcctcaagcaggagccccagtcccccagccgcagcctggagcctgaggacgcggcgcccaccccgcccgggccctcctcggagggcggccccgcggaggccgaggtggacggcgcgaccccgacagagggcgacggcgacggggacggtgagggcgagggcgagggcgaggcggtgctcatggaggaggacctgatccagcagagcctggacgactacgacgccggcaggtacagcccgcggctgctcacggcgcacgagctgccactggacgcgcacgtgctggaaccggatgaggacctgcagcgcctgcagctctcgcgccagcagctccaggtcacgggagacgccagcgagagcgccgaggacatcttcttccggcgggccaaggagggcatgggccaggacgaggcgcagttcagcgtggagatgccactcaccggcaaggcctacctgtgggccgacaagtaccggccacgcaagccgcgcttcttcaaccgcgtgcacacgggcttcgagtggaacaagtacaaccagacgcactacgactttgacaacccaccgcccaagatcgtgcagggatacaagttcaacatcttctaccccgacctcatcgacaagcgctccacgcccgagtacttcctggaggcctgcgccgacaacaaggatttcgccatcctgcgcttccacgcggggccgccctacgaggacatcgctttcaagatcgtcaaccgcgagtgggaatactcgcaccgccacggcttccgctgccagtttgccaacggcatcttccagctgtggtttcacttcaagcgctaccgctatcggcggtgacggccctggggaacggcaggcagcactgaggccgggaccctgctggcgcccgatccgccactgcagaagagaccctctgtggacacccacactctgcagggactggcccccaactcaccccgtgctggctggtggggtccatttccccgcagcgggccaggagggccgagggccacacgggtgccacagcccaggtcggagtggcccagccggcaggcttgttcttcagcatccgacgggaacatctccaacagaagcaaaacggaaagtgcctcccggacccccagagggccacccaacctcaccagtcaccagccccagaccacccacagcccctcccagacaccccgcctcatctggaaatagttccgtttgtttctctaaaaagacttgtaggtgggaaaaaaaatcttttgttctcatggaattggcctattggcaagatcgcatgtttttttaataaacgttgtattttagaataatctt

SEQ ID NO: 10551 - protein, 758 aa, Homo sapiens
MGRDTRSRSRSAGRRGRRRQSQSGSRSRSRSHGRRNRRRREDEGRRRRRRRSRERRSDSEEERWQRSGMRSRSPPRPKWHSRDGSSQSDSGEEQSRGQWARRRRRARSWSPSSSASSSASPGRSQSPRAAAAALSQQQSLQERLRLREERKQQEELMKAFETPEEKRARRLAKKEAKERKKREKMGWGEEYMGYTNTDNPFGDNNLLGTFIWNKALEKKGISHLEEKELKERNKRIQEDNRLELQKVKQLRLEREREKAMREQELEMLQREKEAEHFKTWEEQEDNFHLQQAKLRSKIRIRDGRAKPIDLLAKYISAEDDDLAVEMHEPYTFLNGLTVADMEDLLEDIQVYMELEQGKNADFWRDMTTITEDEISKLRKLEASGKGPGERREGVNASVSSDVQSVFKGKTYNQLQVIFQGIEGKIRAGGPNLDMGYWESLLQQLRAHMARARLRERHQDVLRQKLYKLKQEQGVESEPLFPILKQEPQSPSRSLEPEDAAPTPPGPSSEGGPAEAEVDGATPTEGDGDGDGEGEGEGEAVLMEEDLIQQSLDDYDAGRYSPRLLTAHELPLDAHVLEPDEDLQRLQLSRQQLQVTGDASESAEDIFFRRAKEGMGQDEAQFSVEMPLTGKAYLWADKYRPRKPRFFNRVHTGFEWNKYNQTHYDFDNPPPKIVQGYKFNIFYPDLIDKRSTPEYFLEACADNKDFAILRFHAGPPYEDIAFKIVNREWEYSHRHGFRCQFANGIFQLWFHFKRYRYRR

SEQ ID NO: 10552 - DNA, 2679 bp, Homo sapiens
cccagcgcaggcttcggctattggtgttggtgccgcggccactggcccagccgatgggtcgggacacacgctcgcgctcgcggtccgcgggtcgccggggccgaaggcggcagagtcagagcgggagccgaagtcggagcaggagccatgggcggcgaaaccgacggcgccgggaggacgagggacggcgcagacggaggcggcggagccgggagcgcaggtcagattcagaggaagagcggtggcagcgctcagggatgcgaagccggagccccccgcggcccaagtggcactcaagagatgggtcctctcagtcggactcaggagaggagcagtcacggggccagtgggctcgccggcgacggcgcgcacgctcgtggtctcctagctcctcagcatccagctccgcgtctccagggcgatcccagagcccccgggcggccgcggctgccctgagccagcagcagagcctgcaggagcggctgcggctgcgggaggagcggaagcagcaggaggagctgatgaaggccttcgagacgcccgaggagaagcgcgcacggcggctggccaagaaggaggccaaggagcgcaagaagcgggagaagatgggctggggtgaggagtacatgggctacaccaacaccgacaaccccttcggagacaacaacctgctgggcaccttcatctggaataaggccctggagaagaaggggatcagccacctggaggagaaggagctgaaggagcggaacaagaggatccaggaggacaaccggctggagctgcagaaggtgaagcagctgcggctggagcgggagcgggagaaggccatgcgcgagcaggagctggagatgctgcagcgcgagaaggaggcagagcacttcaagacatgggaggagcaggaggacaacttccacctccagcaggccaagctgcgttccaagatccgcatccgggacgggcgggccaagcccatcgacctgctggccaagtacatcagcgctgaggatgacgatctggccgtggagatgcatgagccctacacgttcctcaacggcctcaccgtggccgacatggaggacctgctggaggatatccaggtctacatggagctggagcagggcaagaacgccgacttctggcgggacatgaccaccatcaccgaggacgagatctccaagctccgcaagctggaggcctcgggcaaggggccaggtgagcgccgcgagggggtcaacgcctccgtcagctctgatgtgcagtcggtgttcaaggggaagacatacaaccagctgcaggtcatcttccagggcatcgagggcaaaatccgcgctggtggccccaacctggacatgggctactgggagagcctcctgcagcagcttcgtgcccacatggcacgggcccggctgcgtgagcgccaccaggacgtgctgcggcagaagctgtacaaactgaagcaggagcagggcgtggagagcgagccgctgttccccatcctcaagcaggagccccagtcccccagccgcagcctggagcctgaggacgcggcgcccaccccgcccgggccctcctcggagggcggccccgcggaggccgaggtggacggcgcgaccccgacagagggcgacggcgacggggacggtgagggcgagggcgagggcgaggcggtgctcatggaggaggacctgatccagcagagcctggacgactacgacgccggcaggtacagcccgcggctgctcacggcgcacgagctgccactggacgcgcacgtgctggaaccggatgaggacctgcagcgcctgcagctctcgcgccagcagctccaggtcacgggagacgccagcgagagcgccgaggacatcttcttccggcgggccaaggagggcatgggccaggacgaggcgcagttcagcgtggagatgccactcaccggcaaggcctacctgtgggccgacaagtaccggccacgcaagccgcgcttcttcaaccgcgtgcacacgggcttcgagtggaacaagtacaaccagacgcactacgactttgacaacccaccgcccaagatcgtgcagggatacaagttcaacatcttctaccccgacctcatcgacaagcgctccacgcccgagtacttcctggaggcctgcgccgacaacaaggatttcgccatcctgcgcttccacgcggggccgccctacgaggacatcgctttcaagatcgtcaaccgcgagtgggaatactcgcaccgccacggcttccgctgccagtttgccaacggcatcttccagctgtggtttcacttcaagcgctaccgctatcggcggtgacggccctggggaacggcaggcaggagggccgagggccacacgggtgccacagcccaggtcggagtggcccagccggcaggcttgttcttcagcatccgacgggaacatctccaacagaagcaaaacggaaagtgcctcccggacccccagagggccacccaacctcaccagtcaccagccccagaccacccacagcccctcccagacaccccgcctcatctggaaatagttccgtttgtttctctaaaaagacttgtaggtgggaaaaaaaatcttttgttctcatggaattggcctattggcaagatcgcatgtttttttaataaacgttgtattttagaataatctt

SEQ ID NO: 10553 - protein, 758 aa, Homo sapiens; identical to SEQ ID NO: 10551

SEQ ID NO: 10554 - DNA, 3355 bp, Homo sapiens
cccagcgcaggcttcggctattggtgttggtgccgcggccactggcccagccgatgggtcgggacacacgctcgcgctcgcggtccgcgggtcgccggggccgaaggcggcagagtcagagcgggagccgaagtcggagcaggagccatgggcggcgaaaccgacggcgccgggaggacgagggacggcgcagacggaggcggcggagccgggagcgcaggtcagattcagaggaagagcggtggcagcgctcagggatgcgaagccggagccccccgcggcccaagtggcactcaagagatgggtcctctcagtcggactcaggagaggagcagtcacggggccagtgggctcgccggcgacggcgcgcacgctcgtggtctcctagctcctcagcatccagctccgcgtctccagggcgatcccagagcccccgggcggccgcggctgccctgagccagcagcagagcctgcaggagcggctgcggctgcgggaggagcggaagcagcaggaggagctgatgaaggccttcgagacgcccgaggagaagcgcgcacggcggctggccaagaaggaggccaaggagcgcaagaagcgggagaagatgggctggggtgaggagtacatgggctacaccaacaccgacaaccccttcggagacaacaacctgctgggcaccttcatctggaataaggccctggagaagaaggggatcagccacctggaggagaaggagctgaaggagcggaacaagaggatccaggaggacaaccggctggagctgcagaaggtgaagcagctgcggctggagcgggagcgggagaaggccatgcgcgagcaggagctggagatgctgcagcgcgagaaggaggcagagcacttcaagacatgggaggagcaggaggacaacttccacctccagcaggccaagctgcgttccaagatccgcatccgggacgggcgggccaagcccatcgacctgctggccaagtacatcagcgctgaggatgacgatctggccgtggagatgcatgagccctacacgttcctcaacggcctcaccgtggccgacatggaggacctgctggaggatatccaggtctacatggagctggagcagggcaagaacgccgacttctggcgggacatgaccaccatcaccgaggacgagatctccaagctccgcaagctggaggcctcgggcaaggggccaggtgagcgccgcgagggggtcaacgcctccgtcagctctgatgtgcagtcggtgttcaaggggaagacatacaaccagctgcaggtcatcttccagggcatcgagggcaaaatccgcgctggtggccccaacctggacatgggctactgggagagcctcctgcagcagcttcgtgcccacatggcacgggcccggctgcgtgagcgccaccaggacgtgctgcggcagaagctgtacaaactgaagcaggagcagggcgtggagagcgagccgctgttccccatcctcaagcaggagccccagtcccccagccgcagcctggagcctgaggacgcggcgcccaccccgcccgggccctcctcggagggcggccccgcggaggccgaggtggacggcgcgaccccgacagagggcgacggcgacggggacggtgagggcgagggcgagggcgaggcggtgctcatggaggaggacctgatccagcagagcctggacgactacgacgccggcaggtacagcccgcggctgctcacggcgcacgagctgccactggacgcgcacgtgctggaaccggatgaggacctgcagcgcctgcagctctcgcgccagcagctccaggtcacgggagacgccagcgagagcgccgaggacatcttcttccggcgggccaaggagggcatgggccaggacgaggcgcagttcagcgtggagatgccactcaccggcaaggcctacctgtgggccgacaagtaccggccacgcaagccgcgcttcttcaaccgcgtgcacacgggcttcgagtggaacaagtacaaccagacgcactacgactttgacaacccaccgcccaagatcgtgcagggatacaagttcaacatcttctaccccgacctcatcgacaagcgctccacgcccgagtacttcctggaggcctgcgccgacaacaaggatttcgccatcctgcgcttccacgcggggccgccctacgaggacatcgctttcaagatcgtcaaccgcgagtgggaatactcgcaccgccacggcttccgctgccagtttgccaacggcatcttccagctgtggtttcacttcaagcgctaccgctatcggcggtgacggccctggggaacggcaggcaggtgtcctcgggggcacagtaaaggggcttcggtgaagctggtggtcactccggggccgctgtctgggctgcagggccgcgggttcacgtcccacctcaggccgcatctttctttcgccaggcctcagtttcctcctatataaaaggggggtcaccattgagcctgccatggtgagctgaggagacactgggacaggctggcctagggtcctgatgcaacggagggggcgctaggggcatctttcgagcacgagggtggccagcagccgccagctgacctcaccgtccaggcggacactctccaccgcccctcagccaggctgggtggggcccacagggcctgccccaagtggcggccacacagggtgttgtggagatgggccagaggggcctgggcttggcggtgccaggctcgtgagaagcaggaaactcaaggccagccctgccacatcacggggcacccactgggcgtgaggcagagcccgcggctgtggggcagctccagccctgcccacaggccaccctcgcccgcacaggcagcactgaggccgggaccctgctggcgcccgatccgccactgcagaagagaccctctgtggacacccacactctgcagggactggcccccaactcaccccgtgctggctggtggggtccatttccccgcagcgggccaggagggccgagggccacacgggtgccacagcccaggtcggagtggcccagccggcaggcttgttcttcagcatccgacgggaacatctccaacagaagcaaaacggaaagtgcctcccggacccccagagggccacccaacctcaccagtcaccagccccagaccacccacagcccctcccagacaccccgcctcatctggaaatagttccgtttgtttctctaaaaagacttgtaggtgggaaaaaaaatcttttgttctcatggaattggcctattggcaagatcgcatgtttttttaataaacgttgtattttagaataatctt

SEQ ID NO: 10555 - protein, 758 aa, Homo sapiens; identical to SEQ ID NO: 10551

SEQ ID NO: 10556 - DNA, 784 bp, Homo sapiens
gattattctaaaatacaacgtttattaaaaaaacatgcgatcttgccaataggccaattccatgagaacaaaagattttttttcccacctacaagtctttttagagaaacaaacggaactatttccagatgaggcggggtgtctgggaggggctgtgggtggtctggggctggtgactggtgaggttgggtggcccttgcagcccagacagcggccccggagtgaccaccagcttcaccgaagcccctttactgtgcccccgaggacacctgcctgccgttccccagggccgtcaccgccgatagcggtagcgcttgaagtgaaaccacagctggaagatgccgttggcaaactggcagcggaagccgtggcggtgcgagtattcccactcgcggttgacgatcttgaaagcgatgtcctcgtagggcggccccgcgtggaagcgcaggatggcgaaatccttgttgtcggcgcaggcctccaggaagtactcgggcgtggagcgcttgtcgatgaggtcggggtagaagatgttgaacttgtatccctgcacgatcttgggcggtgggttgtcaaagtcgtagtgcgtctggttgtacttgttccactcgaagcccgtgtgcacgcggttgaagaagcgcggcttgcgtggccggtacttgtcggcccacaggtaggccttgccggtgagtggcatctccacgctgaactgcgcctcgtcctggcccatgccctccttggcccgccggaagaagatgtcctcggcgctctcgctggcgtctcc

SEQ ID NO: 10557 - protein, 240 aa, Homo sapiens
MRTKDFFSHLQVFLEKQTELFPDEAGCLGGAVGGLGLVTGEVGWPLQPRQRPRSDHQLHRSPFTVPPRTPACRSPGPSPPIAVALEVKPQLEDAVGKLAAEAVAVRVFPLAVDDLESDVLVGRPRVEAQDGEILVVGAGLQEVLGRGALVDEVGVEDVELVSLHDLGRWVVKVVVRLVVLVPLEARVHAVEEARLAWPVLVGPQVGLAGEWHLHAELRLVLAHALLGPPEEDVLGALAGV

SEQ ID NO: 10558 - DNA, 483 bp, Homo sapiens
tgggctgggccgactgcacctgctcgccggttgcgcagttgggagctgtggggtctccaggtggcttctgcccgatgtcgtctgaccccagagttctttattgaggcacacactgctgcctggcacttcatcgccaccatgtgctgtgcacctgcggtgtgctgggcaccaccgtgagctctgggcgggcagccatggaggaggaagatgtggtcatcgttgacgcctgtggaagcggccccaggctgggttggatagaccacagagtggcccgggtgtctgggggtggtccccagccaggcagcctgtgtccctggaggcaagttctgggcggcaggggttcctggaaccccctcatggcgacggggcaccgggagcctgaggaaggtggtcgggaagtgggggctccgcgccaggctctcagacagctgctggaagaagccagctttgagggtctccaggctgggacaagcccatcagtgg

SEQ ID NO: 10559 - protein, 95 aa, Homo sapiens
MEEEDVVIVDACGSGPRLGWIDHRVARVSGGGPQPGSLCPWRQVLGGRGSWNPLMATGHREPEEGGREVGAPRQALRQLLEEASFEGLQAGTSPS

SEQ ID NO: 10560 - DNA, 5056 bp, Homo sapiens
tcggcggcggcggtcgcagctcgggtccccctcgggcgcccccgccgccgtccgcgcgcggccatggagctggaggtaccggacgaggcggagagcgctgaggcgggggccgtgccctcggaggcggcgtgggcggcagagagcggggcggcggcaggtttggctcagaagaaggcggccccaacagaggttctgtccatgacggcacagccgggccctggccatgggaagaagttgggccatcgaggtgtggacgcatccggcgaaaccacctacaagaagaccacctcctccaccctgaagggtgccatccagctgggcatcggctacaccgtgggccacctgagctccaagcccgaacgcgacgtgctcatgcaggacttctacgtggtggagagcatcttcttccccagcgaaggcagcaacctcacccccgcccaccacttccaggacttccgcttcaagacctatgcacctgtcgccttccgctacttccgggagctctttgggatccggccagatgattacttgtactccctgtgcaatgagccgctgatcgagctgtccaacccgggcgccagtggctccctcttctacgtcaccagcgacgacgagttcatcatcaagaccgtcatgcacaaggaggccgagttcctgcagaagctgctccctggctactacatgaacctcaaccagaacccgcggacgctgctgcccaagttctatgggctgtactgcgtgcagtcggggggcaagaacatccgcgtcgtggtcatgaacaacatcctgccccgcgtggtcaagatgcacctcaagttcgacctcaagggctccacctacaagcggcgcgccagcaagaaggagaaggagaagagcttccccacctacaaggacctggacttcatgcaggacatgcccgaggggctcctgctggacgccgacaccttcagcgccctggtcaagacgctgcagcgggactgcctggtcctggaaagtttcaagatcatggactacagcctgctgctgggcgtgcacaacatcgaccagcacgagcgcgagcggcaggcgcagggcgcccagagcacctcagatgagaagcggcctgtgggccagaaggcgctctactccacggccatggagtccatccagggtggcgccgcgcgcggggaggccatcgaatcggatgacacgatgggcgggatccccgctgtgaacggccgcggggagcggctgctgctgcacattggcatcatcgacatcctgcagtcctacaggttcatcaagaaactggagcacacctggaaggccctcgtccacgatggggacacggtgtccgtccaccgccccagcttctatgccgagcgctttttcaagttcatgagcaacacggtctttcggaagaactcctccctgaagtcctcgccctccaagaaggggcgcggcggagccttgctagctgtgaaaccgctggggcccaccgctgccttctcggccagccagatccctagcgagcgggaggaggcccagtacgacctgcggggggcccgcagctaccccacgctggaggacgaaggccggcccgacctcctgccctgcacgccaccttctttcgaagaagccactacagcctccattgccacgactctgtcatccacatccctctccattcctgagcggtccccctcggagacgtcggagcagccgcggtacaggcggcgcacacagtcgtctggacaggatggcaggccgcaggaggagccacccgcggaagaggatctgcagcagattacagtgcaggtggagcctgcgtgcagcgtggagattgtggtccccaaagaggaggacgcaggggtggaggcttccccggccggtgcctctgctgctgttgaagtagaaactgccagccaggcctcagacgaggagggcgcacctgccagccaggcctcggacgaggaggacgcgcccgccaccgacatctactttcccaccgatgagaggagctgggtgtactccccgctccactatagcgcccaggcccccccggcctccgacggcgagagcgacacataatttctatgcagcccccgacccagagccgagctccacttctgctccggctgcccccgaaggcgctgcccaccccgctgaggcccagagctcgggagatgcccgcctcgccgccccaccggacctcgtcctccccctgcacggatgccgacggccgggcccctccccgacaagcctcccagggccccggcaccccggtcggcagcctgcccctgtgagacccaccctcccgagcggccaatcgcatttgagtccttatttggcacagagacggaagcacgtgtgtgccgttttaggaaaagaacaaaaaagacacaaacaaaccaaccagagggagaagagcccctgcccactgcactctttggttctctgctgtgcctgcctgtgtcctgaggaagaagccaggctgttcgcggtggcctctggggacctgagccccgggggccccatcggcctgcagaggggacggctggggtcccgagcaactctgcctccatccacgtgggaagcggaccctcctgccctcagcttgggtttgggggcctcagtgcaggacatctggcctgaacatcgactgtggggacagccctcgccctgccaagcactgcggccactcagcagctatgttcccgccgcagtggggccctgacgcccacctcccaggtgcccctcgagcaaaaacctctggcgcctccaatccagacccaccacagctggagggccaggcctcctcttccccaggctgccacccacgctggcggagctcagggctggggacttgtccttctcttccaacgtaggccactcagcaactggcatggagggcccaggcaacggagacgttttctccatggcaggacagagcgggaggccgggccttgggccacaggagaccagctcagggcggaaggtcaggctccccgccccctccacgtggagacatggcctagggggccaggcccggctccacaggagtctccttcaggactggtgtggatgtccgccgcctctttcttgtttaagtgatgtgatgtctccgaggaggggagagaagactttgtttccgactcatcaccctccaagagggcagcgctcccagtggtgggactcagcccagactgccctggggcagcttcctgggcccgctgcgctcagagggtgctggttggaggccagagctcggcagagtcacccaccctgcccttccccaggacccctgagaggggcttattggtgatggctgtgggaatcccccacttccaagatgtgcccaggatgtgaggagctggagtggaagctgcacctttgggaagaattcctctccagacctggcagagcctggtgtggggtctgagacggccggagaacctcccaggcagggctctgtgttttgtctgttacaacctccgtatgacgccacgccacccgctgttcacgtcccgtcggcctcctgcacagcccacacgctgcgcccggaaggcccctgctgtggagaagccggacccatccccgaggtccccagcgaggacacacactccacgagagcagcccctccactctgcccaggagaggggccgaccctcctcgggaaccggccagccgcgtggctcccagcatccatcaggacaagcccacgtggggtcctccctgcgtgctcagagggtctgtccagccctgggaagcgaccttggcctcagttcacagcctggtgctcatctgctggcaccgggcatccacccatcagcccccgccctgtccctccgaaggacacccagcaggcaccccccggggaggcaggggcagaggtcagaaggggtgtctgggacctggatggccagcagggacaggggcattgtcatctcaaaggcccaacccccagaggccacaccagtcctcccagggagtcctcgagtcgccctgcccagagccctggcaccagagacgccaagagcctgtggggtgactcggagcagcaggtgtggccccgggcgggcggcaccgcgtccagggcagcctccctccgctgagtgacacgggacaccagtgcccggccgacgcgcctttgcaggagaaatgtgcaaacctctgtggataccatttcatttccattcttgtgttgtctccaaggcccttttggagatatacttggtgttggttgtgttttttggttccttttcagagaactgtaaaccgaggctgacgtgctccactgactgtgccgaggggcgggggcaggaggacggcaagacctatttataatatttagcgaactcggtctccctcagatcccccgcgagggaggctgctggacccaccccgctgtcccccatgatagaagtctgtaaataccttggtgaccaatgcccacttcccctcctgggtcacctctgatggctgctgtccactgagaacgtgggcagtgtccaaattcctgtactgtaaagactaaaaggcgtttgctctgagactgacaaggcggaaacttccatgtgtctcctgccaggctctgtccccctacgccatcccgacacgtccccgttcccccgaaacctggctcagtgcaatactcccattgccatggggtccttcaccatggtactgtctccacagccctcagtccccaccccaggagaggcgcctgccacctcctcctcatctccggtggttcaatcgctccgcctgtccccaacccagtcccatttttatggccaaactgattctgaaacaaaatgaaactgcaaacctcgtgtgtcttaactccccccagggatgccactccattcctccgccccgtggtctggtgcgtgacaatccaaagcgccgagacgagggtgctgtgtccctcaaacccagagtggtgggcgcctctgaaaccatacagccactcctggccccaaacactggtttgcatcccaggttcctcgcccacctacccccgccacaccccgtctttttagagatctctctaataaatcgggtaataagcatc

SEQ ID NO: 10561 - protein, 668 aa, Homo sapiens; identical to SEQ ID NO: 1781

SEQ ID NO: 10562 - DNA, 445 bp, Homo sapiens
gtgcagtcggggggcaagaacatccgcgtcgtggtcatgaacaacatcctgccccgcgtggtcaagatgcacctcaagttcgacctcaagggctccacctacaagcggcgcgccagcaagaaggagaaggagaagagctgtccccaacccagtcccatttttatggccaaactgattctgaaacaaaatgaaactgcaaacctcgtgtgtcttaactccccccagggatgccactccattcctccgccccgtggtctggtgcgtgacaatccaaagcgccgagacgagggtgctgtgtccctcaaacccagagtggtgggcgcctctgaaaccatacagccactcctggccccaaacactggtttgcatcccaggttcctcgcccacctacccccgccacaccccgtctttttagagatctctctaataaatcgggtaataagca

SEQ ID NO: 10563 - protein, 135 aa, Homo sapiens
MNNILPRVVKMHLKFDLKGSTYKRRASKKEKEKSCPQPSPIFMAKLILKQNETANLVCLNSPQGCHSIPPPRGLVRDNPKRRDEGAVSLKPRVVGASETIQPLLAPNTGLHPRFLAHLPPPHPVFLEISLINRVI

SEQ ID NO: 10564 - DNA, 1323 bp, Homo sapiens
tcggcggcggcggtcgcagctcgggtccccctcgggcgcccccgccgccgtccgcgcgcggccatggagctggaggtaccggacgaggcggagagcgctgaggcgggggccgtgccctcggaggcggcgtgggcggcagagagcggggcggcggcaggtttggctcagaagaaggcggccccaacagaggttctgtccatgacggcacagccgggccctggccatgggaagaagttgggccatcgaggtgtggacgcatccggcgaaaccacctacaagaagaccacctcctccaccctgaagggtgccatccagctgggcatcggctacaccgtgggccacctgagctccaagcccgaacgcgacgtgctcatgcaggacttctacgtggtggagagcatcttcttccccagcgaaggcagcaacctcacccccgcccaccacttccaggacttccgcttcaagacctatgcacctgtcgccttccgctacttccgggagctctttgggatccggccagatgattacttgtactccctgtgcaatgagccgctgatcgagctgtccaacccgggcgccagtggctccctcttctacgtcaccagcgacgacgagttcatcatcaagaccgtcatgcacaaggaggccgagttcctgcagaagctgctccctggctactacatgaacctcaaccagaacccgcggacgctgctgcccaagttctatgggctgtactgcgtgcagtcggggggcaagaacatccgcgtcgtggtcatgaacaacatcctgccccgcgtggtcaagatgcacctcaagttcgacctcaagggctccacctacaagcggcgcgccagcaagaaggagaaggagaagagcttccccacctacaaggacctggacttcatgcaggacatgcccgaggggctcctgctggacgccgacaccttcagcgccctggtcaagacgctgcagcgggactgcctggtcctggaaagtttcaagatcatggactacagcctgctgctgggcgtgcacaacatcgaccagcacgagcgcgagcggcaggcgcagggcgcccagagcacctcagatgagaagcggcctgtgggccagaaggcgctctactccacggccatggagtccatccagggtggcgccgcgcgcggggaggccatcgaatcggatgacacggtcttcgctggcctggcgggggagcaggtgagcgtaccagcctgtggcgtgagcagagcgtgcagggcgccagcccagcgggtctgggtcccagtggcttcaggatgactgctgcacgtgtggcctcactaa

SEQ ID NO: 10565 - protein, 411 aa, Homo sapiens
MELEVPDEAESAEAGAVPSEAAWAAESGAAAGLAQKKAAPTEVLSMTAQPGPGHGKKLGHRGVDASGETTYKKTTSSTLKGAIQLGIGYTVGHLSSKPERDVLMQDFYVVESIFFPSEGSNLTPAHHFQDFRFKTYAPVAFRYFRELFGIRPDDYLYSLCNEPLIELSNPGASGSLFYVTSDDEFIIKTVMHKEAEFLQKLLPGYYMNLNQNPRTLLPKFYGLYCVQSGGKNIRVVVMNNILPRVVKMHLKFDLKGSTYKRRASKKEKEKSFPTYKDLDFMQDMPEGLLLDADTFSALVKTLQRDCLVLESFKIMDYSLLLGVHNIDQHERERQAQGAQSTSDEKRPVGQKALYSTAMESIQGGAARGEAIESDDTVFAGLAGEQVSVPACGVSRACRAPAQRVWVPVASG

SEQ ID NO: 10566 - DNA, 480 bp, Homo sapiens
gattgtcaggctggctctgcagtgagacccaaagcctccgaccatggggaccacaggcccctctgaggacctgccaggacggccaggctgggcagcggcactccacgacacaggctggggtggggacccggaggcggcagggccgaccctcagctctggtgaggctcagaccaggacccggcggacaaggaatgtgatgcaagggatggtgtgggcgtgaggaaggctggcacttctcactgtgcctctgggaacctgggccacgacactcagaggccagctccctgcaaaaagaccgggcggccccagctgttcctgccatcctggctgagggttggacaggcaagtgtaggacgagcttgaatttcctgccactgccgaccacagccatggaactaaccccaggtatgacctacagaagaaccacccaactgaacccaacccaaataacagaatcgcaagcaaatacacagttgtttg

SEQ ID NO: 10567 - protein, 58 aa, Homo sapiens
MGTTGPSEDLPGRPGWAAALHDTGWGGDPEAAGPTLSSGEAQTRTRRTRNVMQGMVWA

SEQ ID NO: 10568 - DNA, 3351 bp, Homo sapiens
agatgcaagaagcaggagggagggggactccgggagtgcggtccattcatgtctgaatgtagccaacgagggtttcctaagcacctaccatgtgcggacgcttgataccagggcctcggcggtgagggcacaggcaggagcaagctcacctctgggcaagcaggggttaaggccagttgctcccacgtgagggcaccttgcgacagagccacacacccagtcctcctgctggcccgcccctcaccctggtccgtctccctgtgtctgtggtcgtcagttccactggcaggggacctgcctccctgttgccaccacaagagaggaaaagttggtcaaacaggtggggaggccagagctacaagcctcgggttccctccccaccacccgtgccaggcaggcacccgggccctggcacctgctgcctgcccagaggccacccagcctcctagacaggtggctgacatggaggagctgaccatctgggaacagcacacggccacactgtccaaggacccccgccggggctttggcattgcgatctctggaggccgagaccggcccggtggatccatggttgtatctgacgtggtacctggagggccggcggagggcaggctacagacaggcgaccacatcgtcatggtgaacggggtttccatggagaatgccacctccgcgtttgccattcagatactcaagacctgcaccaagatggccaacatcacagtgaaacgtccccggaggatccacctgcccgccaccaaagccagcccctccagcccagggcgccaggactcggatgaagacgatgggccccagcgggtggaggaggtggaccagggccggggctatgacggcgactcatccagtggctccggccgctcctgggacgagcgctcccgccggccgaggcctggtcgccggggccgggccggcagccatgggcgtaggagcccaggtggtggctctgaggccaacgggctggccctggtgtccggctttaagcggctgccacggcaggacgtgcagatgaagcctgtgaagtcagtgctggtgaagaggagagacagcgaagagtttggcgtcaagctgggcagtcagatcttcatcaagcacattacagattcgggcctggctgcccggcaccgtgggctgcaggaaggagatctcattctacagatcaacggggtgtctagccagaacctgtcactgaacgacacccggcgactgattgagaagtcagaagggaagctaagcctgctggtgctgagagatcgtgggcagttcctggtgaacattccgcctgctgtcagtgacagcgacagctcgccattggaggacatctcggacctcgcctcggagctatcgcaggcaccaccatcccacatcccaccaccaccccggcatgctcagcggagccccgaggccagccagaccgactctcccgtggagagtccccggcttcggcgggaaagttcagtagattccagaaccatctcggaaccagatgagcaacggtcagagttgcccagggaaagcagctatgacatctacagagtgcccagcagtcagagcatggaggatcgtgggtacagccccgacacgcgtgtggtccgcttcctcaagggcaagagcatcgggctgcggctggcagggggcaatgacgtgggcatcttcgtgtccggggtgcaggcgggcagcccggccgacgggcagggcatccaggagggagatcagattctgcaggtgaatgacgtgccattccagaacctgacacgggaggaggcagtgcagttcctgctggggctgccaccaggcgaggagatggagctggtgacgcagaggaagcaggacattttctggaaaatggtgcagtcccgcgtgggtgactccttctacatccgcactcactttgagctggagcccagtccaccgtctggcctgggcttcacccgtggcgacgtcttccacgtgctggacacgctgcaccccggccccgggcagagccacgcacgaggaggccactggctggcggtgcgcatgggtcgtgacctgcgggagcaagagcggggcatcattcccaaccagagcagggcggagcagctggccagcctggaagctgcccagagggccgtgggagtcgggcccggctcctccgcgggctccaatgctcgggccgagttctggcggctgcggggtcttcgtcgaggagccaagaagaccactcagcggagccgtgaggacctctcagctctgacccgacagggccgctacccgccctacgaacgagtggtgttgcgagaagccagtttcaagcgcccggtagtgatcctgggacccgtggccgacattgctatgcagaagttgactgctgagatgcctgaccagtttgaaatcgcagagactgtgtccaggaccgacagcccctccaagatcatcaaactagacaccgtgcgggtgattgcagaaaaagacaagcatgcgctcctggatgtgaccccctccgccatcgagcgcctcaactatgtgcagtactaccccattgtggtcttcttcatccccgagagccggccggccctcaaggcactgcgccagtggctggcgcctgcctcccgccgcagcacccgtcgcctctacgcacaagcccagaagctgcgaaaacacagcagccacctcttcacagccaccatccctctgaatggcacgagtgacacctggtaccaggagctcaaggccatcattcgagagcagcagacgcggcccatctggacggcggaagatcagctggatggctccttggaggacaacctagacctccctcaccacggcctggccgacagctccgctgacctcagctgcgacagccgcgttaacagcgactacgagacggacggcgagggcggcgcgtacacggatggcgagggctacacagacggcgagggggggccctacacggatgtggatgatgagcccccggctccagccctggcccggtcctcggagcccgtgcaggcagatgagtcccagagcccgagggatcgtgggagaatctcggctcatcagggggcccaggtggacagccgccacccccagggacagtggcgacaggacagcatgcgaacctatgaacgggaagccctgaagaaaaagtttatgcgagtacatgatgcggagtcctccgatgaagacggctatgactggggtccggccactgacctgtgacctctcgaaggctgccagctggtccgtcctccttctccctccctggggctgggactcagtttcccatacagaacccacaaccttacctccctccgcctggtctttaataaacagagtattttcacagca

SEQ ID NO: 10569 - protein, 919 aa, Homo sapiens
MEELTIWEQHTATLSKDPRRGFGIAISGGRDRPGGSMVVSDVVPGGPAEGRLQTGDHIVMVNGVSMENATSAFAIQILKTCTKMANITVKRPRRIHLPATKASPSSPGRQDSDEDDGPQRVEEVDQGRGYDGDSSSGSGRSWDERSRRPRPGRRGRAGSHGRRSPGGGSEANGLALVSGFKRLPRQDVQMKPVKSVLVKRRDSEEFGVKLGSQIFIKHITDSGLAARHRGLQEGDLILQINGVSSQNLSLNDTRRLIEKSEGKLSLLVLRDRGQFLVNIPPAVSDSDSSPLEDISDLASELSQAPPSHIPPPPRHAQRSPEASQTDSPVESPRLRRESSVDSRTISEPDEQRSELPRESSYDIYRVPSSQSMEDRGYSPDTRVVRFLKGKSIGLRLAGGNDVGIFVSGVQAGSPADGQGIQEGDQILQVNDVPFQNLTREEAVQFLLGLPPGEEMELVTQRKQDIFWKMVQSRVGDSFYIRTHFELEPSPPSGLGFTRGDVFHVLDTLHPGPGQSHARGGHWLAVRMGRDLREQERGIIPNQSRAEQLASLEAAQRAVGVGPGSSAGSNARAEFWRLRGLRRGAKKTTQRSREDLSALTRQGRYPPYERVVLREASFKRPVVILGPVADIAMQKLTAEMPDQFEIAETVSRTDSPSKIIKLDTVRVIAEKDKHALLDVTPSAIERLNYVQYYPIVVFFIPESRPALKALRQWLAPASRRSTRRLYAQAQKLRKHSSHLFTATIPLNGTSDTWYQELKAIIREQQTRPIWTAEDQLDGSLEDNLDLPHHGLADSSADLSCDSRVNSDYETDGEGGAYTDGEGYTDGEGGPYTDVDDEPPAPALARSSEPVQADESQSPRDRGRISAHQGAQVDSRHPQGQWRQDSMRTYEREALKKKFMRVHDAESSDEDGYDWGPATDL

SEQ ID NO: 10570 - DNA, 2247 bp, Homo sapiens
aagcgggtaacagattctcggtcattctggggtcaagacgagctatcccggtccgaatcggagtctggtctcatcagcttcctggtttgtagaggatgaaccctggctcagagaaggacagccgcttaccccgggccgcacagccaagtagaaatgtcaggcggccaagagtcaagacgcagaggacagggagctggtggcgggggtggtgctctggaggctggccctgcccccagctgatgcctcaggctcagcatctcgagaaagtcctgccccctggcttggtgcttcctcgtggccctgagtcccggggaaagtccagggcagggagtatgggtacttgttcttcctctttagggctggccaggggccaggggagctgtgtttgctcagggtggaacctgacaccctttggaatggattgaggttagcggaagcctaggctggggggaggggtcgcccagggagcgaacgggcatttattgtgcacttactgtatgcgcgagtgtggggtcaccaggccttggagattcagcagtgagcaaggcaggccaagcttcctgctctcgtggggcgcatattttggtggggaaagacagacatgaaacaagagcgcagtaatggagccaatggctgcacagagggtaacatgcgtgagaggcgctttgtaactttattttactttttatatttttttgaaacggagtctcgctctgtcgcccaggctggagtgcggtggcgcgatctcggctcactgcaagctccgcctcccgggttcacgccatactcctgcctcagcctcccgagtagctgggactacaggcgcccgccaccacacccggctaattttttgtatttttagtacagacgggggtttcaccgtattggtcaggctggtctcgaactcctgatctcaggtgattcgctcgcctgtaatcccagcactttgggaggccgagacgggtggatcacgaggtcaggagttcaagaccagcctggctaacatggtgaaaccctgtctctactaaaagtacaaaaaaaaaaaaaaaggtgctttatgtgtctgcttaattcattaattaatatgggaaccggtaagactttatagcctatacagaggggaattaatttgtttcctttctttcttttttttaaaaattgaaaatagaaatggggttttgctgtgttggccggcctggtctcgagcttctgggctcaagtgatctgccagcctcagccactcaaagtgctgggatttcaagcgagagccaccgacccggcctcagcattcttgattgcctgtgtgtgtgtgttctttcagttctcctctggaccagacacggtggctcacgcctgtaatcccagcattttgggaggccaaggcaggtgggtcacttgagcccaggagtttgagaccagcctggcaaacgtggtgaaactctgtctctactaaaaatacaaaaattagccaggtgtgttggcgtgtgcctataattccagctacttgggaggctgaggcaggagaattgcttgaacctgggaggcagaggttgcagtgagccgggatcgcaccactgcactccagccccagagacagagcaagactccatctcaaaaatgtcattccgtgcccagaatgacagcaccttagcgtagatggtttccatggggcagggggccccctctagccctgggacactgtaattcacctttggctttcccactgggggcccgagtggagttagaagcatggagaggcagcccaggggatccttagtggcagatgcttaaacctttgagccttccctgaaatactgctcagggtcaaaaccgggatccccgttttacagatgaggaagctgaggcaggggctggaattcacatgggctctgcttttctctctctgctgtggaacttccttctagagctcagccgtcctcccttttgggggaaatggcatctttggcatggcttggtggctcccgcctggaatcccaacattttgggaggccgaggtgggaggatcgcatgagcccagcagttcaagacaggtccgggcaacatagcgagataccgtctctacaaaatatacaaaaatctgctgggcagggtggcgtgcacctgtggccccagctacacaggaggctggggtgggaggatcgcttgagcccaggaaagtggaggctgcagtgagctatgattgcaccactgcactccagcctaggtgacagagcaagactctgtctc

SEQ ID NO: 10571 - protein, 109 aa, Homo sapiens
MNPGSEKDSRLPRAAQPSRNVRRPRVKTQRTGSWWRGWCSGGWPCPQLMPQAQHLEKVLPPGLVLPRGPESRGKSRAGSMGTCSSSLGLARGQGSCVCSGWNLTPFGMD

SEQ ID NO: 10572 - DNA, 708 bp, Homo sapiens
tcaggacctggctcctgtgatgggaggtggggagagaaacctccgccgcgtccagggggcgtgtctgggcaggggcggggctgacccgagacctggaggaggaagaggggcaggtgcagccgggagctgcggagctggagggaggaggacgagagcccggccctcagcccgctgtgactctcctcagccccctcccccagcccggggtgggggccgattgactgtttccaggaccccctcgggtaggggggctggagagcccccaggtggaccatggcggtgagattccaggtggctgacatggaggagctgaccatctgggaacagcacacggccacactgtccaaggacccccgccggggctttggcattgcgatctctggaggccgagaccggcccggtggatccatggttgtatctgacgtggtacctggagggccggcggagggcaggctacagacaggcgaccacatcgtcatggtgaacggggtttccatggagaatgccacctccgcgtttgccattcagatactcaagacctgcaccaagatggccaacatcgtgagtaggcagcccctggcatggccagcatctctgaccccagcctgggtcgtgccgctgtgggggttgtaagcttctgagagcaaggagtcatcttctcatcttacagtttggacattgaggcccagagagagactggtgtccccc

SEQ ID NO: 10573 - protein, 119 aa, Homo sapiens
MAVRFQVADMEELTIWEQHTATLSKDPRRGFGIAISGGRDRPGGSMVVSDVVPGGPAEGRLQTGDHIVMVNGVSMENATSAFAIQILKTCTKMANIVSRQPLAWPASLTPAWVVPLWGL

SEQ ID NO: 10574 - DNA, 3111 bp, Homo sapiens
ggctgacccgagacctggaggaggaagaggggcaggtgcagccgggagctgcggagctggagggaggaggacgagagcccggccctcagcccgctgtgactctcctcagccccctcccccagcccggggtgggggccgattgactgtttccaggaccccctcgggtaggggggctggagagcccccaggtggaccatggcggtgagattccaggtggctgacatggaggagctgaccatctgggaacagcacacggccacactgtccaaggacccccgccggggctttggcattgcgatctctggaggccgagaccggcccggtggatccatggttgtatctgacgtggtacctggagggccggcggagggcaggctacagacaggcgaccacatcgtcatggtgaacggggtttccatggagaatgccacctccgcgtttgccattcagatactcaagacctgcaccaagatggccaacatcacagtgaaacgtccccggaggatccacctgcccgccaccaaagccagcccctccagcccagggcgccaggactcggatgaagacgatgggccccagcgggtggaggaggtggaccagggccggggctatgacggcgactcatccagtggctccggccgctcctgggacgagcgctcccgccggccgaggcctggtcgccggggccgggccggcagccatgggcgtaggagcccaggtggtggctctgaggccaacgggctggccctggtgtccggctttaagcggctgccacggcaggacgtgcagatgaagcctgtgaagtcagtgctggtgaagaggagagacagcgaagagtttggcgtcaagctgggcagtcagatcttcatcaagcacattacagattcgggcctggctgcccggcaccgtgggctgcaggaaggagatctcattctacagatcaacggggtgtctagccagaacctgtcactgaacgacacccggcgactgattgagaagtcagaagggaagctaagcctgctggtgctgagagatcgtgggcagttcctggtgaacattccgcctgctgtcagtgacagcgacagctcgccattggaggacatctcggacctcgcctcggagctatcgcaggcaccaccatcccacatcccaccaccaccccggcatgctcagcggagccccgaggccagccagaccgactctcccgtggagagtccccggcttcggcgggaaagttcagtagattccagaaccatctcggaaccagatgagcaacggtcagagttgcccagggaaagcagctatgacatctacagagtgcccagcagtcagagcatggaggatcgtgggtacagccccgacacgcgtgtggtccgcttcctcaagggcaagagcatcgggctgcggctggcagggggcaatgacgtgggcatcttcgtgtccggggtgcaggcgggcagcccggccgacgggcagggcatccaggagggagatcagattctgcaggtgaatgacgtgccattccagaacctgacacgggaggaggcagtgcagttcctgctggggctgccaccaggcgaggagatggagctggtgacgcagaggaagcaggacattttctggaaaatggtgcagtcccgcgtgggtgactccttctacatccgcactcactttgagctggagcccagtccaccgtctggcctgggcttcacccgtggcgacgtcttccacgtgctggacacgctgcaccccggccccgggcagagccacgcacgaggaggccactggctggcggtgcgcatgggtcgtgacctgcgggagcaagagcggggcatcattcccaaccagagcagggcggagcagctggccagcctggaagctgcccagagggccgtgggagtcgggcccggctcctccgcgggctccaatgctcgggccgagttctggcggctgcggggtcttcgtcgaggagccaagaagaccactcagcggagccgtgaggacctctcagctctgacccgacagggccgctacccgccctacgaacgagtggtgttgcgagaagccagtttcaagcgcccggtagtgatcctgggacccgtggccgacattgctatgcagaagttgactgctgagatgcctgaccagtttgaaatcgcagagactgtgtccaggaccgacagcccctccaagatcatcaaactagacaccgtgcgggtgattgcagaaaaagacaagcatgcgctcctggatgtgaccccctccgccatcgagcgcctcaactatgtgcagtactaccccattgtggtcttcttcatccccgagagccggccggccctcaaggcactgcgccagtggctggcgcctgcctcccgccgcagcacccgtcgcctctacgcacaagcccagaagctgcgaaaacacagcagccacctcttcacagccaccatccctctgaatggcacgagtgacacctggtaccaggagctcaaggccatcattcgagagcagcagacgcggcccatctggacggcggaagatcagctggatggctccttggaggacaacctagacctccctcaccacggcctggccgacagctccgctgacctcagctgcgacagccgcgttaacagcgactacgagacggacggcgagggcggcgcgtacacggatggcgagggctacacagacggcgagggggggccctacacggatgtggatgatgagcccccggctccagccctggcccggtcctcggagcccgtgcaggcagatgagtcccagagcccgagggatcgtgggagaatctcggctcatcagggggcccaggtggacagccgccacccccagggacagtggcgacaggacagcatgcgaacctatgaacgggaagccctgaagaaaaagtttatgcgagtacatgatgcggagtcctccgatgaagacggctatgactggggtccggccactgacctgtgacctctcgaaggctgccagctggtccgtcctccttctccctccctggggctgggactcagtttcccatacagaacccacaaccttacctccctccgcctggtctttaataaacagagtattttcacagca

SEQ ID NO: 10575 - protein, 928 aa, Homo sapiens
MAVRFQVADMEELTIWEQHTATLSKDPRRGFGIAISGGRDRPGGSMVVSDVVPGGPAEGRLQTGDHIVMVNGVSMENATSAFAIQILKTCTKMANITVKRPRRIHLPATKASPSSPGRQDSDEDDGPQRVEEVDQGRGYDGDSSSGSGRSWDERSRRPRPGRRGRAGSHGRRSPGGGSEANGLALVSGFKRLPRQDVQMKPVKSVLVKRRDSEEFGVKLGSQIFIKHITDSGLAARHRGLQEGDLILQINGVSSQNLSLNDTRRLIEKSEGKLSLLVLRDRGQFLVNIPPAVSDSDSSPLEDISDLASELSQAPPSHIPPPPRHAQRSPEASQTDSPVESPRLRRESSVDSRTISEPDEQRSELPRESSYDIYRVPSSQSMEDRGYSPDTRVVRFLKGKSIGLRLAGGNDVGIFVSGVQAGSPADGQGIQEGDQILQVNDVPFQNLTREEAVQFLLGLPPGEEMELVTQRKQDIFWKMVQSRVGDSFYIRTHFELEPSPPSGLGFTRGDVFHVLDTLHPGPGQSHARGGHWLAVRMGRDLREQERGIIPNQSRAEQLASLEAAQRAVGVGPGSSAGSNARAEFWRLRGLRRGAKKTTQRSREDLSALTRQGRYPPYERVVLREASFKRPVVILGPVADIAMQKLTAEMPDQFEIAETVSRTDSPSKIIKLDTVRVIAEKDKHALLDVTPSAIERLNYVQYYPIVVFFIPESRPALKALRQWLAPASRRSTRRLYAQAQKLRKHSSHLFTATIPLNGTSDTWYQELKAIIREQQTRPIWTAEDQLDGSLEDNLDLPHHGLADSSADLSCDSRVNSDYETDGEGGAYTDGEGYTDGEGGPYTDVDDEPPAPALARSSEPVQADESQSPRDRGRISAHQGAQVDSRHPQGQWRQDSMRTYEREALKKKFMRVHDAESSDEDGYDWGPATDL

SEQ ID NO: 10576 - DNA, 2946 bp, Homo sapiens
atgaacctgtgtggcctcatgcccatcttccccgctcccctcgaccaggtggctgacatggaggagctgaccatctgggaacagcacacggccacactgtccaaggacccccgccggggctttggcattgcgatctctggaggccgagaccggcccggtggatccatggttgtatctgacgtggtacctggagggccggcggagggcaggctacagacaggcgaccacatcgtcatggtgaacggggtttccatggagaatgccacctccgcgtttgccattcagatactcaagacctgcaccaagatggccaacatcacagtgaaacgtccccggaggatccacctgcccgccaccaaagccagcccctccagcccagggcgccaggactcggatgaagacgatgggccccagcgggtggaggaggtggaccagggccggggctatgacggcgactcatccagtggctccggccgctcctgggacgagcgctcccgccggccgaggcctggtcgccggggccgggccggcagccatgggcgtaggagcccaggtggtggctctgaggccaacgggctggccctggtgtccggctttaagcggctgccacggcaggacgtgcagatgaagcctgtgaagtcagtgctggtgaagaggagagacagcgaagagtttggcgtcaagctgggcagtcagatcttcatcaagcacattacagattcgggcctggctgcccggcaccgtgggctgcaggaaggagatctcattctacagatcaacggggtgtctagccagaacctgtcactgaacgacacccggcgactgattgagaagtcagaagggaagctaagcctgctggtgctgagagatcgtgggcagttcctggtgaacattccgcctgctgtcagtgacagcgacagctcgccattggaggacatctcggacctcgcctcggagctatcgcaggcaccaccatcccacatcccaccaccaccccggcatgctcagcggagccccgaggccagccagaccgactctcccgtggagagtccccggcttcggcgggaaagttcagtagattccagaaccatctcggaaccagatgagcaacggtcagagttgcccagggaaagcagctatgacatctacagagtgcccagcagtcagagcatggaggatcgtgggtacagccccgacacgcgtgtggtccgcttcctcaagggcaagagcatcgggctgcggctggcagggggcaatgacgtgggcatcttcgtgtccggggtgcaggcgggcagcccggccgacgggcagggcatccaggagggagatcagattctgcaggtgaatgacgtgccattccagaacctgacacgggaggaggcagtgcagttcctgctggggctgccaccaggcgaggagatggagctggtgacgcagaggaagcaggacattttctggaaaatggtgcagtcccgcgtgggtgactccttctacatccgcactcactttgagctggagcccagtccaccgtctggcctgggcttcacccgtggcgacgtcttccacgtgctggacacgctgcaccccggccccgggcagagccacgcacgaggaggccactggctggcggtgcgcatgggtcgtgacctgcgggagcaagagcggggcatcattcccaaccagagcagggcggagcagctggccagcctggaagctgcccagagggccgtgggagtcgggcccggctcctccgcgggctccaatgctcgggccgagttctggcggctgcggggtcttcgtcgaggagccaagaagaccactcagcggagccgtgaggacctctcagctctgacccgacagggccgctacccgccctacgaacgagtggtgttgcgagaagccagtttcaagcgcccggtagtgatcctgggacccgtggccgacattgctatgcagaagttgactgctgagatgcctgaccagtttgaaatcgcagagactgtgtccaggaccgacagcccctccaagatcatcaaactagacaccgtgcgggtgattgcagaaaaagacaagcatgcgctcctggatgtgaccccctccgccatcgagcgcctcaactatgtgcagtactaccccattgtggtcttcttcatccccgagagccggccggccctcaaggcactgcgccagtggctggcgcctgcctcccgccgcagcacccgtcgcctctacgcacaagcccagaagctgcgaaaacacagcagccacctcttcacagccaccatccctctgaatggcacgagtgacacctggtaccaggagctcaaggccatcattcgagagcagcagacgcggcccatctggacggcggaagatcagctggatggctccttggaggacaacctagacctccctcaccacggcctggccgacagctccgctgacctcagctgcgacagccgcgttaacagcgactacgagacggacggcgagggcggcgcgtacacggatggcgagggctacacagacggcgagggggggccctacacggatgtggatgatgagcccccggctccagccctggcccggtcctcggagcccgtgcaggcagatgagtcccagagcccgagggatcgtgggagaatctcggctcatcagggggcccaggtggacagccgccacccccagggacagtggcgacaggacagcatgcgaacctatgaacgggaagccctgaagaaaaagtttatgcgagtacatgatgcggagtcctccgatgaagacggctatgactggggtccggccactgacctgtgacctctcgaaggctgccagctggtccgtcctccttctccctccctggggctgggactcagtttcccatacagaacccacaaccttacctccctccgcctggtctttaataaacagagtattttcacagca

SEQ ID NO: 10577 - protein, 938 aa, Homo sapiens
MNLCGLMPIFPAPLDQVADMEELTIWEQHTATLSKDPRRGFGIAISGGRDRPGGSMVVSDVVPGGPAEGRLQTGDHIVMVNGVSMENATSAFAIQILKTCTKMANITVKRPRRIHLPATKASPSSPGRQDSDEDDGPQRVEEVDQGRGYDGDSSSGSGRSWDERSRRPRPGRRGRAGSHGRRSPGGGSEANGLALVSGFKRLPRQDVQMKPVKSVLVKRRDSEEFGVKLGSQIFIKHITDSGLAARHRGLQEGDLILQINGVSSQNLSLNDTRRLIEKSEGKLSLLVLRDRGQFLVNIPPAVSDSDSSPLEDISDLASELSQAPPSHIPPPPRHAQRSPEASQTDSPVESPRLRRESSVDSRTISEPDEQRSELPRESSYDIYRVPSSQSMEDRGYSPDTRVVRFLKGKSIGLRLAGGNDVGIFVSGVQAGSPADGQGIQEGDQILQVNDVPFQNLTREEAVQFLLGLPPGEEMELVTQRKQDIFWKMVQSRVGDSFYIRTHFELEPSPPSGLGFTRGDVFHVLDTLHPGPGQSHARGGHWLAVRMGRDLREQERGIIPNQSRAEQLASLEAAQRAVGVGPGSSAGSNARAEFWRLRGLRRGAKKTTQRSREDLSALTRQGRYPPYERVVLREASFKRPVVILGPVADIAMQKLTAEMPDQFEIAETVSRTDSPSKIIKLDTVRVIAEKDKHALLDVTPSAIERLNYVQYYPIVVFFIPESRPALKALRQWLAPASRRSTRRLYAQAQKLRKHSSHLFTATIPLNGTSDTWYQELKAIIREQQTRPIWTAEDQLDGSLEDNLDLPHHGLADSSADLSCDSRVNSDYETDGEGGAYTDGEGYTDGEGGPYTDVDDEPPAPALARSSEPVQADESQSPRDRGRISAHQGAQVDSRHPQGQWRQDSMRTYEREALKKKFMRVHDAESSDEDGYDWGPATDL

SEQ ID NO: 10578 - DNA, 2988 bp, Homo sapiens
atgaacctgtgtggcctcatgcccatcttccccgctcccctcgaccaggtggctgacatggaggagctgaccatctgggaacagcacacggccacactgtccaaggacccccgccggggctttggcattgcgatctctggaggccgagaccggcccggtggatccatggttgtatctgacgtggtacctggagggccggcggagggcaggctacagacaggcgaccacatcgtcatggtgaacggggtttccatggagaatgccacctccgcgtttgccattcagatactcaagacctgcaccaagatggccaacatcacagtgaaacgtccccggaggatccacctgcccgccaccaaagccagcccctccagcccagggcgccaggactcggatgaagacgatgggccccagcgggtggaggaggtggaccagggccggggctatgacggcgactcatccagtggctccggccgctcctgggacgagcgctcccgccggccgaggcctggtcgccggggccgggccggcagccatgggcgtaggagcccaggtggtggctctgaggccaacgggctggccctggtgtccggctttaagcggctgccacggcaggacgtgcagatgaagcctgtgaagtcagtgctggtgaagaggagagacagcgaagagtttggcgtcaagctgggcagtcagatcttcatcaagcacattacagattcgggcctggctgcccggcaccgtgggctgcaggaaggagatctcattctacagatcaacggggtgtctagccagaacctgtcactgaacgacacccggcgactgattgagaagtcagaagggaagctaagcctgctggtgctgagagatcgtgggcagttcctggtgaacattccgcctgctgtcagtgacagcgacagctcgccattggaggaaggcgtgaccatggctgatgagatgtcctctccccctgcagacatctcggacctcgcctcggagctatcgcaggcaccaccatcccacatcccaccaccaccccggcatgctcagcggagccccgaggccagccagaccgactctcccgtggagagtccccggcttcggcgggaaagttcagtagattccagaaccatctcggaaccagatgagcaacggtcagagttgcccagggaaagcagctatgacatctacagagtgcccagcagtcagagcatggaggatcgtgggtacagccccgacacgcgtgtggtccgcttcctcaagggcaagagcatcgggctgcggctggcagggggcaatgacgtgggcatcttcgtgtccggggtgcaggcgggcagcccggccgacgggcagggcatccaggagggagatcagattctgcaggtgaatgacgtgccattccagaacctgacacgggaggaggcagtgcagttcctgctggggctgccaccaggcgaggagatggagctggtgacgcagaggaagcaggacattttctggaaaatggtgcagtcccgcgtgggtgactccttctacatccgcactcactttgagctggagcccagtccaccgtctggcctgggcttcacccgtggcgacgtcttccacgtgctggacacgctgcaccccggccccgggcagagccacgcacgaggaggccactggctggcggtgcgcatgggtcgtgacctgcgggagcaagagcggggcatcattcccaaccagagcagggcggagcagctggccagcctggaagctgcccagagggccgtgggagtcgggcccggctcctccgcgggctccaatgctcgggccgagttctggcggctgcggggtcttcgtcgaggagccaagaagaccactcagcggagccgtgaggacctctcagctctgacccgacagggccgctacccgccctacgaacgagtggtgttgcgagaagccagtttcaagcgcccggtagtgatcctgggacccgtggccgacattgctatgcagaagttgactgctgagatgcctgaccagtttgaaatcgcagagactgtgtccaggaccgacagcccctccaagatcatcaaactagacaccgtgcgggtgattgcagaaaaagacaagcatgcgctcctggatgtgaccccctccgccatcgagcgcctcaactatgtgcagtactaccccattgtggtcttcttcatccccgagagccggccggccctcaaggcactgcgccagtggctggcgcctgcctcccgccgcagcacccgtcgcctctacgcacaagcccagaagctgcgaaaacacagcagccacctcttcacagccaccatccctctgaatggcacgagtgacacctggtaccaggagctcaaggccatcattcgagagcagcagacgcggcccatctggacggcggaagatcagctggatggctccttggaggacaacctagacctccctcaccacggcctggccgacagctccgctgacctcagctgcgacagccgcgttaacagcgactacgagacggacggcgagggcggcgcgtacacggatggcgagggctacacagacggcgagggggggccctacacggatgtggatgatgagcccccggctccagccctggcccggtcctcggagcccgtgcaggcagatgagtcccagagcccgagggatcgtgggagaatctcggctcatcagggggcccaggtggacagccgccacccccagggacagtggcgacaggacagcatgcgaacctatgaacgggaagccctgaagaaaaagtttatgcgagtacatgatgcggagtcctccgatgaagacggctatgactggggtccggccactgacctgtgacctctcgaaggctgccagctggtccgtcctccttctccctccctggggctgggactcagtttcccatacagaacccacaaccttacctccctccgcctggtctttaataaacagagtattttcacagca

SEQ ID NO: 10579 - protein, 952 aa, Homo sapiens; identical to SEQ ID NO: 1783

SEQ ID NO: 10580 - DNA, 5183 bp, Homo sapiens
gagaattggaaggcggcagtgaagcggaagccattactctctggagtcgattgccccgagacacatgggccaaggaggggtcagcggcgaattctttcggcctgttggggacccctcgtgtccccacgccagactggacctcccgtatgaacttctcttcgcatcggcggcggcttccgtcacctccgctcccccgatcctattcccagtcgtatgccagcttggagagtcacgtgagagcaagagagtagctttctggttgtcctggtgccctgctcaggcaaactgactgccattctctgaggatggcagctctgtcccccacatttgccacgtccacccaggattccacctgtctccaggactcagaatttcctgtttcttcaaaagaccattcctgtccccagaatttggacctgttcgtgtgcagtggtctggagcctcacacacccagtgttggttcccaggaatcggtgactttccaagatgtcgctgtggactttaccgagaaggagtggcccttgctggattcttctcagagaaaactgtacaaagatgtaatgctggagaactacagcaacctcacttcactggattgggagactccatctaaaaccaagtggtcacttcttatggaagatatttttgggaaggaaacgcccagtggtgtgacgatggtaagatttccgtgggataattctggatcttccttccacgtctgaggagactggggcagcctaggttagaaaagcagttcaacaccagggcaagcagcttccctcagaggagactgtgtttcagagacactgggtattaccaagatggagacaaccctaaagctaacctcaagctactttacctagagtgtctctgagtgaagatttttatagctgtgtctcagatattgagtgttggggctcaatgcagtttttgttttattttatatttatgctgtacacttacttatcaatttagttttggtggtgtttattttttggggggcagacagtcttgctcttgttgcccagtgcagtgggcaacatcttggctcactgcaacctctgcctcccaggctcaagccatcctcccacctcagcctcctgagcagctgggactataggcgtgtgccaccacacttggctgatttttctattttttgcagagacaggatttcaccatgttgcccaggctggtcttgaactcctggagatccatcagcctcggtctcccaaagtgctgggattataggcttgagccaccatgcccagcctcaattcagtggtttttgtttgtttgtttttgttgttgtttttgttttttgtttttttttttgaggcacagtcttgctcttgtcacccaggctggagtgcaatggcacgatctcagctcactgcagcctccacctttcaggctcaagtgattctcctgtcccaccctcccgagtagctgggattacaggtgtgcaccaccatgcccagctaatttttgtatttttagtagagacagcgtttcaccatgttagccaggctggtctcgaactcctgacctcaggtggtccacccgccttggccttccagagtgctgggatgacaggcgtgagccaccttgcccagcctcaattcagttttaagcagtgaagaaatgctatatgcaaaaagctttgaaaaagtaacacatgtggagccttgtggcctggcattcacctattgtccttgatggagctcaaatggggcagggacagcacgtttgcacggcagatggttacagctctagtcatagtaatgtgcttctatctgttcatagcagtgtatgtggggatgacgcttagggttgcaatgaatatgagaattgcctttgtcagcacttacgtcttaaccaacaggaaagagccggtcttggagagaagtccactgaatacgctcacttgttcgaagtctttggcatggaccctcatctcactcagccaatgggaaggcacgctggcaagaggccctatcaccgccgcgactatggggtagcgttcaagggcaggccgcacctcactcagcacatgagcatgtacgacgggagaaaaatgcatgaatgtcatcagtgccaaaaagccttcaccacgagcgcgtccctcacacggcacaggagaatccacaccggggagaagccttacgagtgcagcgactgcgggaaagccttcaacgacccttcagcccttaggagccacgcaagaactcacctcaaagagaagccctttgactgcagtcagtgtggaaatgcattccggaccctctcggccctgaaaatccacatgcgagttcacactggcgagaggccttacaagtgtgatcagtgcgggaaggcttacggccggagctgccacctcatcgcacacaagagaacgcacaccggagagaggccctacgagtgtcacgactgtgggaaagctttccagcacccctcccacctcaaagagcacgtgaggaatcacacgggggagaagccctacgcgtgcacgcagtgcggcaaagccttccgctggaagtccaactttaatttgcacaagaagaaccacatggtggagaagacctacgaatgtaaagaatgcgggaaatcctttggcgatctcgtgtcccggaggaaacacatgaggattcacatcgtcaagaaacccgtggaatgtcggcagtgcgggaagaccttccgaaaccagtccatccttaagactcacatgaactctcacactggagagaaaccatacgggtgcgatctctgcgggaaagctttcagcgcgagttcaaacctcaccgcacacaggaagatacacacgcaagagagacgctacgaatgcgccgcctgcgggaaagtcttcggtgactatttatcccggcggaggcacatgagcgttcaccttgtaaagaaacgagttgagtgtaggcagtgtggcaaggccttcaggaaccagtcaacgctgaagacgcacatgcgaagccacacgggggagaaaccgtacgaatgcgatcactgtgggaaggccttcagcataggctccaacctgaatgtgcacaggcggatccacaccggggagaagccctacgaatgccttgtctgcgggaaagccttcagcgaccactcatccctcaggagccacgtgaaaactcaccggggagagaagctctttgtgtcatccgtgtggaaaaggctccagtgagcgcgcctgctttagagacacaggatgattcagaccggaaacagacctcgtgggtgtaagaggaagcctctgtgagctcgcaccttactgggtgcaaaagaatccacggaacttgggagaagtccagttcctgtaaaaactgggaagacgaggcgttctcatcccataggaggtttgtgagaactcacgccgggggtgaaaatgtacgtctgtagcatggagaagccttcagggtacattcagctcttaacaaacacaggaggacttaatggcagcttggcatttaatgtcaaaatccaagccgtggcatttaatgtcaaaatgacttcagaccacttctagccttctgggcccatgagtaataatgagcacactagggagcatctctgtaaacacagtggctggggaaacccttcctagtctcacttgattcctcatgacggaaatcacactaaagagagaaatcagtgaagtaaggaacgtggaaggtcatgaatgggccgcaaaccacggccagctgcttgtctttgtatggcttgccagctaacaatagtggttccatctttaaggaagaagaatgtttgatggagaaaatttgtggccaatgaagtctgaaatacttcctgtcatctgcccctttccagaaaaacttggccgacccttggtctacagcacgggttctcagtcgggcgacgatttggctgtctaggcgtcatttggcaatgtctagagacatttttggtagttagaatggggggaagatactcctgacttgtaataagaagacatcagagatgctgctaagtcggctccagcacacaggagccccccacaacgaagagttagtgcccccaaacgtcactgttgctgaggttgaaaataatcatgcagtcattcctcaattactgcctgcagcaattcctccatttttatgaatcttgtgagcacttacgctaggagaaatttcttttacaaaacttttaaaatacaattagtgctgataattcctatgtggaaatgattccagccatggtcccctcacttgagcatgtgaatattctcacggagagaagccccagcgagattttccggtgaatacgggattgcacttactctttcatcacggaaacagaccccccgagagaagccccaacgagattttccggtgaatacgggactgcacgtactctctcatcatgaaaacagagccccgttcataaatttttcatctttatttttaaggttatactcctctaaataacccttaagcctcatcaagaaaggtttgtttatagtatttttactatagcttcatccttgataacgtcctaatttccttctggacaacctccttgaccaatggcatattgagatctatgtgacatgaggatatttctcagtaccactttgttactggtacctgatgcacacggattgcgaccagagcatgatgcctccatcaagtggtaatatgtttgcagcctgctgtccagccaagagtgacagatacttctagtgacttccccggtatccactctcatcttcttccaatatcaagagaatccaggttctgtcagattagtaaggtgtgctaatctaaattttaaaaaatctcttacaggttttcttgcagctggtaccatccatgtctcacagccctggccactgacagatcagcagatgtcaccacatgggcttctgagaaagctcttgaatggggatcgttcttaaacatgaattcctccctgtatgttttgttctttgctttacttttcaccttgcaaagagatccagtacctagtattggaagatccaccttaacgaccgtgcatatgaaaaccacagtctaaggaagtgactgcagaaagctcacagcgaccctggcctcccctgtggcctctttgagtgtctgcagcagccctggacttccagacttctatcacatgagaaaaaataaaactgattattggtttaagctgct

SEQ ID NO: 10581 - protein, 138 aa, Homo sapiens
MAALSPTFATSTQDSTCLQDSEFPVSSKDHSCPQNLDLFVCSGLEPHTPSVGSQESVTFQDVAVDFTEKEWPLLDSSQRKLYKDVMLENYSNLTSLDWETPSKTKWSLLMEDIFGKETPSGVTMVRFPWDNSGSSFHV

SEQ ID NO: 10582 - DNA, 3978 bp, Homo sapiens
gagaattggaaggcggcagtgaagcggaagccattactctctggagtcgattgccccgagacacatgggccaaggaggggtcagcggcgaattctttcggcctgttggggacccctcgtgtccccacgccagactggacctcccgtatgaacttctcttcgcatcggcggcggcttccgtcacctccgctcccccgatcctattcccagtcgtatgccagcttggagagtcacgtgagagcaagagagtagctttctggttgtcctggtgccctgctcaggcaaactgactgccattctctgaggatggcagctctgtcccccacatttgccacgtccacccaggattccacctgtctccaggactcagaatttcctgtttcttcaaaagaccattcctgtccccagaatttggacctgttcgtgtgcagtggtctggagcctcacacacccagtgttggttcccaggaatcggtgactttccaagatgtcgctgtggactttaccgagaaggagtggcccttgctggattcttctcagagaaaactgtacaaagatgtaatgctggagaactacagcaacctcacttcactggattgggagactccatctaaaaccaagtggtcacttcttatggaagatatttttgggaaggaaacgcccagtggtgtgacgatggaaagagccggtcttggagagaagtccactgaatacgctcacttgttcgaagtctttggcatggaccctcatctcactcagccaatgggaaggcacgctggcaagaggccctatcaccgccgcgactatggggtagcgttcaagggcaggccgcacctcactcagcacatgagcatgtacgacgggagaaaaatgcatgaatgtcatcagtgccaaaaagccttcaccacgagcgcgtccctcacacggcacaggagaatccacaccggggagaagccttacgagtgcagcgactgcgggaaagccttcaacgacccttcagcccttaggagccacgcaagaactcacctcaaagagaagccctttgactgcagtcagtgtggaaatgcattccggaccctctcggccctgaaaatccacatgcgagttcacactggcgagaggccttacaagtgtgatcagtgcgggaaggcttacggccggagctgccacctcatcgcacacaagagaacgcacaccggagagaggccctacgagtgtcacgactgtgggaaagctttccagcacccctcccacctcaaagagcacgtgaggaatcacacgggggagaagccctacgcgtgcacgcagtgcggcaaagccttccgctggaagtccaactttaatttgcacaagaagaaccacatggtggagaagacctacgaatgtaaagaatgcgggaaatcctttggcgatctcgtgtcccggaggaaacacatgaggattcacatcgtcaagaaacccgtggaatgtcggcagtgcgggaagaccttccgaaaccagtccatccttaagactcacatgaactctcacactggagagaaaccatacgggtgcgatctctgcgggaaagctttcagcgcgagttcaaacctcaccgcacacaggaagatacacacgcaagagagacgctacgaatgcgccgcctgcgggaaagtcttcggtgactatttatcccggcggaggcacatgagcgttcaccttgtaaagaaacgagttgagtgtaggcagtgtggcaaggccttcaggaaccagtcaacgctgaagacgcacatgcgaagccacacgggggagaaaccgtacgaatgcgatcactgtgggaaggccttcagcataggctccaacctgaatgtgcacaggcggatccacaccggggagaagccctacgaatgccttgtctgcgggaaagccttcagcgaccactcatccctcaggagccacgtgaaaactcaccggggagagaagctctttgtgtcatccgtgtggaaaaggctccagtgagcgcgcctgctttagagacacaggatgattcagaccggaaacagacctcgtgggtgtaagaggaagcctctgtgagctcgcaccttactgggtgcaaaagaatccacggaacttgggagaagtccagttcctgtaaaaactgggaagacgaggcgttctcatcccataggaggtttgtgagaactcacgccgggggtgaaaatgtacgtctgtagcatggagaagccttcagggtacattcagctcttaacaaacacaggaggacttaatggcagcttggcatttaatgtcaaaatccaagccgtggcatttaatgtcaaaatgacttcagaccacttctagccttctgggcccatgagtaataatgagcacactagggagcatctctgtaaacacagtggctggggaaacccttcctagtctcacttgattcctcatgacggaaatcacactaaagagagaaatcagtgaagtaaggaacgtggaaggtcatgaatgggccgcaaaccacggccagctgcttgtctttgtatggcttgccagctaacaatagtggttccatctttaaggaagaagaatgtttgatggagaaaatttgtggccaatgaagtctgaaatacttcctgtcatctgcccctttccagaaaaacttggccgacccttggtctacagcacgggttctcagtcgggcgacgatttggctgtctaggcgtcatttggcaatgtctagagacatttttggtagttagaatggggggaagatactcctgacttgtaataagaagacatcagagatgctgctaagtcggctccagcacacaggagccccccacaacgaagagttagtgcccccaaacgtcactgttgctgaggttgaaaataatcatgcagtcattcctcaattactgcctgcagcaattcctccatttttatgaatcttgtgagcacttacgctaggagaaatttcttttacaaaacttttaaaatacaattagtgctgataattcctatgtggaaatgattccagccatggtcccctcacttgagcatgtgaatattctcacggagagaagccccagcgagattttccggtgaatacgggattgcacttactctttcatcacggaaacagaccccccgagagaagccccaacgagattttccggtgaatacgggactgcacgtactctctcatcatgaaaacagagccccgttcataaatttttcatctttatttttaaggttatactcctctaaataacccttaagcctcatcaagaaaggtttgtttatagtatttttactatagcttcatccttgataacgtcctaatttccttctggacaacctccttgaccaatggcatattgagatctatgtgacatgaggatatttctcagtaccactttgttactggtacctgatgcacacggattgcgaccagagcatgatgcctccatcaagtggtaatatgtttgcagcctgctgtccagccaagagtgacagatacttctagtgacttccccggtatccactctcatcttcttccaatatcaagagaatccaggttctgtcagattagtaaggtgtgctaatctaaattttaaaaaatctcttacaggttttcttgcagctggtaccatccatgtctcacagccctggccactgacagatcagcagatgtcaccacatgggcttctgagaaagctcttgaatggggatcgttcttaaacatgaattcctccctgtatgttttgttctttgctttacttttcaccttgcaaagagatccagtacctagtattggaagatccaccttaacgaccgtgcatatgaaaaccacagtctaaggaagtgactgcagaaagctcacagcgaccctggcctcccctgtggcctctttgagtgtctgcagcagccctggacttccagacttctatcacatgagaaaaaataaaactgattattggtttaagctgct

SEQ ID NO: 10583 - protein, 563 aa, Homo sapiens
MAALSPTFATSTQDSTCLQDSEFPVSSKDHSCPQNLDLFVCSGLEPHTPSVGSQESVTFQDVAVDFTEKEWPLLDSSQRKLYKDVMLENYSNLTSLDWETPSKTKWSLLMEDIFGKETPSGVTMERAGLGEKSTEYAHLFEVFGMDPHLTQPMGRHAGKRPYHRRDYGVAFKGRPHLTQHMSMYDGRKMHECHQCQKAFTTSASLTRHRRIHTGEKPYECSDCGKAFNDPSALRSHARTHLKEKPFDCSQCGNAFRTLSALKIHMRVHTGERPYKCDQCGKAYGRSCHLIAHKRTHTGERPYECHDCGKAFQHPSHLKEHVRNHTGEKPYACTQCGKAFRWKSNFNLHKKNHMVEKTYECKECGKSFGDLVSRRKHMRIHIVKKPVECRQCGKTFRNQSILKTHMNSHTGEKPYGCDLCGKAFSASSNLTAHRKIHTQERRYECAACGKVFGDYLSRRRHMSVHLVKKRVECRQCGKAFRNQSTLKTHMRSHTGEKPYECDHCGKAFSIGSNLNVHRRIHTGEKPYECLVCGKAFSDHSSLRSHVKTHRGEKLFVSSVWKRLQ

SEQ ID NO: 10584 - DNA, 4220 bp, Homo sapiens
gagaattggaaggcggcagtgaagcggaagccattactctctggagtcgattgccccgagacacatgggccaaggaggggtcagcggcgaattctttcggcctgttggggacccctcgtgtccccacgccagactggacctcccgtatgaacttctcttcgcatcggcggcggcttccgtcacctccgctcccccgatcctattcccagtcgtatgccagcttggagagtcacgtgagagcaagagagtagctttctggttgtcctggtgccctgctcaggcaaactgactgccattctctgaggatggcagctctgtcccccacatttgccacgtccacccaggattccacctgtctccaggactcagaatttcctgtttcttcaaaagaccattcctgtccccagaatttggacctgttcgtgtgcagtggtctggagcctcacacacccagtgttggttcccaggaatcggtgactttccaagatgtcgctgtggactttaccgagaaggagtggcccttgctggattcttctcagagaaaactgtacaaagatgtaatgctggagaactacagcaacctcacttcactggaaattttggcaccaccattttgctgctcctaagtcagacttgtccaccctcagaacactgaagacccaagtgttgagcccaggctactggaaggggttgtcctctgcatggccctccctcaacctgtgtctttcccgtgagtgtagggtatcaggtcggcaaacccagcctcatctcacacttggagcaggaggaggagccgaggacagaggagaggggcgctcaccagggcgcttgtgcagattgggagactccatctaaaaccaagtggtcacttcttatggaagatatttttgggaaggaaacgcccagtggtgtgacgatggaaagagccggtcttggagagaagtccactgaatacgctcacttgttcgaagtctttggcatggaccctcatctcactcagccaatgggaaggcacgctggcaagaggccctatcaccgccgcgactatggggtagcgttcaagggcaggccgcacctcactcagcacatgagcatgtacgacgggagaaaaatgcatgaatgtcatcagtgccaaaaagccttcaccacgagcgcgtccctcacacggcacaggagaatccacaccggggagaagccttacgagtgcagcgactgcgggaaagccttcaacgacccttcagcccttaggagccacgcaagaactcacctcaaagagaagccctttgactgcagtcagtgtggaaatgcattccggaccctctcggccctgaaaatccacatgcgagttcacactggcgagaggccttacaagtgtgatcagtgcgggaaggcttacggccggagctgccacctcatcgcacacaagagaacgcacaccggagagaggccctacgagtgtcacgactgtgggaaagctttccagcacccctcccacctcaaagagcacgtgaggaatcacacgggggagaagccctacgcgtgcacgcagtgcggcaaagccttccgctggaagtccaactttaatttgcacaagaagaaccacatggtggagaagacctacgaatgtaaagaatgcgggaaatcctttggcgatctcgtgtcccggaggaaacacatgaggattcacatcgtcaagaaacccgtggaatgtcggcagtgcgggaagaccttccgaaaccagtccatccttaagactcacatgaactctcacactggagagaaaccatacgggtgcgatctctgcgggaaagctttcagcgcgagttcaaacctcaccgcacacaggaagatacacacgcaagagagacgctacgaatgcgccgcctgcgggaaagtcttcggtgactatttatcccggcggaggcacatgagcgttcaccttgtaaagaaacgagttgagtgtaggcagtgtggcaaggccttcaggaaccagtcaacgctgaagacgcacatgcgaagccacacgggggagaaaccgtacgaatgcgatcactgtgggaaggccttcagcataggctccaacctgaatgtgcacaggcggatccacaccggggagaagccctacgaatgccttgtctgcgggaaagccttcagcgaccactcatccctcaggagccacgtgaaaactcaccggggagagaagctctttgtgtcatccgtgtggaaaaggctccagtgagcgcgcctgctttagagacacaggatgattcagaccggaaacagacctcgtgggtgtaagaggaagcctctgtgagctcgcaccttactgggtgcaaaagaatccacggaacttgggagaagtccagttcctgtaaaaactgggaagacgaggcgttctcatcccataggaggtttgtgagaactcacgccgggggtgaaaatgtacgtctgtagcatggagaagccttcagggtacattcagctcttaacaaacacaggaggacttaatggcagcttggcatttaatgtcaaaatccaagccgtggcatttaatgtcaaaatgacttcagaccacttctagccttctgggcccatgagtaataatgagcacactagggagcatctctgtaaacacagtggctggggaaacccttcctagtctcacttgattcctcatgacggaaatcacactaaagagagaaatcagtgaagtaaggaacgtggaaggtcatgaatgggccgcaaaccacggccagctgcttgtctttgtatggcttgccagctaacaatagtggttccatctttaaggaagaagaatgtttgatggagaaaatttgtggccaatgaagtctgaaatacttcctgtcatctgcccctttccagaaaaacttggccgacccttggtctacagcacgggttctcagtcgggcgacgatttggctgtctaggcgtcatttggcaatgtctagagacatttttggtagttagaatggggggaagatactcctgacttgtaataagaagacatcagagatgctgctaagtcggctccagcacacaggagccccccacaacgaagagttagtgcccccaaacgtcactgttgctgaggttgaaaataatcatgcagtcattcctcaattactgcctgcagcaattcctccatttttatgaatcttgtgagcacttacgctaggagaaatttcttttacaaaacttttaaaatacaattagtgctgataattcctatgtggaaatgattccagccatggtcccctcacttgagcatgtgaatattctcacggagagaagccccagcgagattttccggtgaatacgggattgcacttactctttcatcacggaaacagaccccccgagagaagccccaacgagattttccggtgaatacgggactgcacgtactctctcatcatgaaaacagagccccgttcataaatttttcatctttatttttaaggttatactcctctaaataacccttaagcctcatcaagaaaggtttgtttatagtatttttactatagcttcatccttgataacgtcctaatttccttctggacaacctccttgaccaatggcatattgagatctatgtgacatgaggatatttctcagtaccactttgttactggtacctgatgcacacggattgcgaccagagcatgatgcctccatcaagtggtaatatgtttgcagcctgctgtccagccaagagtgacagatacttctagtgacttccccggtatccactctcatcttcttccaatatcaagagaatccaggttctgtcagattagtaaggtgtgctaatctaaattttaaaaaatctcttacaggttttcttgcagctggtaccatccatgtctcacagccctggccactgacagatcagcagatgtcaccacatgggcttctgagaaagctcttgaatggggatcgttcttaaacatgaattcctccctgtatgttttgttctttgctttacttttcaccttgcaaagagatccagtacctagtattggaagatccaccttaacgaccgtgcatatgaaaaccacagtctaaggaagtgactgcagaaagctcacagcgaccctggcctcccctgtggcctctttgagtgtctgcagcagccctggacttccagacttctatcacatgagaaaaaataaaactgattattggtttaagctgct

SEQ ID NO: 10585 - protein, 454 aa, Homo sapiens [sequence omitted]

SEQ ID NO: 10586 - DNA, 4074 bp, Homo sapiens
gagaattggaaggcggcagtgaagcggaagccattactctctggagtcgattgccccgagacacatgggccaaggaggggtcagcggcgaattctttcggcctgttggggacccctcgtgtccccacgccagactggacctcccgtatgaacttctcttcgcatcggcggcggcttccgtcacctccgctcccccgatcctattcccagtcgtatgccagcttggagagtcacgtgagagcaagagagtagctttctggttgtcctggtgccctgctcaggcaaactgactgccattctctgaggatggcagctctgtcccccacatttgccacgtccacccaggattccacctgtctccaggactcagaatttcctgtttcttcaaaagaccattcctgtccccagaatttggacctgttcgtgtgcagtggtctggagcctcacacacccagtgttggttcccaggaatcggtgactttccaagatgtcgctgtggactttaccgagaaggagtggcccttgctggattcttctcagagaaaactgtacaaagatgtaatgctggagaactacagcaacctcacttcactggggtatcaggtcggcaaacccagcctcatctcacacttggagcaggaggaggagccgaggacagaggagaggggcgctcaccagggcgcttgtgcagattgggagactccatctaaaaccaagtggtcacttcttatggaagatatttttgggaaggaaacgcccagtggtgtgacgatggaaagagccggtcttggagagaagtccactgaatacgctcacttgttcgaagtctttggcatggaccctcatctcactcagccaatgggaaggcacgctggcaagaggccctatcaccgccgcgactatggggtagcgttcaagggcaggccgcacctcactcagcacatgagcatgtacgacgggagaaaaatgcatgaatgtcatcagtgccaaaaagccttcaccacgagcgcgtccctcacacggcacaggagaatccacaccggggagaagccttacgagtgcagcgactgcgggaaagccttcaacgacccttcagcccttaggagccacgcaagaactcacctcaaagagaagccctttgactgcagtcagtgtggaaatgcattccggaccctctcggccctgaaaatccacatgcgagttcacactggcgagaggccttacaagtgtgatcagtgcgggaaggcttacggccggagctgccacctcatcgcacacaagagaacgcacaccggagagaggccctacgagtgtcacgactgtgggaaagctttccagcacccctcccacctcaaagagcacgtgaggaatcacacgggggagaagccctacgcgtgcacgcagtgcggcaaagccttccgctggaagtccaactttaatttgcacaagaagaaccacatggtggagaagacctacgaatgtaaagaatgcgggaaatcctttggcgatctcgtgtcccggaggaaacacatgaggattcacatcgtcaagaaacccgtggaatgtcggcagtgcgggaagaccttccgaaaccagtccatccttaagactcacatgaactctcacactggagagaaaccatacgggtgcgatctctgcgggaaagctttcagcgcgagttcaaacctcaccgcacacaggaagatacacacgcaagagagacgctacgaatgcgccgcctgcgggaaagtcttcggtgactatttatcccggcggaggcacatgagcgttcaccttgtaaagaaacgagttgagtgtaggcagtgtggcaaggccttcaggaaccagtcaacgctgaagacgcacatgcgaagccacacgggggagaaaccgtacgaatgcgatcactgtgggaaggccttcagcataggctccaacctgaatgtgcacaggcggatccacaccggggagaagccctacgaatgccttgtctgcgggaaagccttcagcgaccactcatccctcaggagccacgtgaaaactcaccggggagagaagctctttgtgtcatccgtgtggaaaaggctccagtgagcgcgcctgctttagagacacaggatgattcagaccggaaacagacctcgtgggtgtaagaggaagcctctgtgagctcgcaccttactgggtgcaaaagaatccacggaacttgggagaagtccagttcctgtaaaaactgggaagacgaggcgttctcatcccataggaggtttgtgagaactcacgccgggggtgaaaatgtacgtctgtagcatggagaagccttcagggtacattcagctcttaacaaacacaggaggacttaatggcagcttggcatttaatgtcaaaatccaagccgtggcatttaatgtcaaaatgacttcagaccacttctagccttctgggcccatgagtaataatgagcacactagggagcatctctgtaaacacagtggctggggaaacccttcctagtctcacttgattcctcatgacggaaatcacactaaagagagaaatcagtgaagtaaggaacgtggaaggtcatgaatgggccgcaaaccacggccagctgcttgtctttgtatggcttgccagctaacaatagtggttccatctttaaggaagaagaatgtttgatggagaaaatttgtggccaatgaagtctgaaatacttcctgtcatctgcccctttccagaaaaacttggccgacccttggtctacagcacgggttctcagtcgggcgacgatttggctgtctaggcgtcatttggcaatgtctagagacatttttggtagttagaatggggggaagatactcctgacttgtaataagaagacatcagagatgctgctaagtcggctccagcacacaggagccccccacaacgaagagttagtgcccccaaacgtcactgttgctgaggttgaaaataatcatgcagtcattcctcaattactgcctgcagcaattcctccatttttatgaatcttgtgagcacttacgctaggagaaatttcttttacaaaacttttaaaatacaattagtgctgataattcctatgtggaaatgattccagccatggtcccctcacttgagcatgtgaatattctcacggagagaagccccagcgagattttccggtgaatacgggattgcacttactctttcatcacggaaacagaccccccgagagaagccccaacgagattttccggtgaatacgggactgcacgtactctctcatcatgaaaacagagccccgttcataaatttttcatctttatttttaaggttatactcctctaaataacccttaagcctcatcaagaaaggtttgtttatagtatttttactatagcttcatccttgataacgtcctaatttccttctggacaacctccttgaccaatggcatattgagatctatgtgacatgaggatatttctcagtaccactttgttactggtacctgatgcacacggattgcgaccagagcatgatgcctccatcaagtggtaatatgtttgcagcctgctgtccagccaagagtgacagatacttctagtgacttccccggtatccactctcatcttcttccaatatcaagagaatccaggttctgtcagattagtaaggtgtgctaatctaaattttaaaaaatctcttacaggttttcttgcagctggtaccatccatgtctcacagccctggccactgacagatcagcagatgtcaccacatgggcttctgagaaagctcttgaatggggatcgttcttaaacatgaattcctccctgtatgttttgttctttgctttacttttcaccttgcaaagagatccagtacctagtattggaagatccaccttaacgaccgtgcatatgaaaaccacagtctaaggaagtgactgcagaaagctcacagcgaccctggcctcccctgtggcctctttgagtgtctgcagcagccctggacttccagacttctatcacatgagaaaaaataaaactgattattggtttaagctgct

SEQ ID NO: 10587 - protein, 595 aa, Homo sapiens
MAALSPTFATSTQDSTCLQDSEFPVSSKDHSCPQNLDLFVCSGLEPHTPSVGSQESVTFQDVAVDFTEKEWPLLDSSQRKLYKDVMLENYSNLTSLGYQVGKPSLISHLEQEEEPRTEERGAHQGACADWETPSKTKWSLLMEDIFGKETPSGVTMERAGLGEKSTEYAHLFEVFGMDPHLTQPMGRHAGKRPYHRRDYGVAFKGRPHLTQHMSMYDGRKMHECHQCQKAFTTSASLTRHRRIHTGEKPYECSDCGKAFNDPSALRSHARTHLKEKPFDCSQCGNAFRTLSALKIHMRVHTGERPYKCDQCGKAYGRSCHLIAHKRTHTGERPYECHDCGKAFQHPSHLKEHVRNHTGEKPYACTQCGKAFRWKSNFNLHKKNHMVEKTYECKECGKSFGDLVSRRKHMRIHIVKKPVECRQCGKTFRNQSILKTHMNSHTGEKPYGCDLCGKAFSASSNLTAHRKIHTQERRYECAACGKVFGDYLSRRRHMSVHLVKKRVECRQCGKAFRNQSTLKTHMRSHTGEKPYECDHCGKAFSIGSNLNVHRRIHTGEKPYECLVCGKAFSDHSSLRSHVKTHRGEKLFVSSVWKRLQ

SEQ ID NO: 10588 - DNA, 4119 bp, Homo sapiens
gagaattggaaggcggcagtgaagcggaagccattactctctggagtcgattgccccgagacacatgggccaaggaggggtcagcggcgaattctttcggcctgttggggacccctcgtgtccccacgccagactggacctcccgtatgaacttctcttcgcatcggcggcggcttccgtcacctccgctcccccgatcctattcccagtcgtatgccagcttggagagtcacgtgagagcaagagagtagctttctggttgtcctggtgccctgctcaggcaaactgactgccattctctgaggatggcagctctgtcccccacatttgccacgtccacccaggattccacctgtctccaggactcagaatttcctgtttcttcaaaagaccattcctgtccccagaatttggacctgttcgtgtgcagtggtctggagcctcacacacccagtgttggttcccaggaatcggtgactttccaagatgtcgctgtggactttaccgagaaggagtggcccttgctggattcttctcagagaaaactgtacaaagatgtaatgctggagaactacagcaacctcacttcactggggtatcaggtcggcaaacccagcctcatctcacacttggagcaggaggaggagccgaggacagaggagaggggcgctcaccagggcgcttgtgcagattgggagactccatctaaaaccaagtggtcacttcttatggaagatatttttgggaaggaaacgcccagtggtgtgacgatggaaagagccggtcttggagagaagtccactgaatacgctcacttgttcgaagtctttggcatggaccctcatctcactcagccaatgggaaggcacgctggcaagaggccctatcaccgccgcgactatggggtagcgttcaagggcaggccgcacctcactcagcacatgagcatgtacgacgggagaaaaatgcatgaatgtcatcagtgccaaaaagccttcaccacgagcgcgtccctcacacggcacaggagaatccacaccggggagaagccttacgagtgcagcgactgcgggaaagccttcaacgacccttcagcccttaggagccacgcaagaactcacctcaaagagaagccctttgactgcagtcagtgtggaaatgcattccggaccctctcggccctgaaaatccacatgcgagttcacactggcgagaggccttacaagtgtgatcagtgcgggaaggcttacggccggagctgccacctcatcgcacacaagagaacgcacaccggagagaggccctacgagtgtcacgactgtgggaaagctttccagcacccctcccacctcaaagagcacgtgaggaatcacacgggggagaagccctacgcgtgcacgcagtgcggcaaagccttccgctggaagtccaactttaatttgcacaagaagaaccacatggtggagaagacctacgaatgtaaagaatgcgggaaatcctttggcgatctcgtgtcccggaggaaacacatgaggattcacatcgtcaagaaacccgtggaatgtcggcagtgcgggaagaccttccgaaaccagtccatccttaagactcacatgaactctcacactggagagaaaccatacgggtgcgatctctgcgggaaagctttcagcgcgagttcaaacctcaccgcacacaggaagatacacacgcaagagagacgctacgaatgcgccgcctgcgggaaagtcttcggtgactatttatcccggcggaggcacatgagcgttcaccttgtaaagaaacgagttgagtgtaggcagtgtggcaaggccttcaggaaccagtcaacgctgaagacgcacatgcgaagccacacgggggagaaaccgtacgaatgcgatcactgtgggaaggccttcagcataggctccaacctgaatgtgcacaggcggatccacaccggggagaagccctacgaatgccttgtctgcgggaaagccttcagcgaccactcatccctcaggagccacgtgaaaactcaccggggagagaagctctttgtgtcatccgtgtggaaaaggctccagtgagcgcgcctgctttagagacacaggatgattcagaccggaaacagacctcgtgggtgtaagaggaagcctctgtgagctcgcaccttactgggtgcaaaagaatccacggaacttgggagaagtccagttcctgtaaaaactgggaagacgaggcgttctcatcccataggaggtttgtgagaactcacgccgggggtgaaaatgtacgtctgtagcatggagaagccttcagggtacattcagctcttaacaaacacaggaggacttaatggcagcttggcatttaatgtcaaaatccaagccgtggcatttaatgtcaaaatgacttcagaccacttctagccttctgggcccatgagtaataatgagcacactagggagcatctctgtaaacacagtggctggggaaacccttcctagtctcacttgattcctcatgacggaaatcacactaaagagagaaatcagtgaagtaaggaacgtggaaggtcatgaatgggccgcaaaccacggccagctgcttgtctttgtatggcttgccagctaacaatagtggttccatctttaaggaagaagaatgtttgatggagaaaatttgtggccaatgaagtctgaaatacttcctgtcatctgcccctttccagaaaaacttggccgacccttggtctacagcacgggttctcagtcgggcgacgatttggctgtctaggcgtcatttggcaatgtctagagacatttttggtagttagaatggggggaagatactcctgacttgtaataagaagacatcagagatgctgctaagtcggctccagcacacaggagccccccacaacgaagagttagtgcccccaaacgtcactgttgctgaggttgaaaataatcatgcagtcattcctcaattactgcctgcagcaattcctccatttttatgaatcttgtgagcacttacgctaggagaaatttcttttacaaaacttttaaaatacaattagtgctgataattcctatgtggaaatgattccagccatggtcccctcacttgagcatgtgaatattctcacggagagaagccccagcgagattttccggtgaatacgggattgcacttactctttcatcacggaaacagaccccccgagagaagccccaacgagattttccggtgaatacgggactgcacgtactctctcatcatgaaaacagagccccgttcataaatttttcatctttatttttaaggttatactcctctaaataacccttaagcctcatcaagaaaggtttgtttatagtatttttactatagcttcatccttgataacgtcctaatttccttctggacaacctccttgaccaatggcatattgagatctatgtgacatgaggatatttctcagtaccactttgttactggtacctgatgcacacggattgcgaccagagcatgatgcctccatcaagtggtaatatgtttgcagcctgctgtccagccaagagtgacagatacttctagtgacttccccggtatccactctcatcttcttccaatatcaagagaatccaggttctgtcagattagtaaggtgtgctaatctaaattttaaaaaatctcttacaggttttcttgcagctggtaccatccatgtctcacagccctggccactgacagatcagcagatgtcaccacatgggcttctgagaaagctcttgaatggggatcgttcttaaacatgaattcctccctgtatgttttgttctttgctttacttttcaccttgcaaagagatccagtacctagtattggaagatccaccttaacgaccgtgcatatgaaaaccacagtctaaggaagtgactgcagaaagctcacagcgaccctggcctcccctgtggcctctttgagtgtctgcagcagccctggacttccagacttctatcacatgagaaaaaataaaactgattattggtttaagctgctatggatatttcattgtttttcttttaaatttatttattttaagat

SEQ ID NO: 10589 - protein, 595 aa, Homo sapiens; identical to SEQ ID NO: 10587

SEQ ID NO: 10590 - DNA, 5228 bp, Homo sapiens
gagaattggaaggcggcagtgaagcggaagccattactctctggagtcgattgccccgagacacatgggccaaggaggggtcagcggcgaattctttcggcctgttggggacccctcgtgtccccacgccagactggacctcccgtatgaacttctcttcgcatcggcggcggcttccgtcacctccgctcccccgatcctattcccagtcgtatgccagcttggagagtcacgtgagagcaagagagtagctttctggttgtcctggtgccctgctcaggcaaactgactgccattctctgaggatggcagctctgtcccccacatttgccacgtccacccaggattccacctgtctccaggactcagaatttcctgtttcttcaaaagaccattcctgtccccagaatttggacctgttcgtgtgcagtggtctggagcctcacacacccagtgttggttcccaggaatcggtgactttccaagatgtcgctgtggactttaccgagaaggagtggcccttgctggattcttctcagagaaaactgtacaaagatgtaatgctggagaactacagcaacctcacttcactggattgggagactccatctaaaaccaagtggtcacttcttatggaagatatttttgggaaggaaacgcccagtggtgtgacgatggtaagatttccgtgggataattctggatcttccttccacgtctgaggagactggggcagcctaggttagaaaagcagttcaacaccagggcaagcagcttccctcagaggagactgtgtttcagagacactgggtattaccaagatggagacaaccctaaagctaacctcaagctactttacctagagtgtctctgagtgaagatttttatagctgtgtctcagatattgagtgttggggctcaatgcagtttttgttttattttatatttatgctgtacacttacttatcaatttagttttggtggtgtttattttttggggggcagacagtcttgctcttgttgcccagtgcagtgggcaacatcttggctcactgcaacctctgcctcccaggctcaagccatcctcccacctcagcctcctgagcagctgggactataggcgtgtgccaccacacttggctgatttttctattttttgcagagacaggatttcaccatgttgcccaggctggtcttgaactcctggagatccatcagcctcggtctcccaaagtgctgggattataggcttgagccaccatgcccagcctcaattcagtggtttttgtttgtttgtttttgttgttgtttttgttttttgtttttttttttgaggcacagtcttgctcttgtcacccaggctggagtgcaatggcacgatctcagctcactgcagcctccacctttcaggctcaagtgattctcctgtcccaccctcccgagtagctgggattacaggtgtgcaccaccatgcccagctaatttttgtatttttagtagagacagcgtttcaccatgttagccaggctggtctcgaactcctgacctcaggtggtccacccgccttggccttccagagtgctgggatgacaggcgtgagccaccttgcccagcctcaattcagttttaagcagtgaagaaatgctatatgcaaaaagctttgaaaaagtaacacatgtggagccttgtggcctggcattcacctattgtccttgatggagctcaaatggggcagggacagcacgtttgcacggcagatggttacagctctagtcatagtaatgtgcttctatctgttcatagcagtgtatgtggggatgacgcttagggttgcaatgaatatgagaattgcctttgtcagcacttacgtcttaaccaacaggaaagagccggtcttggagagaagtccactgaatacgctcacttgttcgaagtctttggcatggaccctcatctcactcagccaatgggaaggcacgctggcaagaggccctatcaccgccgcgactatggggtagcgttcaagggcaggccgcacctcactcagcacatgagcatgtacgacgggagaaaaatgcatgaatgtcatcagtgccaaaaagccttcaccacgagcgcgtccctcacacggcacaggagaatccacaccggggagaagccttacgagtgcagcgactgcgggaaagccttcaacgacccttcagcccttaggagccacgcaagaactcacctcaaagagaagccctttgactgcagtcagtgtggaaatgcattccggaccctctcggccctgaaaatccacatgcgagttcacactggcgagaggccttacaagtgtgatcagtgcgggaaggcttacggccggagctgccacctcatcgcacacaagagaacgcacaccggagagaggccctacgagtgtcacgactgtgggaaagctttccagcacccctcccacctcaaagagcacgtgaggaatcacacgggggagaagccctacgcgtgcacgcagtgcggcaaagccttccgctggaagtccaactttaatttgcacaagaagaaccacatggtggagaagacctacgaatgtaaagaatgcgggaaatcctttggcgatctcgtgtcccggaggaaacacatgaggattcacatcgtcaagaaacccgtggaatgtcggcagtgcgggaagaccttccgaaaccagtccatccttaagactcacatgaactctcacactggagagaaaccatacgggtgcgatctctgcgggaaagctttcagcgcgagttcaaacctcaccgcacacaggaagatacacacgcaagagagacgctacgaatgcgccgcctgcgggaaagtcttcggtgactatttatcccggcggaggcacatgagcgttcaccttgtaaagaaacgagttgagtgtaggcagtgtggcaaggccttcaggaaccagtcaacgctgaagacgcacatgcgaagccacacgggggagaaaccgtacgaatgcgatcactgtgggaaggccttcagcataggctccaacctgaatgtgcacaggcggatccacaccggggagaagccctacgaatgccttgtctgcgggaaagccttcagcgaccactcatccctcaggagccacgtgaaaactcaccggggagagaagctctttgtgtcatccgtgtggaaaaggctccagtgagcgcgcctgctttagagacacaggatgattcagaccggaaacagacctcgtgggtgtaagaggaagcctctgtgagctcgcaccttactgggtgcaaaagaatccacggaacttgggagaagtccagttcctgtaaaaactgggaagacgaggcgttctcatcccataggaggtttgtgagaactcacgccgggggtgaaaatgtacgtctgtagcatggagaagccttcagggtacattcagctcttaacaaacacaggaggacttaatggcagcttggcatttaatgtcaaaatccaagccgtggcatttaatgtcaaaatgacttcagaccacttctagccttctgggcccatgagtaataatgagcacactagggagcatctctgtaaacacagtggctggggaaacccttcctagtctcacttgattcctcatgacggaaatcacactaaagagagaaatcagtgaagtaaggaacgtggaaggtcatgaatgggccgcaaaccacggccagctgcttgtctttgtatggcttgccagctaacaatagtggttccatctttaaggaagaagaatgtttgatggagaaaatttgtggccaatgaagtctgaaatacttcctgtcatctgcccctttccagaaaaacttggccgacccttggtctacagcacgggttctcagtcgggcgacgatttggctgtctaggcgtcatttggcaatgtctagagacatttttggtagttagaatggggggaagatactcctgacttgtaataagaagacatcagagatgctgctaagtcggctccagcacacaggagccccccacaacgaagagttagtgcccccaaacgtcactgttgctgaggttgaaaataatcatgcagtcattcctcaattactgcctgcagcaattcctccatttttatgaatcttgtgagcacttacgctaggagaaatttcttttacaaaacttttaaaatacaattagtgctgataattcctatgtggaaatgattccagccatggtcccctcacttgagcatgtgaatattctcacggagagaagccccagcgagattttccggtgaatacgggattgcacttactctttcatcacggaaacagaccccccgagagaagccccaacgagattttccggtgaatacgggactgcacgtactctctcatcatgaaaacagagccccgttcataaatttttcatctttatttttaaggttatactcctctaaataacccttaagcctcatcaagaaaggtttgtttatagtatttttactatagcttcatccttgataacgtcctaatttccttctggacaacctccttgaccaatggcatattgagatctatgtgacatgaggatatttctcagtaccactttgttactggtacctgatgcacacggattgcgaccagagcatgatgcctccatcaagtggtaatatgtttgcagcctgctgtccagccaagagtgacagatacttctagtgacttccccggtatccactctcatcttcttccaatatcaagagaatccaggttctgtcagattagtaaggtgtgctaatctaaattttaaaaaatctcttacaggttttcttgcagctggtaccatccatgtctcacagccctggccactgacagatcagcagatgtcaccacatgggcttctgagaaagctcttgaatggggatcgttcttaaacatgaattcctccctgtatgttttgttctttgctttacttttcaccttgcaaagagatccagtacctagtattggaagatccaccttaacgaccgtgcatatgaaaaccacagtctaaggaagtgactgcagaaagctcacagcgaccctggcctcccctgtggcctctttgagtgtctgcagcagccctggacttccagacttctatcacatgagaaaaaataaaactgattattggtttaagctgctatggatatttcattgtttttcttttaaatttatttattttaagat

SEQ ID NO: 10591 - protein, 138 aa, Homo sapiens; identical to SEQ ID NO: 10581

SEQ ID NO: 10592 - DNA, 4023 bp, Homo sapiens
gagaattggaaggcggcagtgaagcggaagccattactctctggagtcgattgccccgagacacatgggccaaggaggggtcagcggcgaattctttcggcctgttggggacccctcgtgtccccacgccagactggacctcccgtatgaacttctcttcgcatcggcggcggcttccgtcacctccgctcccccgatcctattcccagtcgtatgccagcttggagagtcacgtgagagcaagagagtagctttctggttgtcctggtgccctgctcaggcaaactgactgccattctctgaggatggcagctctgtcccccacatttgccacgtccacccaggattccacctgtctccaggactcagaatttcctgtttcttcaaaagaccattcctgtccccagaatttggacctgttcgtgtgcagtggtctggagcctcacacacccagtgttggttcccaggaatcggtgactttccaagatgtcgctgtggactttaccgagaaggagtggcccttgctggattcttctcagagaaaactgtacaaagatgtaatgctggagaactacagcaacctcacttcactggattgggagactccatctaaaaccaagtggtcacttcttatggaagatatttttgggaaggaaacgcccagtggtgtgacgatggaaagagccggtcttggagagaagtccactgaatacgctcacttgttcgaagtctttggcatggaccctcatctcactcagccaatgggaaggcacgctggcaagaggccctatcaccgccgcgactatggggtagcgttcaagggcaggccgcacctcactcagcacatgagcatgtacgacgggagaaaaatgcatgaatgtcatcagtgccaaaaagccttcaccacgagcgcgtccctcacacggcacaggagaatccacaccggggagaagccttacgagtgcagcgactgcgggaaagccttcaacgacccttcagcccttaggagccacgcaagaactcacctcaaagagaagccctttgactgcagtcagtgtggaaatgcattccggaccctctcggccctgaaaatccacatgcgagttcacactggcgagaggccttacaagtgtgatcagtgcgggaaggcttacggccggagctgccacctcatcgcacacaagagaacgcacaccggagagaggccctacgagtgtcacgactgtgggaaagctttccagcacccctcccacctcaaagagcacgtgaggaatcacacgggggagaagccctacgcgtgcacgcagtgcggcaaagccttccgctggaagtccaactttaatttgcacaagaagaaccacatggtggagaagacctacgaatgtaaagaatgcgggaaatcctttggcgatctcgtgtcccggaggaaacacatgaggattcacatcgtcaagaaacccgtggaatgtcggcagtgcgggaagaccttccgaaaccagtccatccttaagactcacatgaactctcacactggagagaaaccatacgggtgcgatctctgcgggaaagctttcagcgcgagttcaaacctcaccgcacacaggaagatacacacgcaagagagacgctacgaatgcgccgcctgcgggaaagtcttcggtgactatttatcccggcggaggcacatgagcgttcaccttgtaaagaaacgagttgagtgtaggcagtgtggcaaggccttcaggaaccagtcaacgctgaagacgcacatgcgaagccacacgggggagaaaccgtacgaatgcgatcactgtgggaaggccttcagcataggctccaacctgaatgtgcacaggcggatccacaccggggagaagccctacgaatgccttgtctgcgggaaagccttcagcgaccactcatccctcaggagccacgtgaaaactcaccggggagagaagctctttgtgtcatccgtgtggaaaaggctccagtgagcgcgcctgctttagagacacaggatgattcagaccggaaacagacctcgtgggtgtaagaggaagcctctgtgagctcgcaccttactgggtgcaaaagaatccacggaacttgggagaagtccagttcctgtaaaaactgggaagacgaggcgttctcatcccataggaggtttgtgagaactcacgccgggggtgaaaatgtacgtctgtagcatggagaagccttcagggtacattcagctcttaacaaacacaggaggacttaatggcagcttggcatttaatgtcaaaatccaagccgtggcatttaatgtcaaaatgacttcagaccacttctagccttctgggcccatgagtaataatgagcacactagggagcatctctgtaaacacagtggctggggaaacccttcctagtctcacttgattcctcatgacggaaatcacactaaagagagaaatcagtgaagtaaggaacgtggaaggtcatgaatgggccgcaaaccacggccagctgcttgtctttgtatggcttgccagctaacaatagtggttccatctttaaggaagaagaatgtttgatggagaaaatttgtggccaatgaagtctgaaatacttcctgtcatctgcccctttccagaaaaacttggccgacccttggtctacagcacgggttctcagtcgggcgacgatttggctgtctaggcgtcatttggcaatgtctagagacatttttggtagttagaatggggggaagatactcctgacttgtaataagaagacatcagagatgctgctaagtcggctccagcacacaggagccccccacaacgaagagttagtgcccccaaacgtcactgttgctgaggttgaaaataatcatgcagtcattcctcaattactgcctgcagcaattcctccatttttatgaatcttgtgagcacttacgctaggagaaatttcttttacaaaacttttaaaatacaattagtgctgataattcctatgtggaaatgattccagccatggtcccctcacttgagcatgtgaatattctcacggagagaagccccagcgagattttccggtgaatacgggattgcacttactctttcatcacggaaacagaccccccgagagaagccccaacgagattttccggtgaatacgggactgcacgtactctctcatcatgaaaacagagccccgttcataaatttttcatctttatttttaaggttatactcctctaaataacccttaagcctcatcaagaaaggtttgtttatagtatttttactatagcttcatccttgataacgtcctaatttccttctggacaacctccttgaccaatggcatattgagatctatgtgacatgaggatatttctcagtaccactttgttactggtacctgatgcacacggattgcgaccagagcatgatgcctccatcaagtggtaatatgtttgcagcctgctgtccagccaagagtgacagatacttctagtgacttccccggtatccactctcatcttcttccaatatcaagagaatccaggttctgtcagattagtaaggtgtgctaatctaaattttaaaaaatctcttacaggttttcttgcagctggtaccatccatgtctcacagccctggccactgacagatcagcagatgtcaccacatgggcttctgagaaagctcttgaatggggatcgttcttaaacatgaattcctccctgtatgttttgttctttgctttacttttcaccttgcaaagagatccagtacctagtattggaagatccaccttaacgaccgtgcatatgaaaaccacagtctaaggaagtgactgcagaaagctcacagcgaccctggcctcccctgtggcctctttgagtgtctgcagcagccctggacttccagacttctatcacatgagaaaaaataaaactgattattggtttaagctgctatggatatttcattgtttttcttttaaatttatttattttaagat

SEQ ID NO: 10593 - protein, 563 aa, Homo sapiens; identical to SEQ ID NO: 10583

SEQ ID NO: 10594 - DNA, 3050 bp, Homo sapiens
aattggaaggcggcagtgaagcggaagccattactctctggagtcgattgccccgagacacatgggccaaggaggggtcagcggcgaattctttcggcctgttggggacccctcgtgtccccacgccagactggacctcccgtatgaacttctcttcgcatcggcggcggcttccgtcacctccgctcccccgatcctattcccagtcgtatgccagcttggagagtcacgtgagagcaagagagtagctttctggttgtcctggtgccctgctcaggcaaactgactgccattctctgaggatggcagctctcacccctcccacctcaaagagcacgtgaggaatcacacgggggagaagccctacgcgtgcacgcagtgcggcaaagccttccgctggaagtccaactttaatttgcacaagaagaaccacatggtggagaagacctacgaatgtaaagaatgcgggaaatcctttggcgatctcgtgtcccggaggaaacacatgaggattcacatcgtcaagaaacccgtggaatgtcggcagtgcgggaagaccttccgaaaccagtccatccttaagactcacatgaactctcacactggagagaaaccatacgggtgcgatctctgcgggaaagctttcagcgcgagttcaaacctcaccgcacacaggaagatacacacgcaagagagacgctacgaatgcgccgcctgcgggaaagtcttcggtgactatttatcccggcggaggcacatgagcgttcaccttgtaaagaaacgagttgagtgtaggcagtgtggcaaggccttcaggaaccagtcaacgctgaagacgcacatgcgaagccacacgggggagaaaccgtacgaatgcgatcactgtgggaaggccttcagcataggctccaacctgaatgtgcacaggcggatccacaccggggagaagccctacgaatgccttgtctgcgggaaagccttcagcgaccactcatccctcaggagccacgtgaaaactcaccggggagagaagctctttgtgtcatccgtgtggaaaaggctccagtgagcgcgcctgctttagagacacaggatgattcagaccggaaacagacctcgtgggtgtaagaggaagcctctgtgagctcgcaccttactgggtgcaaaagaatccacggaacttgggagaagtccagttcctgtaaaaactgggaagacgaggcgttctcatcccataggaggtttgtgagaactcacgccgggggtgaaaatgtacgtctgtagcatggagaagccttcagggtacattcagctcttaacaaacacaggaggacttaatggcagcttggcatttaatgtcaaaatccaagccgtggcatttaatgtcaaaatgacttcagaccacttctagccttctgggcccatgagtaataatgagcacactagggagcatctctgtaaacacagtggctggggaaacccttcctagtctcacttgattcctcatgacggaaatcacactaaagagagaaatcagtgaagtaaggaacgtggaaggtcatgaatgggccgcaaaccacggccagctgcttgtctttgtatggcttgccagctaacaatagtggttccatctttaaggaagaagaatgtttgatggagaaaatttgtggccaatgaagtctgaaatacttcctgtcatctgcccctttccagaaaaacttggccgacccttggtctacagcacgggttctcagtcgggcgacgatttggctgtctaggcgtcatttggcaatgtctagagacatttttggtagttagaatggggggaagatactcctgacttgtaataagaagacatcagagatgctgctaagtcggctccagcacacaggagccccccacaacgaagagttagtgcccccaaacgtcactgttgctgaggttgaaaataatcatgcagtcattcctcaattactgcctgcagcaattcctccatttttatgaatcttgtgagcacttacgctaggagaaatttcttttacaaaacttttaaaatacaattagtgctgataattcctatgtggaaatgattccagccatggtcccctcacttgagcatgtgaatattctcacggagagaagccccagcgagattttccggtgaatacgggattgcacttactctttcatcacggaaacagaccccccgagagaagccccaacgagattttccggtgaatacgggactgcacgtactctctcatcatgaaaacagagccccgttcataaatttttcatctttatttttaaggttatactcctctaaataacccttaagcctcatcaagaaaggtttgtttatagtatttttactatagcttcatccttgataacgtcctaatttccttctggacaacctccttgaccaatggcatattgagatctatgtgacatgaggatatttctcagtaccactttgttactggtacctgatgcacacggattgcgaccagagcatgatgcctccatcaagtggtaatatgtttgcagcctgctgtccagccaagagtgacagatacttctagtgacttccccggtatccactctcatcttcttccaatatcaagagaatccaggttctgtcagattagtaaggtgtgctaatctaaattttaaaaaatctcttacaggttttcttgcagctggtaccatccatgtctcacagccctggccactgacagatcagcagatgtcaccacatgggcttctgagaaagctcttgaatggggatcgttcttaaacatgaattcctccctgtatgttttgttctttgctttacttttcaccttgcaaagagatccagtacctagtattggaagatccaccttaacgaccgtgcatatgaaaaccacagtctaaggaagtgactgcagaaagctcacagcgaccctggcctcccctgtggcctctttgagtgtctgcagcagccctggacttccagacttctatcacatgagaaaaaataaaactgattattggtttaagctgct

SEQ ID NO: 10595 - protein, 74 aa, Homo sapiens
MGQGGVSGEFFRPVGDPSCPHARLDLPYELLFASAAASVTSAPPILFPVVCQLGESRESKRVAFWLSWCPAQAN

SEQ ID NO: 10596 - DNA, 3095 bp, Homo sapiens
aattggaaggcggcagtgaagcggaagccattactctctggagtcgattgccccgagacacatgggccaaggaggggtcagcggcgaattctttcggcctgttggggacccctcgtgtccccacgccagactggacctcccgtatgaacttctcttcgcatcggcggcggcttccgtcacctccgctcccccgatcctattcccagtcgtatgccagcttggagagtcacgtgagagcaagagagtagctttctggttgtcctggtgccctgctcaggcaaactgactgccattctctgaggatggcagctctcacccctcccacctcaaagagcacgtgaggaatcacacgggggagaagccctacgcgtgcacgcagtgcggcaaagccttccgctggaagtccaactttaatttgcacaagaagaaccacatggtggagaagacctacgaatgtaaagaatgcgggaaatcctttggcgatctcgtgtcccggaggaaacacatgaggattcacatcgtcaagaaacccgtggaatgtcggcagtgcgggaagaccttccgaaaccagtccatccttaagactcacatgaactctcacactggagagaaaccatacgggtgcgatctctgcgggaaagctttcagcgcgagttcaaacctcaccgcacacaggaagatacacacgcaagagagacgctacgaatgcgccgcctgcgggaaagtcttcggtgactatttatcccggcggaggcacatgagcgttcaccttgtaaagaaacgagttgagtgtaggcagtgtggcaaggccttcaggaaccagtcaacgctgaagacgcacatgcgaagccacacgggggagaaaccgtacgaatgcgatcactgtgggaaggccttcagcataggctccaacctgaatgtgcacaggcggatccacaccggggagaagccctacgaatgccttgtctgcgggaaagccttcagcgaccactcatccctcaggagccacgtgaaaactcaccggggagagaagctctttgtgtcatccgtgtggaaaaggctccagtgagcgcgcctgctttagagacacaggatgattcagaccggaaacagacctcgtgggtgtaagaggaagcctctgtgagctcgcaccttactgggtgcaaaagaatccacggaacttgggagaagtccagttcctgtaaaaactgggaagacgaggcgttctcatcccataggaggtttgtgagaactcacgccgggggtgaaaatgtacgtctgtagcatggagaagccttcagggtacattcagctcttaacaaacacaggaggacttaatggcagcttggcatttaatgtcaaaatccaagccgtggcatttaatgtcaaaatgacttcagaccacttctagccttctgggcccatgagtaataatgagcacactagggagcatctctgtaaacacagtggctggggaaacccttcctagtctcacttgattcctcatgacggaaatcacactaaagagagaaatcagtgaagtaaggaacgtggaaggtcatgaatgggccgcaaaccacggccagctgcttgtctttgtatggcttgccagctaacaatagtggttccatctttaaggaagaagaatgtttgatggagaaaatttgtggccaatgaagtctgaaatacttcctgtcatctgcccctttccagaaaaacttggccgacccttggtctacagcacgggttctcagtcgggcgacgatttggctgtctaggcgtcatttggcaatgtctagagacatttttggtagttagaatggggggaagatactcctgacttgtaataagaagacatcagagatgctgctaagtcggctccagcacacaggagccccccacaacgaagagttagtgcccccaaacgtcactgttgctgaggttgaaaataatcatgcagtcattcctcaattactgcctgcagcaattcctccatttttatgaatcttgtgagcacttacgctaggagaaatttcttttacaaaacttttaaaatacaattagtgctgataattcctatgtggaaatgattccagccatggtcccctcacttgagcatgtgaatattctcacggagagaagccccagcgagattttccggtgaatacgggattgcacttactctttcatcacggaaacagaccccccgagagaagccccaacgagattttccggtgaatacgggactgcacgtactctctcatcatgaaaacagagccccgttcataaatttttcatctttatttttaaggttatactcctctaaataacccttaagcctcatcaagaaaggtttgtttatagtatttttactatagcttcatccttgataacgtcctaatttccttctggacaacctccttgaccaatggcatattgagatctatgtgacatgaggatatttctcagtaccactttgttactggtacctgatgcacacggattgcgaccagagcatgatgcctccatcaagtggtaatatgtttgcagcctgctgtccagccaagagtgacagatacttctagtgacttccccggtatccactctcatcttcttccaatatcaagagaatccaggttctgtcagattagtaaggtgtgctaatctaaattttaaaaaatctcttacaggttttcttgcagctggtaccatccatgtctcacagccctggccactgacagatcagcagatgtcaccacatgggcttctgagaaagctcttgaatggggatcgttcttaaacatgaattcctccctgtatgttttgttctttgctttacttttcaccttgcaaagagatccagtacctagtattggaagatccaccttaacgaccgtgcatatgaaaaccacagtctaaggaagtgactgcagaaagctcacagcgaccctggcctcccctgtggcctctttgagtgtctgcagcagccctggacttccagacttctatcacatgagaaaaaataaaactgattattggtttaagctgctatggatatttcattgtttttcttttaaatttatttattttaagat

SEQ ID NO: 10597 - protein, 74 aa, Homo sapiens; identical to SEQ ID NO: 10595

SEQ ID NO: 10598 - DNA, 1849 bp, Homo sapiens
taagaggaagcctctgtgagctcgcaccttactgggtgcaaaagaatccacggaacttgggagaagtccagttcctgtaaaaactgggaagacgaggcgttctcatcccataggaggtttgtgagaactcacgccgggggtgaaaatgtacgtctgtagcatggagaagccttcagggtacattcagctcttaacaaacacaggaggacttaatggcagcttggcatttaatgtcaaaatccaagccgtggcatttaatgtcaaaatgacttcagaccacttctagccttctgggcccatgagtaataatgagcacactagggagcatctctgtaaacacagtggctggggaaacccttcctagtctcacttgattcctcatgacggaaatcacactaaagagagaaatcagtgaagtaaggaacgtggaaggtcatgaatgggccgcaaaccacggccagctgcttgtctttgtatggcttgccagctaacaatagtggttccatctttaaggaagaagaatgtttgatggagaaaatttgtggccaatgaagtctgaaatacttcctgtcatctgcccctttccagaaaaacttggccgacccttggtctacagcacgggttctcagtcgggcgacgatttggctgtctaggcgtcatttggcaatgtctagagacatttttggtagttagaatggggggaagatactcctgacttgtaataagaagacatcagagatgctgctaagtcggctccagcacacaggagccccccacaacgaagagttagtgcccccaaacgtcactgttgctgaggttgaaaataatcatgcagtcattcctcaattactgcctgcagcaattcctccatttttatgaatcttgtgagcacttacgctaggagaaatttcttttacaaaacttttaaaatacaattagtgctgataattcctatgtggaaatgattccagccatggtcccctcacttgagcatgtgaatattctcacggagagaagccccagcgagattttccggtgaatacgggattgcacttactctttcatcacggaaacagccccgttcataaatttttcatctttatttttaaggttatactcctctaaataacccttaagcctcatcaagaaaggtttgtttatagtatttttactatagcttcatccttgataacgtcctaatttccttctggacaacctccttgaccaatggcatattgagatctatgtgacatgaggatatttctcagtaccactttgttactggtacctgatgcacacggattgcgaccagagcatgatgcctccatcaagtggtaatatgtttgcagcctgctgtccagccaagagtgacagatacttctagtgacttccccggtatccactctcatcttcttccaatatcaagagaatccaggttctgtcagattagtaaggtgtgctaatctaaattttaaaaaatctcttacaggttttcttgcagctggtaccatccatgtctcacagccctggccactgacagatcagcagatgtcaccacatgggcttctgagaaagctcttgaatggggatcgttcttaaacatgaattcctccctgtatgttttgttctttgctttacttttcaccttgcaaagagatccagtacctagtattggaagatccaccttaacgaccgtgcatatgaaaaccacagtctaaggaagtgactgcagaaagctcacagcgaccctggcctcccctgtggcctctttgagtgtctgcagcagccctggacttccagacttctatcacatgagaaaaaataaaactgattattggtttaagctgct

SEQ ID NO: 10599 - protein, 46 aa, Homo sapiens [sequence omitted]

SEQ ID NO: 10600 - DNA, 1894 bp, Homo sapiens
taagaggaagcctctgtgagctcgcaccttactgggtgcaaaagaatccacggaacttgggagaagtccagttcctgtaaaaactgggaagacgaggcgttctcatcccataggaggtttgtgagaactcacgccgggggtgaaaatgtacgtctgtagcatggagaagccttcagggtacattcagctcttaacaaacacaggaggacttaatggcagcttggcatttaatgtcaaaatccaagccgtggcatttaatgtcaaaatgacttcagaccacttctagccttctgggcccatgagtaataatgagcacactagggagcatctctgtaaacacagtggctggggaaacccttcctagtctcacttgattcctcatgacggaaatcacactaaagagagaaatcagtgaagtaaggaacgtggaaggtcatgaatgggccgcaaaccacggccagctgcttgtctttgtatggcttgccagctaacaatagtggttccatctttaaggaagaagaatgtttgatggagaaaatttgtggccaatgaagtctgaaatacttcctgtcatctgcccctttccagaaaaacttggccgacccttggtctacagcacgggttctcagtcgggcgacgatttggctgtctaggcgtcatttggcaatgtctagagacatttttggtagttagaatggggggaagatactcctgacttgtaataagaagacatcagagatgctgctaagtcggctccagcacacaggagccccccacaacgaagagttagtgcccccaaacgtcactgttgctgaggttgaaaataatcatgcagtcattcctcaattactgcctgcagcaattcctccatttttatgaatcttgtgagcacttacgctaggagaaatttcttttacaaaacttttaaaatacaattagtgctgataattcctatgtggaaatgattccagccatggtcccctcacttgagcatgtgaatattctcacggagagaagccccagcgagattttccggtgaatacgggattgcacttactctttcatcacggaaacagccccgttcataaatttttcatctttatttttaaggttatactcctctaaataacccttaagcctcatcaagaaaggtttgtttatagtatttttactatagcttcatccttgataacgtcctaatttccttctggacaacctccttgaccaatggcatattgagatctatgtgacatgaggatatttctcagtaccactttgttactggtacctgatgcacacggattgcgaccagagcatgatgcctccatcaagtggtaatatgtttgcagcctgctgtccagccaagagtgacagatacttctagtgacttccccggtatccactctcatcttcttccaatatcaagagaatccaggttctgtcagattagtaaggtgtgctaatctaaattttaaaaaatctcttacaggttttcttgcagctggtaccatccatgtctcacagccctggccactgacagatcagcagatgtcaccacatgggcttctgagaaagctcttgaatggggatcgttcttaaacatgaattcctccctgtatgttttgttctttgctttacttttcaccttgcaaagagatccagtacctagtattggaagatccaccttaacgaccgtgcatatgaaaaccacagtctaaggaagtgactgcagaaagctcacagcgaccctggcctcccctgtggcctctttgagtgtctgcagcagccctggacttccagacttctatcacatgagaaaaaataaaactgattattggtttaagctgctatggatatttcattgtttttcttttaaatttatttattttaagat

SEQ ID NO: 10601 - protein, 46 aa, Homo sapiens [sequence omitted]

SEQ ID NO: 10602 - DNA, 1004 bp, Homo sapiens
atcatgcagtcattcctcaattactgcctgcagcaattcctccatttttatgaatcttgtgagcacttacgctaggagaaatttcttttacaaaacttttaaaatacaattagtgctgataattcctatgtggaaatgattccagccatggtcccctcacttgagcatgtgaatattctcacggagagaagccccagcgagattttccggtgaatacgggattgcacttactctttcatcacggaaacagaccccccgagagaagccccaacgagattttccggtgaatacgggactgcacgtactctctcatcatgaaaacagagccccgttcataaatttttcatctttatttttaaggttatactcctctaaataacccttaagcctcatcaagaaaggtttgtttatagtatttttactatagcttcatccttgataacgtcctaatttccttctggacaacctccttgaccaatggcatattgagatctatgtgacatgaggatatttctcagtaccactttgttactggtacctgatgcacacggattgcgaccagagcatgatgcctccatcaagtggtaatatgtttgcagcctgctgtccagccaagagtgacagatacttctagtgacttccccggttttcttgcagctggtaccatccatgtctcacagccctggccactgacagatcagcagatgtcaccacatgggcttctgagaaagctcttgaatggggatcgttcttaaacatgaattcctccctgtatgttttgttctttgctttacttttcaccttgcaaagagatccagtacctagtattggaagatccaccttaacgaccgtgcatatgaaaaccacagtctaaggaagtgactgcagaaagctcacagcgaccctggcctcccctgtggcctctttgagtgtctgcagcagccctggacttccagacttctatcacatgagaaaaaataaaactgattattggtttaagctgc

SEQ ID NO: 10603 - protein, 38 aa, Homo sapiens
MNSSLYVLFFALLFTLQRDPVPSIGRSTLTTVHMKTTV

SEQ ID NO: 10604 - DNA, 1050 bp, Homo sapiens
atcatgcagtcattcctcaattactgcctgcagcaattcctccatttttatgaatcttgtgagcacttacgctaggagaaatttcttttacaaaacttttaaaatacaattagtgctgataattcctatgtggaaatgattccagccatggtcccctcacttgagcatgtgaatattctcacggagagaagccccagcgagattttccggtgaatacgggattgcacttactctttcatcacggaaacagaccccccgagagaagccccaacgagattttccggtgaatacgggactgcacgtactctctcatcatgaaaacagagccccgttcataaatttttcatctttatttttaaggttatactcctctaaataacccttaagcctcatcaagaaaggtttgtttatagtatttttactatagcttcatccttgataacgtcctaatttccttctggacaacctccttgaccaatggcatattgagatctatgtgacatgaggatatttctcagtaccactttgttactggtacctgatgcacacggattgcgaccagagcatgatgcctccatcaagtggtaatatgtttgcagcctgctgtccagccaagagtgacagatacttctagtgacttccccggttttcttgcagctggtaccatccatgtctcacagccctggccactgacagatcagcagatgtcaccacatgggcttctgagaaagctcttgaatggggatcgttcttaaacatgaattcctccctgtatgttttgttctttgctttacttttcaccttgcaaagagatccagtacctagtattggaagatccaccttaacgaccgtgcatatgaaaaccacagtctaaggaagtgactgcagaaagctcacagcgaccctggcctcccctgtggcctctttgagtgtctgcagcagccctggacttccagacttctatcacatgagaaaaaataaaactgattattggtttaagctgctatggatatttcattgtttttcttttaaatttatttattttaagat

SEQ ID NO: 10605 - protein, 38 aa, Homo sapiens; identical to SEQ ID NO: 10603

SEQ ID NO: 10606 - DNA, 3215 bp, Homo sapiens
gagacagttctccctctattgcccaggctggagtgcagtggtgtaaacatagctccctgcagttgcaaattcctgggctcaagtgatccttccatctcagcctcccgagtagctgggactacaggtgtccaccaccatgcctggctaatgacctcttcttttgtagatacatcagctacatggaagcaggaaaccaaacaggatttttagagtttatccttctcggactctctgaggatccagaactacagccgttcatatttgggctgttcctgtccatgtacctggtgacggtgctgggaaacctgctcatcatcctggccatcagctctgactcccacctccacacccccatgtacttcttcctctccaacctgtcctgggttgacatctgtttcagcacttgcatcgtccccaagatgctggtgaacatccagaccgagaacaaagccatctcctacatggactgcctcacacaggtctatttctccatgttttttcctattctggacacgctactcctgaccgtgatggcctatgaccggtttgtggctgtctgccaccctctgcactatatgatcatcatgaacccccacctctgtggcctcctggtttttgtcacctggctcattggtgtcatgacatccctcctccatatttctctgatgatgcatctaatcttctgtaaagattttgaaattccacattttttctgcgaactgacgtacatcctccagctggcctgctctgataccttcctgaacagcacgttgatatactttatgacgggtgtgctgggcgtttttcccctccttgggatcattttctcttattcacgaattgcttcatccataaggaagatgtcctcatctgggggaaaacaaaaagcactttccacctgtgggtctcacctctccgtcgtttctttattttatgggacaggcattggggtccacttcacttctgcggtgactcactcttcccagaaaatctccgtggcctcggtgatgtacactgtggtcacccccatgttgaaccccttcatctacagcctgaggaacaaggatgtgaagggagccctggggagtctcctcagcagggcagcctcttgtttgtgatggatcccttggccccaggactaagaagttttgtgagcaccaatggcaaaaatgttttattttgaaattcttactctttaaaattaaaaacatttttttatactttgagagtacaaatgcagatttcttaacatgcatttgcataagggtgaagtctgagcttttggcgtaccaattacctgaatagtgaacataaggcacttttttttcttttttgagacggagtctcactctgtctcccaggctggagtgcagtggagtgatctcggctcactgcaacctccgcctcccgggttcaagtgattcttctgtctcagcctcctgagtagctgagattacaggtgtgtgccacccatgccttttagtagagacggggtttcaccatcttggccaggctggtctcgaactcctgaccttgtgatccacctgccttggcctctcaaagtgctgggattacaggtgtgagccaccacgcccggccaaggcagtttttaaactctcactcccctctcaccttttgcagtctccagtgtccattattctgttataatgcccatgcgtatacattgtttagctcccaattataagtgagatcatgcagcatttgactttgtttctttactaccttacttaagagaatggcttccagtcccatcgatgttgctgcaaaagacatgatttcatccttttttatggctgagtagtactccattgtatatatcctcgatatctatatagatatagacatatgtagatacataccatgttttctttttttaaaaaaatttatttttatgtcagtagtttttggggtacatgtggtttttcattacacggatgagttctttagtggtgacttctgagtttttagtgtacccgtcacccaagtggtagtagtctcttattcctcacccccctcccaacctttctcccttcaagtcaccaaagttcattatattgttcatatccctttgtgtcctcatagcttagctcccacttataactgagaacatacgatatgttcatatggatcttatgtatgttggttgaacatacaaacaagtccaggtttttcattcctgagttacttcacctagagtaatgacctccagttccatccaagttgctacaaaagacattatttggttcctttttatggataagtagtattccatgctgtacatataccacaatctttatcactcattggttgatgggcacttaggttggttccatgcctttgtaattgctaattatgttgctataaacatgcaggtgtatgtgtctttttcacataatgactttgtttcctttgggtagatacccagtagtggaactgctggactgaaaggtagttctacttttagttcttttttttgttttttttttaagacagagtctcactctgttgcccaggctggagtgcagtggcgcgatctcatctcactgcaacctccacctcccaggttcaagcgattctcctgcctcaacctcctgagtagctgggactacaggcacctgccaccccacccagctaattcttctatttttagtagagacagggtttcaccatgttggccaggctggtcttgaactcctgacctcaggtgatacgcccacctcggcctcccaaagtgctgggattacaggtgtgagccactgtgcctggccttctagttctttaagataccactttaaaaaaagtccagtcctccattgatggacacgtaggttgattccatatctttgctaatgtgaatagtgccgtgataaacatgggggtgtaagttaacaattaatctccaagtaatttccttgatggcacttctgtcctatgtgctattcaaaaattgtgtccttgatcatcgttcttaattctccattagtgagttctgaacttgggtttgaagcatttgctatagctttgttatctcaagtggtggcacagagttcttaagctattgattgttcactgactttatttctatgtgtttgcatgtgggtttttgttgtttgtgtgttcgatcatgaacagatcaacagtgtttatttgttttcctactggatgaagtatgattaaaatacgtatttaaatat

SEQ ID NO: 10607 - protein, 312 aa, Homo sapiens; identical to SEQ ID NO: 1787

SEQ ID NO: 10608 - DNA, 823 bp, Homo sapiens
agtatacctggacagcctcctttagtttccgagcaatgaccctggtatctaggtgaaatcacaaccctgtttttatatataagaagtccttgcttaaagtcaatagcatcttggaaactgcaaccttaaggaaatgatatacagcaggtcctcaagtaaaattgttttgttcaaagtccattagttatattgttgataaggaaaaacacacggtttcattataaatcatttcacttaaatcacagtttccaaaaacatattgagggtgttaattgaggacttactgtatttcaaatttaagttaattttcacagttcgtgtggaaattatttacatattacatctgtaaaatcactttaagcaggctatgtgtgacgaacttgttcacgagccctcaaccttggcttttattgacctcacctggggagcttacaaatgatgatggctgggctctcttacccagagattttgatttacttgaacctgtgtgggtctgagaggttttaaaagcaccagtgatagttcagacgatgaagttcttcaagggatcaagctcaaatggaggacaagaaaaaactatactaaggtgaggaacatcaacattcaacaggataatttttgaggaaaccaggtcagcacttgatattgggagtgccatacacatcaaattagaagtctcagaaagagtggtaagaaaactgatcaaagatggaactttatgggaaacatctagggaagaaaagtcaaaaagggcttacagagggagtttttaggagaaactaacacaaaaacaaaagcaaaatcatagttgtttttgattaaa

SEQ ID NO: 10609 - protein, 46 aa, Homo sapiens
TCVGLRGFKSTSDSSDDEVLQGIKLKWRTRKNYTKVRNINIQQDNF

SEQ ID NO: 10610 - DNA, 939 bp, Homo sapiens; identical to SEQ ID NO: 1788

SEQ ID NO: 10611 - protein, 312 aa, Homo sapiens; identical to SEQ ID NO: 1789

SEQ ID NO: 10612 - DNA, 1436 bp, Homo sapiens
atgtcctattttccaattctctttttttttttcctcaaaaggtgtccgagctacacagagccacagaatctcacaggtgtctcagaattcctcctcctgggactctcagaggatccagaactgcagccggtcctcgctgggctgttcctgtccatgtacctggtcacggtgctggggaacctgctcatcatcctggctgtcagctctgactcccacctccacacccccatgtacttcttcctctccaacctgtccttggctgacatcggtttcacctccaccacggtccccaagatgattgtggacatgcaaactcacagcagagtcatctcctatgaaggctgcctgactcagatgtctttttttgtcctttttgcatgtatggatgacatgctcctgagtgtgatggcctatgaccggtttgtggccatctgtcaccccctgcactaccgaatcatcatgaacccacgcctctgtggcttcttaatcttgttgtctttttttattagtcttttggactcccagttgcacaatttgattatgttacagctcacctgcttcaaggatgtggacatttctaatttcttctgtgacccttctcaactcctccaccttaggtgttccgacaccttcatcaatgaaatggtcatatatttcatgggtgccatatttggctgtctccctatctcagggatccttttctcttactataaaattgtttcccccattctgagagttccaacatcagatgggaagtataaagccttctccacctgtggctctcacctggcagttgtttgcttattttatggaacagggcttgtagggtacctcagttcagctgtgttaccatcccccaggaagagtatggtggcttcagtgatgtacactgtggtcacccccatgctgaaccccttcatctacagcctgaggaacaaggacattcaaagtgccctgtgcaggctgcatggcagaatcatcaaatctcatcatctccatcctttttgttatatgggatagaaatggcagcaaaatttaacacctaggcctgcaaattctgcctccttggtcacattattttggttgcttgatggctttcattcctctctgggtttcgtatgtgaatattgcttgctttgttttgtctttaattgcaatgggtgagtattctggtatcctttgttcatcatacacatcatgaatgattccaatatacctagacagcctcctttagtatctgtgcaatgaccttgatatccaggtgcaatcacaatcttttctgatagacttgaaatcctcacttaactttgtcaagaggtttttggaaactgcaactttaaaaaaaaagcgcagcaggtcctgaaataagttcattttgttcaatgttgtttagttttaattttggtgagaaatgaataaattggtttcatggttca

SEQ ID NO: 10613 - protein, 339 aa, Homo sapiens
MSYFPILFFFFLKRCPSYTEPQNLTGVSEFLLLGLSEDPELQPVLAGLFLSMYLVTVLGNLLIILAVSSDSHLHTPMYFFLSNLSLADIGFTSTTVPKMIVDMQTHSRVISYEGCLTQMSFFVLFACMDDMLLSVMAYDRFVAICHPLHYRIIMNPRLCGFLILLSFFISLLDSQLHNLIMLQLTCFKDVDISNFFCDPSQLLHLRCSDTFINEMVIYFMGAIFGCLPISGILFSYYKIVSPILRVPTSDGKYKAFSTCGSHLAVVCLFYGTGLVGYLSSAVLPSPRKSMVASVMYTVVTPMLNPFIYSLRNKDIQSALCRLHGRIIKSHHLHPFCYMG

SEQ ID NO: 10614 - DNA, 512 bp, Homo sapiens
cctccatcgtgcaccacacagggaggacggcggacctgctctccgtggtcatggcccagcagaggggaagcgcagctcagtgtccaagttacacagactcgcagaatctcacaggtgtcttagaatttctcttcctgggactctcagaggatccagaactgcagcccgtcctcgttgggctgttcctgtccatgtacctgatcacggtgctggggaacctgctcatcatcctggccgtcagctgtgactcccacctccacacccccatgtacttcttcctctccaacttgtccttggctgacatcggactcacctctgccaccatccctaagatgattgttgatatgcaatctcacagcagaatcatctcctatgagggctgcctgatgcagatgtctttatctattttgtgtgtatgaatgacatggtcctgactgtgatggcctatgaccagtttgtggccatttgtcaccccctacgctacccagtcatcatgaatccccatctctgtg

SEQ ID NO: 10615 - protein, 122 aa, Homo sapiens
MAQQRGSAAQCPSYTDSQNLTGVLEFLFLGLSEDPELQPVLVGLFLSMYLITVLGNLLIILAVSCDSHLHTPMYFFLSNLSLADIGLTSATIPKMIVDMQSHSRIISYEGCLMQMSLSILCV

SEQ ID NO: 10616 - DNA, 705 bp, Homo sapiens
cgggagaccgagggctgggtttgggaatcggcggtctaagggctgcctccccgccactccttgtccggaccccgcgcccggggcctcccgccgccgcggcgcctcctcagagagcccgggtcagctgcccctgtggccgcggctggtcccaaactcactgaatcgggaactctggtctgggtacagaaatcggggtgattctgatgcaggcgagagttggagaaccaatgtcgtagttcatcagcctccgaaagcatcctttgctctctttccagaaaggaagagcatctctgccattcgtgtctcaaggacaagcgcttcagcctcgttctctgtgagctgatctgtggatcgcggcgtgtcgggcgacatggaggaagaaagaaaaactgctgagttacagaaaaatagaatacaggactcagtagtctttgaggatgtggctgtggactttacccaggaggaatgggctttgctggatcttgctcagagaaacctctacagagatgtgatgctggaaaacttccagaacctggcctcactagggtatccgctacacacaccccatctgatctcccagtgggaacaagaggaggacctgcagacagtgaagagagaacttatccagggcatctttatgggagagcaccgggaaggcaagaacccttgggagaaactgttttggttgggggaaaaaataaactt

SEQ ID NO: 10617 - protein, 110 aa, Homo sapiens
MEEERKTAELQKNRIQDSVVFEDVAVDFTQEEWALLDLAQRNLYRDVMLENFQNLASLGYPLHTPHLISQWEQEEDLQTVKRELIQGIFMGEHREGKNPWEKLFWLGEKI

SEQ ID NO: 10618 - DNA, 3269 bp, Homo sapiens
atgcgcagaagcacacttctgattcctctttcggcgctgcaaatggcgtatggggcggggcctgggaagcgggacttgagctctgggttggaaaaagccgcagcagctgatgggcccgggaacccgaggccccgccccctaggtggtcctagcctttgcgcgtgcgcggcgtgtctgcgtgggcgcatgcgcataacggccgccatcttaacagcgcgttcccgttggcgtctgaggtgcccagtgaaatggagcctgtcccgtgcactttcgggcatttcgagcatcttgtgggctctcccaagtcgcggcccctcctctgagagccacagtcaggaacagcatctctgccttcctgttcacggtgaccttcgcttggtgtcctcctggcctcagcaacctgacaattctgtcgtgtcccggcaggagtacagtggtgagatcacggttcactgcagcattgacctccctaggctcaggtgttgctcccacctcagtcttctgaatagcttggagtatagagagatggctaatgaatggcgcttgatgacagatgagtaatgcctgttgctgaaagattgacggtatgaggcaagactcccactactacttaatcaagaggaattgagattgacttacccataagttcagacagtgtctcgaagagactttgggaacaagatattcaggcacatttcactgttagactcacaggatgctggccattggtctttccctttgtgatcatctttctcaagatgttttctgtcttcatgagtcaaaatttgaagaggaaaggatggtggctgggtggttgacaaattactctcaggactcagtgacctttgaggatgtggctgtggacttcacccaggaggagtggactttgctggatcaaactcagagaaacttatacagagatgtgatgctggagaactataagaatctagttgcagtagattgggagagtcatattaataccaaatggtcagcacctcagcagaattttttgcaggggaaaacatccagtgtggtggaaatgaattcagagtaaaagggagaatctcaatgaaataaatttggaaaacttctatgaaccatcattaattttcaccaacaggagagaaaccattttggagaggaactgtttgactttaaccaatgtgaaaaagccttgagtgaacactcatgccttaagactcacaggagaacttactttagaaagaaaacctgtgagtgtaatcaatgtgaaaaagccttcagaaaaccctctatctttactttacacaagaaaactgatatcggagaggaacttcctaactgtaatcaatgtgaaacagccttcagccaacatctacatcttgtttgcaagaaaactagccaaaatctacatcttgtttgcaagaaaactcacactcaagagaaaccatataaatgcagtgactgtgaaaaaggcttaccttcctcctcacacctcagagaatgtgtaagaatttatggtggagagagaccatatactcataaggagtatgtcgaaaccttttctcattctacagccctttttgtacacatgcaaactcaagatggagaaaaattctatgaatgtaaagcatgtgggaaacccttcactgagtcgtcatatcttactcaacatttaagaactcatagtagagtgttacctatagaacataagaaatttggcaaagcctttgctttttccccagatcttgctaaacatataagacttagaactagaggaaaacactatgtttgtaatgaatgtggcaaagaatttacttgtttctcaaaactcaacattcacataagggttcacactggagaaaaaccgtatgagtgcaacaaatgtgggaaagccttcactgattcatcaggtcttataaaacacaggcgaactcacactggagaaaagccttatgaatgtaaggaatgtgggaaagcttttgctaactcttcacatcttactgtacatatgagaactcacactggtgagaagccttatcaatgtaaggaatgtggaaaagcctttattaattcctcttcctttaaaagtcacatgcagactcatcctggtgtaaaaccctatgactgtcaacagtgtgggaaagccttcattcgatcctcatttcttattcgacatttgagaagtcacagtgcagaaaggccttttgaatgtgaggaatgtgggaaagcctttagatactcctcgcaccttagtcaacataaaagaatacatacaggggagaggccatataaatgtcaaaagtgtgggcaagccttcagtatctcatcaggccttacagtacacatgagaactcacactggtgaacggccctttgaatgtcaggaatgtgggaaagcctttactcggtccacatatcttattcgacatctaagaagtcatagtgtggagaaaccatataaggaatgtgggcaaacctttagtaattcctcatgccttactgaatgtgtgtgaattggggctgatacttggaaagaatgtggtaaagccactacttcctcacacttactgaacatgtactcattcatagtggcaatgtacacagtcataaggaatgtgggaagccttccttggtgtctcagatcttaacaattccaatagaagagaagacatatgaatgtaaggaatgtgggaaaatcttggctccttccataggccttactattcatgtgtctgtgcatcctaggaaacaaactgaacgtaggaaacctgtcgatgcttacatcttactgagtctgtttgaactcatgctggagagaaatgctatgaatgtgaggaaggtggaaaagctttcattattttcctcgggccttactgagcttgtgagcacattggatataaatgcacgtcctctggctgtaaggaatgtgttgaaacctttcactctgccttataccttaatattcagctgtgatctcacaagtgtgaaaaatcttatgaatgtaaaatgtgtggagattcttctttgtttttagcttccactttgggaacatgtcaaagcacacattgagaagtcccatgagtgaaagagatgttggaaagcccttgaacttggtcgttaggaaacatccacactgaagaggaacctgactgtatggaaggtcaaaaaggctgtattaatttacatgcaaaaagtcacactagaggaatgccatatcagaatgcttttggtaaatatacatgttttaaagaggttatatatcattaataaaaatatctagctggtctg

SEQ ID NO: 10619 - protein, 186 aa, Homo sapiens
MRRSTLLIPLSALQMAYGAGPGKRDLSSGLEKAAAADGPGNPRPRPLGGPSLCACAACLRGRMRITAAILTARSRWRLRCPVKWSLSRALSGISSILWALPSRGPSSESHSQEQHLCLPVHGDLRLVSSWPQQPDNSVVSRQEYSGEITVHCSIDLPRLRCCSHLSLLNSLEYREMANEWRLMTDE

SEQ ID NO: 10620 - DNA, 1585 bp, Homo sapiens
atgcgcagaagcacacttctgattcctctttcggcgctgcaaatggcgtatggggcggggcctgggaagcgggacttgagctctgggttggaaaaagccgcagcagctgatgggcccgggaacccgaggccccgccccctaggtggtcctagcctttgcgcgtgcgcggcgtgtctgcgtgggcgcatgcgcataacggccgccatcttaacagcgcgttcccgttggcgtctgaggtgcccagtgaaatggagcctgtcccgtgcactttcgggcatttcgagcatcttgtgggctctcccaagtcgcggcccctcctctgagagccacagtcaggaacagcatctctgccttcctgttcacggtgaccttcgcttggtgtcctcctggcctcagcaacctgacaattctgtcgtgtcccggcaggagtacagtggtgagatcacggttcactgcagcattgacctccctaggctcaggtgttgctcccacctcagtcttctgaatagcttggagtatagagagatggctaatgaatggcgcttgatgacagatgagtaatgcctgttgctgaaagattgacggtatgaggcaagactcccactactacttaatcaagaggaattgagattgacttacccataagttcagacagtgtctcgaagagactttgggaacaagatattcaggcacatttcactgttagactcacaggatgctggccattggtctttccctttgtgatcatctttctcaagatgttttctgtcttcatgagtcaaaatttgaagaggaaaggatggtggctgggtggttgacaaattactctcaggactcagtgacctttgaggatgtggctgtggacttcacccaggaggagtggactttgctggatcaaactcagagaaacttatacagagatgtgatgctggagaactataagaatctagttgcagtagattgggagagtcatattaataccaaatggtcagcacctcagcagaattttttgcaggggaaaacatccagtgtggtggaaatggaaacaaactgaacgtaggaaacctgtcgatgcttacatcttactgagtctgtttgaactcatgctggagagaaatgctatgaatgtgaggaaggtggaaaagctttcattattttcctcgggccttactgagcttgtgagcacattggatataaatgcacgtcctctggctgtaaggaatgtgttgaaacctttcactctgccttataccttaatattcagctgtgatctcacaagtgtgaaaaatcttatgaatgtaaaatgtgtggagattcttctttgtttttagcttccactttgggaacatgtcaaagcacacattgagaagtcccatgagtgaaagagatgttggaaagcccttgaacttggtcgttaggaaacatccacactgaagaggaacctgactgtatggaaggtcaaaaaggctgtattaatttacatgcaaaaagtcacactagaggaatgccatatcagaatgcttttggtaaatatacatgttttaaagaggttatatatcattaataaaaatatctagctggtctg

SEQ ID NO: 10621 - protein, 186 aa, Homo sapiens; identical to SEQ ID NO: 10619

SEQ ID NO: 10622 - DNA, 4073 bp, Homo sapiens
atgcgcagaagcacacttctgattcctctttcggcgctgcaaatggcgtatggggcggggcctgggaagcgggacttgagctctgggttggaaaaagccgcagcagctgatgggcccgggaacccgaggccccgccccctaggtggtcctagcctttgcgcgtgcgcggcgtgtctgcgtgggcgcatgcgcataacggccgccatcttaacagcgcgttcccgttggcgtctgaggtgcccagtgaaatggagcctgtcccgtgcactttcgggcatttcgagcatcttgtgggctctcccaagtcgcggcccctcctctgagagccacagtcaggaacagcatctctgccttcctgttcacggtgaccttcgcttggtgtcctcctggcctcagcaacctgacaattctgtcgtgtcccggcaggagtacagtggtgagatcacggttcactgcagcattgacctccctaggctcaggtgttgctcccacctcagtcttctgaatagcttggagtatagagagatggctaatgaatggcgcttgatgacagatgagtaatgcctgttgctgaaagattgacggtatgaggcaagactcccactactacttaatcaagaggaattgagattgacttacccataagttcagacagtgtctcgaagagactttgggaacaagatattcaggcacatttcactgttagactcacaggatgctggccattggtctttccctttgtgatcatctttctcaagatgttttctgtcttcatgagtcaaaatttgaagaggaaaggatggtggctgggtggttgacaaattactctcaggactcagtgacctttgaggatgtggctgtggacttcacccaggaggagtggactttgctggatcaaactcagagaaacttatacagagatgtgatgctggagaactataagaatctagttgcagtagattgggagagtcatattaataccaaatggtcagcacctcagcagaattttttgcaggggaaaacatccagtgtggtggaaatgaattcagagtaaaagggagaatctcaatgaaataaatttggaaaacttctatgaaccatcattaattttcaccaacaggagagaaaccattttggagaggaactgtttgactttaaccaatgtgaaaaagccttgagtgaacactcatgccttaagactcacaggagaacttactttagaaagaaaacctgtgagtgtaatcaatgtgaaaaagccttcagaaaaccctctatctttactttacacaagaaaactgatatcggagaggaacttcctaactgtaatcaatgtgaaacagccttcagccaacatctacatcttgtttgcaagaaaactagccaaaatctacatcttgtttgcaagaaaactcacactcaagagaaaccatataaatgcagtgactgtgaaaaaggcttaccttcctcctcacacctcagagaatgtgtaagaatttatggtggagagagaccatatactcataaggagtatgtcgaaaccttttctcattctacagccctttttgtacacatgcaaactcaagatggagaaaaattctatgaatgtaaagcatgtgggaaacccttcactgagtcgtcatatcttactcaacatttaagaactcatagtagagtgttacctatagaacataagaaatttggcaaagcctttgctttttccccagatcttgctaaacatataagacttagaactagaggaaaacactatgtttgtaatgaatgtggcaaagaatttacttgtttctcaaaactcaacattcacataagggttcacactggagaaaaaccgtatgagtgcaacaaatgtgggaaagccttcactgattcatcaggtcttataaaacacaggcgaactcacactggagaaaagccttatgaatgtaaggaatgtgggaaagcttttgctaactcttcacatcttactgtacatatgagaactcacactggtgagaagccttatcaatgtaaggaatgtggaaaagcctttattaattcctcttcctttaaaagtcacatgcagactcatcctggtgtaaaaccctatgactgtcaacagtgtgggaaagccttcattcgatcctcatttcttattcgacatttgagaagtcacagtgcagaaaggccttttgaatgtgaggaatgtgggaaagcctttagatactcctcgcaccttagtcaacataaaagaatacatacaggggagaggccatataaatgtcaaaagtgtgggcaagccttcagtatctcatcaggccttacagtacacatgagaactcacactggtgaacggccctttgaatgtcaggaatgtgggaaagcctttactcggtccacatatcttattcgacatctaagaagtcatagtgtggagaaaccatataaggaatgtgggcaaacctttagtaattcctcatgccttactgaatgtgtgtgaattggggctgatacttggaaagaatgtggtaaagccactacttcctcacacttactgaacatgtactcattcatagtggcaatgtacacagtcataaggaatgtgggaagccttccttggtgtctcagatcttaacaattccaatagaagagaagacatatgaatgtaaggaatgtgggaaaatcttggctccttccataggccttactattcatgtgtctgtgcatcctaggaaacaaactgaacgtaggaaacctgtcgatgcttacatcttactgagtctgtttgaactcatgctggagagaaatgctatgaatgtgaggaaggtggaaaagctttcattattttcctcgggccttactgagcttgtgagcacattggatataaatgcacgtcctctggctgtaaggaatgtgttgaaacctttcactctgccttataccttaatattcagctgtgatctcacaagtgtgaaaaatcttatgaatgtaaaatgtgtggagattcttctttgtttttagcttccactttgggaacatgtcaaagcacacattgagaagtcccatgagtgaaagagatgttggaaagcccttgaacttggtcgttaggaaacatccacactgaagaggaacctgactgtatggaaggtcaaaaaggctgtattaatttacatgcaaaaagtcacactagaggaatgccatatcagaatgcttttggtaaatatacatgttttaaagaggttatatatcattaataaaaatatctagctggtctgaagatcctgagttatctcaattgttcacggttacagatggaactctttattattgaggagttccactctttcccccatttgtcactactacacttccctagtctttaaaacaattttaggctgggtgcagtggctcattcctgtaatcccagcactttgaaaggccgaagcgagtggatcatttgaggtcaggagttcgagaccagcctggccaacgtggtgaaaccccatctctactaaaaatacaaaaattagccaggcatggtggtacgtgcctgtaatcccagctactcgagaggttgaggcagaattgcttgaacccgggaggcggaagctgcagtgagctcagatcacgccactgcactccagcctggatgatatggtaagaccatctcaaaaaaagaaaaaaaaattaaaatatcctcagagggttttttaatgaaaaacttagttatagggaattgaggaacatttaggggtacaaattttcacttattgcacacaagaaaattggtactggccaggcatgctggctcacaccttaattccagcaatttgggaggccaaggcagaaggatcacttgagcccaggagttcaagaccagcctgggcaatatagtgaaacctcatcttgacaaagaataaataagattaactgggtgtactggtttgtgcctatagtcccagctatttaggaggctggggcaagaggattgcttgagcctggtcagggaggcagaggttgcagtgagccctgatcgtgccactacactctagcctgggcaacaggatgagaccctgtct

SEQ ID NO: 10623 - protein, 186 aa, Homo sapiens; identical to SEQ ID NO: 10619

SEQ ID NO: 10624 - DNA, 1409 bp, Homo sapiens
atgcgcagaagcacacttctgattcctctttcggcgctgcaaatggcgtatggggcggggcctgggaagcgggacttgagctctgggttggaaaaagccgcagcagctgatgggcccgggaacccgaggccccgccccctaggtggtcctagcctttgcgcgtgcgcggcgtgtctgcgtgggcgcatgcgcataacggccgccatcttaacagcgcgttcccgttggcgtctgaggtgcccagtgaaatggagcctgtcccgtgcactttcgggcatttcgagcatcttgtgggctctcccaagtcgcggcccctcctctgagagccacagtcaggaacagcatctctgccttcctgttcacggtgaccttcgcttggtgtcctcctggcctcagcaacctgacaattctgtcgtgtcccggcaggagtacagtggtgagatcacggttcactgcagcattgacctccctaggctcaggtgttgctcccacctcagtcttctgaatagcttggagtatagagagatggctaatgaatggcgcttgatgacagatgagtaatgcctgttgctgaaagattgacggtatgaggcaagactcccactactacttaatcaagaggaattgagattgacttacccataagttcagacagtgtctcgaagagactttgggaacaagatattcaggcacatttcactgttagactcacaggatgctggccattggtctttccctttgtgatcatctttctcaagatgttttctgtcttcatgagtcaaaatttgaagaggaaaggatggtggctgggtggttgacaaattactctcaggactcagtgacctttgaggatgtggctgtggacttcacccaggaggagtggactttgctggatcaaactcagagaaacttatacagagatgtgatgctggagaactataagaatctagttgcagtagattgggagagtcatattaataccaaatggtcagcacctcagcagaattttttgcaggggaaaacatccagtgtggtggaaatgagagagggtctctctctgttgaccaggctggtcttgaactgctggactcaagggatcctgccacctcagcctcccagagtgctgggattacagacgtgagccactgctcttggccgtcttttctggattgcaccttatttggatgaccagatcctggacataaaaccagagtctactaccacgggcatgagactttggtgtggccttaggaagtgttgctttgattagaaagtttggctttgctgagatacgtagttggaaaagagagaagcattttcagggctgggtataagtaagcaagaagagggcctgggagaagagtctgacgagcaaggggaaggtagccaaggatggagtgaaatacagg

SEQ ID NO: 10625 - protein, 186 aa, Homo sapiens; identical to SEQ ID NO: 10619

SEQ ID NO: 10626 - DNA, 3100 bp, Homo sapiens
aaccaatcagactgaacgcgggctaccgcttcatttacaggaggtgagcatgaagtggccaatgggaaaattctaggaggtattgggactcatgaaggttctgtttcggagcccttgagctgccgcttggccagttcccacactgtggagtatgctttcgttttcaacaaatcccagctcttgttcttttgttgcttcattctttctttgctttgctgggcgttttgtctaattctttgttcaaaacgccagtaacctggacagcttgcagtcaagaccccctaccggtgacacttgcgctcttcggggaggtaaacagcatttcctctcagctctgggttggaaaaagccgcagcagctgatgggcccgggaacccgaggccccgccccctaggtggtcctagcctttgcgcgtgcgcggcgtgtctgcgtgggcgcatgcgcataacggccgccatcttaacagcgcgttcccgttggcgtctgaggaacagcatctctgccttcctgttcacggtgaccttcgcttggtgtcctcctggcctcagcaacctgacaattctgtcgtgtcccgatcatctttctcaagatgttttctgtcttcatgagtcaaaatttgaagaggaaaggatggtggctgggtggttgacaaattactctcaggactcagtgacctttgaggatgtggctgtggacttcacccaggaggagtggactttgctggatcaaactcagagaaacttatacagagatgtgatgctggagaactataagaatctagttgcagtagattgggagagtcatattaataccaaatggtcagcacctcagcagaattttttgcaggggaaaacatccagtgtggtggaaatgaattcagagtaaaagggagaatctcaatgaaataaatttggaaaacttctatgaaccatcattaattttcaccaacaggagagaaaccattttggagaggaactgtttgactttaaccaatgtgaaaaagccttgagtgaacactcatgccttaagactcacaggagaacttactttagaaagaaaacctgtgagtgtaatcaatgtgaaaaagccttcagaaaaccctctatctttactttacacaagaaaactgatatcggagaggaacttcctaactgtaatcaatgtgaaacagccttcagccaacatctacatcttgtttgcaagaaaactagccaaaatctacatcttgtttgcaagaaaactcacactcaagagaaaccatataaatgcagtgactgtgaaaaaggcttaccttcctcctcacacctcagagaatgtgtaagaatttatggtggagagagaccatatactcataaggagtatgtcgaaaccttttctcattctacagccctttttgtacacatgcaaactcaagatggagaaaaattctatgaatgtaaagcatgtgggaaacccttcactgagtcgtcatatcttactcaacatttaagaactcatagtagagtgttacctatagaacataagaaatttggcaaagcctttgctttttccccagatcttgctaaacatataagacttagaactagaggaaaacactatgtttgtaatgaatgtggcaaagaatttacttgtttctcaaaactcaacattcacataagggttcacactggagaaaaaccgtatgagtgcaacaaatgtgggaaagccttcactgattcatcaggtcttataaaacacaggcgaactcacactggagaaaagccttatgaatgtaaggaatgtgggaaagcttttgctaactcttcacatcttactgtacatatgagaactcacactggtgagaagccttatcaatgtaaggaatgtggaaaagcctttattaattcctcttcctttaaaagtcacatgcagactcatcctggtgtaaaaccctatgactgtcaacagtgtgggaaagccttcattcgatcctcatttcttattcgacatttgagaagtcacagtgcagaaaggccttttgaatgtgaggaatgtgggaaagcctttagatactcctcgcaccttagtcaacataaaagaatacatacaggggagaggccatataaatgtcaaaagtgtgggcaagccttcagtatctcatcaggccttacagtacacatgagaactcacactggtgaacggccctttgaatgtcaggaatgtgggaaagcctttactcggtccacatatcttattcgacatctaagaagtcatagtgtggagaaaccatataaggaatgtgggcaaacctttagtaattcctcatgccttactgaatgtgtgtgaattggggctgatacttggaaagaatgtggtaaagccactacttcctcacacttactgaacatgtactcattcatagtggcaatgtacacagtcataaggaatgtgggaagccttccttggtgtctcagatcttaacaattccaatagaagagaagacatatgaatgtaaggaatgtgggaaaatcttggctccttccataggccttactattcatgtgtctgtgcatcctaggaaacaaactgaacgtaggaaacctgtcgatgcttacatcttactgagtctgtttgaactcatgctggagagaaatgctatgaatgtgaggaaggtggaaaagctttcattattttcctcgggccttactgagcttgtgagcacattggatataaatgcacgtcctctggctgtaaggaatgtgttgaaacctttcactctgccttataccttaatattcagctgtgatctcacaagtgtgaaaaatcttatgaatgtaaaatgtgtggagattcttctttgtttttagcttccactttgggaacatgtcaaagcacacattgagaagtcccatgagtgaaagagatgttggaaagcccttgaacttggtcgttaggaaacatccacactgaagaggaacctgactgtatggaaggtcaaaaaggctgtattaatttacatgcaaaaagtcacactagaggaatgccatatcagaatgcttttggtaaatatacatgttttaaagaggttatatatcattaataaaaatatctagctggtctg

SEQ ID NO: 10627 - protein, 148 aa, Homo sapiens
MRITAAILTARSRWRLRNSISAFLFTVTFAWCPPGLSNLTILSCPDHLSQDVFCLHESKFEEERMVAGWLTNYSQDSVTFEDVAVDFTQEEWTLLDQTQRNLYRDVMLENYKNLVAVDWESHINTKWSAPQQNFLQGKTSSVVEMNSE

SEQ ID NO: 10628 - DNA, 2983 bp, Homo sapiens
aaccaatcagactgaacgcgggctaccgcttcatttacaggaggtgagcatgaagtggccaatgggaaaattctaggaggtattgggactcatgaaggttctgtttcggagcccttgagctgccgcttggccagttcccacactgtggagtatgctttcgttttcaacaaatcccagctcttgttcttttgttgcttcattctttctttgctttgctgggcgttttgtctaattctttgttcaaaacgccagtaacctggacagcttgcagtcaagaccccctaccggtgacacttgcgctcttcggggaggtaaacagcatttcctctcagctctgggttggaaaaagccgcagcagctgatgggcccgggaacccgaggccccgccccctaggtggtcctagcctttgcgcgtgcgcggcgtgtctgcgtgggcgcatgcgcataacggccgccatcttaacagcgcgttcccgttggcgtctgaggaacagcatctctgccttcctgttcacggtgaccttcgcttggtgtcctcctggcctcagcaacctgacaattctgtcgtgtcccggcaggagtacagtggtgagatcacggttcactgcagcattgacctccctaggctcaggtgttgctcccacctcagtcttctgaatagcttggagtatagattgggagagtcatattaataccaaatggtcagcacctcagcagaattttttgcaggggaaaacatccagtgtggtggaaatgaattcagagtaaaagggagaatctcaatgaaataaatttggaaaacttctatgaaccatcattaattttcaccaacaggagagaaaccattttggagaggaactgtttgactttaaccaatgtgaaaaagccttgagtgaacactcatgccttaagactcacaggagaacttactttagaaagaaaacctgtgagtgtaatcaatgtgaaaaagccttcagaaaaccctctatctttactttacacaagaaaactgatatcggagaggaacttcctaactgtaatcaatgtgaaacagccttcagccaacatctacatcttgtttgcaagaaaactagccaaaatctacatcttgtttgcaagaaaactcacactcaagagaaaccatataaatgcagtgactgtgaaaaaggcttaccttcctcctcacacctcagagaatgtgtaagaatttatggtggagagagaccatatactcataaggagtatgtcgaaaccttttctcattctacagccctttttgtacacatgcaaactcaagatggagaaaaattctatgaatgtaaagcatgtgggaaacccttcactgagtcgtcatatcttactcaacatttaagaactcatagtagagtgttacctatagaacataagaaatttggcaaagcctttgctttttccccagatcttgctaaacatataagacttagaactagaggaaaacactatgtttgtaatgaatgtggcaaagaatttacttgtttctcaaaactcaacattcacataagggttcacactggagaaaaaccgtatgagtgcaacaaatgtgggaaagccttcactgattcatcaggtcttataaaacacaggcgaactcacactggagaaaagccttatgaatgtaaggaatgtgggaaagcttttgctaactcttcacatcttactgtacatatgagaactcacactggtgagaagccttatcaatgtaaggaatgtggaaaagcctttattaattcctcttcctttaaaagtcacatgcagactcatcctggtgtaaaaccctatgactgtcaacagtgtgggaaagccttcattcgatcctcatttcttattcgacatttgagaagtcacagtgcagaaaggccttttgaatgtgaggaatgtgggaaagcctttagatactcctcgcaccttagtcaacataaaagaatacatacaggggagaggccatataaatgtcaaaagtgtgggcaagccttcagtatctcatcaggccttacagtacacatgagaactcacactggtgaacggccctttgaatgtcaggaatgtgggaaagcctttactcggtccacatatcttattcgacatctaagaagtcatagtgtggagaaaccatataaggaatgtgggcaaacctttagtaattcctcatgccttactgaatgtgtgtgaattggggctgatacttggaaagaatgtggtaaagccactacttcctcacacttactgaacatgtactcattcatagtggcaatgtacacagtcataaggaatgtgggaagccttccttggtgtctcagatcttaacaattccaatagaagagaagacatatgaatgtaaggaatgtgggaaaatcttggctccttccataggccttactattcatgtgtctgtgcatcctaggaaacaaactgaacgtaggaaacctgtcgatgcttacatcttactgagtctgtttgaactcatgctggagagaaatgctatgaatgtgaggaaggtggaaaagctttcattattttcctcgggccttactgagcttgtgagcacattggatataaatgcacgtcctctggctgtaaggaatgtgttgaaacctttcactctgccttataccttaatattcagctgtgatctcacaagtgtgaaaaatcttatgaatgtaaaatgtgtggagattcttctttgtttttagcttccactttgggaacatgtcaaagcacacattgagaagtcccatgagtgaaagagatgttggaaagcccttgaacttggtcgttaggaaacatccacactgaagaggaacctgactgtatggaaggtcaaaaaggctgtattaatttacatgcaaaaagtcacactagaggaatgccatatcagaatgcttttggtaaatatacatgttttaaagaggttatatatcattaataaaaatatctagctggtctg

SEQ ID NO: 10629 - protein, 72 aa, Homo sapiens
MRITAAILTARSRWRLRNSISAFLFTVTFAWCPPGLSNLTILSCPGRSTVVRSRFTAALTSLGSGVAPTSVF

SEQ ID NO: 10630 - DNA, 3085 bp, Homo sapiens
aaccaatcagactgaacgcgggctaccgcttcatttacaggaggtgagcatgaagtggccaatgggaaaattctaggaggtattgggactcatgaaggttctgtttcggagcccttgagctgccgcttggccagttcccacactgtggagtatgctttcgttttcaacaaatcccagctcttgttcttttgttgcttcattctttctttgctttgctgggcgttttgtctaattctttgttcaaaacgccagtaacctggacagcttgcagtcaagaccccctaccggtgacacttgcgctcttcggggaggtaaacagcatttcctctcagctctgggttggaaaaagccgcagcagctgatgggcccgggaacccgaggccccgccccctaggtggtcctagcctttgcgcgtgcgcggcgtgtctgcgtgggcgcatgcgcataacggccgccatcttaacagcgcgttcccgttggcgtctgaggaacagcatctctgccttcctgttcacggtgaccttcgcttggtgtcctcctggcctcagcaacctgacaattctgtcgtgtcccgagagatggctaatgaatggcgcttgatgacagatgagtaatgcctgttgctgaaagattgacgatcatctttctcaagatgttttctgtcttcatgagtcaaaatttgaagaggaaaggatggtggctgggtggttgacaaattactctcaggactcagtgacctttgaggatgtggctgtggacttcacccaggaggagtggactttgctggatcaaactcagagaaacttatacagagatgtgatgctggagaactataagaatctagttgcagtagattgggagagtcatattaataccaaatggtcagcacctcagcagaattttttgcaggggaaaacatccagtgtggtggaaatggagagaaaccattttggagaggaactgtttgactttaaccaatgtgaaaaagccttgagtgaacactcatgccttaagactcacaggagaacttactttagaaagaaaacctgtgagtgtaatcaatgtgaaaaagccttcagaaaaccctctatctttactttacacaagaaaactgatatcggagaggaacttcctaactgtaatcaatgtgaaacagccttcagccaacatctacatcttgtttgcaagaaaactagccaaaatctacatcttgtttgcaagaaaactcacactcaagagaaaccatataaatgcagtgactgtgaaaaaggcttaccttcctcctcacacctcagagaatgtgtaagaatttatggtggagagagaccatatactcataaggagtatgtcgaaaccttttctcattctacagccctttttgtacacatgcaaactcaagatggagaaaaattctatgaatgtaaagcatgtgggaaacccttcactgagtcgtcatatcttactcaacatttaagaactcatagtagagtgttacctatagaacataagaaatttggcaaagcctttgctttttccccagatcttgctaaacatataagacttagaactagaggaaaacactatgtttgtaatgaatgtggcaaagaatttacttgtttctcaaaactcaacattcacataagggttcacactggagaaaaaccgtatgagtgcaacaaatgtgggaaagccttcactgattcatcaggtcttataaaacacaggcgaactcacactggagaaaagccttatgaatgtaaggaatgtgggaaagcttttgctaactcttcacatcttactgtacatatgagaactcacactggtgagaagccttatcaatgtaaggaatgtggaaaagcctttattaattcctcttcctttaaaagtcacatgcagactcatcctggtgtaaaaccctatgactgtcaacagtgtgggaaagccttcattcgatcctcatttcttattcgacatttgagaagtcacagtgcagaaaggccttttgaatgtgaggaatgtgggaaagcctttagatactcctcgcaccttagtcaacataaaagaatacatacaggggagaggccatataaatgtcaaaagtgtgggcaagccttcagtatctcatcaggccttacagtacacatgagaactcacactggtgaacggccctttgaatgtcaggaatgtgggaaagcctttactcggtccacatatcttattcgacatctaagaagtcatagtgtggagaaaccatataaggaatgtgggcaaacctttagtaattcctcatgccttactgaatgtgtgtgaattggggctgatacttggaaagaatgtggtaaagccactacttcctcacacttactgaacatgtactcattcatagtggcaatgtacacagtcataaggaatgtgggaagccttccttggtgtctcagatcttaacaattccaatagaagagaagacatatgaatgtaaggaatgtgggaaaatcttggctccttccataggccttactattcatgtgtctgtgcatcctaggaaacaaactgaacgtaggaaacctgtcgatgcttacatcttactgagtctgtttgaactcatgctggagagaaatgctatgaatgtgaggaaggtggaaaagctttcattattttcctcgggccttactgagcttgtgagcacattggatataaatgcacgtcctctggctgtaaggaatgtgttgaaacctttcactctgccttataccttaatattcagctgtgatctcacaagtgtgaaaaatcttatgaatgtaaaatgtgtggagattcttctttgtttttagcttccactttgggaacatgtcaaagcacacattgagaagtcccatgagtgaaagagatgttggaaagcccttgaacttggtcgttaggaaacatccacactgaagaggaacctgactgtatggaaggtcaaaaaggctgtattaatttacatgcaaaaagtcacactagaggaatgccatatcagaatgcttttggtaaatatacatgttttaaagaggttatatatcattaataaaaatatctagctggtctg

SEQ ID NO: 10631 - protein, 538 aa, Homo sapiens; identical to SEQ ID NO: 1791

SEQ ID NO: 10632 - DNA, 3117 bp, Homo sapiens
aaccaatcagactgaacgcgggctaccgcttcatttacaggaggtgagcatgaagtggccaatgggaaaattctaggaggtattgggactcatgaaggttctgtttcggagcccttgagctgccgcttggccagttcccacactgtggagtatgctttcgttttcaacaaatcccagctcttgttcttttgttgcttcattctttctttgctttgctgggcgttttgtctaattctttgttcaaaacgccagtaacctggacagcttgcagtcaagaccccctaccggtgacacttgcgctcttcggggaggtaaacagcatttcctctcagctctgggttggaaaaagccgcagcagctgatgggcccgggaacccgaggccccgccccctaggtggtcctagcctttgcgcgtgcgcggcgtgtctgcgtgggcgcatgcgcataacggccgccatcttaacagcgcgttcccgttggcgtctgaggaacagcatctctgccttcctgttcacggtgaccttcgcttggtgtcctcctggcctcagcaacctgacaattctgtcgtgtcccgagagatggctaatgaatggcgcttgatgacagatgagtaatgcctgttgctgaaagattgacggtatgaggcaagactcccactactacttaatcaagaggaattgagattgacttacccataagttcagacagtgtctcgaagagactttgggaacaagatattcaggcacatttcactgttagactcacaggatgctggccattggtctttccctttgtgatcatctttctcaagatgttttctgtcttcatgagtcaaaatttgaagaggaaaggatggtggctgggtggttgacaaattactctcagattgggagagtcatattaataccaaatggtcagcacctcagcagaattttttgcaggggaaaacatccagtgtggtggaaatggagagaaaccattttggagaggaactgtttgactttaaccaatgtgaaaaagccttgagtgaacactcatgccttaagactcacaggagaacttactttagaaagaaaacctgtgagtgtaatcaatgtgaaaaagccttcagaaaaccctctatctttactttacacaagaaaactgatatcggagaggaacttcctaactgtaatcaatgtgaaacagccttcagccaacatctacatcttgtttgcaagaaaactagccaaaatctacatcttgtttgcaagaaaactcacactcaagagaaaccatataaatgcagtgactgtgaaaaaggcttaccttcctcctcacacctcagagaatgtgtaagaatttatggtggagagagaccatatactcataaggagtatgtcgaaaccttttctcattctacagccctttttgtacacatgcaaactcaagatggagaaaaattctatgaatgtaaagcatgtgggaaacccttcactgagtcgtcatatcttactcaacatttaagaactcatagtagagtgttacctatagaacataagaaatttggcaaagcctttgctttttccccagatcttgctaaacatataagacttagaactagaggaaaacactatgtttgtaatgaatgtggcaaagaatttacttgtttctcaaaactcaacattcacataagggttcacactggagaaaaaccgtatgagtgcaacaaatgtgggaaagccttcactgattcatcaggtcttataaaacacaggcgaactcacactggagaaaagccttatgaatgtaaggaatgtgggaaagcttttgctaactcttcacatcttactgtacatatgagaactcacactggtgagaagccttatcaatgtaaggaatgtggaaaagcctttattaattcctcttcctttaaaagtcacatgcagactcatcctggtgtaaaaccctatgactgtcaacagtgtgggaaagccttcattcgatcctcatttcttattcgacatttgagaagtcacagtgcagaaaggccttttgaatgtgaggaatgtgggaaagcctttagatactcctcgcaccttagtcaacataaaagaatacatacaggggagaggccatataaatgtcaaaagtgtgggcaagccttcagtatctcatcaggccttacagtacacatgagaactcacactggtgaacggccctttgaatgtcaggaatgtgggaaagcctttactcggtccacatatcttattcgacatctaagaagtcatagtgtggagaaaccatataaggaatgtgggcaaacctttagtaattcctcatgccttactgaatgtgtgtgaattggggctgatacttggaaagaatgtggtaaagccactacttcctcacacttactgaacatgtactcattcatagtggcaatgtacacagtcataaggaatgtgggaagccttccttggtgtctcagatcttaacaattccaatagaagagaagacatatgaatgtaaggaatgtgggaaaatcttggctccttccataggccttactattcatgtgtctgtgcatcctaggaaacaaactgaacgtaggaaacctgtcgatgcttacatcttactgagtctgtttgaactcatgctggagagaaatgctatgaatgtgaggaaggtggaaaagctttcattattttcctcgggccttactgagcttgtgagcacattggatataaatgcacgtcctctggctgtaaggaatgtgttgaaacctttcactctgccttataccttaatattcagctgtgatctcacaagtgtgaaaaatcttatgaatgtaaaatgtgtggagattcttctttgtttttagcttccactttgggaacatgtcaaagcacacattgagaagtcccatgagtgaaagagatgttggaaagcccttgaacttggtcgttaggaaacatccacactgaagaggaacctgactgtatggaaggtcaaaaaggctgtattaatttacatgcaaaaagtcacactagaggaatgccatatcagaatgcttttggtaaatatacatgttttaaagaggttatatatcattaataaaaatatctagctggtctg

SEQ ID NO: 10633 - protein, 458 aa, Homo sapiens
MERNHFGEELFDFNQCEKALSEHSCLKTHRRTYFRKKTCECNQCEKAFRKPSIFTLHKKTDIGEELPNCNQCETAFSQHLHLVCKKTSQNLHLVCKKTHTQEKPYKCSDCEKGLPSSSHLRECVRIYGGERPYTHKEYVETFSHSTALFVHMQTQDGEKFYECKACGKPFTESSYLTQHLRTHSRVLPIEHKKFGKAFAFSPDLAKHIRLRTRGKHYVCNECGKEFTCFSKLNIHIRVHTGEKPYECNKCGKAFTDSSGLIKHRRTHTGEKPYECKECGKAFANSSHLTVHMRTHTGEKPYQCKECGKAFINSSSFKSHMQTHPGVKPYDCQQCGKAFIRSSFLIRHLRSHSAERPFECEECGKAFRYSSHLSQHKRIHTGERPYKCQKCGQAFSISSGLTVHMRTHTGERPFECQECGKAFTRSTYLIRHLRSHSVEKPYKECGQTFSNSSCLTECV

SEQ ID NO: 10634 - DNA, 3595 bp, Homo sapiens
aaccaatcagactgaacgcgggctaccgcttcatttacaggaggtgagcatgaagtggccaatgggaaaattctaggaggtattgggactcatgaaggttctgtttcggagcccttgagctgccgcttggccagttcccacactgtggagtatgctttcgttttcaacaaatcccagctcttgttcttttgttgcttcattctttctttgctttgctgggcgttttgtctaattctttgttcaaaacgccagtaacctggacagcttgcagtcaagaccccctaccggtgacacttgcgctcttcggggaggtaaacagcatttcctctcagctctgggttggaaaaagccgcagcagctgatgggcccgggaacccgaggccccgccccctaggtggtcctagcctttgcgcgtgcgcggcgtgtctgcgtgggcgcatgcgcataacggccgccatcttaacagcgcgttcccgttggcgtctgaggaacagcatctctgccttcctgttcacggtgaccttcgcttggtgtcctcctggcctcagcaacctgacaattctgtcgtgtcccgagagatggctaatgaatggcgcttgatgacagatgagtaatgcctgttgctgaaagattgacgatcatctttctcaagatgttttctgtcttcatgagtcaaaatttgaagaggaaaggatggtggctgggtggttgacaaattactctcaggactcagtgacctttgaggatgtggctgtggacttcacccaggaggagtggactttgctggatcaaactcagagaaacttatacagagatgtgatgctggagaactataagaatctagttgcagtagattgggagagtcatattaataccaaatggtcagcacctcagcagaattttttgcaggggaaaacatccagtgtggtggaaatggtaagattcagaaggtataatttattgtcttccatgttagaggaagattggaaattccttaaaatggaaaagcagcacaataaccttgagacatttgagactagtgtttttcacccaaaaataatctgtctcttggagagactatggatcatgagtttgacaaacactctaaacatccctcagaatatatttgtttacatatttccttcaacattcccatatgtatctcagatgtttttgataaataattcactcttgggccgttatcagctaagctctatttagaagccctctgaaagtaaagaatataacagaacttcctgcagtcactttgttccacttgaaaacactcaggtctgaaccatgccttgcaatgaaaatggcaggaacaaacagtttcaattatactaacttattttccatgtgtaacagaattcagagtaaaagggagaatctcaatgaaataaatttggaaaacttctatgaaccatcattaattttcaccaacaggagagaaaccattttggagaggaactgtttgactttaaccaatgtgaaaaagccttgagtgaacactcatgccttaagactcacaggagaacttactttagaaagaaaacctgtgagtgtaatcaatgtgaaaaagccttcagaaaaccctctatctttactttacacaagaaaactgatatcggagaggaacttcctaactgtaatcaatgtgaaacagccttcagccaacatctacatcttgtttgcaagaaaactagccaaaatctacatcttgtttgcaagaaaactcacactcaagagaaaccatataaatgcagtgactgtgaaaaaggcttaccttcctcctcacacctcagagaatgtgtaagaatttatggtggagagagaccatatactcataaggagtatgtcgaaaccttttctcattctacagccctttttgtacacatgcaaactcaagatggagaaaaattctatgaatgtaaagcatgtgggaaacccttcactgagtcgtcatatcttactcaacatttaagaactcatagtagagtgttacctatagaacataagaaatttggcaaagcctttgctttttccccagatcttgctaaacatataagacttagaactagaggaaaacactatgtttgtaatgaatgtggcaaagaatttacttgtttctcaaaactcaacattcacataagggttcacactggagaaaaaccgtatgagtgcaacaaatgtgggaaagccttcactgattcatcaggtcttataaaacacaggcgaactcacactggagaaaagccttatgaatgtaaggaatgtgggaaagcttttgctaactcttcacatcttactgtacatatgagaactcacactggtgagaagccttatcaatgtaaggaatgtggaaaagcctttattaattcctcttcctttaaaagtcacatgcagactcatcctggtgtaaaaccctatgactgtcaacagtgtgggaaagccttcattcgatcctcatttcttattcgacatttgagaagtcacagtgcagaaaggccttttgaatgtgaggaatgtgggaaagcctttagatactcctcgcaccttagtcaacataaaagaatacatacaggggagaggccatataaatgtcaaaagtgtgggcaagccttcagtatctcatcaggccttacagtacacatgagaactcacactggtgaacggccctttgaatgtcaggaatgtgggaaagcctttactcggtccacatatcttattcgacatctaagaagtcatagtgtggagaaaccatataaggaatgtgggcaaacctttagtaattcctcatgccttactgaatgtgtgtgaattggggctgatacttggaaagaatgtggtaaagccactacttcctcacacttactgaacatgtactcattcatagtggcaatgtacacagtcataaggaatgtgggaagccttccttggtgtctcagatcttaacaattccaatagaagagaagacatatgaatgtaaggaatgtgggaaaatcttggctccttccataggccttactattcatgtgtctgtgcatcctaggaaacaaactgaacgtaggaaacctgtcgatgcttacatcttactgagtctgtttgaactcatgctggagagaaatgctatgaatgtgaggaaggtggaaaagctttcattattttcctcgggccttactgagcttgtgagcacattggatataaatgcacgtcctctggctgtaaggaatgtgttgaaacctttcactctgccttataccttaatattcagctgtgatctcacaagtgtgaaaaatcttatgaatgtaaaatgtgtggagattcttctttgtttttagcttccactttgggaacatgtcaaagcacacattgagaagtcccatgagtgaaagagatgttggaaagcccttgaacttggtcgttaggaaacatccacactgaagaggaacctgactgtatggaaggtcaaaaaggctgtattaatttacatgcaaaaagtcacactagaggaatgccatatcagaatgcttttggtaaatatacatgttttaaagaggttatatatcattaataaaaatatctagctggtctg

SEQ ID NO: 10635 - protein, 175 aa, Homo sapiens
MVAGWLTNYSQDSVTFEDVAVDFTQEEWTLLDQTQRNLYRDVMLENYKNLVAVDWESHINTKWSAPQQNFLQGKTSSVVEMVRFRRYNLLSSMLEEDWKFLKMEKQHNNLETFETSVFHPKIICLLERLWIMSLTNTLNIPQNIFVYIFPSTFPYVSQMFLINNSLLGRYQLSSI

SEQ ID NO: 10636 - DNA, 3163 bp, Homo sapiens
aaccaatcagactgaacgcgggctaccgcttcatttacaggaggtgagcatgaagtggccaatgggaaaattctaggaggtattgggactcatgaaggttctgtttcggagcccttgagctgccgcttggccagttcccacactgtggagtatgctttcgttttcaacaaatcccagctcttgttcttttgttgcttcattctttctttgctttgctgggcgttttgtctaattctttgttcaaaacgccagtaacctggacagcttgcagtcaagaccccctaccggtgacacttgcgctcttcggggaggtaaacagcatttcctctcagctctgggttggaaaaagccgcagcagctgatgggcccgggaacccgaggccccgccccctaggtggtcctagcctttgcgcgtgcgcggcgtgtctgcgtgggcgcatgcgcataacggccgccatcttaacagcgcgttcccgttggcgtctgaggaacagcatctctgccttcctgttcacggtgaccttcgcttggtgtcctcctggcctcagcaacctgacaattctgtcgtgtcccgagagatggctaatgaatggcgcttgatgacagatgagtaatgcctgttgctgaaagattgacgatcatctttctcaagatgttttctgtcttcatgagtcaaaatttgaagaggaaaggatggtggctgggtggttgacaaattactctcaggactcagtgacctttgaggatgtggctgtggacttcacccaggaggagtggactttgctggatcaaactcagagaaacttatacagagatgtgatgctggagaactataagaatctagttgcagtagattgggagagtcatattaataccaaatggtcagcacctcagcagaattttttgcaggggaaaacatccagtgtggtggaaatgaattcagagtaaaagggagaatctcaatgaaataaatttggaaaacttctatgaaccatcattaattttcaccaacaggagagaaaccattttggagaggaactgtttgactttaaccaatgtgaaaaagccttgagtgaacactcatgccttaagactcacaggagaacttactttagaaagaaaacctgtgagtgtaatcaatgtgaaaaagccttcagaaaaccctctatctttactttacacaagaaaactgatatcggagaggaacttcctaactgtaatcaatgtgaaacagccttcagccaacatctacatcttgtttgcaagaaaactagccaaaatctacatcttgtttgcaagaaaactcacactcaagagaaaccatataaatgcagtgactgtgaaaaaggcttaccttcctcctcacacctcagagaatgtgtaagaatttatggtggagagagaccatatactcataaggagtatgtcgaaaccttttctcattctacagccctttttgtacacatgcaaactcaagatggagaaaaattctatgaatgtaaagcatgtgggaaacccttcactgagtcgtcatatcttactcaacatttaagaactcatagtagagtgttacctatagaacataagaaatttggcaaagcctttgctttttccccagatcttgctaaacatataagacttagaactagaggaaaacactatgtttgtaatgaatgtggcaaagaatttacttgtttctcaaaactcaacattcacataagggttcacactggagaaaaaccgtatgagtgcaacaaatgtgggaaagccttcactgattcatcaggtcttataaaacacaggcgaactcacactggagaaaagccttatgaatgtaaggaatgtgggaaagcttttgctaactcttcacatcttactgtacatatgagaactcacactggtgagaagccttatcaatgtaaggaatgtggaaaagcctttattaattcctcttcctttaaaagtcacatgcagactcatcctggtgtaaaaccctatgactgtcaacagtgtgggaaagccttcattcgatcctcatttcttattcgacatttgagaagtcacagtgcagaaaggccttttgaatgtgaggaatgtgggaaagcctttagatactcctcgcaccttagtcaacataaaagaatacatacaggggagaggccatataaatgtcaaaagtgtgggcaagccttcagtatctcatcaggccttacagtacacatgagaactcacactggtgaacggccctttgaatgtcaggaatgtgggaaagcctttactcggtccacatatcttattcgacatctaagaagtcatagtgtggagaaaccatataaggaatgtgggcaaacctttagtaattcctcatgccttactgaatgtgtgtgaattggggctgatacttggaaagaatgtggtaaagccactacttcctcacacttactgaacatgtactcattcatagtggcaatgtacacagtcataaggaatgtgggaagccttccttggtgtctcagatcttaacaattccaatagaagagaagacatatgaatgtaaggaatgtgggaaaatcttggctccttccataggccttactattcatgtgtctgtgcatcctaggaaacaaactgaacgtaggaaacctgtcgatgcttacatcttactgagtctgtttgaactcatgctggagagaaatgctatgaatgtgaggaaggtggaaaagctttcattattttcctcgggccttactgagcttgtgagcacattggatataaatgcacgtcctctggctgtaaggaatgtgttgaaacctttcactctgccttataccttaatattcagctgtgatctcacaagtgtgaaaaatcttatgaatgtaaaatgtgtggagattcttctttgtttttagcttccactttgggaacatgtcaaagcacacattgagaagtcccatgagtgaaagagatgttggaaagcccttgaacttggtcgttaggaaacatccacactgaagaggaacctgactgtatggaaggtcaaaaaggctgtattaatttacatgcaaaaagtcacactagaggaatgccatatcagaatgcttttggtaaatatacatgttttaaagaggttatatatcattaataaaaatatctagctggtctg

SEQ ID NO: 10637 - protein, 84 aa, Homo sapiens
MVAGWLTNYSQDSVTFEDVAVDFTQEEWTLLDQTQRNLYRDVMLENYKNLVAVDWESHINTKWSAPQQNFLQGKTSSVVEMNSE

SEQ ID NO: 10638 - DNA, 3199 bp, Homo sapiens
aaccaatcagactgaacgcgggctaccgcttcatttacaggaggtgagcatgaagtggccaatgggaaaattctaggaggtattgggactcatgaaggttctgtttcggagcccttgagctgccgcttggccagttcccacactgtggagtatgctttcgttttcaacaaatcccagctcttgttcttttgttgcttcattctttctttgctttgctgggcgttttgtctaattctttgttcaaaacgccagtaacctggacagcttgcagtcaagaccccctaccggtgacacttgcgctcttcggggaggtaaacagcatttcctctcagctctgggttggaaaaagccgcagcagctgatgggcccgggaacccgaggccccgccccctaggtggtcctagcctttgcgcgtgcgcggcgtgtctgcgtgggcgcatgcgcataacggccgccatcttaacagcgcgttcccgttggcgtctgaggaacagcatctctgccttcctgttcacggtgaccttcgcttggtgtcctcctggcctcagcaacctgacaattctgtcgtgtcccggcaggagtacagtggtgagatcacggttcactgcagcattgacctccctaggctcaggtgttgctcccacctcagtcttctgaatagcttggagtatagatcatctttctcaagatgttttctgtcttcatgagtcaaaatttgaagaggaaaggatggtggctgggtggttgacaaattactctcaggactcagtgacctttgaggatgtggctgtggacttcacccaggaggagtggactttgctggatcaaactcagagaaacttatacagagatgtgatgctggagaactataagaatctagttgcagtagattgggagagtcatattaataccaaatggtcagcacctcagcagaattttttgcaggggaaaacatccagtgtggtggaaatgaattcagagtaaaagggagaatctcaatgaaataaatttggaaaacttctatgaaccatcattaattttcaccaacaggagagaaaccattttggagaggaactgtttgactttaaccaatgtgaaaaagccttgagtgaacactcatgccttaagactcacaggagaacttactttagaaagaaaacctgtgagtgtaatcaatgtgaaaaagccttcagaaaaccctctatctttactttacacaagaaaactgatatcggagaggaacttcctaactgtaatcaatgtgaaacagccttcagccaacatctacatcttgtttgcaagaaaactagccaaaatctacatcttgtttgcaagaaaactcacactcaagagaaaccatataaatgcagtgactgtgaaaaaggcttaccttcctcctcacacctcagagaatgtgtaagaatttatggtggagagagaccatatactcataaggagtatgtcgaaaccttttctcattctacagccctttttgtacacatgcaaactcaagatggagaaaaattctatgaatgtaaagcatgtgggaaacccttcactgagtcgtcatatcttactcaacatttaagaactcatagtagagtgttacctatagaacataagaaatttggcaaagcctttgctttttccccagatcttgctaaacatataagacttagaactagaggaaaacactatgtttgtaatgaatgtggcaaagaatttacttgtttctcaaaactcaacattcacataagggttcacactggagaaaaaccgtatgagtgcaacaaatgtgggaaagccttcactgattcatcaggtcttataaaacacaggcgaactcacactggagaaaagccttatgaatgtaaggaatgtgggaaagcttttgctaactcttcacatcttactgtacatatgagaactcacactggtgagaagccttatcaatgtaaggaatgtggaaaagcctttattaattcctcttcctttaaaagtcacatgcagactcatcctggtgtaaaaccctatgactgtcaacagtgtgggaaagccttcattcgatcctcatttcttattcgacatttgagaagtcacagtgcagaaaggccttttgaatgtgaggaatgtgggaaagcctttagatactcctcgcaccttagtcaacataaaagaatacatacaggggagaggccatataaatgtcaaaagtgtgggcaagccttcagtatctcatcaggccttacagtacacatgagaactcacactggtgaacggccctttgaatgtcaggaatgtgggaaagcctttactcggtccacatatcttattcgacatctaagaagtcatagtgtggagaaaccatataaggaatgtgggcaaacctttagtaattcctcatgccttactgaatgtgtgtgaattggggctgatacttggaaagaatgtggtaaagccactacttcctcacacttactgaacatgtactcattcatagtggcaatgtacacagtcataaggaatgtgggaagccttccttggtgtctcagatcttaacaattccaatagaagagaagacatatgaatgtaaggaatgtgggaaaatcttggctccttccataggccttactattcatgtgtctgtgcatcctaggaaacaaactgaacgtaggaaacctgtcgatgcttacatcttactgagtctgtttgaactcatgctggagagaaatgctatgaatgtgaggaaggtggaaaagctttcattattttcctcgggccttactgagcttgtgagcacattggatataaatgcacgtcctctggctgtaaggaatgtgttgaaacctttcactctgccttataccttaatattcagctgtgatctcacaagtgtgaaaaatcttatgaatgtaaaatgtgtggagattcttctttgtttttagcttccactttgggaacatgtcaaagcacacattgagaagtcccatgagtgaaagagatgttggaaagcccttgaacttggtcgttaggaaacatccacactgaagaggaacctgactgtatggaaggtcaaaaaggctgtattaatttacatgcaaaaagtcacactagaggaatgccatatcagaatgcttttggtaaatatacatgttttaaagaggttatatatcattaataaaaatatctagctggtctg

SEQ ID NO: 10639 - protein, 84 aa, Homo sapiens; identical to SEQ ID NO: 10637

SEQ ID NO: 10640 - DNA, 3022 bp, Homo sapiens
aaccaatcagactgaacgcgggctaccgcttcatttacaggaggtgagcatgaagtggccaatgggaaaattctaggaggtattgggactcatgaaggttctgtttcggagcccttgagctgccgcttggccagttcccacactgtggagtatgctttcgttttcaacaaatcccagctcttgttcttttgttgcttcattctttctttgctttgctgggcgttttgtctaattctttgttcaaaacgccagtaacctggacagcttgcagtcaagaccccctaccggtgacacttgcgctcttcggggaggtaaacagcatttcctctcagctctgggttggaaaaagccgcagcagctgatgggcccgggaacccgaggccccgccccctaggtggtcctagcctttgcgcgtgcgcggcgtgtctgcgtgggcgcatgcgcataacggccgccatcttaacagcgcgttcccgttggcgtctgaggaacagcatctctgccttcctgttcacggtgaccttcgcttggtgtcctcctggcctcagcaacctgacaattctgtcgtgtcccgatcatctttctcaagatgttttctgtcttcatgagtcaaaatttgaagaggaaaggatggtggctgggtggttgacaaattactctcaggactcagtgacctttgaggatgtggctgtggacttcacccaggaggagtggactttgctggatcaaactcagagaaacttatacagagatgtgatgctggagaactataagaatctagttgcagtagattgggagagtcatattaataccaaatggtcagcacctcagcagaattttttgcaggggaaaacatccagtgtggtggaaatggagagaaaccattttggagaggaactgtttgactttaaccaatgtgaaaaagccttgagtgaacactcatgccttaagactcacaggagaacttactttagaaagaaaacctgtgagtgtaatcaatgtgaaaaagccttcagaaaaccctctatctttactttacacaagaaaactgatatcggagaggaacttcctaactgtaatcaatgtgaaacagccttcagccaacatctacatcttgtttgcaagaaaactagccaaaatctacatcttgtttgcaagaaaactcacactcaagagaaaccatataaatgcagtgactgtgaaaaaggcttaccttcctcctcacacctcagagaatgtgtaagaatttatggtggagagagaccatatactcataaggagtatgtcgaaaccttttctcattctacagccctttttgtacacatgcaaactcaagatggagaaaaattctatgaatgtaaagcatgtgggaaacccttcactgagtcgtcatatcttactcaacatttaagaactcatagtagagtgttacctatagaacataagaaatttggcaaagcctttgctttttccccagatcttgctaaacatataagacttagaactagaggaaaacactatgtttgtaatgaatgtggcaaagaatttacttgtttctcaaaactcaacattcacataagggttcacactggagaaaaaccgtatgagtgcaacaaatgtgggaaagccttcactgattcatcaggtcttataaaacacaggcgaactcacactggagaaaagccttatgaatgtaaggaatgtgggaaagcttttgctaactcttcacatcttactgtacatatgagaactcacactggtgagaagccttatcaatgtaaggaatgtggaaaagcctttattaattcctcttcctttaaaagtcacatgcagactcatcctggtgtaaaaccctatgactgtcaacagtgtgggaaagccttcattcgatcctcatttcttattcgacatttgagaagtcacagtgcagaaaggccttttgaatgtgaggaatgtgggaaagcctttagatactcctcgcaccttagtcaacataaaagaatacatacaggggagaggccatataaatgtcaaaagtgtgggcaagccttcagtatctcatcaggccttacagtacacatgagaactcacactggtgaacggccctttgaatgtcaggaatgtgggaaagcctttactcggtccacatatcttattcgacatctaagaagtcatagtgtggagaaaccatataaggaatgtgggcaaacctttagtaattcctcatgccttactgaatgtgtgtgaattggggctgatacttggaaagaatgtggtaaagccactacttcctcacacttactgaacatgtactcattcatagtggcaatgtacacagtcataaggaatgtgggaagccttccttggtgtctcagatcttaacaattccaatagaagagaagacatatgaatgtaaggaatgtgggaaaatcttggctccttccataggccttactattcatgtgtctgtgcatcctaggaaacaaactgaacgtaggaaacctgtcgatgcttacatcttactgagtctgtttgaactcatgctggagagaaatgctatgaatgtgaggaaggtggaaaagctttcattattttcctcgggccttactgagcttgtgagcacattggatataaatgcacgtcctctggctgtaaggaatgtgttgaaacctttcactctgccttataccttaatattcagctgtgatctcacaagtgtgaaaaatcttatgaatgtaaaatgtgtggagattcttctttgtttttagcttccactttgggaacatgtcaaagcacacattgagaagtcccatgagtgaaagagatgttggaaagcccttgaacttggtcgttaggaaacatccacactgaagaggaacctgactgtatggaaggtcaaaaaggctgtattaatttacatgcaaaaagtcacactagaggaatgccatatcagaatgcttttggtaaatatacatgttttaaagaggttatatatcattaataaaaatatctagctggtctg

SEQ ID NO: 10641 - protein, 602 aa, Homo sapiens
MRITAAILTARSRWRLRNSISAFLFTVTFAWCPPGLSNLTILSCPDHLSQDVFCLHESKFEEERMVAGWLTNYSQDSVTFEDVAVDFTQEEWTLLDQTQRNLYRDVMLENYKNLVAVDWESHINTKWSAPQQNFLQGKTSSVVEMERNHFGEELFDFNQCEKALSEHSCLKTHRRTYFRKKTCECNQCEKAFRKPSIFTLHKKTDIGEELPNCNQCETAFSQHLHLVCKKTSQNLHLVCKKTHTQEKPYKCSDCEKGLPSSSHLRECVRIYGGERPYTHKEYVETFSHSTALFVHMQTQDGEKFYECKACGKPFTESSYLTQHLRTHSRVLPIEHKKFGKAFAFSPDLAKHIRLRTRGKHYVCNECGKEFTCFSKLNIHIRVHTGEKPYECNKCGKAFTDSSGLIKHRRTHTGEKPYECKECGKAFANSSHLTVHMRTHTGEKPYQCKECGKAFINSSSFKSHMQTHPGVKPYDCQQCGKAFIRSSFLIRHLRSHSAERPFECEECGKAFRYSSHLSQHKRIHTGERPYKCQKCGQAFSISSGLTVHMRTHTGERPFECQECGKAFTRSTYLIRHLRSHSVEKPYKECGQTFSNSSCLTECV

SEQ ID NO: 10642 - DNA, 3532 bp, Homo sapiens
aaccaatcagactgaacgcgggctaccgcttcatttacaggaggtgagcatgaagtggccaatgggaaaattctaggaggtattgggactcatgaaggttctgtttcggagcccttgagctgccgcttggccagttcccacactgtggagtatgctttcgttttcaacaaatcccagctcttgttcttttgttgcttcattctttctttgctttgctgggcgttttgtctaattctttgttcaaaacgccagtaacctggacagcttgcagtcaagaccccctaccggtgacacttgcgctcttcggggaggtaaacagcatttcctctcagctctgggttggaaaaagccgcagcagctgatgggcccgggaacccgaggccccgccccctaggtggtcctagcctttgcgcgtgcgcggcgtgtctgcgtgggcgcatgcgcataacggccgccatcttaacagcgcgttcccgttggcgtctgaggaacagcatctctgccttcctgttcacggtgaccttcgcttggtgtcctcctggcctcagcaacctgacaattctgtcgtgtcccgatcatctttctcaagatgttttctgtcttcatgagtcaaaatttgaagaggaaaggatggtggctgggtggttgacaaattactctcaggactcagtgacctttgaggatgtggctgtggacttcacccaggaggagtggactttgctggatcaaactcagagaaacttatacagagatgtgatgctggagaactataagaatctagttgcagtagattgggagagtcatattaataccaaatggtcagcacctcagcagaattttttgcaggggaaaacatccagtgtggtggaaatggtaagattcagaaggtataatttattgtcttccatgttagaggaagattggaaattccttaaaatggaaaagcagcacaataaccttgagacatttgagactagtgtttttcacccaaaaataatctgtctcttggagagactatggatcatgagtttgacaaacactctaaacatccctcagaatatatttgtttacatatttccttcaacattcccatatgtatctcagatgtttttgataaataattcactcttgggccgttatcagctaagctctatttagaagccctctgaaagtaaagaatataacagaacttcctgcagtcactttgttccacttgaaaacactcaggtctgaaccatgccttgcaatgaaaatggcaggaacaaacagtttcaattatactaacttattttccatgtgtaacagaattcagagtaaaagggagaatctcaatgaaataaatttggaaaacttctatgaaccatcattaattttcaccaacaggagagaaaccattttggagaggaactgtttgactttaaccaatgtgaaaaagccttgagtgaacactcatgccttaagactcacaggagaacttactttagaaagaaaacctgtgagtgtaatcaatgtgaaaaagccttcagaaaaccctctatctttactttacacaagaaaactgatatcggagaggaacttcctaactgtaatcaatgtgaaacagccttcagccaacatctacatcttgtttgcaagaaaactagccaaaatctacatcttgtttgcaagaaaactcacactcaagagaaaccatataaatgcagtgactgtgaaaaaggcttaccttcctcctcacacctcagagaatgtgtaagaatttatggtggagagagaccatatactcataaggagtatgtcgaaaccttttctcattctacagccctttttgtacacatgcaaactcaagatggagaaaaattctatgaatgtaaagcatgtgggaaacccttcactgagtcgtcatatcttactcaacatttaagaactcatagtagagtgttacctatagaacataagaaatttggcaaagcctttgctttttccccagatcttgctaaacatataagacttagaactagaggaaaacactatgtttgtaatgaatgtggcaaagaatttacttgtttctcaaaactcaacattcacataagggttcacactggagaaaaaccgtatgagtgcaacaaatgtgggaaagccttcactgattcatcaggtcttataaaacacaggcgaactcacactggagaaaagccttatgaatgtaaggaatgtgggaaagcttttgctaactcttcacatcttactgtacatatgagaactcacactggtgagaagccttatcaatgtaaggaatgtggaaaagcctttattaattcctcttcctttaaaagtcacatgcagactcatcctggtgtaaaaccctatgactgtcaacagtgtgggaaagccttcattcgatcctcatttcttattcgacatttgagaagtcacagtgcagaaaggccttttgaatgtgaggaatgtgggaaagcctttagatactcctcgcaccttagtcaacataaaagaatacatacaggggagaggccatataaatgtcaaaagtgtgggcaagccttcagtatctcatcaggccttacagtacacatgagaactcacactggtgaacggccctttgaatgtcaggaatgtgggaaagcctttactcggtccacatatcttattcgacatctaagaagtcatagtgtggagaaaccatataaggaatgtgggcaaacctttagtaattcctcatgccttactgaatgtgtgtgaattggggctgatacttggaaagaatgtggtaaagccactacttcctcacacttactgaacatgtactcattcatagtggcaatgtacacagtcataaggaatgtgggaagccttccttggtgtctcagatcttaacaattccaatagaagagaagacatatgaatgtaaggaatgtgggaaaatcttggctccttccataggccttactattcatgtgtctgtgcatcctaggaaacaaactgaacgtaggaaacctgtcgatgcttacatcttactgagtctgtttgaactcatgctggagagaaatgctatgaatgtgaggaaggtggaaaagctttcattattttcctcgggccttactgagcttgtgagcacattggatataaatgcacgtcctctggctgtaaggaatgtgttgaaacctttcactctgccttataccttaatattcagctgtgatctcacaagtgtgaaaaatcttatgaatgtaaaatgtgtggagattcttctttgtttttagcttccactttgggaacatgtcaaagcacacattgagaagtcccatgagtgaaagagatgttggaaagcccttgaacttggtcgttaggaaacatccacactgaagaggaacctgactgtatggaaggtcaaaaaggctgtattaatttacatgcaaaaagtcacactagaggaatgccatatcagaatgcttttggtaaatatacatgttttaaagaggttatatatcattaataaaaatatctagctggtctg

SEQ ID NO: 10643 - protein, 239 aa, Homo sapiens
MRITAAILTARSRWRLRNSISAFLFTVTFAWCPPGLSNLTILSCPDHLSQDVFCLHESKFEEERMVAGWLTNYSQDSVTFEDVAVDFTQEEWTLLDQTQRNLYRDVMLENYKNLVAVDWESHINTKWSAPQQNFLQGKTSSVVEMVRFRRYNLLSSMLEEDWKFLKMEKQHNNLETFETSVFHPKIICLLERLWIMSLTNTLNIPQNIFVYIFPSTFPYVSQMFLINNSLLGRYQLSSI

SEQ ID NO: 10644 - DNA, 2905 bp, Homo sapiens
aaccaatcagactgaacgcgggctaccgcttcatttacaggaggtgagcatgaagtggccaatgggaaaattctaggaggtattgggactcatgaaggttctgtttcggagcccttgagctgccgcttggccagttcccacactgtggagtatgctttcgttttcaacaaatcccagctcttgttcttttgttgcttcattctttctttgctttgctgggcgttttgtctaattctttgttcaaaacgccagtaacctggacagcttgcagtcaagaccccctaccggtgacacttgcgctcttcggggaggtaaacagcatttcctctcagctctgggttggaaaaagccgcagcagctgatgggcccgggaacccgaggccccgccccctaggtggtcctagcctttgcgcgtgcgcggcgtgtctgcgtgggcgcatgcgcataacggccgccatcttaacagcgcgttcccgttggcgtctgaggaacagcatctctgccttcctgttcacggtgaccttcgcttggtgtcctcctggcctcagcaacctgacaattctgtcgtgtcccggcaggagtacagtggtgagatcacggttcactgcagcattgacctccctaggctcaggtgttgctcccacctcagtcttctgaatagcttggagtatagattgggagagtcatattaataccaaatggtcagcacctcagcagaattttttgcaggggaaaacatccagtgtggtggaaatggagagaaaccattttggagaggaactgtttgactttaaccaatgtgaaaaagccttgagtgaacactcatgccttaagactcacaggagaacttactttagaaagaaaacctgtgagtgtaatcaatgtgaaaaagccttcagaaaaccctctatctttactttacacaagaaaactgatatcggagaggaacttcctaactgtaatcaatgtgaaacagccttcagccaacatctacatcttgtttgcaagaaaactagccaaaatctacatcttgtttgcaagaaaactcacactcaagagaaaccatataaatgcagtgactgtgaaaaaggcttaccttcctcctcacacctcagagaatgtgtaagaatttatggtggagagagaccatatactcataaggagtatgtcgaaaccttttctcattctacagccctttttgtacacatgcaaactcaagatggagaaaaattctatgaatgtaaagcatgtgggaaacccttcactgagtcgtcatatcttactcaacatttaagaactcatagtagagtgttacctatagaacataagaaatttggcaaagcctttgctttttccccagatcttgctaaacatataagacttagaactagaggaaaacactatgtttgtaatgaatgtggcaaagaatttacttgtttctcaaaactcaacattcacataagggttcacactggagaaaaaccgtatgagtgcaacaaatgtgggaaagccttcactgattcatcaggtcttataaaacacaggcgaactcacactggagaaaagccttatgaatgtaaggaatgtgggaaagcttttgctaactcttcacatcttactgtacatatgagaactcacactggtgagaagccttatcaatgtaaggaatgtggaaaagcctttattaattcctcttcctttaaaagtcacatgcagactcatcctggtgtaaaaccctatgactgtcaacagtgtgggaaagccttcattcgatcctcatttcttattcgacatttgagaagtcacagtgcagaaaggccttttgaatgtgaggaatgtgggaaagcctttagatactcctcgcaccttagtcaacataaaagaatacatacaggggagaggccatataaatgtcaaaagtgtgggcaagccttcagtatctcatcaggccttacagtacacatgagaactcacactggtgaacggccctttgaatgtcaggaatgtgggaaagcctttactcggtccacatatcttattcgacatctaagaagtcatagtgtggagaaaccatataaggaatgtgggcaaacctttagtaattcctcatgccttactgaatgtgtgtgaattggggctgatacttggaaagaatgtggtaaagccactacttcctcacacttactgaacatgtactcattcatagtggcaatgtacacagtcataaggaatgtgggaagccttccttggtgtctcagatcttaacaattccaatagaagagaagacatatgaatgtaaggaatgtgggaaaatcttggctccttccataggccttactattcatgtgtctgtgcatcctaggaaacaaactgaacgtaggaaacctgtcgatgcttacatcttactgagtctgtttgaactcatgctggagagaaatgctatgaatgtgaggaaggtggaaaagctttcattattttcctcgggccttactgagcttgtgagcacattggatataaatgcacgtcctctggctgtaaggaatgtgttgaaacctttcactctgccttataccttaatattcagctgtgatctcacaagtgtgaaaaatcttatgaatgtaaaatgtgtggagattcttctttgtttttagcttccactttgggaacatgtcaaagcacacattgagaagtcccatgagtgaaagagatgttggaaagcccttgaacttggtcgttaggaaacatccacactgaagaggaacctgactgtatggaaggtcaaaaaggctgtattaatttacatgcaaaaagtcacactagaggaatgccatatcagaatgcttttggtaaatatacatgttttaaagaggttatatatcattaataaaaatatctagctggtctg

SEQ ID NO: 10645 - protein, 458 aa, Homo sapiens; identical to SEQ ID NO: 10633

SEQ ID NO: 10646 - DNA, 3904 bp, Homo sapiens
aaccaatcagactgaacgcgggctaccgcttcatttacaggaggtgagcatgaagtggccaatgggaaaattctaggaggtattgggactcatgaaggttctgtttcggagcccttgagctgccgcttggccagttcccacactgtggagtatgctttcgttttcaacaaatcccagctcttgttcttttgttgcttcattctttctttgctttgctgggcgttttgtctaattctttgttcaaaacgccagtaacctggacagcttgcagtcaagaccccctaccggtgacacttgcgctcttcggggaggtaaacagcatttcctctcagctctgggttggaaaaagccgcagcagctgatgggcccgggaacccgaggccccgccccctaggtggtcctagcctttgcgcgtgcgcggcgtgtctgcgtgggcgcatgcgcataacggccgccatcttaacagcgcgttcccgttggcgtctgaggaacagcatctctgccttcctgttcacggtgaccttcgcttggtgtcctcctggcctcagcaacctgacaattctgtcgtgtcccgatcatctttctcaagatgttttctgtcttcatgagtcaaaatttgaagaggaaaggatggtggctgggtggttgacaaattactctcaggactcagtgacctttgaggatgtggctgtggacttcacccaggaggagtggactttgctggatcaaactcagagaaacttatacagagatgtgatgctggagaactataagaatctagttgcagtagattgggagagtcatattaataccaaatggtcagcacctcagcagaattttttgcaggggaaaacatccagtgtggtggaaatgaattcagagtaaaagggagaatctcaatgaaataaatttggaaaacttctatgaaccatcattaattttcaccaacaggagagaaaccattttggagaggaactgtttgactttaaccaatgtgaaaaagccttgagtgaacactcatgccttaagactcacaggagaacttactttagaaagaaaacctgtgagtgtaatcaatgtgaaaaagccttcagaaaaccctctatctttactttacacaagaaaactgatatcggagaggaacttcctaactgtaatcaatgtgaaacagccttcagccaacatctacatcttgtttgcaagaaaactagccaaaatctacatcttgtttgcaagaaaactcacactcaagagaaaccatataaatgcagtgactgtgaaaaaggcttaccttcctcctcacacctcagagaatgtgtaagaatttatggtggagagagaccatatactcataaggagtatgtcgaaaccttttctcattctacagccctttttgtacacatgcaaactcaagatggagaaaaattctatgaatgtaaagcatgtgggaaacccttcactgagtcgtcatatcttactcaacatttaagaactcatagtagagtgttacctatagaacataagaaatttggcaaagcctttgctttttccccagatcttgctaaacatataagacttagaactagaggaaaacactatgtttgtaatgaatgtggcaaagaatttacttgtttctcaaaactcaacattcacataagggttcacactggagaaaaaccgtatgagtgcaacaaatgtgggaaagccttcactgattcatcaggtcttataaaacacaggcgaactcacactggagaaaagccttatgaatgtaaggaatgtgggaaagcttttgctaactcttcacatcttactgtacatatgagaactcacactggtgagaagccttatcaatgtaaggaatgtggaaaagcctttattaattcctcttcctttaaaagtcacatgcagactcatcctggtgtaaaaccctatgactgtcaacagtgtgggaaagccttcattcgatcctcatttcttattcgacatttgagaagtcacagtgcagaaaggccttttgaatgtgaggaatgtgggaaagcctttagatactcctcgcaccttagtcaacataaaagaatacatacaggggagaggccatataaatgtcaaaagtgtgggcaagccttcagtatctcatcaggccttacagtacacatgagaactcacactggtgaacggccctttgaatgtcaggaatgtgggaaagcctttactcggtccacatatcttattcgacatctaagaagtcatagtgtggagaaaccatataaggaatgtgggcaaacctttagtaattcctcatgccttactgaatgtgtgtgaattggggctgatacttggaaagaatgtggtaaagccactacttcctcacacttactgaacatgtactcattcatagtggcaatgtacacagtcataaggaatgtgggaagccttccttggtgtctcagatcttaacaattccaatagaagagaagacatatgaatgtaaggaatgtgggaaaatcttggctccttccataggccttactattcatgtgtctgtgcatcctaggaaacaaactgaacgtaggaaacctgtcgatgcttacatcttactgagtctgtttgaactcatgctggagagaaatgctatgaatgtgaggaaggtggaaaagctttcattattttcctcgggccttactgagcttgtgagcacattggatataaatgcacgtcctctggctgtaaggaatgtgttgaaacctttcactctgccttataccttaatattcagctgtgatctcacaagtgtgaaaaatcttatgaatgtaaaatgtgtggagattcttctttgtttttagcttccactttgggaacatgtcaaagcacacattgagaagtcccatgagtgaaagagatgttggaaagcccttgaacttggtcgttaggaaacatccacactgaagaggaacctgactgtatggaaggtcaaaaaggctgtattaatttacatgcaaaaagtcacactagaggaatgccatatcagaatgcttttggtaaatatacatgttttaaagaggttatatatcattaataaaaatatctagctggtctgaagatcctgagttatctcaattgttcacggttacagatggaactctttattattgaggagttccactctttcccccatttgtcactactacacttccctagtctttaaaacaattttaggctgggtgcagtggctcattcctgtaatcccagcactttgaaaggccgaagcgagtggatcatttgaggtcaggagttcgagaccagcctggccaacgtggtgaaaccccatctctactaaaaatacaaaaattagccaggcatggtggtacgtgcctgtaatcccagctactcgagaggttgaggcagaattgcttgaacccgggaggcggaagctgcagtgagctcagatcacgccactgcactccagcctggatgatatggtaagaccatctcaaaaaaagaaaaaaaaattaaaatatcctcagagggttttttaatgaaaaacttagttatagggaattgaggaacatttaggggtacaaattttcacttattgcacacaagaaaattggtactggccaggcatgctggctcacaccttaattccagcaatttgggaggccaaggcagaaggatcacttgagcccaggagttcaagaccagcctgggcaatatagtgaaacctcatcttgacaaagaataaataagattaactgggtgtactggtttgtgcctatagtcccagctatttaggaggctggggcaagaggattgcttgagcctggtcagggaggcagaggttgcagtgagccctgatcgtgccactacactctagcctgggcaacaggatgagaccctgtct

SEQ ID NO: 10647 - protein, 148 aa, Homo sapiens; identical to SEQ ID NO: 10627

SEQ ID NO: 10648 - DNA, 3709 bp, Homo sapiens
aaccaatcagactgaacgcgggctaccgcttcatttacaggaggtgagcatgaagtggccaatgggaaaattctaggaggtattgggactcatgaaggttctgtttcggagcccttgagctgccgcttggccagttcccacactgtggagtatgctttcgttttcaacaaatcccagctcttgttcttttgttgcttcattctttctttgctttgctgggcgttttgtctaattctttgttcaaaacgccagtaacctggacagcttgcagtcaagaccccctaccggtgacacttgcgctcttcggggaggtaaacagcatttcctctcagctctgggttggaaaaagccgcagcagctgatgggcccgggaacccgaggccccgccccctaggtggtcctagcctttgcgcgtgcgcggcgtgtctgcgtgggcgcatgcgcataacggccgccatcttaacagcgcgttcccgttggcgtctgaggaacagcatctctgccttcctgttcacggtgaccttcgcttggtgtcctcctggcctcagcaacctgacaattctgtcgtgtcccggcaggagtacagtggtgagatcacggttcactgcagcattgacctccctaggctcaggtgttgctcccacctcagtcttctgaatagcttggagtatagattgggagagtcatattaataccaaatggtcagcacctcagcagaattttttgcaggggaaaacatccagtgtggtggaaatggagagaaaccattttggagaggaactgtttgactttaaccaatgtgaaaaagccttgagtgaacactcatgccttaagactcacaggagaacttactttagaaagaaaacctgtgagtgtaatcaatgtgaaaaagccttcagaaaaccctctatctttactttacacaagaaaactgatatcggagaggaacttcctaactgtaatcaatgtgaaacagccttcagccaacatctacatcttgtttgcaagaaaactagccaaaatctacatcttgtttgcaagaaaactcacactcaagagaaaccatataaatgcagtgactgtgaaaaaggcttaccttcctcctcacacctcagagaatgtgtaagaatttatggtggagagagaccatatactcataaggagtatgtcgaaaccttttctcattctacagccctttttgtacacatgcaaactcaagatggagaaaaattctatgaatgtaaagcatgtgggaaacccttcactgagtcgtcatatcttactcaacatttaagaactcatagtagagtgttacctatagaacataagaaatttggcaaagcctttgctttttccccagatcttgctaaacatataagacttagaactagaggaaaacactatgtttgtaatgaatgtggcaaagaatttacttgtttctcaaaactcaacattcacataagggttcacactggagaaaaaccgtatgagtgcaacaaatgtgggaaagccttcactgattcatcaggtcttataaaacacaggcgaactcacactggagaaaagccttatgaatgtaaggaatgtgggaaagcttttgctaactcttcacatcttactgtacatatgagaactcacactggtgagaagccttatcaatgtaaggaatgtggaaaagcctttattaattcctcttcctttaaaagtcacatgcagactcatcctggtgtaaaaccctatgactgtcaacagtgtgggaaagccttcattcgatcctcatttcttattcgacatttgagaagtcacagtgcagaaaggccttttgaatgtgaggaatgtgggaaagcctttagatactcctcgcaccttagtcaacataaaagaatacatacaggggagaggccatataaatgtcaaaagtgtgggcaagccttcagtatctcatcaggccttacagtacacatgagaactcacactggtgaacggccctttgaatgtcaggaatgtgggaaagcctttactcggtccacatatcttattcgacatctaagaagtcatagtgtggagaaaccatataaggaatgtgggcaaacctttagtaattcctcatgccttactgaatgtgtgtgaattggggctgatacttggaaagaatgtggtaaagccactacttcctcacacttactgaacatgtactcattcatagtggcaatgtacacagtcataaggaatgtgggaagccttccttggtgtctcagatcttaacaattccaatagaagagaagacatatgaatgtaaggaatgtgggaaaatcttggctccttccataggccttactattcatgtgtctgtgcatcctaggaaacaaactgaacgtaggaaacctgtcgatgcttacatcttactgagtctgtttgaactcatgctggagagaaatgctatgaatgtgaggaaggtggaaaagctttcattattttcctcgggccttactgagcttgtgagcacattggatataaatgcacgtcctctggctgtaaggaatgtgttgaaacctttcactctgccttataccttaatattcagctgtgatctcacaagtgtgaaaaatcttatgaatgtaaaatgtgtggagattcttctttgtttttagcttccactttgggaacatgtcaaagcacacattgagaagtcccatgagtgaaagagatgttggaaagcccttgaacttggtcgttaggaaacatccacactgaagaggaacctgactgtatggaaggtcaaaaaggctgtattaatttacatgcaaaaagtcacactagaggaatgccatatcagaatgcttttggtaaatatacatgttttaaagaggttatatatcattaataaaaatatctagctggtctgaagatcctgagttatctcaattgttcacggttacagatggaactctttattattgaggagttccactctttcccccatttgtcactactacacttccctagtctttaaaacaattttaggctgggtgcagtggctcattcctgtaatcccagcactttgaaaggccgaagcgagtggatcatttgaggtcaggagttcgagaccagcctggccaacgtggtgaaaccccatctctactaaaaatacaaaaattagccaggcatggtggtacgtgcctgtaatcccagctactcgagaggttgaggcagaattgcttgaacccgggaggcggaagctgcagtgagctcagatcacgccactgcactccagcctggatgatatggtaagaccatctcaaaaaaagaaaaaaaaattaaaatatcctcagagggttttttaatgaaaaacttagttatagggaattgaggaacatttaggggtacaaattttcacttattgcacacaagaaaattggtactggccaggcatgctggctcacaccttaattccagcaatttgggaggccaaggcagaaggatcacttgagcccaggagttcaagaccagcctgggcaatatagtgaaacctcatcttgacaaagaataaataagattaactgggtgtactggtttgtgcctatagtcccagctatttaggaggctggggcaagaggattgcttgagcctggtcagggaggcagaggttgcagtgagccctgatcgtgccactacactctagcctgggcaacaggatgagaccctgtct

SEQ ID NO: 10649 - protein, 458 aa, Homo sapiens; identical to SEQ ID NO: 10633

SEQ ID NO: 10650 - DNA, 3889 bp, Homo sapiens
aaccaatcagactgaacgcgggctaccgcttcatttacaggaggtgagcatgaagtggccaatgggaaaattctaggaggtattgggactcatgaaggttctgtttcggagcccttgagctgccgcttggccagttcccacactgtggagtatgctttcgttttcaacaaatcccagctcttgttcttttgttgcttcattctttctttgctttgctgggcgttttgtctaattctttgttcaaaacgccagtaacctggacagcttgcagtcaagaccccctaccggtgacacttgcgctcttcggggaggtaaacagcatttcctctcagctctgggttggaaaaagccgcagcagctgatgggcccgggaacccgaggccccgccccctaggtggtcctagcctttgcgcgtgcgcggcgtgtctgcgtgggcgcatgcgcataacggccgccatcttaacagcgcgttcccgttggcgtctgaggaacagcatctctgccttcctgttcacggtgaccttcgcttggtgtcctcctggcctcagcaacctgacaattctgtcgtgtcccgagagatggctaatgaatggcgcttgatgacagatgagtaatgcctgttgctgaaagattgacgatcatctttctcaagatgttttctgtcttcatgagtcaaaatttgaagaggaaaggatggtggctgggtggttgacaaattactctcaggactcagtgacctttgaggatgtggctgtggacttcacccaggaggagtggactttgctggatcaaactcagagaaacttatacagagatgtgatgctggagaactataagaatctagttgcagtagattgggagagtcatattaataccaaatggtcagcacctcagcagaattttttgcaggggaaaacatccagtgtggtggaaatggagagaaaccattttggagaggaactgtttgactttaaccaatgtgaaaaagccttgagtgaacactcatgccttaagactcacaggagaacttactttagaaagaaaacctgtgagtgtaatcaatgtgaaaaagccttcagaaaaccctctatctttactttacacaagaaaactgatatcggagaggaacttcctaactgtaatcaatgtgaaacagccttcagccaacatctacatcttgtttgcaagaaaactagccaaaatctacatcttgtttgcaagaaaactcacactcaagagaaaccatataaatgcagtgactgtgaaaaaggcttaccttcctcctcacacctcagagaatgtgtaagaatttatggtggagagagaccatatactcataaggagtatgtcgaaaccttttctcattctacagccctttttgtacacatgcaaactcaagatggagaaaaattctatgaatgtaaagcatgtgggaaacccttcactgagtcgtcatatcttactcaacatttaagaactcatagtagagtgttacctatagaacataagaaatttggcaaagcctttgctttttccccagatcttgctaaacatataagacttagaactagaggaaaacactatgtttgtaatgaatgtggcaaagaatttacttgtttctcaaaactcaacattcacataagggttcacactggagaaaaaccgtatgagtgcaacaaatgtgggaaagccttcactgattcatcaggtcttataaaacacaggcgaactcacactggagaaaagccttatgaatgtaaggaatgtgggaaagcttttgctaactcttcacatcttactgtacatatgagaactcacactggtgagaagccttatcaatgtaaggaatgtggaaaagcctttattaattcctcttcctttaaaagtcacatgcagactcatcctggtgtaaaaccctatgactgtcaacagtgtgggaaagccttcattcgatcctcatttcttattcgacatttgagaagtcacagtgcagaaaggccttttgaatgtgaggaatgtgggaaagcctttagatactcctcgcaccttagtcaacataaaagaatacatacaggggagaggccatataaatgtcaaaagtgtgggcaagccttcagtatctcatcaggccttacagtacacatgagaactcacactggtgaacggccctttgaatgtcaggaatgtgggaaagcctttactcggtccacatatcttattcgacatctaagaagtcatagtgtggagaaaccatataaggaatgtgggcaaacctttagtaattcctcatgccttactgaatgtgtgtgaattggggctgatacttggaaagaatgtggtaaagccactacttcctcacacttactgaacatgtactcattcatagtggcaatgtacacagtcataaggaatgtgggaagccttccttggtgtctcagatcttaacaattccaatagaagagaagacatatgaatgtaaggaatgtgggaaaatcttggctccttccataggccttactattcatgtgtctgtgcatcctaggaaacaaactgaacgtaggaaacctgtcgatgcttacatcttactgagtctgtttgaactcatgctggagagaaatgctatgaatgtgaggaaggtggaaaagctttcattattttcctcgggccttactgagcttgtgagcacattggatataaatgcacgtcctctggctgtaaggaatgtgttgaaacctttcactctgccttataccttaatattcagctgtgatctcacaagtgtgaaaaatcttatgaatgtaaaatgtgtggagattcttctttgtttttagcttccactttgggaacatgtcaaagcacacattgagaagtcccatgagtgaaagagatgttggaaagcccttgaacttggtcgttaggaaacatccacactgaagaggaacctgactgtatggaaggtcaaaaaggctgtattaatttacatgcaaaaagtcacactagaggaatgccatatcagaatgcttttggtaaatatacatgttttaaagaggttatatatcattaataaaaatatctagctggtctgaagatcctgagttatctcaattgttcacggttacagatggaactctttattattgaggagttccactctttcccccatttgtcactactacacttccctagtctttaaaacaattttaggctgggtgcagtggctcattcctgtaatcccagcactttgaaaggccgaagcgagtggatcatttgaggtcaggagttcgagaccagcctggccaacgtggtgaaaccccatctctactaaaaatacaaaaattagccaggcatggtggtacgtgcctgtaatcccagctactcgagaggttgaggcagaattgcttgaacccgggaggcggaagctgcagtgagctcagatcacgccactgcactccagcctggatgatatggtaagaccatctcaaaaaaagaaaaaaaaattaaaatatcctcagagggttttttaatgaaaaacttagttatagggaattgaggaacatttaggggtacaaattttcacttattgcacacaagaaaattggtactggccaggcatgctggctcacaccttaattccagcaatttgggaggccaaggcagaaggatcacttgagcccaggagttcaagaccagcctgggcaatatagtgaaacctcatcttgacaaagaataaataagattaactgggtgtactggtttgtgcctatagtcccagctatttaggaggctggggcaagaggattgcttgagcctggtcagggaggcagaggttgcagtgagccctgatcgtgccactacactctagcctgggcaacaggatgagaccctgtct

SEQ ID NO: 10651 - protein, 538 aa, Homo sapiens; identical to SEQ ID NO: 1791

SEQ ID NO: 10652 - DNA, 3967 bp, Homo sapiens
aaccaatcagactgaacgcgggctaccgcttcatttacaggaggtgagcatgaagtggccaatgggaaaattctaggaggtattgggactcatgaaggttctgtttcggagcccttgagctgccgcttggccagttcccacactgtggagtatgctttcgttttcaacaaatcccagctcttgttcttttgttgcttcattctttctttgctttgctgggcgttttgtctaattctttgttcaaaacgccagtaacctggacagcttgcagtcaagaccccctaccggtgacacttgcgctcttcggggaggtaaacagcatttcctctcagctctgggttggaaaaagccgcagcagctgatgggcccgggaacccgaggccccgccccctaggtggtcctagcctttgcgcgtgcgcggcgtgtctgcgtgggcgcatgcgcataacggccgccatcttaacagcgcgttcccgttggcgtctgaggaacagcatctctgccttcctgttcacggtgaccttcgcttggtgtcctcctggcctcagcaacctgacaattctgtcgtgtcccgagagatggctaatgaatggcgcttgatgacagatgagtaatgcctgttgctgaaagattgacgatcatctttctcaagatgttttctgtcttcatgagtcaaaatttgaagaggaaaggatggtggctgggtggttgacaaattactctcaggactcagtgacctttgaggatgtggctgtggacttcacccaggaggagtggactttgctggatcaaactcagagaaacttatacagagatgtgatgctggagaactataagaatctagttgcagtagattgggagagtcatattaataccaaatggtcagcacctcagcagaattttttgcaggggaaaacatccagtgtggtggaaatgaattcagagtaaaagggagaatctcaatgaaataaatttggaaaacttctatgaaccatcattaattttcaccaacaggagagaaaccattttggagaggaactgtttgactttaaccaatgtgaaaaagccttgagtgaacactcatgccttaagactcacaggagaacttactttagaaagaaaacctgtgagtgtaatcaatgtgaaaaagccttcagaaaaccctctatctttactttacacaagaaaactgatatcggagaggaacttcctaactgtaatcaatgtgaaacagccttcagccaacatctacatcttgtttgcaagaaaactagccaaaatctacatcttgtttgcaagaaaactcacactcaagagaaaccatataaatgcagtgactgtgaaaaaggcttaccttcctcctcacacctcagagaatgtgtaagaatttatggtggagagagaccatatactcataaggagtatgtcgaaaccttttctcattctacagccctttttgtacacatgcaaactcaagatggagaaaaattctatgaatgtaaagcatgtgggaaacccttcactgagtcgtcatatcttactcaacatttaagaactcatagtagagtgttacctatagaacataagaaatttggcaaagcctttgctttttccccagatcttgctaaacatataagacttagaactagaggaaaacactatgtttgtaatgaatgtggcaaagaatttacttgtttctcaaaactcaacattcacataagggttcacactggagaaaaaccgtatgagtgcaacaaatgtgggaaagccttcactgattcatcaggtcttataaaacacaggcgaactcacactggagaaaagccttatgaatgtaaggaatgtgggaaagcttttgctaactcttcacatcttactgtacatatgagaactcacactggtgagaagccttatcaatgtaaggaatgtggaaaagcctttattaattcctcttcctttaaaagtcacatgcagactcatcctggtgtaaaaccctatgactgtcaacagtgtgggaaagccttcattcgatcctcatttcttattcgacatttgagaagtcacagtgcagaaaggccttttgaatgtgaggaatgtgggaaagcctttagatactcctcgcaccttagtcaacataaaagaatacatacaggggagaggccatataaatgtcaaaagtgtgggcaagccttcagtatctcatcaggccttacagtacacatgagaactcacactggtgaacggccctttgaatgtcaggaatgtgggaaagcctttactcggtccacatatcttattcgacatctaagaagtcatagtgtggagaaaccatataaggaatgtgggcaaacctttagtaattcctcatgccttactgaatgtgtgtgaattggggctgatacttggaaagaatgtggtaaagccactacttcctcacacttactgaacatgtactcattcatagtggcaatgtacacagtcataaggaatgtgggaagccttccttggtgtctcagatcttaacaattccaatagaagagaagacatatgaatgtaaggaatgtgggaaaatcttggctccttccataggccttactattcatgtgtctgtgcatcctaggaaacaaactgaacgtaggaaacctgtcgatgcttacatcttactgagtctgtttgaactcatgctggagagaaatgctatgaatgtgaggaaggtggaaaagctttcattattttcctcgggccttactgagcttgtgagcacattggatataaatgcacgtcctctggctgtaaggaatgtgttgaaacctttcactctgccttataccttaatattcagctgtgatctcacaagtgtgaaaaatcttatgaatgtaaaatgtgtggagattcttctttgtttttagcttccactttgggaacatgtcaaagcacacattgagaagtcccatgagtgaaagagatgttggaaagcccttgaacttggtcgttaggaaacatccacactgaagaggaacctgactgtatggaaggtcaaaaaggctgtattaatttacatgcaaaaagtcacactagaggaatgccatatcagaatgcttttggtaaatatacatgttttaaagaggttatatatcattaataaaaatatctagctggtctgaagatcctgagttatctcaattgttcacggttacagatggaactctttattattgaggagttccactctttcccccatttgtcactactacacttccctagtctttaaaacaattttaggctgggtgcagtggctcattcctgtaatcccagcactttgaaaggccgaagcgagtggatcatttgaggtcaggagttcgagaccagcctggccaacgtggtgaaaccccatctctactaaaaatacaaaaattagccaggcatggtggtacgtgcctgtaatcccagctactcgagaggttgaggcagaattgcttgaacccgggaggcggaagctgcagtgagctcagatcacgccactgcactccagcctggatgatatggtaagaccatctcaaaaaaagaaaaaaaaattaaaatatcctcagagggttttttaatgaaaaacttagttatagggaattgaggaacatttaggggtacaaattttcacttattgcacacaagaaaattggtactggccaggcatgctggctcacaccttaattccagcaatttgggaggccaaggcagaaggatcacttgagcccaggagttcaagaccagcctgggcaatatagtgaaacctcatcttgacaaagaataaataagattaactgggtgtactggtttgtgcctatagtcccagctatttaggaggctggggcaagaggattgcttgagcctggtcagggaggcagaggttgcagtgagccctgatcgtgccactacactctagcctgggcaacaggatgagaccctgtct

SEQ ID NO: 10653 - protein, 84 aa, Homo sapiens; identical to SEQ ID NO: 10637

SEQ ID NO: 10654 - DNA, 4399 bp, Homo sapiens
aaccaatcagactgaacgcgggctaccgcttcatttacaggaggtgagcatgaagtggccaatgggaaaattctaggaggtattgggactcatgaaggttctgtttcggagcccttgagctgccgcttggccagttcccacactgtggagtatgctttcgttttcaacaaatcccagctcttgttcttttgttgcttcattctttctttgctttgctgggcgttttgtctaattctttgttcaaaacgccagtaacctggacagcttgcagtcaagaccccctaccggtgacacttgcgctcttcggggaggtaaacagcatttcctctcagctctgggttggaaaaagccgcagcagctgatgggcccgggaacccgaggccccgccccctaggtggtcctagcctttgcgcgtgcgcggcgtgtctgcgtgggcgcatgcgcataacggccgccatcttaacagcgcgttcccgttggcgtctgaggaacagcatctctgccttcctgttcacggtgaccttcgcttggtgtcctcctggcctcagcaacctgacaattctgtcgtgtcccgagagatggctaatgaatggcgcttgatgacagatgagtaatgcctgttgctgaaagattgacgatcatctttctcaagatgttttctgtcttcatgagtcaaaatttgaagaggaaaggatggtggctgggtggttgacaaattactctcaggactcagtgacctttgaggatgtggctgtggacttcacccaggaggagtggactttgctggatcaaactcagagaaacttatacagagatgtgatgctggagaactataagaatctagttgcagtagattgggagagtcatattaataccaaatggtcagcacctcagcagaattttttgcaggggaaaacatccagtgtggtggaaatggtaagattcagaaggtataatttattgtcttccatgttagaggaagattggaaattccttaaaatggaaaagcagcacaataaccttgagacatttgagactagtgtttttcacccaaaaataatctgtctcttggagagactatggatcatgagtttgacaaacactctaaacatccctcagaatatatttgtttacatatttccttcaacattcccatatgtatctcagatgtttttgataaataattcactcttgggccgttatcagctaagctctatttagaagccctctgaaagtaaagaatataacagaacttcctgcagtcactttgttccacttgaaaacactcaggtctgaaccatgccttgcaatgaaaatggcaggaacaaacagtttcaattatactaacttattttccatgtgtaacagaattcagagtaaaagggagaatctcaatgaaataaatttggaaaacttctatgaaccatcattaattttcaccaacaggagagaaaccattttggagaggaactgtttgactttaaccaatgtgaaaaagccttgagtgaacactcatgccttaagactcacaggagaacttactttagaaagaaaacctgtgagtgtaatcaatgtgaaaaagccttcagaaaaccctctatctttactttacacaagaaaactgatatcggagaggaacttcctaactgtaatcaatgtgaaacagccttcagccaacatctacatcttgtttgcaagaaaactagccaaaatctacatcttgtttgcaagaaaactcacactcaagagaaaccatataaatgcagtgactgtgaaaaaggcttaccttcctcctcacacctcagagaatgtgtaagaatttatggtggagagagaccatatactcataaggagtatgtcgaaaccttttctcattctacagccctttttgtacacatgcaaactcaagatggagaaaaattctatgaatgtaaagcatgtgggaaacccttcactgagtcgtcatatcttactcaacatttaagaactcatagtagagtgttacctatagaacataagaaatttggcaaagcctttgctttttccccagatcttgctaaacatataagacttagaactagaggaaaacactatgtttgtaatgaatgtggcaaagaatttacttgtttctcaaaactcaacattcacataagggttcacactggagaaaaaccgtatgagtgcaacaaatgtgggaaagccttcactgattcatcaggtcttataaaacacaggcgaactcacactggagaaaagccttatgaatgtaaggaatgtgggaaagcttttgctaactcttcacatcttactgtacatatgagaactcacactggtgagaagccttatcaatgtaaggaatgtggaaaagcctttattaattcctcttcctttaaaagtcacatgcagactcatcctggtgtaaaaccctatgactgtcaacagtgtgggaaagccttcattcgatcctcatttcttattcgacatttgagaagtcacagtgcagaaaggccttttgaatgtgaggaatgtgggaaagcctttagatactcctcgcaccttagtcaacataaaagaatacatacaggggagaggccatataaatgtcaaaagtgtgggcaagccttcagtatctcatcaggccttacagtacacatgagaactcacactggtgaacggccctttgaatgtcaggaatgtgggaaagcctttactcggtccacatatcttattcgacatctaagaagtcatagtgtggagaaaccatataaggaatgtgggcaaacctttagtaattcctcatgccttactgaatgtgtgtgaattggggctgatacttggaaagaatgtggtaaagccactacttcctcacacttactgaacatgtactcattcatagtggcaatgtacacagtcataaggaatgtgggaagccttccttggtgtctcagatcttaacaattccaatagaagagaagacatatgaatgtaaggaatgtgggaaaatcttggctccttccataggccttactattcatgtgtctgtgcatcctaggaaacaaactgaacgtaggaaacctgtcgatgcttacatcttactgagtctgtttgaactcatgctggagagaaatgctatgaatgtgaggaaggtggaaaagctttcattattttcctcgggccttactgagcttgtgagcacattggatataaatgcacgtcctctggctgtaaggaatgtgttgaaacctttcactctgccttataccttaatattcagctgtgatctcacaagtgtgaaaaatcttatgaatgtaaaatgtgtggagattcttctttgtttttagcttccactttgggaacatgtcaaagcacacattgagaagtcccatgagtgaaagagatgttggaaagcccttgaacttggtcgttaggaaacatccacactgaagaggaacctgactgtatggaaggtcaaaaaggctgtattaatttacatgcaaaaagtcacactagaggaatgccatatcagaatgcttttggtaaatatacatgttttaaagaggttatatatcattaataaaaatatctagctggtctgaagatcctgagttatctcaattgttcacggttacagatggaactctttattattgaggagttccactctttcccccatttgtcactactacacttccctagtctttaaaacaattttaggctgggtgcagtggctcattcctgtaatcccagcactttgaaaggccgaagcgagtggatcatttgaggtcaggagttcgagaccagcctggccaacgtggtgaaaccccatctctactaaaaatacaaaaattagccaggcatggtggtacgtgcctgtaatcccagctactcgagaggttgaggcagaattgcttgaacccgggaggcggaagctgcagtgagctcagatcacgccactgcactccagcctggatgatatggtaagaccatctcaaaaaaagaaaaaaaaattaaaatatcctcagagggttttttaatgaaaaacttagttatagggaattgaggaacatttaggggtacaaattttcacttattgcacacaagaaaattggtactggccaggcatgctggctcacaccttaattccagcaatttgggaggccaaggcagaaggatcacttgagcccaggagttcaagaccagcctgggcaatatagtgaaacctcatcttgacaaagaataaataagattaactgggtgtactggtttgtgcctatagtcccagctatttaggaggctggggcaagaggattgcttgagcctggtcagggaggcagaggttgcagtgagccctgatcgtgccactacactctagcctgggcaacaggatgagaccctgtct

SEQ ID NO: 10655 - protein, 175 aa, Homo sapiens; identical to SEQ ID NO: 10635

SEQ ID NO: 10656 - DNA, 3787 bp, Homo sapiens
aaccaatcagactgaacgcgggctaccgcttcatttacaggaggtgagcatgaagtggccaatgggaaaattctaggaggtattgggactcatgaaggttctgtttcggagcccttgagctgccgcttggccagttcccacactgtggagtatgctttcgttttcaacaaatcccagctcttgttcttttgttgcttcattctttctttgctttgctgggcgttttgtctaattctttgttcaaaacgccagtaacctggacagcttgcagtcaagaccccctaccggtgacacttgcgctcttcggggaggtaaacagcatttcctctcagctctgggttggaaaaagccgcagcagctgatgggcccgggaacccgaggccccgccccctaggtggtcctagcctttgcgcgtgcgcggcgtgtctgcgtgggcgcatgcgcataacggccgccatcttaacagcgcgttcccgttggcgtctgaggaacagcatctctgccttcctgttcacggtgaccttcgcttggtgtcctcctggcctcagcaacctgacaattctgtcgtgtcccggcaggagtacagtggtgagatcacggttcactgcagcattgacctccctaggctcaggtgttgctcccacctcagtcttctgaatagcttggagtatagattgggagagtcatattaataccaaatggtcagcacctcagcagaattttttgcaggggaaaacatccagtgtggtggaaatgaattcagagtaaaagggagaatctcaatgaaataaatttggaaaacttctatgaaccatcattaattttcaccaacaggagagaaaccattttggagaggaactgtttgactttaaccaatgtgaaaaagccttgagtgaacactcatgccttaagactcacaggagaacttactttagaaagaaaacctgtgagtgtaatcaatgtgaaaaagccttcagaaaaccctctatctttactttacacaagaaaactgatatcggagaggaacttcctaactgtaatcaatgtgaaacagccttcagccaacatctacatcttgtttgcaagaaaactagccaaaatctacatcttgtttgcaagaaaactcacactcaagagaaaccatataaatgcagtgactgtgaaaaaggcttaccttcctcctcacacctcagagaatgtgtaagaatttatggtggagagagaccatatactcataaggagtatgtcgaaaccttttctcattctacagccctttttgtacacatgcaaactcaagatggagaaaaattctatgaatgtaaagcatgtgggaaacccttcactgagtcgtcatatcttactcaacatttaagaactcatagtagagtgttacctatagaacataagaaatttggcaaagcctttgctttttccccagatcttgctaaacatataagacttagaactagaggaaaacactatgtttgtaatgaatgtggcaaagaatttacttgtttctcaaaactcaacattcacataagggttcacactggagaaaaaccgtatgagtgcaacaaatgtgggaaagccttcactgattcatcaggtcttataaaacacaggcgaactcacactggagaaaagccttatgaatgtaaggaatgtgggaaagcttttgctaactcttcacatcttactgtacatatgagaactcacactggtgagaagccttatcaatgtaaggaatgtggaaaagcctttattaattcctcttcctttaaaagtcacatgcagactcatcctggtgtaaaaccctatgactgtcaacagtgtgggaaagccttcattcgatcctcatttcttattcgacatttgagaagtcacagtgcagaaaggccttttgaatgtgaggaatgtgggaaagcctttagatactcctcgcaccttagtcaacataaaagaatacatacaggggagaggccatataaatgtcaaaagtgtgggcaagccttcagtatctcatcaggccttacagtacacatgagaactcacactggtgaacggccctttgaatgtcaggaatgtgggaaagcctttactcggtccacatatcttattcgacatctaagaagtcatagtgtggagaaaccatataaggaatgtgggcaaacctttagtaattcctcatgccttactgaatgtgtgtgaattggggctgatacttggaaagaatgtggtaaagccactacttcctcacacttactgaacatgtactcattcatagtggcaatgtacacagtcataaggaatgtgggaagccttccttggtgtctcagatcttaacaattccaatagaagagaagacatatgaatgtaaggaatgtgggaaaatcttggctccttccataggccttactattcatgtgtctgtgcatcctaggaaacaaactgaacgtaggaaacctgtcgatgcttacatcttactgagtctgtttgaactcatgctggagagaaatgctatgaatgtgaggaaggtggaaaagctttcattattttcctcgggccttactgagcttgtgagcacattggatataaatgcacgtcctctggctgtaaggaatgtgttgaaacctttcactctgccttataccttaatattcagctgtgatctcacaagtgtgaaaaatcttatgaatgtaaaatgtgtggagattcttctttgtttttagcttccactttgggaacatgtcaaagcacacattgagaagtcccatgagtgaaagagatgttggaaagcccttgaacttggtcgttaggaaacatccacactgaagaggaacctgactgtatggaaggtcaaaaaggctgtattaatttacatgcaaaaagtcacactagaggaatgccatatcagaatgcttttggtaaatatacatgttttaaagaggttatatatcattaataaaaatatctagctggtctgaagatcctgagttatctcaattgttcacggttacagatggaactctttattattgaggagttccactctttcccccatttgtcactactacacttccctagtctttaaaacaattttaggctgggtgcagtggctcattcctgtaatcccagcactttgaaaggccgaagcgagtggatcatttgaggtcaggagttcgagaccagcctggccaacgtggtgaaaccccatctctactaaaaatacaaaaattagccaggcatggtggtacgtgcctgtaatcccagctactcgagaggttgaggcagaattgcttgaacccgggaggcggaagctgcagtgagctcagatcacgccactgcactccagcctggatgatatggtaagaccatctcaaaaaaagaaaaaaaaattaaaatatcctcagagggttttttaatgaaaaacttagttatagggaattgaggaacatttaggggtacaaattttcacttattgcacacaagaaaattggtactggccaggcatgctggctcacaccttaattccagcaatttgggaggccaaggcagaaggatcacttgagcccaggagttcaagaccagcctgggcaatatagtgaaacctcatcttgacaaagaataaataagattaactgggtgtactggtttgtgcctatagtcccagctatttaggaggctggggcaagaggattgcttgagcctggtcagggaggcagaggttgcagtgagccctgatcgtgccactacactctagcctgggcaacaggatgagaccctgtct

SEQ ID NO: 10657 - protein, 72 aa, Homo sapiens; identical to SEQ ID NO: 10629

SEQ ID NO: 10658 - DNA, 4003 bp, Homo sapiens
aaccaatcagactgaacgcgggctaccgcttcatttacaggaggtgagcatgaagtggccaatgggaaaattctaggaggtattgggactcatgaaggttctgtttcggagcccttgagctgccgcttggccagttcccacactgtggagtatgctttcgttttcaacaaatcccagctcttgttcttttgttgcttcattctttctttgctttgctgggcgttttgtctaattctttgttcaaaacgccagtaacctggacagcttgcagtcaagaccccctaccggtgacacttgcgctcttcggggaggtaaacagcatttcctctcagctctgggttggaaaaagccgcagcagctgatgggcccgggaacccgaggccccgccccctaggtggtcctagcctttgcgcgtgcgcggcgtgtctgcgtgggcgcatgcgcataacggccgccatcttaacagcgcgttcccgttggcgtctgaggaacagcatctctgccttcctgttcacggtgaccttcgcttggtgtcctcctggcctcagcaacctgacaattctgtcgtgtcccggcaggagtacagtggtgagatcacggttcactgcagcattgacctccctaggctcaggtgttgctcccacctcagtcttctgaatagcttggagtatagatcatctttctcaagatgttttctgtcttcatgagtcaaaatttgaagaggaaaggatggtggctgggtggttgacaaattactctcaggactcagtgacctttgaggatgtggctgtggacttcacccaggaggagtggactttgctggatcaaactcagagaaacttatacagagatgtgatgctggagaactataagaatctagttgcagtagattgggagagtcatattaataccaaatggtcagcacctcagcagaattttttgcaggggaaaacatccagtgtggtggaaatgaattcagagtaaaagggagaatctcaatgaaataaatttggaaaacttctatgaaccatcattaattttcaccaacaggagagaaaccattttggagaggaactgtttgactttaaccaatgtgaaaaagccttgagtgaacactcatgccttaagactcacaggagaacttactttagaaagaaaacctgtgagtgtaatcaatgtgaaaaagccttcagaaaaccctctatctttactttacacaagaaaactgatatcggagaggaacttcctaactgtaatcaatgtgaaacagccttcagccaacatctacatcttgtttgcaagaaaactagccaaaatctacatcttgtttgcaagaaaactcacactcaagagaaaccatataaatgcagtgactgtgaaaaaggcttaccttcctcctcacacctcagagaatgtgtaagaatttatggtggagagagaccatatactcataaggagtatgtcgaaaccttttctcattctacagccctttttgtacacatgcaaactcaagatggagaaaaattctatgaatgtaaagcatgtgggaaacccttcactgagtcgtcatatcttactcaacatttaagaactcatagtagagtgttacctatagaacataagaaatttggcaaagcctttgctttttccccagatcttgctaaacatataagacttagaactagaggaaaacactatgtttgtaatgaatgtggcaaagaatttacttgtttctcaaaactcaacattcacataagggttcacactggagaaaaaccgtatgagtgcaacaaatgtgggaaagccttcactgattcatcaggtcttataaaacacaggcgaactcacactggagaaaagccttatgaatgtaaggaatgtgggaaagcttttgctaactcttcacatcttactgtacatatgagaactcacactggtgagaagccttatcaatgtaaggaatgtggaaaagcctttattaattcctcttcctttaaaagtcacatgcagactcatcctggtgtaaaaccctatgactgtcaacagtgtgggaaagccttcattcgatcctcatttcttattcgacatttgagaagtcacagtgcagaaaggccttttgaatgtgaggaatgtgggaaagcctttagatactcctcgcaccttagtcaacataaaagaatacatacaggggagaggccatataaatgtcaaaagtgtgggcaagccttcagtatctcatcaggccttacagtacacatgagaactcacactggtgaacggccctttgaatgtcaggaatgtgggaaagcctttactcggtccacatatcttattcgacatctaagaagtcatagtgtggagaaaccatataaggaatgtgggcaaacctttagtaattcctcatgccttactgaatgtgtgtgaattggggctgatacttggaaagaatgtggtaaagccactacttcctcacacttactgaacatgtactcattcatagtggcaatgtacacagtcataaggaatgtgggaagccttccttggtgtctcagatcttaacaattccaatagaagagaagacatatgaatgtaaggaatgtgggaaaatcttggctccttccataggccttactattcatgtgtctgtgcatcctaggaaacaaactgaacgtaggaaacctgtcgatgcttacatcttactgagtctgtttgaactcatgctggagagaaatgctatgaatgtgaggaaggtggaaaagctttcattattttcctcgggccttactgagcttgtgagcacattggatataaatgcacgtcctctggctgtaaggaatgtgttgaaacctttcactctgccttataccttaatattcagctgtgatctcacaagtgtgaaaaatcttatgaatgtaaaatgtgtggagattcttctttgtttttagcttccactttgggaacatgtcaaagcacacattgagaagtcccatgagtgaaagagatgttggaaagcccttgaacttggtcgttaggaaacatccacactgaagaggaacctgactgtatggaaggtcaaaaaggctgtattaatttacatgcaaaaagtcacactagaggaatgccatatcagaatgcttttggtaaatatacatgttttaaagaggttatatatcattaataaaaatatctagctggtctgaagatcctgagttatctcaattgttcacggttacagatggaactctttattattgaggagttccactctttcccccatttgtcactactacacttccctagtctttaaaacaattttaggctgggtgcagtggctcattcctgtaatcccagcactttgaaaggccgaagcgagtggatcatttgaggtcaggagttcgagaccagcctggccaacgtggtgaaaccccatctctactaaaaatacaaaaattagccaggcatggtggtacgtgcctgtaatcccagctactcgagaggttgaggcagaattgcttgaacccgggaggcggaagctgcagtgagctcagatcacgccactgcactccagcctggatgatatggtaagaccatctcaaaaaaagaaaaaaaaattaaaatatcctcagagggttttttaatgaaaaacttagttatagggaattgaggaacatttaggggtacaaattttcacttattgcacacaagaaaattggtactggccaggcatgctggctcacaccttaattccagcaatttgggaggccaaggcagaaggatcacttgagcccaggagttcaagaccagcctgggcaatatagtgaaacctcatcttgacaaagaataaataagattaactgggtgtactggtttgtgcctatagtcccagctatttaggaggctggggcaagaggattgcttgagcctggtcagggaggcagaggttgcagtgagccctgatcgtgccactacactctagcctgggcaacaggatgagaccctgtct

SEQ ID NO: 10659 - protein, 84 aa, Homo sapiens; identical to SEQ ID NO: 10637

SEQ ID NO: 10660 - DNA, 3921 bp, Homo sapiens
aaccaatcagactgaacgcgggctaccgcttcatttacaggaggtgagcatgaagtggccaatgggaaaattctaggaggtattgggactcatgaaggttctgtttcggagcccttgagctgccgcttggccagttcccacactgtggagtatgctttcgttttcaacaaatcccagctcttgttcttttgttgcttcattctttctttgctttgctgggcgttttgtctaattctttgttcaaaacgccagtaacctggacagcttgcagtcaagaccccctaccggtgacacttgcgctcttcggggaggtaaacagcatttcctctcagctctgggttggaaaaagccgcagcagctgatgggcccgggaacccgaggccccgccccctaggtggtcctagcctttgcgcgtgcgcggcgtgtctgcgtgggcgcatgcgcataacggccgccatcttaacagcgcgttcccgttggcgtctgaggaacagcatctctgccttcctgttcacggtgaccttcgcttggtgtcctcctggcctcagcaacctgacaattctgtcgtgtcccgagagatggctaatgaatggcgcttgatgacagatgagtaatgcctgttgctgaaagattgacggtatgaggcaagactcccactactacttaatcaagaggaattgagattgacttacccataagttcagacagtgtctcgaagagactttgggaacaagatattcaggcacatttcactgttagactcacaggatgctggccattggtctttccctttgtgatcatctttctcaagatgttttctgtcttcatgagtcaaaatttgaagaggaaaggatggtggctgggtggttgacaaattactctcagattgggagagtcatattaataccaaatggtcagcacctcagcagaattttttgcaggggaaaacatccagtgtggtggaaatggagagaaaccattttggagaggaactgtttgactttaaccaatgtgaaaaagccttgagtgaacactcatgccttaagactcacaggagaacttactttagaaagaaaacctgtgagtgtaatcaatgtgaaaaagccttcagaaaaccctctatctttactttacacaagaaaactgatatcggagaggaacttcctaactgtaatcaatgtgaaacagccttcagccaacatctacatcttgtttgcaagaaaactagccaaaatctacatcttgtttgcaagaaaactcacactcaagagaaaccatataaatgcagtgactgtgaaaaaggcttaccttcctcctcacacctcagagaatgtgtaagaatttatggtggagagagaccatatactcataaggagtatgtcgaaaccttttctcattctacagccctttttgtacacatgcaaactcaagatggagaaaaattctatgaatgtaaagcatgtgggaaacccttcactgagtcgtcatatcttactcaacatttaagaactcatagtagagtgttacctatagaacataagaaatttggcaaagcctttgctttttccccagatcttgctaaacatataagacttagaactagaggaaaacactatgtttgtaatgaatgtggcaaagaatttacttgtttctcaaaactcaacattcacataagggttcacactggagaaaaaccgtatgagtgcaacaaatgtgggaaagccttcactgattcatcaggtcttataaaacacaggcgaactcacactggagaaaagccttatgaatgtaaggaatgtgggaaagcttttgctaactcttcacatcttactgtacatatgagaactcacactggtgagaagccttatcaatgtaaggaatgtggaaaagcctttattaattcctcttcctttaaaagtcacatgcagactcatcctggtgtaaaaccctatgactgtcaacagtgtgggaaagccttcattcgatcctcatttcttattcgacatttgagaagtcacagtgcagaaaggccttttgaatgtgaggaatgtgggaaagcctttagatactcctcgcaccttagtcaacataaaagaatacatacaggggagaggccatataaatgtcaaaagtgtgggcaagccttcagtatctcatcaggccttacagtacacatgagaactcacactggtgaacggccctttgaatgtcaggaatgtgggaaagcctttactcggtccacatatcttattcgacatctaagaagtcatagtgtggagaaaccatataaggaatgtgggcaaacctttagtaattcctcatgccttactgaatgtgtgtgaattggggctgatacttggaaagaatgtggtaaagccactacttcctcacacttactgaacatgtactcattcatagtggcaatgtacacagtcataaggaatgtgggaagccttccttggtgtctcagatcttaacaattccaatagaagagaagacatatgaatgtaaggaatgtgggaaaatcttggctccttccataggccttactattcatgtgtctgtgcatcctaggaaacaaactgaacgtaggaaacctgtcgatgcttacatcttactgagtctgtttgaactcatgctggagagaaatgctatgaatgtgaggaaggtggaaaagctttcattattttcctcgggccttactgagcttgtgagcacattggatataaatgcacgtcctctggctgtaaggaatgtgttgaaacctttcactctgccttataccttaatattcagctgtgatctcacaagtgtgaaaaatcttatgaatgtaaaatgtgtggagattcttctttgtttttagcttccactttgggaacatgtcaaagcacacattgagaagtcccatgagtgaaagagatgttggaaagcccttgaacttggtcgttaggaaacatccacactgaagaggaacctgactgtatggaaggtcaaaaaggctgtattaatttacatgcaaaaagtcacactagaggaatgccatatcagaatgcttttggtaaatatacatgttttaaagaggttatatatcattaataaaaatatctagctggtctgaagatcctgagttatctcaattgttcacggttacagatggaactctttattattgaggagttccactctttcccccatttgtcactactacacttccctagtctttaaaacaattttaggctgggtgcagtggctcattcctgtaatcccagcactttgaaaggccgaagcgagtggatcatttgaggtcaggagttcgagaccagcctggccaacgtggtgaaaccccatctctactaaaaatacaaaaattagccaggcatggtggtacgtgcctgtaatcccagctactcgagaggttgaggcagaattgcttgaacccgggaggcggaagctgcagtgagctcagatcacgccactgcactccagcctggatgatatggtaagaccatctcaaaaaaagaaaaaaaaattaaaatatcctcagagggttttttaatgaaaaacttagttatagggaattgaggaacatttaggggtacaaattttcacttattgcacacaagaaaattggtactggccaggcatgctggctcacaccttaattccagcaatttgggaggccaaggcagaaggatcacttgagcccaggagttcaagaccagcctgggcaatatagtgaaacctcatcttgacaaagaataaataagattaactgggtgtactggtttgtgcctatagtcccagctatttaggaggctggggcaagaggattgcttgagcctggtcagggaggcagaggttgcagtgagccctgatcgtgccactacactctagcctgggcaacaggatgagaccctgtct

SEQ ID NO: 10661 - protein, 458 aa, Homo sapiens; identical to SEQ ID NO: 10633

SEQ ID NO: 10662 - DNA, 3826 bp, Homo sapiens
aaccaatcagactgaacgcgggctaccgcttcatttacaggaggtgagcatgaagtggccaatgggaaaattctaggaggtattgggactcatgaaggttctgtttcggagcccttgagctgccgcttggccagttcccacactgtggagtatgctttcgttttcaacaaatcccagctcttgttcttttgttgcttcattctttctttgctttgctgggcgttttgtctaattctttgttcaaaacgccagtaacctggacagcttgcagtcaagaccccctaccggtgacacttgcgctcttcggggaggtaaacagcatttcctctcagctctgggttggaaaaagccgcagcagctgatgggcccgggaacccgaggccccgccccctaggtggtcctagcctttgcgcgtgcgcggcgtgtctgcgtgggcgcatgcgcataacggccgccatcttaacagcgcgttcccgttggcgtctgaggaacagcatctctgccttcctgttcacggtgaccttcgcttggtgtcctcctggcctcagcaacctgacaattctgtcgtgtcccgatcatctttctcaagatgttttctgtcttcatgagtcaaaatttgaagaggaaaggatggtggctgggtggttgacaaattactctcaggactcagtgacctttgaggatgtggctgtggacttcacccaggaggagtggactttgctggatcaaactcagagaaacttatacagagatgtgatgctggagaactataagaatctagttgcagtagattgggagagtcatattaataccaaatggtcagcacctcagcagaattttttgcaggggaaaacatccagtgtggtggaaatggagagaaaccattttggagaggaactgtttgactttaaccaatgtgaaaaagccttgagtgaacactcatgccttaagactcacaggagaacttactttagaaagaaaacctgtgagtgtaatcaatgtgaaaaagccttcagaaaaccctctatctttactttacacaagaaaactgatatcggagaggaacttcctaactgtaatcaatgtgaaacagccttcagccaacatctacatcttgtttgcaagaaaactagccaaaatctacatcttgtttgcaagaaaactcacactcaagagaaaccatataaatgcagtgactgtgaaaaaggcttaccttcctcctcacacctcagagaatgtgtaagaatttatggtggagagagaccatatactcataaggagtatgtcgaaaccttttctcattctacagccctttttgtacacatgcaaactcaagatggagaaaaattctatgaatgtaaagcatgtgggaaacccttcactgagtcgtcatatcttactcaacatttaagaactcatagtagagtgttacctatagaacataagaaatttggcaaagcctttgctttttccccagatcttgctaaacatataagacttagaactagaggaaaacactatgtttgtaatgaatgtggcaaagaatttacttgtttctcaaaactcaacattcacataagggttcacactggagaaaaaccgtatgagtgcaacaaatgtgggaaagccttcactgattcatcaggtcttataaaacacaggcgaactcacactggagaaaagccttatgaatgtaaggaatgtgggaaagcttttgctaactcttcacatcttactgtacatatgagaactcacactggtgagaagccttatcaatgtaaggaatgtggaaaagcctttattaattcctcttcctttaaaagtcacatgcagactcatcctggtgtaaaaccctatgactgtcaacagtgtgggaaagccttcattcgatcctcatttcttattcgacatttgagaagtcacagtgcagaaaggccttttgaatgtgaggaatgtgggaaagcctttagatactcctcgcaccttagtcaacataaaagaatacatacaggggagaggccatataaatgtcaaaagtgtgggcaagccttcagtatctcatcaggccttacagtacacatgagaactcacactggtgaacggccctttgaatgtcaggaatgtgggaaagcctttactcggtccacatatcttattcgacatctaagaagtcatagtgtggagaaaccatataaggaatgtgggcaaacctttagtaattcctcatgccttactgaatgtgtgtgaattggggctgatacttggaaagaatgtggtaaagccactacttcctcacacttactgaacatgtactcattcatagtggcaatgtacacagtcataaggaatgtgggaagccttccttggtgtctcagatcttaacaattccaatagaagagaagacatatgaatgtaaggaatgtgggaaaatcttggctccttccataggccttactattcatgtgtctgtgcatcctaggaaacaaactgaacgtaggaaacctgtcgatgcttacatcttactgagtctgtttgaactcatgctggagagaaatgctatgaatgtgaggaaggtggaaaagctttcattattttcctcgggccttactgagcttgtgagcacattggatataaatgcacgtcctctggctgtaaggaatgtgttgaaacctttcactctgccttataccttaatattcagctgtgatctcacaagtgtgaaaaatcttatgaatgtaaaatgtgtggagattcttctttgtttttagcttccactttgggaacatgtcaaagcacacattgagaagtcccatgagtgaaagagatgttggaaagcccttgaacttggtcgttaggaaacatccacactgaagaggaacctgactgtatggaaggtcaaaaaggctgtattaatttacatgcaaaaagtcacactagaggaatgccatatcagaatgcttttggtaaatatacatgttttaaagaggttatatatcattaataaaaatatctagctggtctgaagatcctgagttatctcaattgttcacggttacagatggaactctttattattgaggagttccactctttcccccatttgtcactactacacttccctagtctttaaaacaattttaggctgggtgcagtggctcattcctgtaatcccagcactttgaaaggccgaagcgagtggatcatttgaggtcaggagttcgagaccagcctggccaacgtggtgaaaccccatctctactaaaaatacaaaaattagccaggcatggtggtacgtgcctgtaatcccagctactcgagaggttgaggcagaattgcttgaacccgggaggcggaagctgcagtgagctcagatcacgccactgcactccagcctggatgatatggtaagaccatctcaaaaaaagaaaaaaaaattaaaatatcctcagagggttttttaatgaaaaacttagttatagggaattgaggaacatttaggggtacaaattttcacttattgcacacaagaaaattggtactggccaggcatgctggctcacaccttaattccagcaatttgggaggccaaggcagaaggatcacttgagcccaggagttcaagaccagcctgggcaatatagtgaaacctcatcttgacaaagaataaataagattaactgggtgtactggtttgtgcctatagtcccagctatttaggaggctggggcaagaggattgcttgagcctggtcagggaggcagaggttgcagtgagccctgatcgtgccactacactctagcctgggcaacaggatgagaccctgtct

SEQ ID NO: 10663 - protein, 602 aa, Homo sapiens; identical to SEQ ID NO: 10641

SEQ ID NO: 10664 - DNA, 4336 bp, Homo sapiens
aaccaatcagactgaacgcgggctaccgcttcatttacaggaggtgagcatgaagtggccaatgggaaaattctaggaggtattgggactcatgaaggttctgtttcggagcccttgagctgccgcttggccagttcccacactgtggagtatgctttcgttttcaacaaatcccagctcttgttcttttgttgcttcattctttctttgctttgctgggcgttttgtctaattctttgttcaaaacgccagtaacctggacagcttgcagtcaagaccccctaccggtgacacttgcgctcttcggggaggtaaacagcatttcctctcagctctgggttggaaaaagccgcagcagctgatgggcccgggaacccgaggccccgccccctaggtggtcctagcctttgcgcgtgcgcggcgtgtctgcgtgggcgcatgcgcataacggccgccatcttaacagcgcgttcccgttggcgtctgaggaacagcatctctgccttcctgttcacggtgaccttcgcttggtgtcctcctggcctcagcaacctgacaattctgtcgtgtcccgatcatctttctcaagatgttttctgtcttcatgagtcaaaatttgaagaggaaaggatggtggctgggtggttgacaaattactctcaggactcagtgacctttgaggatgtggctgtggacttcacccaggaggagtggactttgctggatcaaactcagagaaacttatacagagatgtgatgctggagaactataagaatctagttgcagtagattgggagagtcatattaataccaaatggtcagcacctcagcagaattttttgcaggggaaaacatccagtgtggtggaaatggtaagattcagaaggtataatttattgtcttccatgttagaggaagattggaaattccttaaaatggaaaagcagcacaataaccttgagacatttgagactagtgtttttcacccaaaaataatctgtctcttggagagactatggatcatgagtttgacaaacactctaaacatccctcagaatatatttgtttacatatttccttcaacattcccatatgtatctcagatgtttttgataaataattcactcttgggccgttatcagctaagctctatttagaagccctctgaaagtaaagaatataacagaacttcctgcagtcactttgttccacttgaaaacactcaggtctgaaccatgccttgcaatgaaaatggcaggaacaaacagtttcaattatactaacttattttccatgtgtaacagaattcagagtaaaagggagaatctcaatgaaataaatttggaaaacttctatgaaccatcattaattttcaccaacaggagagaaaccattttggagaggaactgtttgactttaaccaatgtgaaaaagccttgagtgaacactcatgccttaagactcacaggagaacttactttagaaagaaaacctgtgagtgtaatcaatgtgaaaaagccttcagaaaaccctctatctttactttacacaagaaaactgatatcggagaggaacttcctaactgtaatcaatgtgaaacagccttcagccaacatctacatcttgtttgcaagaaaactagccaaaatctacatcttgtttgcaagaaaactcacactcaagagaaaccatataaatgcagtgactgtgaaaaaggcttaccttcctcctcacacctcagagaatgtgtaagaatttatggtggagagagaccatatactcataaggagtatgtcgaaaccttttctcattctacagccctttttgtacacatgcaaactcaagatggagaaaaattctatgaatgtaaagcatgtgggaaacccttcactgagtcgtcatatcttactcaacatttaagaactcatagtagagtgttacctatagaacataagaaatttggcaaagcctttgctttttccccagatcttgctaaacatataagacttagaactagaggaaaacactatgtttgtaatgaatgtggcaaagaatttacttgtttctcaaaactcaacattcacataagggttcacactggagaaaaaccgtatgagtgcaacaaatgtgggaaagccttcactgattcatcaggtcttataaaacacaggcgaactcacactggagaaaagccttatgaatgtaaggaatgtgggaaagcttttgctaactcttcacatcttactgtacatatgagaactcacactggtgagaagccttatcaatgtaaggaatgtggaaaagcctttattaattcctcttcctttaaaagtcacatgcagactcatcctggtgtaaaaccctatgactgtcaacagtgtgggaaagccttcattcgatcctcatttcttattcgacatttgagaagtcacagtgcagaaaggccttttgaatgtgaggaatgtgggaaagcctttagatactcctcgcaccttagtcaacataaaagaatacatacaggggagaggccatataaatgtcaaaagtgtgggcaagccttcagtatctcatcaggccttacagtacacatgagaactcacactggtgaacggccctttgaatgtcaggaatgtgggaaagcctttactcggtccacatatcttattcgacatctaagaagtcatagtgtggagaaaccatataaggaatgtgggcaaacctttagtaattcctcatgccttactgaatgtgtgtgaattggggctgatacttggaaagaatgtggtaaagccactacttcctcacacttactgaacatgtactcattcatagtggcaatgtacacagtcataaggaatgtgggaagccttccttggtgtctcagatcttaacaattccaatagaagagaagacatatgaatgtaaggaatgtgggaaaatcttggctccttccataggccttactattcatgtgtctgtgcatcctaggaaacaaactgaacgtaggaaacctgtcgatgcttacatcttactgagtctgtttgaactcatgctggagagaaatgctatgaatgtgaggaaggtggaaaagctttcattattttcctcgggccttactgagcttgtgagcacattggatataaatgcacgtcctctggctgtaaggaatgtgttgaaacctttcactctgccttataccttaatattcagctgtgatctcacaagtgtgaaaaatcttatgaatgtaaaatgtgtggagattcttctttgtttttagcttccactttgggaacatgtcaaagcacacattgagaagtcccatgagtgaaagagatgttggaaagcccttgaacttggtcgttaggaaacatccacactgaagaggaacctgactgtatggaaggtcaaaaaggctgtattaatttacatgcaaaaagtcacactagaggaatgccatatcagaatgcttttggtaaatatacatgttttaaagaggttatatatcattaataaaaatatctagctggtctgaagatcctgagttatctcaattgttcacggttacagatggaactctttattattgaggagttccactctttcccccatttgtcactactacacttccctagtctttaaaacaattttaggctgggtgcagtggctcattcctgtaatcccagcactttgaaaggccgaagcgagtggatcatttgaggtcaggagttcgagaccagcctggccaacgtggtgaaaccccatctctactaaaaatacaaaaattagccaggcatggtggtacgtgcctgtaatcccagctactcgagaggttgaggcagaattgcttgaacccgggaggcggaagctgcagtgagctcagatcacgccactgcactccagcctggatgatatggtaagaccatctcaaaaaaagaaaaaaaaattaaaatatcctcagagggttttttaatgaaaaacttagttatagggaattgaggaacatttaggggtacaaattttcacttattgcacacaagaaaattggtactggccaggcatgctggctcacaccttaattccagcaatttgggaggccaaggcagaaggatcacttgagcccaggagttcaagaccagcctgggcaatatagtgaaacctcatcttgacaaagaataaataagattaactgggtgtactggtttgtgcctatagtcccagctatttaggaggctggggcaagaggattgcttgagcctggtcagggaggcagaggttgcagtgagccctgatcgtgccactacactctagcctgggcaacaggatgagaccctgtct

SEQ ID NO: 10665 - protein, 239 aa, Homo sapiens; identical to SEQ ID NO: 10643

SEQ ID NO: 10666 - DNA, 1137 bp, Homo sapiens
aaccaatcagactgaacgcgggctaccgcttcatttacaggaggtgagcatgaagtggccaatgggaaaattctaggaggtattgggactcatgaaggttctgtttcggagcccttgagctgccgcttggccagttcccacactgtggagtatgctttcgttttcaacaaatcccagctcttgttcttttgttgcttcattctttctttgctttgctgggcgttttgtctaattctttgttcaaaacgccagtaacctggacagcttgcagtcaagaccccctaccggtgacacttgcgctcttcggggaggtaaacagcatttcctctcagctctgggttggaaaaagccgcagcagctgatgggcccgggaacccgaggccccgccccctaggtggtcctagcctttgcgcgtgcgcggcgtgtctgcgtgggcgcatgcgcataacggccgccatcttaacagcgcgttcccgttggcgtctgaggaacagcatctctgccttcctgttcacggtgaccttcgcttggtgtcctcctggcctcagcaacctgacaattctgtcgtgtcccggcaggagtacagtggtgagatcacggttcactgcagcattgacctccctaggctcaggtgttgctcccacctcagtcttctgaatagcttggagtatagagagatggctaatgaatggcgcttgatgacagatgagtaatgcctgttgctgaaagattgacgatcatctttctcaagatgttttctgtcttcatgagtcaaaatttgaagaggaaaggatggtggctgggtggttgacaaattactctcaggactcagtgacctttgaggatgtggctgtggacttcacccaggaggagtggactttgctggatcaaactcagagaaacttatacagagatgtgatgctggagaactataagaatctagttgcagtagattgggagagtcatattaataccaaatggtcagcacctcagcagaattttttgcaggggaaaacatccagtgtggtggaaatgagtctcactgtatcacccagactggagtgcagtggtaccatctcagctcacggcagcttccacctcccaggttcaagcaattcttgtgcctcagcctcccga

SEQ ID NO: 10667 - protein, 114 aa, Homo sapiens
MVAGWLTNYSQDSVTFEDVAVDFTQEEWTLLDQTQRNLYRDVMLENYKNLVAVDWESHINTKWSAPQQNFLQGKTSSVVEMSLTVSPRLECSGTISAHGSFHLPGSSNSCASAS

SEQ ID NO: 10668 - DNA, 1020 bp, Homo sapiens
aaccaatcagactgaacgcgggctaccgcttcatttacaggaggtgagcatgaagtggccaatgggaaaattctaggaggtattgggactcatgaaggttctgtttcggagcccttgagctgccgcttggccagttcccacactgtggagtatgctttcgttttcaacaaatcccagctcttgttcttttgttgcttcattctttctttgctttgctgggcgttttgtctaattctttgttcaaaacgccagtaacctggacagcttgcagtcaagaccccctaccggtgacacttgcgctcttcggggaggtaaacagcatttcctctcagctctgggttggaaaaagccgcagcagctgatgggcccgggaacccgaggccccgccccctaggtggtcctagcctttgcgcgtgcgcggcgtgtctgcgtgggcgcatgcgcataacggccgccatcttaacagcgcgttcccgttggcgtctgaggaacagcatctctgccttcctgttcacggtgaccttcgcttggtgtcctcctggcctcagcaacctgacaattctgtcgtgtcccggcaggagtacagtggtgagatcacggttcactgcagcattgacctccctaggctcaggtgttgctcccacctcagtcttctgaatagcttggagtatagatcatctttctcaagatgttttctgtcttcatgagtcaaaatttgaagaggaaaggatggtggctgggtggttgacaaattactctcaggactcagtgacctttgaggatgtggctgtggacttcacccaggaggagtggactttgctggatcaaactcagagaaacttatacagagatgtgatgctggagaactataagaatctagttgcagtagattgggagagtcatattaataccaaatggtcagcacctcagcagaattttttgcaggggaaaacatccagtgtggtggaaatgggctgggtataagtaagcaagaagagggcctgggagaagagtctgacg

SEQ ID NO: 10669 - protein, 84 aa, Homo sapiens
MVAGWLTNYSQDSVTFEDVAVDFTQEEWTLLDQTQRNLYRDVMLENYKNLVAVDWESHINTKWSAPQQNFLQGKTSSVVEMGWV

SEQ ID NO: 10670 - DNA, 1042 bp, Homo sapiens
aaccaatcagactgaacgcgggctaccgcttcatttacaggaggtgagcatgaagtggccaatgggaaaattctaggaggtattgggactcatgaaggttctgtttcggagcccttgagctgccgcttggccagttcccacactgtggagtatgctttcgttttcaacaaatcccagctcttgttcttttgttgcttcattctttctttgctttgctgggcgttttgtctaattctttgttcaaaacgccagtaacctggacagcttgcagtcaagaccccctaccggtgacacttgcgctcttcggggaggtaaacagcatttcctctcagctctgggttggaaaaagccgcagcagctgatgggcccgggaacccgaggccccgccccctaggtggtcctagcctttgcgcgtgcgcggcgtgtctgcgtgggcgcatgcgcataacggccgccatcttaacagcgcgttcccgttggcgtctgaggaacagcatctctgccttcctgttcacggtgaccttcgcttggtgtcctcctggcctcagcaacctgacaattctgtcgtgtcccgagatgcggtcttgctgtgttgcctaggctggtctcaaactcctgctctcaagtgatcctcctgcctcagcctcctgagtacatttatatttaaagtaattattgatggctctgcctgcttaggactctgcccagccaggaaggaaacctacaggaggaagaatggctgcagggtggctgacaacctggtcacaggtacacaagaaatttctctatttccaaaagcacactgccattcctgaaaagaacacatctcttgcccctgacctgaagcttcacagcccaatctgagctggcttcatcttccgcagctcccaggctgcttcatgtggaagagggaatccctgggaaaggcttctgttcccacatttgttaactttctccagatattcttccatatttttgagtatgaattccatactgtagtgagtgctgtaaagaaagacttttactaggaaaattatttatc

SEQ ID NO: 10671 - protein, 53 aa, Homo sapiens
MRITAAILTARSRWRLRNSISAFLFTVTFAWCPPGLSNLTILSCPEMRSCCVA

SEQ ID NO: 10672 - DNA, 2451 bp, Homo sapiens
aaccaatcagactgaacgcgggctaccgcttcatttacaggaggtgagcatgaagtggccaatgggaaaattctaggaggtattgggactcatgaaggttctgtttcggagcccttgagctgccgcttggccagttcccacactgtggagtatgctttcgttttcaacaaatcccagctcttgttcttttgttgcttcattctttctttgctttgctgggcgttttgtctaattctttgttcaaaacgccagtaacctggacagcttgcagtcaagaccccctaccggtgacacttgcgctcttcggggaggtaaacagcatttcctctcagctctgggttggaaaaagccgcagcagctgatgggcccgggaacccgaggccccgccccctaggtggtcctagcctttgcgcgtgcgcggcgtgtctgcgtgggcgcatgcgcataacggccgccatcttaacagcgcgttcccgttggcgtctgaggaacagcatctctgccttcctgttcacggtgaccttcgcttggtgtcctcctggcctcagcaacctgacaattctgtcgtgtcccgatcatctttctcaagatgttttctgtcttcatgagtcaaaatttgaagaggaaaggatggtggctgggtggttgacaaattactctcaggactcagtgacctttgaggatgtggctgtggacttcacccaggaggagtggactttgctggatcaaactcagagaaacttatacagagatgtgatgctggagaactataagaatctagttgcagtagggctgggtataagtaagcaagaagagggcctgggagaagagtctgacgagcaaggggaaggtagccaaggatggagtgaaatacagggtgacctgtgtttttcccctggctgctttggaaattatgggaaaaaatcaaataccaaggaagaaaaatctataatgaaattagatgtggatttctttttatgtattcagcttgggggcttatgatacttctagtacccaaaggctctgcctgcttaggactctgcccagccaggaaggaaacctacaggaggaagaatggctgcagggtggctgacaacctggtcacagaactcagtaaccttccaggaagtggcagtggacttttcccaggaggagtgggcattgctggaccctgctcaaaaaaatctatacaaagatgtgatgctggagaactttaggaacctggcctcagtagggtatcagctctgcagacacagtctgatctccaaggtggatcaagaacagctgaagacagatgaaagaggaattttacaaggtgactgtgcagactgggaaactcaacttaaaccaaaagatacaattgctatgcagaacattcctgggggaaaaacatccaatggcataaacacgaactgtgtcagaactcactctggagagatgccctatgaatgcagtgactgtgggaaagccttcatttttcagtcttcccttaagaaacacatgagatctcatactggagagaagccttatgagtgtgatcactgtggaaaatcctttagccagagctctcatctgaatgtgcacaaaagaactcacactggagagaaaccctatgactgtaaggaatgtgggaaggctttcactgttccttcatcccttcagaaacatgtgagaacccacactggagagaaaccctatgaatgcagtgactgtggaaaagccttcatcgatcagtcatcccttaagaaacacacacgctctcacactggagagaagccttatgagtgtaaccagtgtggaaagtccttcagcacaggctcttaccttattgtgcacaagagaactcacactggtgagaaaacctatgagtgtaaagaatgtgggaaggcctttaggaattcctcttgcctgagggtacacgtgagaactcacactggagagaagccttataaatgtattcagtgtgaaaaagcctttagcacaagcactaaccttataatgcacaagcgaatccacaatggccagaaactccatgaatgaaatgactcagggaagtgtttgttgcccctcatgcctcctttctcactttagaacatatattggagagaagccctgttatggtcacctggaaacagccttctggcccaactctggatgcctgttatactgggacaaaccttataaatgttatagctatgattgtttttatcagtgagtatttcattcttatatgtgtcacaactgtagatcctatgaatattttagttatcttttcagtttaattgcattgtgaacagaacacatggtcttcaatatgtagattctgtgtgacatagatttgaacataattgctggacactgactgatgtactgtggcagacagaactagttgctgtctcaatatccattcctcccttctttcttaaagtaataaaatttaccatttagttc

SEQ ID NO: 10673 - protein, 321 aa, Homo sapiens
MAAGWLTTWSQNSVTFQEVAVDFSQEEWALLDPAQKNLYKDVMLENFRNLASVGYQLCRHSLISKVDQEQLKTDERGILQGDCADWETQLKPKDTIAMQNIPGGKTSNGINTNCVRTHSGEMPYECSDCGKAFIFQSSLKKHMRSHTGEKPYECDHCGKSFSQSSHLNVHKRTHTGEKPYDCKECGKAFTVPSSLQKHVRTHTGEKPYECSDCGKAFIDQSSLKKHTRSHTGEKPYECNQCGKSFSTGSYLIVHKRTHTGEKTYECKECGKAFRNSSCLRVHVRTHTGEKPYKCIQCEKAFSTSTNLIMHKRIHNGQKLHE

SEQ ID NO: 10674 - DNA, 2878 bp, Homo sapiens
aaccaatcagactgaacgcgggctaccgcttcatttacaggaggtgagcatgaagtggccaatgggaaaattctaggaggtattgggactcatgaaggttctgtttcggagcccttgagctgccgcttggccagttcccacactgtggagtatgctttcgttttcaacaaatcccagctcttgttcttttgttgcttcattctttctttgctttgctgggcgttttgtctaattctttgttcaaaacgccagtaacctggacagcttgcagtcaagaccccctaccggtgacacttgcgctcttcggggaggtaaacagcatttcctctcagctctgggttggaaaaagccgcagcagctgatgggcccgggaacccgaggccccgccccctaggtggtcctagcctttgcgcgtgcgcggcgtgtctgcgtgggcgcatgcgcataacggccgccatcttaacagcgcgttcccgttggcgtctgaggaacagcatctctgccttcctgttcacggtgaccttcgcttggtgtcctcctggcctcagcaacctgacaattctgtcgtgtcccgatcatctttctcaagatgttttctgtcttcatgagtcaaaatttgaagaggaaaggatggtggctgggtggttgacaaattactctcaggactcagtgacctttgaggatgtggctgtggacttcacccaggaggagtggactttgctggatcaaactcagagaaacttatacagagatgtgatgctggagaactataagaatctagttgcagtagggctgggtataagtaagcaagaagagggcctgggagaagagtctgacgagcaaggggaaggtagccaaggatggagtgaaatacagggtgacctgtgtttttcccctggctgctttggaaattatgggaaaaaatcaaataccaaggaagaaaaatctataatgaaattagatgtggatttctttttatgtattcagcttgggggcttatgatacttctagtacccaaaggctctgcctgcttaggactctgcccagccaggaaggaaacctacaggaggaagaatggctgcagggtggctgacaacctggtcacagaactcagtaaccttccaggaagtggcagtggacttttcccaggaggagtgggcattgctggaccctgctcaaaaaaatctatacaaagatgtgatgctggagaactttaggaacctggcctcagtagggtatcagctctgcagacacagtctgatctccaaggtggatcaagaacagctgaagacagatgaaagaggaattttacaaggtgactgtgcagactgggaaactcaacttaaaccaaaagatacaattgctatgcagaacattcctgggggaaaaacatccaatggcataaacacgaactgtgtcagaactcactctggagagatgccctatgaatgcagtgactgtgggaaagccttcatttttcagtcttcccttaagaaacacatgagatctcatactggagagaagccttatgagtgtgatcactgtggaaaatcctttagccagagctctcatctgaatgtgcacaaaagaactcacactggagagaaaccctatgactgtaaggaatgtgggaaggctttcactgttccttcatcccttcagaaacatgtgagaacccacactggagagaaaccctatgaatgcagtgactgtggaaaagccttcatcgatcagtcatcccttaagaaacacacacgctctcacactggagagaagccttatgagtgtaaccagtgtggaaagtccttcagcacaggctcttaccttattgtgcacaagagaactcacactggtgagaaaacctatgagtgtaaagaatgtgggaaggcctttaggaattcctcttgcctgagggtacacgtgagaactcacactggagagaagccttataaatgtattcagtgtgaaaaagcctttagcacaagcactaaccttataatgcacaagcgaatccacaatggccagaaactccatgaatgaaatgactcagggaagtgtttgttgcccctcatgcctcctttctcactttagaacatatattggagagaagccctgttatggtcacctggaaacagccttctggcccaactctggatgcctgttatactgggacaaaccttataaatgttatagctatgattgtttttatcagtgagtatttcattcttatatgtgtcacaactgtagatcctatgaatattttagttatcttttcagtttaattgcattgtgaacagaacacatggtcttcaatatgtagattctgtgtgacatagatttgaacataattgctggacactgactgatgtactgtggcagacagaactagttgctgtctcaatatccattcctcccttctttcttaaagtaataaaatttaccatttagttcaagctggcaatgtggacagttttcacccagcttcccttacagctgtgagcggccaaatatgttcacatccctagcccatgcaaagtaggcagaagtcactggatacagctgctaaggaagctcatggaaatgggaatatctcatctggtgtttttttcttaactatttgccctttgtcttgtcccttatttcctagaaaatatatacaccaagaggaggacagagaaaggatactaaatgaaacaacaggggagatacaatattatctggttgcactaatcctgtgctgcttatctctggatttcatgttacatgagaaaaattaactgccatgtggtttaaaccactcttgtgggaagttcctctttcagctgatttcagtcccaactgttacatctaataaatggtcaagttttaggaatcgttc

SEQ ID NO: 10675 - protein, 321 aa, Homo sapiens; identical to SEQ ID NO: 10673

SEQ ID NO: 10676 - DNA, 3233 bp, Homo sapiens
gacagcttgcagtcaagaccccctaccggtgacacttgcgctcttcggggaggtaaacagcatttcctctcagctctgggttggaaaaagccgcagcagctgatgggcccgggaacccgaggccccgccccctaggtggtcctagcctttgcgcgtgcgcggcgtgtctgcgtgggcgcatgcgcataacggccgccatcttaacagcgcgttcccgttggcgtctgaggtaagtttttgtttctgggcggcgttcggtggtgtcccggtgcagccacgcgagagtagaagggtggaaaggggaggtgcccagtgaaatggagcctgtcccgtgcactttcgggcatttcgagcatcttgtgggctctcccaagtcgcggcccctcctctgagagccacagtcaggaacagcatctctgccttcctgttcacggtgaccttcgcttggtgtcctcctggcctcagcaacctgacaattctgtcgtgtcccgattgggagagtcatattaataccaaatggtcagcacctcagcagaattttttgcaggggaaaacatccagtgtggtggaaatggtaagattcagaaggtataatttattgtcttccatgttagaggaagattggaaattccttaaaatggaaaagcagcacaataaccttgagacatttgagactagtgtttttcacccaaaaataatctgtctcttggagagactatggatcatgagtttgacaaacactctaaacatccctcagaatatatttgtttacatatttccttcaacattcccatatgtatctcagatgtttttgataaataattcactcttgggccgttatcagctaagctctatttagaagccctctgaaagtaaagaatataacagaacttcctgcagtcactttgttccacttgaaaacactcaggtctgaaccatgccttgcaatgaaaatggcaggaacaaacagtttcaattatactaacttattttccatgtgtaacagaattcagagtaaaagggagaatctcaatgaaataaatttggaaaacttctatgaaccatcattaattttcaccaacaggagagaaaccattttggagaggaactgtttgactttaaccaatgtgaaaaagccttgagtgaacactcatgccttaagactcacaggagaacttactttagaaagaaaacctgtgagtgtaatcaatgtgaaaaagccttcagaaaaccctctatctttactttacacaagaaaactgatatcggagaggaacttcctaactgtaatcaatgtgaaacagccttcagccaacatctacatcttgtttgcaagaaaactagccaaaatctacatcttgtttgcaagaaaactcacactcaagagaaaccatataaatgcagtgactgtgaaaaaggcttaccttcctcctcacacctcagagaatgtgtaagaatttatggtggagagagaccatatactcataaggagtatgtcgaaaccttttctcattctacagccctttttgtacacatgcaaactcaagatggagaaaaattctatgaatgtaaagcatgtgggaaacccttcactgagtcgtcatatcttactcaacatttaagaactcatagtagagtgttacctatagaacataagaaatttggcaaagcctttgctttttccccagatcttgctaaacatataagacttagaactagaggaaaacactatgtttgtaatgaatgtggcaaagaatttacttgtttctcaaaactcaacattcacataagggttcacactggagaaaaaccgtatgagtgcaacaaatgtgggaaagccttcactgattcatcaggtcttataaaacacaggcgaactcacactggagaaaagccttatgaatgtaaggaatgtgggaaagcttttgctaactcttcacatcttactgtacatatgagaactcacactggtgagaagccttatcaatgtaaggaatgtggaaaagcctttattaattcctcttcctttaaaagtcacatgcagactcatcctggtgtaaaaccctatgactgtcaacagtgtgggaaagccttcattcgatcctcatttcttattcgacatttgagaagtcacagtgcagaaaggccttttgaatgtgaggaatgtgggaaagcctttagatactcctcgcaccttagtcaacataaaagaatacatacaggggagaggccatataaatgtcaaaagtgtgggcaagccttcagtatctcatcaggccttacagtacacatgagaactcacactggtgaacggccctttgaatgtcaggaatgtgggaaagcctttactcggtccacatatcttattcgacatctaagaagtcatagtgtggagaaaccatataaggaatgtgggcaaacctttagtaattcctcatgccttactgaatgtgtgtgaattggggctgatacttggaaagaatgtggtaaagccactacttcctcacacttactgaacatgtactcattcatagtggcaatgtacacagtcataaggaatgtgggaagccttccttggtgtctcagatcttaacaattccaatagaagagaagacatatgaatgtaaggaatgtgggaaaatcttggctccttccataggccttactattcatgtgtctgtgcatcctaggaaacaaactgaacgtaggaaacctgtcgatgcttacatcttactgagtctgtttgaactcatgctggagagaaatgctatgaatgtgaggaaggtggaaaagctttcattattttcctcgggccttactgagcttgtgagcacattggatataaatgcacgtcctctggctgtaaggaatgtgttgaaacctttcactctgccttataccttaatattcagctgtgatctcacaagtgtgaaaaatcttatgaatgtaaaatgtgtggagattcttctttgtttttagcttccactttgggaacatgtcaaagcacacattgagaagtcccatgagtgaaagagatgttggaaagcccttgaacttggtcgttaggaaacatccacactgaagaggaacctgactgtatggaaggtcaaaaaggctgtattaatttacatgcaaaaagtcacactagaggaatgccatatcagaatgcttttggtaaatatacatgttttaaagaggttatatatcattaataaaaatatctagctggtctg

SEQ ID NO: 10677 - protein, 307 aa, Homo sapiens [sequence omitted]

SEQ ID NO: 10678 - DNA, 3080 bp, Homo sapiens
gacagcttgcagtcaagaccccctaccggtgacacttgcgctcttcggggaggtaaacagcatttcctctcagctctgggttggaaaaagccgcagcagctgatgggcccgggaacccgaggccccgccccctaggtggtcctagcctttgcgcgtgcgcggcgtgtctgcgtgggcgcatgcgcataacggccgccatcttaacagcgcgttcccgttggcgtctgaggtaagtttttgtttctgggcggcgttcggtggtgtcccggtgcagccacgcgagagtagaagggtggaaaggggaggtgcccagtgaaatggagcctgtcccgtgcactttcgggcatttcgagcatcttgtgggctctcccaagtcgcggcccctcctctgagagccacagtcaggaacagcatctctgccttcctgttcacggtgaccttcgcttggtgtcctcctggcctcagcaacctgacaattctgtcgtgtcccgagagatggctaatgaatggcgcttgatgacagatgagtaatgcctgttgctgaaagattgacgatcatctttctcaagatgttttctgtcttcatgagtcaaaatttgaagaggaaaggatggtggctgggtggttgacaaattactctcaggactcagtgacctttgaggatgtggctgtggacttcacccaggaggagtggactttgctggatcaaactcagagaaacttatacagagatgtgatgctggagaactataagaatctagttgcagtagattgggagagtcatattaataccaaatggtcagcacctcagcagaattttttgcaggggaaaacatccagtgtggtggaaatgaattcagagtaaaagggagaatctcaatgaaataaatttggaaaacttctatgaaccatcattaattttcaccaacaggagagaaaccattttggagaggaactgtttgactttaaccaatgtgaaaaagccttgagtgaacactcatgccttaagactcacaggagaacttactttagaaagaaaacctgtgagtgtaatcaatgtgaaaaagccttcagaaaaccctctatctttactttacacaagaaaactgatatcggagaggaacttcctaactgtaatcaatgtgaaacagccttcagccaacatctacatcttgtttgcaagaaaactagccaaaatctacatcttgtttgcaagaaaactcacactcaagagaaaccatataaatgcagtgactgtgaaaaaggcttaccttcctcctcacacctcagagaatgtgtaagaatttatggtggagagagaccatatactcataaggagtatgtcgaaaccttttctcattctacagccctttttgtacacatgcaaactcaagatggagaaaaattctatgaatgtaaagcatgtgggaaacccttcactgagtcgtcatatcttactcaacatttaagaactcatagtagagtgttacctatagaacataagaaatttggcaaagcctttgctttttccccagatcttgctaaacatataagacttagaactagaggaaaacactatgtttgtaatgaatgtggcaaagaatttacttgtttctcaaaactcaacattcacataagggttcacactggagaaaaaccgtatgagtgcaacaaatgtgggaaagccttcactgattcatcaggtcttataaaacacaggcgaactcacactggagaaaagccttatgaatgtaaggaatgtgggaaagcttttgctaactcttcacatcttactgtacatatgagaactcacactggtgagaagccttatcaatgtaaggaatgtggaaaagcctttattaattcctcttcctttaaaagtcacatgcagactcatcctggtgtaaaaccctatgactgtcaacagtgtgggaaagccttcattcgatcctcatttcttattcgacatttgagaagtcacagtgcagaaaggccttttgaatgtgaggaatgtgggaaagcctttagatactcctcgcaccttagtcaacataaaagaatacatacaggggagaggccatataaatgtcaaaagtgtgggcaagccttcagtatctcatcaggccttacagtacacatgagaactcacactggtgaacggccctttgaatgtcaggaatgtgggaaagcctttactcggtccacatatcttattcgacatctaagaagtcatagtgtggagaaaccatataaggaatgtgggcaaacctttagtaattcctcatgccttactgaatgtgtgtgaattggggctgatacttggaaagaatgtggtaaagccactacttcctcacacttactgaacatgtactcattcatagtggcaatgtacacagtcataaggaatgtgggaagccttccttggtgtctcagatcttaacaattccaatagaagagaagacatatgaatgtaaggaatgtgggaaaatcttggctccttccataggccttactattcatgtgtctgtgcatcctaggaaacaaactgaacgtaggaaacctgtcgatgcttacatcttactgagtctgtttgaactcatgctggagagaaatgctatgaatgtgaggaaggtggaaaagctttcattattttcctcgggccttactgagcttgtgagcacattggatataaatgcacgtcctctggctgtaaggaatgtgttgaaacctttcactctgccttataccttaatattcagctgtgatctcacaagtgtgaaaaatcttatgaatgtaaaatgtgtggagattcttctttgtttttagcttccactttgggaacatgtcaaagcacacattgagaagtcccatgagtgaaagagatgttggaaagcccttgaacttggtcgttaggaaacatccacactgaagaggaacctgactgtatggaaggtcaaaaaggctgtattaatttacatgcaaaaagtcacactagaggaatgccatatcagaatgcttttggtaaatatacatgttttaaagaggttatatatcattaataaaaatatctagctggtctg

SEQ ID NO: 10679 - protein, 84 aa, Homo sapiens; identical to SEQ ID NO: 10637

SEQ ID NO: 10680 - DNA, 3292 bp, Homo sapiens
gacagcttgcagtcaagaccccctaccggtgacacttgcgctcttcggggaggtaaacagcatttcctctcagctctgggttggaaaaagccgcagcagctgatgggcccgggaacccgaggccccgccccctaggtggtcctagcctttgcgcgtgcgcggcgtgtctgcgtgggcgcatgcgcataacggccgccatcttaacagcgcgttcccgttggcgtctgaggtaagtttttgtttctgggcggcgttcggtggtgtcccggtgcagccacgcgagagtagaagggtggaaaggggaggtgcccagtgaaatggagcctgtcccgtgcactttcgggcatttcgagcatcttgtgggctctcccaagtcgcggcccctcctctgagagccacagtcaggtctgtcctcaggggtcgaggcggctgcgctggggcctcggcccgggaggaggcggggggcacggcctttccattttccctgctcccctctgcagaagcctcatagggcccggcgcggcggctcacgcctgtcattcccagcgctttgggcggattgggtaggaggattacttgaggccaggagttcaagaccaggcagggcaacatagggagacccccccccccaaccatctctaatggaaaaaaaaaaaaaagtctccacatccagcgttgtgccttttctctataaggaacagcatctctgccttcctgttcacggtgaccttcgcttggtgtcctcctggcctcagcaacctgacaattctgtcgtgtcccgagagatggctaatgaatggcgcttgatgacagatgagtaatgcctgttgctgaaagattgacgatcatctttctcaagatgttttctgtcttcatgagtcaaaatttgaagaggaaaggatggtggctgggtggttgacaaattactctcaggactcagtgacctttgaggatgtggctgtggacttcacccaggaggagtggactttgctggatcaaactcagagaaacttatacagagatgtgatgctggagaactataagaatctagttgcagtagattgggagagtcatattaataccaaatggtcagcacctcagcagaattttttgcaggggaaaacatccagtgtggtggaaatggagagaaaccattttggagaggaactgtttgactttaaccaatgtgaaaaagccttgagtgaacactcatgccttaagactcacaggagaacttactttagaaagaaaacctgtgagtgtaatcaatgtgaaaaagccttcagaaaaccctctatctttactttacacaagaaaactgatatcggagaggaacttcctaactgtaatcaatgtgaaacagccttcagccaacatctacatcttgtttgcaagaaaactagccaaaatctacatcttgtttgcaagaaaactcacactcaagagaaaccatataaatgcagtgactgtgaaaaaggcttaccttcctcctcacacctcagagaatgtgtaagaatttatggtggagagagaccatatactcataaggagtatgtcgaaaccttttctcattctacagccctttttgtacacatgcaaactcaagatggagaaaaattctatgaatgtaaagcatgtgggaaacccttcactgagtcgtcatatcttactcaacatttaagaactcatagtagagtgttacctatagaacataagaaatttggcaaagcctttgctttttccccagatcttgctaaacatataagacttagaactagaggaaaacactatgtttgtaatgaatgtggcaaagaatttacttgtttctcaaaactcaacattcacataagggttcacactggagaaaaaccgtatgagtgcaacaaatgtgggaaagccttcactgattcatcaggtcttataaaacacaggcgaactcacactggagaaaagccttatgaatgtaaggaatgtgggaaagcttttgctaactcttcacatcttactgtacatatgagaactcacactggtgagaagccttatcaatgtaaggaatgtggaaaagcctttattaattcctcttcctttaaaagtcacatgcagactcatcctggtgtaaaaccctatgactgtcaacagtgtgggaaagccttcattcgatcctcatttcttattcgacatttgagaagtcacagtgcagaaaggccttttgaatgtgaggaatgtgggaaagcctttagatactcctcgcaccttagtcaacataaaagaatacatacaggggagaggccatataaatgtcaaaagtgtgggcaagccttcagtatctcatcaggccttacagtacacatgagaactcacactggtgaacggccctttgaatgtcaggaatgtgggaaagcctttactcggtccacatatcttattcgacatctaagaagtcatagtgtggagaaaccatataaggaatgtgggcaaacctttagtaattcctcatgccttactgaatgtgtgtgaattggggctgatacttggaaagaatgtggtaaagccactacttcctcacacttactgaacatgtactcattcatagtggcaatgtacacagtcataaggaatgtgggaagccttccttggtgtctcagatcttaacaattccaatagaagagaagacatatgaatgtaaggaatgtgggaaaatcttggctccttccataggccttactattcatgtgtctgtgcatcctaggaaacaaactgaacgtaggaaacctgtcgatgcttacatcttactgagtctgtttgaactcatgctggagagaaatgctatgaatgtgaggaaggtggaaaagctttcattattttcctcgggccttactgagcttgtgagcacattggatataaatgcacgtcctctggctgtaaggaatgtgttgaaacctttcactctgccttataccttaatattcagctgtgatctcacaagtgtgaaaaatcttatgaatgtaaaatgtgtggagattcttctttgtttttagcttccactttgggaacatgtcaaagcacacattgagaagtcccatgagtgaaagagatgttggaaagcccttgaacttggtcgttaggaaacatccacactgaagaggaacctgactgtatggaaggtcaaaaaggctgtattaatttacatgcaaaaagtcacactagaggaatgccatatcagaatgcttttggtaaatatacatgttttaaagaggttatatatcattaataaaaatatctagctggtctg

SEQ ID NO: 10681 - protein, 538 aa, Homo sapiens; identical to SEQ ID NO: 1791

SEQ ID NO: 10682 - DNA, 3884 bp, Homo sapiens
gacagcttgcagtcaagaccccctaccggtgacacttgcgctcttcggggaggtaaacagcatttcctctcagctctgggttggaaaaagccgcagcagctgatgggcccgggaacccgaggccccgccccctaggtggtcctagcctttgcgcgtgcgcggcgtgtctgcgtgggcgcatgcgcataacggccgccatcttaacagcgcgttcccgttggcgtctgaggtaagtttttgtttctgggcggcgttcggtggtgtcccggtgcagccacgcgagagtagaagggtggaaaggggaggtgcccagtgaaatggagcctgtcccgtgcactttcgggcatttcgagcatcttgtgggctctcccaagtcgcggcccctcctctgagagccacagtcaggaacagcatctctgccttcctgttcacggtgaccttcgcttggtgtcctcctggcctcagcaacctgacaattctgtcgtgtcccgagagatggctaatgaatggcgcttgatgacagatgagtaatgcctgttgctgaaagattgacgatcatctttctcaagatgttttctgtcttcatgagtcaaaatttgaagaggaaaggatggtggctgggtggttgacaaattactctcaggactcagtgacctttgaggatgtggctgtggacttcacccaggaggagtggactttgctggatcaaactcagagaaacttatacagagatgtgatgctggagaactataagaatctagttgcagtagattgggagagtcatattaataccaaatggtcagcacctcagcagaattttttgcaggggaaaacatccagtgtggtggaaatgaattcagagtaaaagggagaatctcaatgaaataaatttggaaaacttctatgaaccatcattaattttcaccaacaggagagaaaccattttggagaggaactgtttgactttaaccaatgtgaaaaagccttgagtgaacactcatgccttaagactcacaggagaacttactttagaaagaaaacctgtgagtgtaatcaatgtgaaaaagccttcagaaaaccctctatctttactttacacaagaaaactgatatcggagaggaacttcctaactgtaatcaatgtgaaacagccttcagccaacatctacatcttgtttgcaagaaaactagccaaaatctacatcttgtttgcaagaaaactcacactcaagagaaaccatataaatgcagtgactgtgaaaaaggcttaccttcctcctcacacctcagagaatgtgtaagaatttatggtggagagagaccatatactcataaggagtatgtcgaaaccttttctcattctacagccctttttgtacacatgcaaactcaagatggagaaaaattctatgaatgtaaagcatgtgggaaacccttcactgagtcgtcatatcttactcaacatttaagaactcatagtagagtgttacctatagaacataagaaatttggcaaagcctttgctttttccccagatcttgctaaacatataagacttagaactagaggaaaacactatgtttgtaatgaatgtggcaaagaatttacttgtttctcaaaactcaacattcacataagggttcacactggagaaaaaccgtatgagtgcaacaaatgtgggaaagccttcactgattcatcaggtcttataaaacacaggcgaactcacactggagaaaagccttatgaatgtaaggaatgtgggaaagcttttgctaactcttcacatcttactgtacatatgagaactcacactggtgagaagccttatcaatgtaaggaatgtggaaaagcctttattaattcctcttcctttaaaagtcacatgcagactcatcctggtgtaaaaccctatgactgtcaacagtgtgggaaagccttcattcgatcctcatttcttattcgacatttgagaagtcacagtgcagaaaggccttttgaatgtgaggaatgtgggaaagcctttagatactcctcgcaccttagtcaacataaaagaatacatacaggggagaggccatataaatgtcaaaagtgtgggcaagccttcagtatctcatcaggccttacagtacacatgagaactcacactggtgaacggccctttgaatgtcaggaatgtgggaaagcctttactcggtccacatatcttattcgacatctaagaagtcatagtgtggagaaaccatataaggaatgtgggcaaacctttagtaattcctcatgccttactgaatgtgtgtgaattggggctgatacttggaaagaatgtggtaaagccactacttcctcacacttactgaacatgtactcattcatagtggcaatgtacacagtcataaggaatgtgggaagccttccttggtgtctcagatcttaacaattccaatagaagagaagacatatgaatgtaaggaatgtgggaaaatcttggctccttccataggccttactattcatgtgtctgtgcatcctaggaaacaaactgaacgtaggaaacctgtcgatgcttacatcttactgagtctgtttgaactcatgctggagagaaatgctatgaatgtgaggaaggtggaaaagctttcattattttcctcgggccttactgagcttgtgagcacattggatataaatgcacgtcctctggctgtaaggaatgtgttgaaacctttcactctgccttataccttaatattcagctgtgatctcacaagtgtgaaaaatcttatgaatgtaaaatgtgtggagattcttctttgtttttagcttccactttgggaacatgtcaaagcacacattgagaagtcccatgagtgaaagagatgttggaaagcccttgaacttggtcgttaggaaacatccacactgaagaggaacctgactgtatggaaggtcaaaaaggctgtattaatttacatgcaaaaagtcacactagaggaatgccatatcagaatgcttttggtaaatatacatgttttaaagaggttatatatcattaataaaaatatctagctggtctgaagatcctgagttatctcaattgttcacggttacagatggaactctttattattgaggagttccactctttcccccatttgtcactactacacttccctagtctttaaaacaattttaggctgggtgcagtggctcattcctgtaatcccagcactttgaaaggccgaagcgagtggatcatttgaggtcaggagttcgagaccagcctggccaacgtggtgaaaccccatctctactaaaaatacaaaaattagccaggcatggtggtacgtgcctgtaatcccagctactcgagaggttgaggcagaattgcttgaacccgggaggcggaagctgcagtgagctcagatcacgccactgcactccagcctggatgatatggtaagaccatctcaaaaaaagaaaaaaaaattaaaatatcctcagagggttttttaatgaaaaacttagttatagggaattgaggaacatttaggggtacaaattttcacttattgcacacaagaaaattggtactggccaggcatgctggctcacaccttaattccagcaatttgggaggccaaggcagaaggatcacttgagcccaggagttcaagaccagcctgggcaatatagtgaaacctcatcttgacaaagaataaataagattaactgggtgtactggtttgtgcctatagtcccagctatttaggaggctggggcaagaggattgcttgagcctggtcagggaggcagaggttgcagtgagccctgatcgtgccactacactctagcctgggcaacaggatgagaccctgtct

SEQ ID NO: 10683 - protein, 84 aa, Homo sapiens; identical to SEQ ID NO: 10637

SEQ ID NO: 10684 - DNA, 4037 bp, Homo sapiens
gacagcttgcagtcaagaccccctaccggtgacacttgcgctcttcggggaggtaaacagcatttcctctcagctctgggttggaaaaagccgcagcagctgatgggcccgggaacccgaggccccgccccctaggtggtcctagcctttgcgcgtgcgcggcgtgtctgcgtgggcgcatgcgcataacggccgccatcttaacagcgcgttcccgttggcgtctgaggtaagtttttgtttctgggcggcgttcggtggtgtcccggtgcagccacgcgagagtagaagggtggaaaggggaggtgcccagtgaaatggagcctgtcccgtgcactttcgggcatttcgagcatcttgtgggctctcccaagtcgcggcccctcctctgagagccacagtcaggaacagcatctctgccttcctgttcacggtgaccttcgcttggtgtcctcctggcctcagcaacctgacaattctgtcgtgtcccgattgggagagtcatattaataccaaatggtcagcacctcagcagaattttttgcaggggaaaacatccagtgtggtggaaatggtaagattcagaaggtataatttattgtcttccatgttagaggaagattggaaattccttaaaatggaaaagcagcacaataaccttgagacatttgagactagtgtttttcacccaaaaataatctgtctcttggagagactatggatcatgagtttgacaaacactctaaacatccctcagaatatatttgtttacatatttccttcaacattcccatatgtatctcagatgtttttgataaataattcactcttgggccgttatcagctaagctctatttagaagccctctgaaagtaaagaatataacagaacttcctgcagtcactttgttccacttgaaaacactcaggtctgaaccatgccttgcaatgaaaatggcaggaacaaacagtttcaattatactaacttattttccatgtgtaacagaattcagagtaaaagggagaatctcaatgaaataaatttggaaaacttctatgaaccatcattaattttcaccaacaggagagaaaccattttggagaggaactgtttgactttaaccaatgtgaaaaagccttgagtgaacactcatgccttaagactcacaggagaacttactttagaaagaaaacctgtgagtgtaatcaatgtgaaaaagccttcagaaaaccctctatctttactttacacaagaaaactgatatcggagaggaacttcctaactgtaatcaatgtgaaacagccttcagccaacatctacatcttgtttgcaagaaaactagccaaaatctacatcttgtttgcaagaaaactcacactcaagagaaaccatataaatgcagtgactgtgaaaaaggcttaccttcctcctcacacctcagagaatgtgtaagaatttatggtggagagagaccatatactcataaggagtatgtcgaaaccttttctcattctacagccctttttgtacacatgcaaactcaagatggagaaaaattctatgaatgtaaagcatgtgggaaacccttcactgagtcgtcatatcttactcaacatttaagaactcatagtagagtgttacctatagaacataagaaatttggcaaagcctttgctttttccccagatcttgctaaacatataagacttagaactagaggaaaacactatgtttgtaatgaatgtggcaaagaatttacttgtttctcaaaactcaacattcacataagggttcacactggagaaaaaccgtatgagtgcaacaaatgtgggaaagccttcactgattcatcaggtcttataaaacacaggcgaactcacactggagaaaagccttatgaatgtaaggaatgtgggaaagcttttgctaactcttcacatcttactgtacatatgagaactcacactggtgagaagccttatcaatgtaaggaatgtggaaaagcctttattaattcctcttcctttaaaagtcacatgcagactcatcctggtgtaaaaccctatgactgtcaacagtgtgggaaagccttcattcgatcctcatttcttattcgacatttgagaagtcacagtgcagaaaggccttttgaatgtgaggaatgtgggaaagcctttagatactcctcgcaccttagtcaacataaaagaatacatacaggggagaggccatataaatgtcaaaagtgtgggcaagccttcagtatctcatcaggccttacagtacacatgagaactcacactggtgaacggccctttgaatgtcaggaatgtgggaaagcctttactcggtccacatatcttattcgacatctaagaagtcatagtgtggagaaaccatataaggaatgtgggcaaacctttagtaattcctcatgccttactgaatgtgtgtgaattggggctgatacttggaaagaatgtggtaaagccactacttcctcacacttactgaacatgtactcattcatagtggcaatgtacacagtcataaggaatgtgggaagccttccttggtgtctcagatcttaacaattccaatagaagagaagacatatgaatgtaaggaatgtgggaaaatcttggctccttccataggccttactattcatgtgtctgtgcatcctaggaaacaaactgaacgtaggaaacctgtcgatgcttacatcttactgagtctgtttgaactcatgctggagagaaatgctatgaatgtgaggaaggtggaaaagctttcattattttcctcgggccttactgagcttgtgagcacattggatataaatgcacgtcctctggctgtaaggaatgtgttgaaacctttcactctgccttataccttaatattcagctgtgatctcacaagtgtgaaaaatcttatgaatgtaaaatgtgtggagattcttctttgtttttagcttccactttgggaacatgtcaaagcacacattgagaagtcccatgagtgaaagagatgttggaaagcccttgaacttggtcgttaggaaacatccacactgaagaggaacctgactgtatggaaggtcaaaaaggctgtattaatttacatgcaaaaagtcacactagaggaatgccatatcagaatgcttttggtaaatatacatgttttaaagaggttatatatcattaataaaaatatctagctggtctgaagatcctgagttatctcaattgttcacggttacagatggaactctttattattgaggagttccactctttcccccatttgtcactactacacttccctagtctttaaaacaattttaggctgggtgcagtggctcattcctgtaatcccagcactttgaaaggccgaagcgagtggatcatttgaggtcaggagttcgagaccagcctggccaacgtggtgaaaccccatctctactaaaaatacaaaaattagccaggcatggtggtacgtgcctgtaatcccagctactcgagaggttgaggcagaattgcttgaacccgggaggcggaagctgcagtgagctcagatcacgccactgcactccagcctggatgatatggtaagaccatctcaaaaaaagaaaaaaaaattaaaatatcctcagagggttttttaatgaaaaacttagttatagggaattgaggaacatttaggggtacaaattttcacttattgcacacaagaaaattggtactggccaggcatgctggctcacaccttaattccagcaatttgggaggccaaggcagaaggatcacttgagcccaggagttcaagaccagcctgggcaatatagtgaaacctcatcttgacaaagaataaataagattaactgggtgtactggtttgtgcctatagtcccagctatttaggaggctggggcaagaggattgcttgagcctggtcagggaggcagaggttgcagtgagccctgatcgtgccactacactctagcctgggcaacaggatgagaccctgtct

SEQ ID NO: 10685 - protein, 307 aa, Homo sapiens [sequence omitted]

SEQ ID NO: 10686 - DNA, 2451 bp, Homo sapiens
gacagcttgcagtcaagaccccctaccggtgacacttgcgctcttcggggaggtaaacagcatttcctctcagctctgggttggaaaaagccgcagcagctgatgggcccgggaacccgaggccccgccccctaggtggtcctagcctttgcgcgtgcgcggcgtgtctgcgtgggcgcatgcgcataacggccgccatcttaacagcgcgttcccgttggcgtctgaggtaagtttttgtttctgggcggcgttcggtggtgtcccggtgcagccacgcgagagtagaagggtggaaaggggaggtgcccagtgaaatggagcctgtcccgtgcactttcgggcatttcgagcatcttgtgggctctcccaagtcgcggcccctcctctgagagccacagtcaggaacagcatctctgccttcctgttcacggtgaccttcgcttggtgtcctcctggcctcagcaacctgacaattctgtcgtgtcccgatcatctttctcaagatgttttctgtcttcatgagtcaaaatttgaagaggaaaggatggtggctgggtggttgacaaattactctcaggactcagtgacctttgaggatgtggctgtggacttcacccaggaggagtggactttgctggatcaaactcagagaaacttatacagagatgtgatgctggagaactataagaatctagttgcagtagattgggagagtcatattaataccaaatggtcagcacctcagcagaattttttgcaggggaaaacatccagtgtggtggaaatgggctgggtataagtaagcaagaagagggcctgggagaagagtctgacgagcaaggggaaggtagccaaggatggagtgaaatacagggtgacctgtgtttttcccctggctgctttggaaattatgggaaaaaatcaaataccaaggaagaaaaatctataatgaaattagatgtggatttctttttatgtattcagcttgggggcttatgatacttctagtacccaaaggctctgcctgcttaggactctgcccagccaggaaggaaacctacaggaggaagaatggctgcagggtggctgacaacctggtcacagaactcagtaaccttccaggaagtggcagtggacttttcccaggaggagtgggcattgctggaccctgctcaaaaaaatctatacaaagatgtgatgctggagaactttaggaacctggcctcagtagggtatcagctctgcagacacagtctgatctccaaggtggatcaagaacagctgaagacagatgaaagaggaattttacaaggtgactgtgcagactgggaaactcaacttaaaccaaaagatacaattgctatgcagaacattcctgggggaaaaacatccaatggcataaacacgaactgtgtcagaactcactctggagagatgccctatgaatgcagtgactgtgggaaagccttcatttttcagtcttcccttaagaaacacatgagatctcatactggagagaagccttatgagtgtgatcactgtggaaaatcctttagccagagctctcatctgaatgtgcacaaaagaactcacactggagagaaaccctatgactgtaaggaatgtgggaaggctttcactgttccttcatcccttcagaaacatgtgagaacccacactggagagaaaccctatgaatgcagtgactgtggaaaagccttcatcgatcagtcatcccttaagaaacacacacgctctcacactggagagaagccttatgagtgtaaccagtgtggaaagtccttcagcacaggctcttaccttattgtgcacaagagaactcacactggtgagaaaacctatgagtgtaaagaatgtgggaaggcctttaggaattcctcttgcctgagggtacacgtgagaactcacactggagagaagccttataaatgtattcagtgtgaaaaagcctttagcacaagcactaaccttataatgcacaagcgaatccacaatggccagaaactccatgaatgaaatgactcagggaagtgtttgttgcccctcatgcctcctttctcactttagaacatatattggagagaagccctgttatggtcacctggaaacagccttctggcccaactctggatgcctgttatactgggacaaaccttataaatgttatagctatgattgtttttatcagtgagtatttcattcttatatgtgtcacaactgtagatcctatgaatattttagttatcttttcagtttaattgcattgtgaacagaacacatggtcttcaatatgtagattctgtgtgacatagatttgaacataattgctggacactgactgatgtactgtggcagacagaactagttgctgtctcaatatccattcctcccttctttcttaaagtaataaaatttaccatttagttc

SEQ ID NO: 10687 - protein, 321 aa, Homo sapiens; identical to SEQ ID NO: 10673

SEQ ID NO: 10688 - DNA, 2878 bp, Homo sapiens
gacagcttgcagtcaagaccccctaccggtgacacttgcgctcttcggggaggtaaacagcatttcctctcagctctgggttggaaaaagccgcagcagctgatgggcccgggaacccgaggccccgccccctaggtggtcctagcctttgcgcgtgcgcggcgtgtctgcgtgggcgcatgcgcataacggccgccatcttaacagcgcgttcccgttggcgtctgaggtaagtttttgtttctgggcggcgttcggtggtgtcccggtgcagccacgcgagagtagaagggtggaaaggggaggtgcccagtgaaatggagcctgtcccgtgcactttcgggcatttcgagcatcttgtgggctctcccaagtcgcggcccctcctctgagagccacagtcaggaacagcatctctgccttcctgttcacggtgaccttcgcttggtgtcctcctggcctcagcaacctgacaattctgtcgtgtcccgatcatctttctcaagatgttttctgtcttcatgagtcaaaatttgaagaggaaaggatggtggctgggtggttgacaaattactctcaggactcagtgacctttgaggatgtggctgtggacttcacccaggaggagtggactttgctggatcaaactcagagaaacttatacagagatgtgatgctggagaactataagaatctagttgcagtagattgggagagtcatattaataccaaatggtcagcacctcagcagaattttttgcaggggaaaacatccagtgtggtggaaatgggctgggtataagtaagcaagaagagggcctgggagaagagtctgacgagcaaggggaaggtagccaaggatggagtgaaatacagggtgacctgtgtttttcccctggctgctttggaaattatgggaaaaaatcaaataccaaggaagaaaaatctataatgaaattagatgtggatttctttttatgtattcagcttgggggcttatgatacttctagtacccaaaggctctgcctgcttaggactctgcccagccaggaaggaaacctacaggaggaagaatggctgcagggtggctgacaacctggtcacagaactcagtaaccttccaggaagtggcagtggacttttcccaggaggagtgggcattgctggaccctgctcaaaaaaatctatacaaagatgtgatgctggagaactttaggaacctggcctcagtagggtatcagctctgcagacacagtctgatctccaaggtggatcaagaacagctgaagacagatgaaagaggaattttacaaggtgactgtgcagactgggaaactcaacttaaaccaaaagatacaattgctatgcagaacattcctgggggaaaaacatccaatggcataaacacgaactgtgtcagaactcactctggagagatgccctatgaatgcagtgactgtgggaaagccttcatttttcagtcttcccttaagaaacacatgagatctcatactggagagaagccttatgagtgtgatcactgtggaaaatcctttagccagagctctcatctgaatgtgcacaaaagaactcacactggagagaaaccctatgactgtaaggaatgtgggaaggctttcactgttccttcatcccttcagaaacatgtgagaacccacactggagagaaaccctatgaatgcagtgactgtggaaaagccttcatcgatcagtcatcccttaagaaacacacacgctctcacactggagagaagccttatgagtgtaaccagtgtggaaagtccttcagcacaggctcttaccttattgtgcacaagagaactcacactggtgagaaaacctatgagtgtaaagaatgtgggaaggcctttaggaattcctcttgcctgagggtacacgtgagaactcacactggagagaagccttataaatgtattcagtgtgaaaaagcctttagcacaagcactaaccttataatgcacaagcgaatccacaatggccagaaactccatgaatgaaatgactcagggaagtgtttgttgcccctcatgcctcctttctcactttagaacatatattggagagaagccctgttatggtcacctggaaacagccttctggcccaactctggatgcctgttatactgggacaaaccttataaatgttatagctatgattgtttttatcagtgagtatttcattcttatatgtgtcacaactgtagatcctatgaatattttagttatcttttcagtttaattgcattgtgaacagaacacatggtcttcaatatgtagattctgtgtgacatagatttgaacataattgctggacactgactgatgtactgtggcagacagaactagttgctgtctcaatatccattcctcccttctttcttaaagtaataaaatttaccatttagttcaagctggcaatgtggacagttttcacccagcttcccttacagctgtgagcggccaaatatgttcacatccctagcccatgcaaagtaggcagaagtcactggatacagctgctaaggaagctcatggaaatgggaatatctcatctggtgtttttttcttaactatttgccctttgtcttgtcccttatttcctagaaaatatatacaccaagaggaggacagagaaaggatactaaatgaaacaacaggggagatacaatattatctggttgcactaatcctgtgctgcttatctctggatttcatgttacatgagaaaaattaactgccatgtggtttaaaccactcttgtgggaagttcctctttcagctgatttcagtcccaactgttacatctaataaatggtcaagttttaggaatcgttc

SEQ ID NO: 10689 - protein, 321 aa, Homo sapiens; identical to SEQ ID NO: 10673

SEQ ID NO: 10690 - DNA, 752 bp, Homo sapiens
catcttaacagcgcgttcccgttggcgtctgaggaacagcatctctgccttcctgttcacggtgaccttcgcttggtgtcctcctggcctcagcaacctgacaattctgtcgtgtcccgatcatctttctcaagatgttttctgtcttcatgagtcaaaatttgaagaggaaaggatggtggctgggtggttgacaaattactctcagacaggggagaagaaagtgaggaccatcaagtgataggagaccaaagagtcttgtcaaggcatgccaagacaaggtccctcattctccagtcaacatagtggagaacgtacttgcctgacgccagcatgtgtgtgatggtttaggactcagtgacctttgaggatgtggctgtggacttcacccaggaggagtggactttgctggatcaaactcagagaaacttatacagagatgtgatgctggagaactataagaatctagttgcagtaggtaaggctggtaccattcttttcatttagtttttttctggaacaaatgtgtcttaagtaactatgttctagactctgcttgttaatgggctgcattggtaaacaggcgaaacattgtttccatctcatagaccttactgccttgtgatttttctgatgaaattgaagatctgttcattgttctagctttattttctccatggataaaagacttagagcttcttgaatatgtgtatgagcttaagcctgggtttcatgggaaggattgctagtcc

SEQ ID NO: 10691 - protein, 50 aa, Homo sapiens
HLNSAFPLASEEQHLCLPVHGDLRLVSSWPQQPDNSVVSRSSFSRCFLSS

SEQ ID NO: 10692 - DNA, 550 bp, Homo sapiens
catcttaacagcgcgttcccgttggcgtctgaggaacagcatctctgccttcctgttcacggtgaccttcgcttggtgtcctcctggcctcagcaacctgacaattctgtcgtgtcccgagagatggctaatgaatggcgcttgatgacagatgagtaatgcctgttgctgaaagattgacgatcatctttctcaagatgttttctgtcttcatgagtcaaaatttgaagaggaaaggatggtggctgggtggttgacaaattactctcaggactcagtgacctttgaggatgtggctgtggacttcacccaggaggagtggactttgctggatcaaactcagagaaacttatacagagatgtgatgctggagaactataagaatctagttgcagtagattgggagagtcatattaataccaaatggtcagcacctcagcagaattttttgcaggggaaaacatccagtgtggtggaaatgggctgggtataagtaagcaagaagagggcctgggagaagagtctgacgagcaaggggaaggtagccaag

SEQ ID NO: 10693 - protein, 84 aa, Homo sapiens; identical to SEQ ID NO: 10669

SEQ ID NO: 10694 - DNA, 589 bp, Homo sapiens
catcttaacagcgcgttcccgttggcgtctgaggaacagcatctctgccttcctgttcacggtgaccttcgcttggtgtcctcctggcctcagcaacctgacaattctgtcgtgtcccgagagatggctaatgaatggcgcttgatgacagatgagtaatgcctgttgctgaaagattgacgatcatctttctcaagatgttttctgtcttcatgagtcaaaatttgaagaggaaaggatggtggctgggtggttgacaaattactctcaggactcagtgacctttgaggatgtggctgtggacttcacccaggaggagtggactttgctggatcaaactcagagaaacttatacagagatgtgatgctggagaactataagaatctagttgcagtagattgggagagtcatattaataccaaatggtcagcacctcagcagaattttttgcaggggaaaacatccagtgtggtggaaatgagatgcggtcttgctgtgttgcctaggctggtctcaaactcctgctctcaagtgatcctcctgcctcagcctcctgagtacatttatatttaaagtaattattgatgg

SEQ ID NO: 10695 - protein, 111 aa, Homo sapiens
MVAGWLTNYSQDSVTFEDVAVDFTQEEWTLLDQTQRNLYRDVMLENYKNLVAVDWESHINTKWSAPQQNFLQGKTSSVVEMRCGLAVLPRLVSNSCSQVILLPQPPEYIYI

SEQ ID NO: 10696 - DNA, 442 bp, Homo sapiens
atcttaacagcgcgttcccgttggcgtctgaggaacagcatctctgccttcctgttcacggtgaccttcgcttggtgtcctcctggcctcagcaacctgacaattctgtcgtgtcccgagagatggctaatgaatggcgcttgatgacagatgagtaatgcctgttgctgaaagattgacggtatgaggcaagactcccactactacttaatcaagaggaattgagattgacttacccataagttcagacagtgtctcgaagagactttgggaacaagatattcaggcacatttcactgttagactcacaggatgctggccattggtctttccctttgtggtaagtccgtattgatggtccttcaagacgctgctttaaccagtctgtgaacagcttgtcttgtgattagggtttagggtctaagtggccctgcttttgaga

SEQ ID NO: 10697 - protein, 47 aa, Homo sapiens
SRGIEIDLPISSDSVSKRLWEQDIQAHFTVRLTGCWPLVFPFVVSPY

SEQ ID NO: 10698 - DNA, 2987 bp, Homo sapiens
atcttaacagcgcgttcccgttggcgtctgaggaacagcatctctgccttcctgttcacggtgaccttcgcttggtgtcctcctggcctcagcaacctgacaattctgtcgtgtcccggactcagtgacctttgaggatgtggctgtggacttcacccaggaggagtggactttgctggatcaaactcagagaaacttatacagagatgtgatgctggagaactataagaatctagttgcagtagattgggagagtcatattaataccaaatggtcagcacctcagcagaattttttgcaggggaaaacatccagtgtggtggaaatggtaagattcagaaggtataatttattgtcttccatgttagaggaagattggaaattccttaaaatggaaaagcagcacaataaccttgagacatttgagactagtgtttttcacccaaaaataatctgtctcttggagagactatggatcatgagtttgacaaacactctaaacatccctcagaatatatttgtttacatatttccttcaacattcccatatgtatctcagatgtttttgataaataattcactcttgggccgttatcagctaagctctatttagaagccctctgaaagtaaagaatataacagaacttcctgcagtcactttgttccacttgaaaacactcaggtctgaaccatgccttgcaatgaaaatggcaggaacaaacagtttcaattatactaacttattttccatgtgtaacagaattcagagtaaaagggagaatctcaatgaaataaatttggaaaacttctatgaaccatcattaattttcaccaacaggagagaaaccattttggagaggaactgtttgactttaaccaatgtgaaaaagccttgagtgaacactcatgccttaagactcacaggagaacttactttagaaagaaaacctgtgagtgtaatcaatgtgaaaaagccttcagaaaaccctctatctttactttacacaagaaaactgatatcggagaggaacttcctaactgtaatcaatgtgaaacagccttcagccaacatctacatcttgtttgcaagaaaactagccaaaatctacatcttgtttgcaagaaaactcacactcaagagaaaccatataaatgcagtgactgtgaaaaaggcttaccttcctcctcacacctcagagaatgtgtaagaatttatggtggagagagaccatatactcataaggagtatgtcgaaaccttttctcattctacagccctttttgtacacatgcaaactcaagatggagaaaaattctatgaatgtaaagcatgtgggaaacccttcactgagtcgtcatatcttactcaacatttaagaactcatagtagagtgttacctatagaacataagaaatttggcaaagcctttgctttttccccagatcttgctaaacatataagacttagaactagaggaaaacactatgtttgtaatgaatgtggcaaagaatttacttgtttctcaaaactcaacattcacataagggttcacactggagaaaaaccgtatgagtgcaacaaatgtgggaaagccttcactgattcatcaggtcttataaaacacaggcgaactcacactggagaaaagccttatgaatgtaaggaatgtgggaaagcttttgctaactcttcacatcttactgtacatatgagaactcacactggtgagaagccttatcaatgtaaggaatgtggaaaagcctttattaattcctcttcctttaaaagtcacatgcagactcatcctggtgtaaaaccctatgactgtcaacagtgtgggaaagccttcattcgatcctcatttcttattcgacatttgagaagtcacagtgcagaaaggccttttgaatgtgaggaatgtgggaaagcctttagatactcctcgcaccttagtcaacataaaagaatacatacaggggagaggccatataaatgtcaaaagtgtgggcaagccttcagtatctcatcaggccttacagtacacatgagaactcacactggtgaacggccctttgaatgtcaggaatgtgggaaagcctttactcggtccacatatcttattcgacatctaagaagtcatagtgtggagaaaccatataaggaatgtgggcaaacctttagtaattcctcatgccttactgaatgtgtgtgaattggggctgatacttggaaagaatgtggtaaagccactacttcctcacacttactgaacatgtactcattcatagtggcaatgtacacagtcataaggaatgtgggaagccttccttggtgtctcagatcttaacaattccaatagaagagaagacatatgaatgtaaggaatgtgggaaaatcttggctccttccataggccttactattcatgtgtctgtgcatcctaggaaacaaactgaacgtaggaaacctgtcgatgcttacatcttactgagtctgtttgaactcatgctggagagaaatgctatgaatgtgaggaaggtggaaaagctttcattattttcctcgggccttactgagcttgtgagcacattggatataaatgcacgtcctctggctgtaaggaatgtgttgaaacctttcactctgccttataccttaatattcagctgtgatctcacaagtgtgaaaaatcttatgaatgtaaaatgtgtggagattcttctttgtttttagcttccactttgggaacatgtcaaagcacacattgagaagtcccatgagtgaaagagatgttggaaagcccttgaacttggtcgttaggaaacatccacactgaagaggaacctgactgtatggaaggtcaaaaaggctgtattaatttacatgcaaaaagtcacactagaggaatgccatatcagaatgcttttggtaaatatacatgttttaaagaggttatatatcattaataaaaatatctagctggtctg

SEQ ID NO: 10699 - protein, 133 aa, Homo sapiens
MLENYKNLVAVDWESHINTKWSAPQQNFLQGKTSSVVEMVRFRRYNLLSSMLEEDWKFLKMEKQHNNLETFETSVFHPKIICLLERLWIMSLTNTLNIPQNIFVYIFPSTFPYVSQMFLINNSLLGRYQLSSI

SEQ ID NO: 10700 - DNA, 2428 bp, Homo sapiens
atcttaacagcgcgttcccgttggcgtctgaggaacagcatctctgccttcctgttcacggtgaccttcgcttggtgtcctcctggcctcagcaacctgacaattctgtcgtgtcccgattgggagagtcatattaataccaaatggtcagcacctcagcagaattttttgcaggggaaaacatccagtgtggtggaaatgaattcagagtaaaagggagaatctcaatgaaataaatttggaaaacttctatgaaccatcattaattttcaccaacaggagagaaaccattttggagaggaactgtttgactttaaccaatgtgaaaaagccttgagtgaacactcatgccttaagactcacaggagaacttactttagaaagaaaacctgtgagtgtaatcaatgtgaaaaagccttcagaaaaccctctatctttactttacacaagaaaactgatatcggagaggaacttcctaactgtaatcaatgtgaaacagccttcagccaacatctacatcttgtttgcaagaaaactagccaaaatctacatcttgtttgcaagaaaactcacactcaagagaaaccatataaatgcagtgactgtgaaaaaggcttaccttcctcctcacacctcagagaatgtgtaagaatttatggtggagagagaccatatactcataaggagtatgtcgaaaccttttctcattctacagccctttttgtacacatgcaaactcaagatggagaaaaattctatgaatgtaaagcatgtgggaaacccttcactgagtcgtcatatcttactcaacatttaagaactcatagtagagtgttacctatagaacataagaaatttggcaaagcctttgctttttccccagatcttgctaaacatataagacttagaactagaggaaaacactatgtttgtaatgaatgtggcaaagaatttacttgtttctcaaaactcaacattcacataagggttcacactggagaaaaaccgtatgagtgcaacaaatgtgggaaagccttcactgattcatcaggtcttataaaacacaggcgaactcacactggagaaaagccttatgaatgtaaggaatgtgggaaagcttttgctaactcttcacatcttactgtacatatgagaactcacactggtgagaagccttatcaatgtaaggaatgtggaaaagcctttattaattcctcttcctttaaaagtcacatgcagactcatcctggtgtaaaaccctatgactgtcaacagtgtgggaaagccttcattcgatcctcatttcttattcgacatttgagaagtcacagtgcagaaaggccttttgaatgtgaggaatgtgggaaagcctttagatactcctcgcaccttagtcaacataaaagaatacatacaggggagaggccatataaatgtcaaaagtgtgggcaagccttcagtatctcatcaggccttacagtacacatgagaactcacactggtgaacggccctttgaatgtcaggaatgtgggaaagcctttactcggtccacatatcttattcgacatctaagaagtcatagtgtggagaaaccatataaggaatgtgggcaaacctttagtaattcctcatgccttactgaatgtgtgtgaattggggctgatacttggaaagaatgtggtaaagccactacttcctcacacttactgaacatgtactcattcatagtggcaatgtacacagtcataaggaatgtgggaagccttccttggtgtctcagatcttaacaattccaatagaagagaagacatatgaatgtaaggaatgtgggaaaatcttggctccttccataggccttactattcatgtgtctgtgcatcctaggaaacaaactgaacgtaggaaacctgtcgatgcttacatcttactgagtctgtttgaactcatgctggagagaaatgctatgaatgtgaggaaggtggaaaagctttcattattttcctcgggccttactgagcttgtgagcacattggatataaatgcacgtcctctggctgtaaggaatgtgttgaaacctttcactctgccttataccttaatattcagctgtgatctcacaagtgtgaaaaatcttatgaatgtaaaatgtgtggagattcttctttgtttttagcttccactttgggaacatgtcaaagcacacattgagaagtcccatgagtgaaagagatgttggaaagcccttgaacttggtcgttaggaaacatccacactgaagaggaacctgactgtatggaaggtcaaaaaggctgtattaatttacatgcaaaaagtcacactagaggaatgccatatcagaatgcttttggtaaatatacatgttttaaagaggttatatatcattaataaaaatatctagctggtctg

SEQ ID NO: 10701 - protein, 30 aa, Homo sapiens
MVSTSAEFFAGENIQCGGNEFRVKGRISMK

SEQ ID NO: 10702 - DNA, 2350 bp, Homo sapiens
atcttaacagcgcgttcccgttggcgtctgaggaacagcatctctgccttcctgttcacggtgaccttcgcttggtgtcctcctggcctcagcaacctgacaattctgtcgtgtcccgattgggagagtcatattaataccaaatggtcagcacctcagcagaattttttgcaggggaaaacatccagtgtggtggaaatggagagaaaccattttggagaggaactgtttgactttaaccaatgtgaaaaagccttgagtgaacactcatgccttaagactcacaggagaacttactttagaaagaaaacctgtgagtgtaatcaatgtgaaaaagccttcagaaaaccctctatctttactttacacaagaaaactgatatcggagaggaacttcctaactgtaatcaatgtgaaacagccttcagccaacatctacatcttgtttgcaagaaaactagccaaaatctacatcttgtttgcaagaaaactcacactcaagagaaaccatataaatgcagtgactgtgaaaaaggcttaccttcctcctcacacctcagagaatgtgtaagaatttatggtggagagagaccatatactcataaggagtatgtcgaaaccttttctcattctacagccctttttgtacacatgcaaactcaagatggagaaaaattctatgaatgtaaagcatgtgggaaacccttcactgagtcgtcatatcttactcaacatttaagaactcatagtagagtgttacctatagaacataagaaatttggcaaagcctttgctttttccccagatcttgctaaacatataagacttagaactagaggaaaacactatgtttgtaatgaatgtggcaaagaatttacttgtttctcaaaactcaacattcacataagggttcacactggagaaaaaccgtatgagtgcaacaaatgtgggaaagccttcactgattcatcaggtcttataaaacacaggcgaactcacactggagaaaagccttatgaatgtaaggaatgtgggaaagcttttgctaactcttcacatcttactgtacatatgagaactcacactggtgagaagccttatcaatgtaaggaatgtggaaaagcctttattaattcctcttcctttaaaagtcacatgcagactcatcctggtgtaaaaccctatgactgtcaacagtgtgggaaagccttcattcgatcctcatttcttattcgacatttgagaagtcacagtgcagaaaggccttttgaatgtgaggaatgtgggaaagcctttagatactcctcgcaccttagtcaacataaaagaatacatacaggggagaggccatataaatgtcaaaagtgtgggcaagccttcagtatctcatcaggccttacagtacacatgagaactcacactggtgaacggccctttgaatgtcaggaatgtgggaaagcctttactcggtccacatatcttattcgacatctaagaagtcatagtgtggagaaaccatataaggaatgtgggcaaacctttagtaattcctcatgccttactgaatgtgtgtgaattggggctgatacttggaaagaatgtggtaaagccactacttcctcacacttactgaacatgtactcattcatagtggcaatgtacacagtcataaggaatgtgggaagccttccttggtgtctcagatcttaacaattccaatagaagagaagacatatgaatgtaaggaatgtgggaaaatcttggctccttccataggccttactattcatgtgtctgtgcatcctaggaaacaaactgaacgtaggaaacctgtcgatgcttacatcttactgagtctgtttgaactcatgctggagagaaatgctatgaatgtgaggaaggtggaaaagctttcattattttcctcgggccttactgagcttgtgagcacattggatataaatgcacgtcctctggctgtaaggaatgtgttgaaacctttcactctgccttataccttaatattcagctgtgatctcacaagtgtgaaaaatcttatgaatgtaaaatgtgtggagattcttctttgtttttagcttccactttgggaacatgtcaaagcacacattgagaagtcccatgagtgaaagagatgttggaaagcccttgaacttggtcgttaggaaacatccacactgaagaggaacctgactgtatggaaggtcaaaaaggctgtattaatttacatgcaaaaagtcacactagaggaatgccatatcagaatgcttttggtaaatatacatgttttaaagaggttatatatcattaataaaaatatctagctggtctg

SEQ ID NO: 10703 - protein, 458 aa, Homo sapiens; identical to SEQ ID NO: 10633

SEQ ID NO: 10704 - DNA, 3232 bp, Homo sapiens
atcttaacagcgcgttcccgttggcgtctgaggaacagcatctctgccttcctgttcacggtgaccttcgcttggtgtcctcctggcctcagcaacctgacaattctgtcgtgtcccgattgggagagtcatattaataccaaatggtcagcacctcagcagaattttttgcaggggaaaacatccagtgtggtggaaatgaattcagagtaaaagggagaatctcaatgaaataaatttggaaaacttctatgaaccatcattaattttcaccaacaggagagaaaccattttggagaggaactgtttgactttaaccaatgtgaaaaagccttgagtgaacactcatgccttaagactcacaggagaacttactttagaaagaaaacctgtgagtgtaatcaatgtgaaaaagccttcagaaaaccctctatctttactttacacaagaaaactgatatcggagaggaacttcctaactgtaatcaatgtgaaacagccttcagccaacatctacatcttgtttgcaagaaaactagccaaaatctacatcttgtttgcaagaaaactcacactcaagagaaaccatataaatgcagtgactgtgaaaaaggcttaccttcctcctcacacctcagagaatgtgtaagaatttatggtggagagagaccatatactcataaggagtatgtcgaaaccttttctcattctacagccctttttgtacacatgcaaactcaagatggagaaaaattctatgaatgtaaagcatgtgggaaacccttcactgagtcgtcatatcttactcaacatttaagaactcatagtagagtgttacctatagaacataagaaatttggcaaagcctttgctttttccccagatcttgctaaacatataagacttagaactagaggaaaacactatgtttgtaatgaatgtggcaaagaatttacttgtttctcaaaactcaacattcacataagggttcacactggagaaaaaccgtatgagtgcaacaaatgtgggaaagccttcactgattcatcaggtcttataaaacacaggcgaactcacactggagaaaagccttatgaatgtaaggaatgtgggaaagcttttgctaactcttcacatcttactgtacatatgagaactcacactggtgagaagccttatcaatgtaaggaatgtggaaaagcctttattaattcctcttcctttaaaagtcacatgcagactcatcctggtgtaaaaccctatgactgtcaacagtgtgggaaagccttcattcgatcctcatttcttattcgacatttgagaagtcacagtgcagaaaggccttttgaatgtgaggaatgtgggaaagcctttagatactcctcgcaccttagtcaacataaaagaatacatacaggggagaggccatataaatgtcaaaagtgtgggcaagccttcagtatctcatcaggccttacagtacacatgagaactcacactggtgaacggccctttgaatgtcaggaatgtgggaaagcctttactcggtccacatatcttattcgacatctaagaagtcatagtgtggagaaaccatataaggaatgtgggcaaacctttagtaattcctcatgccttactgaatgtgtgtgaattggggctgatacttggaaagaatgtggtaaagccactacttcctcacacttactgaacatgtactcattcatagtggcaatgtacacagtcataaggaatgtgggaagccttccttggtgtctcagatcttaacaattccaatagaagagaagacatatgaatgtaaggaatgtgggaaaatcttggctccttccataggccttactattcatgtgtctgtgcatcctaggaaacaaactgaacgtaggaaacctgtcgatgcttacatcttactgagtctgtttgaactcatgctggagagaaatgctatgaatgtgaggaaggtggaaaagctttcattattttcctcgggccttactgagcttgtgagcacattggatataaatgcacgtcctctggctgtaaggaatgtgttgaaacctttcactctgccttataccttaatattcagctgtgatctcacaagtgtgaaaaatcttatgaatgtaaaatgtgtggagattcttctttgtttttagcttccactttgggaacatgtcaaagcacacattgagaagtcccatgagtgaaagagatgttggaaagcccttgaacttggtcgttaggaaacatccacactgaagaggaacctgactgtatggaaggtcaaaaaggctgtattaatttacatgcaaaaagtcacactagaggaatgccatatcagaatgcttttggtaaatatacatgttttaaagaggttatatatcattaataaaaatatctagctggtctgaagatcctgagttatctcaattgttcacggttacagatggaactctttattattgaggagttccactctttcccccatttgtcactactacacttccctagtctttaaaacaattttaggctgggtgcagtggctcattcctgtaatcccagcactttgaaaggccgaagcgagtggatcatttgaggtcaggagttcgagaccagcctggccaacgtggtgaaaccccatctctactaaaaatacaaaaattagccaggcatggtggtacgtgcctgtaatcccagctactcgagaggttgaggcagaattgcttgaacccgggaggcggaagctgcagtgagctcagatcacgccactgcactccagcctggatgatatggtaagaccatctcaaaaaaagaaaaaaaaattaaaatatcctcagagggttttttaatgaaaaacttagttatagggaattgaggaacatttaggggtacaaattttcacttattgcacacaagaaaattggtactggccaggcatgctggctcacaccttaattccagcaatttgggaggccaaggcagaaggatcacttgagcccaggagttcaagaccagcctgggcaatatagtgaaacctcatcttgacaaagaataaataagattaactgggtgtactggtttgtgcctatagtcccagctatttaggaggctggggcaagaggattgcttgagcctggtcagggaggcagaggttgcagtgagccctgatcgtgccactacactctagcctgggcaacaggatgagaccctgtct

SEQ ID NO: 10705 - protein, 30 aa, Homo sapiens; identical to SEQ ID NO: 10701

SEQ ID NO: 10706 - DNA, 3154 bp, Homo sapiens
atcttaacagcgcgttcccgttggcgtctgaggaacagcatctctgccttcctgttcacggtgaccttcgcttggtgtcctcctggcctcagcaacctgacaattctgtcgtgtcccgattgggagagtcatattaataccaaatggtcagcacctcagcagaattttttgcaggggaaaacatccagtgtggtggaaatggagagaaaccattttggagaggaactgtttgactttaaccaatgtgaaaaagccttgagtgaacactcatgccttaagactcacaggagaacttactttagaaagaaaacctgtgagtgtaatcaatgtgaaaaagccttcagaaaaccctctatctttactttacacaagaaaactgatatcggagaggaacttcctaactgtaatcaatgtgaaacagccttcagccaacatctacatcttgtttgcaagaaaactagccaaaatctacatcttgtttgcaagaaaactcacactcaagagaaaccatataaatgcagtgactgtgaaaaaggcttaccttcctcctcacacctcagagaatgtgtaagaatttatggtggagagagaccatatactcataaggagtatgtcgaaaccttttctcattctacagccctttttgtacacatgcaaactcaagatggagaaaaattctatgaatgtaaagcatgtgggaaacccttcactgagtcgtcatatcttactcaacatttaagaactcatagtagagtgttacctatagaacataagaaatttggcaaagcctttgctttttccccagatcttgctaaacatataagacttagaactagaggaaaacactatgtttgtaatgaatgtggcaaagaatttacttgtttctcaaaactcaacattcacataagggttcacactggagaaaaaccgtatgagtgcaacaaatgtgggaaagccttcactgattcatcaggtcttataaaacacaggcgaactcacactggagaaaagccttatgaatgtaaggaatgtgggaaagcttttgctaactcttcacatcttactgtacatatgagaactcacactggtgagaagccttatcaatgtaaggaatgtggaaaagcctttattaattcctcttcctttaaaagtcacatgcagactcatcctggtgtaaaaccctatgactgtcaacagtgtgggaaagccttcattcgatcctcatttcttattcgacatttgagaagtcacagtgcagaaaggccttttgaatgtgaggaatgtgggaaagcctttagatactcctcgcaccttagtcaacataaaagaatacatacaggggagaggccatataaatgtcaaaagtgtgggcaagccttcagtatctcatcaggccttacagtacacatgagaactcacactggtgaacggccctttgaatgtcaggaatgtgggaaagcctttactcggtccacatatcttattcgacatctaagaagtcatagtgtggagaaaccatataaggaatgtgggcaaacctttagtaattcctcatgccttactgaatgtgtgtgaattggggctgatacttggaaagaatgtggtaaagccactacttcctcacacttactgaacatgtactcattcatagtggcaatgtacacagtcataaggaatgtgggaagccttccttggtgtctcagatcttaacaattccaatagaagagaagacatatgaatgtaaggaatgtgggaaaatcttggctccttccataggccttactattcatgtgtctgtgcatcctaggaaacaaactgaacgtaggaaacctgtcgatgcttacatcttactgagtctgtttgaactcatgctggagagaaatgctatgaatgtgaggaaggtggaaaagctttcattattttcctcgggccttactgagcttgtgagcacattggatataaatgcacgtcctctggctgtaaggaatgtgttgaaacctttcactctgccttataccttaatattcagctgtgatctcacaagtgtgaaaaatcttatgaatgtaaaatgtgtggagattcttctttgtttttagcttccactttgggaacatgtcaaagcacacattgagaagtcccatgagtgaaagagatgttggaaagcccttgaacttggtcgttaggaaacatccacactgaagaggaacctgactgtatggaaggtcaaaaaggctgtattaatttacatgcaaaaagtcacactagaggaatgccatatcagaatgcttttggtaaatatacatgttttaaagaggttatatatcattaataaaaatatctagctggtctgaagatcctgagttatctcaattgttcacggttacagatggaactctttattattgaggagttccactctttcccccatttgtcactactacacttccctagtctttaaaacaattttaggctgggtgcagtggctcattcctgtaatcccagcactttgaaaggccgaagcgagtggatcatttgaggtcaggagttcgagaccagcctggccaacgtggtgaaaccccatctctactaaaaatacaaaaattagccaggcatggtggtacgtgcctgtaatcccagctactcgagaggttgaggcagaattgcttgaacccgggaggcggaagctgcagtgagctcagatcacgccactgcactccagcctggatgatatggtaagaccatctcaaaaaaagaaaaaaaaattaaaatatcctcagagggttttttaatgaaaaacttagttatagggaattgaggaacatttaggggtacaaattttcacttattgcacacaagaaaattggtactggccaggcatgctggctcacaccttaattccagcaatttgggaggccaaggcagaaggatcacttgagcccaggagttcaagaccagcctgggcaatatagtgaaacctcatcttgacaaagaataaataagattaactgggtgtactggtttgtgcctatagtcccagctatttaggaggctggggcaagaggattgcttgagcctggtcagggaggcagaggttgcagtgagccctgatcgtgccactacactctagcctgggcaacaggatgagaccctgtct

SEQ ID NO: 10707 - protein, 458 aa, Homo sapiens; identical to SEQ ID NO: 10633

SEQ ID NO: 10708 - DNA, 3791 bp, Homo sapiens
atcttaacagcgcgttcccgttggcgtctgaggaacagcatctctgccttcctgttcacggtgaccttcgcttggtgtcctcctggcctcagcaacctgacaattctgtcgtgtcccggactcagtgacctttgaggatgtggctgtggacttcacccaggaggagtggactttgctggatcaaactcagagaaacttatacagagatgtgatgctggagaactataagaatctagttgcagtagattgggagagtcatattaataccaaatggtcagcacctcagcagaattttttgcaggggaaaacatccagtgtggtggaaatggtaagattcagaaggtataatttattgtcttccatgttagaggaagattggaaattccttaaaatggaaaagcagcacaataaccttgagacatttgagactagtgtttttcacccaaaaataatctgtctcttggagagactatggatcatgagtttgacaaacactctaaacatccctcagaatatatttgtttacatatttccttcaacattcccatatgtatctcagatgtttttgataaataattcactcttgggccgttatcagctaagctctatttagaagccctctgaaagtaaagaatataacagaacttcctgcagtcactttgttccacttgaaaacactcaggtctgaaccatgccttgcaatgaaaatggcaggaacaaacagtttcaattatactaacttattttccatgtgtaacagaattcagagtaaaagggagaatctcaatgaaataaatttggaaaacttctatgaaccatcattaattttcaccaacaggagagaaaccattttggagaggaactgtttgactttaaccaatgtgaaaaagccttgagtgaacactcatgccttaagactcacaggagaacttactttagaaagaaaacctgtgagtgtaatcaatgtgaaaaagccttcagaaaaccctctatctttactttacacaagaaaactgatatcggagaggaacttcctaactgtaatcaatgtgaaacagccttcagccaacatctacatcttgtttgcaagaaaactagccaaaatctacatcttgtttgcaagaaaactcacactcaagagaaaccatataaatgcagtgactgtgaaaaaggcttaccttcctcctcacacctcagagaatgtgtaagaatttatggtggagagagaccatatactcataaggagtatgtcgaaaccttttctcattctacagccctttttgtacacatgcaaactcaagatggagaaaaattctatgaatgtaaagcatgtgggaaacccttcactgagtcgtcatatcttactcaacatttaagaactcatagtagagtgttacctatagaacataagaaatttggcaaagcctttgctttttccccagatcttgctaaacatataagacttagaactagaggaaaacactatgtttgtaatgaatgtggcaaagaatttacttgtttctcaaaactcaacattcacataagggttcacactggagaaaaaccgtatgagtgcaacaaatgtgggaaagccttcactgattcatcaggtcttataaaacacaggcgaactcacactggagaaaagccttatgaatgtaaggaatgtgggaaagcttttgctaactcttcacatcttactgtacatatgagaactcacactggtgagaagccttatcaatgtaaggaatgtggaaaagcctttattaattcctcttcctttaaaagtcacatgcagactcatcctggtgtaaaaccctatgactgtcaacagtgtgggaaagccttcattcgatcctcatttcttattcgacatttgagaagtcacagtgcagaaaggccttttgaatgtgaggaatgtgggaaagcctttagatactcctcgcaccttagtcaacataaaagaatacatacaggggagaggccatataaatgtcaaaagtgtgggcaagccttcagtatctcatcaggccttacagtacacatgagaactcacactggtgaacggccctttgaatgtcaggaatgtgggaaagcctttactcggtccacatatcttattcgacatctaagaagtcatagtgtggagaaaccatataaggaatgtgggcaaacctttagtaattcctcatgccttactgaatgtgtgtgaattggggctgatacttggaaagaatgtggtaaagccactacttcctcacacttactgaacatgtactcattcatagtggcaatgtacacagtcataaggaatgtgggaagccttccttggtgtctcagatcttaacaattccaatagaagagaagacatatgaatgtaaggaatgtgggaaaatcttggctccttccataggccttactattcatgtgtctgtgcatcctaggaaacaaactgaacgtaggaaacctgtcgatgcttacatcttactgagtctgtttgaactcatgctggagagaaatgctatgaatgtgaggaaggtggaaaagctttcattattttcctcgggccttactgagcttgtgagcacattggatataaatgcacgtcctctggctgtaaggaatgtgttgaaacctttcactctgccttataccttaatattcagctgtgatctcacaagtgtgaaaaatcttatgaatgtaaaatgtgtggagattcttctttgtttttagcttccactttgggaacatgtcaaagcacacattgagaagtcccatgagtgaaagagatgttggaaagcccttgaacttggtcgttaggaaacatccacactgaagaggaacctgactgtatggaaggtcaaaaaggctgtattaatttacatgcaaaaagtcacactagaggaatgccatatcagaatgcttttggtaaatatacatgttttaaagaggttatatatcattaataaaaatatctagctggtctgaagatcctgagttatctcaattgttcacggttacagatggaactctttattattgaggagttccactctttcccccatttgtcactactacacttccctagtctttaaaacaattttaggctgggtgcagtggctcattcctgtaatcccagcactttgaaaggccgaagcgagtggatcatttgaggtcaggagttcgagaccagcctggccaacgtggtgaaaccccatctctactaaaaatacaaaaattagccaggcatggtggtacgtgcctgtaatcccagctactcgagaggttgaggcagaattgcttgaacccgggaggcggaagctgcagtgagctcagatcacgccactgcactccagcctggatgatatggtaagaccatctcaaaaaaagaaaaaaaaattaaaatatcctcagagggttttttaatgaaaaacttagttatagggaattgaggaacatttaggggtacaaattttcacttattgcacacaagaaaattggtactggccaggcatgctggctcacaccttaattccagcaatttgggaggccaaggcagaaggatcacttgagcccaggagttcaagaccagcctgggcaatatagtgaaacctcatcttgacaaagaataaataagattaactgggtgtactggtttgtgcctatagtcccagctatttaggaggctggggcaagaggattgcttgagcctggtcagggaggcagaggttgcagtgagccctgatcgtgccactacactctagcctgggcaacaggatgagaccctgtct

SEQ ID NO: 10709 - protein, 133 aa, Homo sapiens; identical to SEQ ID NO: 10699

SEQ ID NO: 10710 - DNA, 562 bp, Homo sapiens
atcttaacagcgcgttcccgttggcgtctgaggaacagcatctctgccttcctgttcacggtgaccttcgcttggtgtcctcctggcctcagcaacctgacaattctgtcgtgtcccgagagatggctaatgaatggcgcttgatgacagatgagtaatgcctgttgctgaaagattgacgatcatctttctcaagatgttttctgtcttcatgagtcaaaatttgaagaggaaaggatggtggctgggtggttgacaaattactctcagattgggagagtcatattaataccaaatggtcagcacctcagcagaattttttgcaggggaaaacatccagtgtggtggaaatgagagagggtctctctctgttgaccaggctggtcttgaactgctggactcaagggatcctgccacctcagcctcccagagtgctgggattacagacgtgagccactgctcttggccgtcttttctggattgcaccttatttggatgaccagatcctggacataaaaccagagtctactaccacgggcatgagactttggtgtggccttag

SEQ ID NO: 10711 - protein, 67 aa, Homo sapiens
MVSTSAEFFAGENIQCGGNERGSLSVDQAGLELLDSRDPATSASQSAGITDVSHCSWPSFLDCTLFG

SEQ ID NO: 10712 - DNA, 565 bp, Homo sapiens
atcttaacagcgcgttcccgttggcgtctgaggaacagcatctctgccttcctgttcacggtgaccttcgcttggtgtcctcctggcctcagcaacctgacaattctgtcgtgtcccgagagatggctaatgaatggcgcttgatgacagatgagtaatgcctgttgctgaaagattgacggtatgaggcaagactcccactactacttaatcaagaggaattgagattgacttacccataagttcagacagtgtctcgaagagactttgggaacaagatattcaggcacatttcactgttagactcacaggatgctggccattggtctttccctttgtgatcatctttctcaagatgttttctgtcttcatgagtcaaaatttgaagaggaaaggatggtggctgggtggttgacaaattactctcagattgggagagtcatattaataccaaatggtcagcacctcagcagaattttttgcaggggaaaacatccagtgtggtggaaatgggctgggtataagtaagcaagaagagggcctgggagaagagtctgacgagcaa

SEQ ID NO: 10713 - protein, 71 aa, Homo sapiens
MLAIGLSLCDHLSQDVFCLHESKFEEERMVAGWLTNYSQIGRVILIPNGQHLSRIFCRGKHPVWWKWAGYK

SEQ ID NO: 10714 - DNA, 2859 bp, Homo sapiens
tcttaacagcgcgttcccgttggcgtctgaggaacagcatctctgccttcctgttcacggtgaccttcgcttggtgtcctcctggcctcagcaacctgacaattctgtcgtgtcccgattgggagagtcatattaataccaaatggtcagcacctcagcagaattttttgcaggggaaaacatccagtgtggtggaaatggtaagattcagaaggtataatttattgtcttccatgttagaggaagattggaaattccttaaaatggaaaagcagcacaataaccttgagacatttgagactagtgtttttcacccaaaaataatctgtctcttggagagactatggatcatgagtttgacaaacactctaaacatccctcagaatatatttgtttacatatttccttcaacattcccatatgtatctcagatgtttttgataaataattcactcttgggccgttatcagctaagctctatttagaagccctctgaaagtaaagaatataacagaacttcctgcagtcactttgttccacttgaaaacactcaggtctgaaccatgccttgcaatgaaaatggcaggaacaaacagtttcaattatactaacttattttccatgtgtaacagaattcagagtaaaagggagaatctcaatgaaataaatttggaaaacttctatgaaccatcattaattttcaccaacaggagagaaaccattttggagaggaactgtttgactttaaccaatgtgaaaaagccttgagtgaacactcatgccttaagactcacaggagaacttactttagaaagaaaacctgtgagtgtaatcaatgtgaaaaagccttcagaaaaccctctatctttactttacacaagaaaactgatatcggagaggaacttcctaactgtaatcaatgtgaaacagccttcagccaacatctacatcttgtttgcaagaaaactagccaaaatctacatcttgtttgcaagaaaactcacactcaagagaaaccatataaatgcagtgactgtgaaaaaggcttaccttcctcctcacacctcagagaatgtgtaagaatttatggtggagagagaccatatactcataaggagtatgtcgaaaccttttctcattctacagccctttttgtacacatgcaaactcaagatggagaaaaattctatgaatgtaaagcatgtgggaaacccttcactgagtcgtcatatcttactcaacatttaagaactcatagtagagtgttacctatagaacataagaaatttggcaaagcctttgctttttccccagatcttgctaaacatataagacttagaactagaggaaaacactatgtttgtaatgaatgtggcaaagaatttacttgtttctcaaaactcaacattcacataagggttcacactggagaaaaaccgtatgagtgcaacaaatgtgggaaagccttcactgattcatcaggtcttataaaacacaggcgaactcacactggagaaaagccttatgaatgtaaggaatgtgggaaagcttttgctaactcttcacatcttactgtacatatgagaactcacactggtgagaagccttatcaatgtaaggaatgtggaaaagcctttattaattcctcttcctttaaaagtcacatgcagactcatcctggtgtaaaaccctatgactgtcaacagtgtgggaaagccttcattcgatcctcatttcttattcgacatttgagaagtcacagtgcagaaaggccttttgaatgtgaggaatgtgggaaagcctttagatactcctcgcaccttagtcaacataaaagaatacatacaggggagaggccatataaatgtcaaaagtgtgggcaagccttcagtatctcatcaggccttacagtacacatgagaactcacactggtgaacggccctttgaatgtcaggaatgtgggaaagcctttactcggtccacatatcttattcgacatctaagaagtcatagtgtggagaaaccatataaggaatgtgggcaaacctttagtaattcctcatgccttactgaatgtgtgtgaattggggctgatacttggaaagaatgtggtaaagccactacttcctcacacttactgaacatgtactcattcatagtggcaatgtacacagtcataaggaatgtgggaagccttccttggtgtctcagatcttaacaattccaatagaagagaagacatatgaatgtaaggaatgtgggaaaatcttggctccttccataggccttactattcatgtgtctgtgcatcctaggaaacaaactgaacgtaggaaacctgtcgatgcttacatcttactgagtctgtttgaactcatgctggagagaaatgctatgaatgtgaggaaggtggaaaagctttcattattttcctcgggccttactgagcttgtgagcacattggatataaatgcacgtcctctggctgtaaggaatgtgttgaaacctttcactctgccttataccttaatattcagctgtgatctcacaagtgtgaaaaatcttatgaatgtaaaatgtgtggagattcttctttgtttttagcttccactttgggaacatgtcaaagcacacattgagaagtcccatgagtgaaagagatgttggaaagcccttgaacttggtcgttaggaaacatccacactgaagaggaacctgactgtatggaaggtcaaaaaggctgtattaatttacatgcaaaaagtcacactagaggaatgccatatcagaatgcttttggtaaatatacatgttttaaagaggttatatatcattaataaaaatatctagctggtctg

SEQ ID NO: 10715 - protein, 307 aa, Homo sapiens [sequence omitted]

SEQ ID NO: 10716 - DNA, 3663 bp, Homo sapiens
tcttaacagcgcgttcccgttggcgtctgaggaacagcatctctgccttcctgttcacggtgaccttcgcttggtgtcctcctggcctcagcaacctgacaattctgtcgtgtcccgattgggagagtcatattaataccaaatggtcagcacctcagcagaattttttgcaggggaaaacatccagtgtggtggaaatggtaagattcagaaggtataatttattgtcttccatgttagaggaagattggaaattccttaaaatggaaaagcagcacaataaccttgagacatttgagactagtgtttttcacccaaaaataatctgtctcttggagagactatggatcatgagtttgacaaacactctaaacatccctcagaatatatttgtttacatatttccttcaacattcccatatgtatctcagatgtttttgataaataattcactcttgggccgttatcagctaagctctatttagaagccctctgaaagtaaagaatataacagaacttcctgcagtcactttgttccacttgaaaacactcaggtctgaaccatgccttgcaatgaaaatggcaggaacaaacagtttcaattatactaacttattttccatgtgtaacagaattcagagtaaaagggagaatctcaatgaaataaatttggaaaacttctatgaaccatcattaattttcaccaacaggagagaaaccattttggagaggaactgtttgactttaaccaatgtgaaaaagccttgagtgaacactcatgccttaagactcacaggagaacttactttagaaagaaaacctgtgagtgtaatcaatgtgaaaaagccttcagaaaaccctctatctttactttacacaagaaaactgatatcggagaggaacttcctaactgtaatcaatgtgaaacagccttcagccaacatctacatcttgtttgcaagaaaactagccaaaatctacatcttgtttgcaagaaaactcacactcaagagaaaccatataaatgcagtgactgtgaaaaaggcttaccttcctcctcacacctcagagaatgtgtaagaatttatggtggagagagaccatatactcataaggagtatgtcgaaaccttttctcattctacagccctttttgtacacatgcaaactcaagatggagaaaaattctatgaatgtaaagcatgtgggaaacccttcactgagtcgtcatatcttactcaacatttaagaactcatagtagagtgttacctatagaacataagaaatttggcaaagcctttgctttttccccagatcttgctaaacatataagacttagaactagaggaaaacactatgtttgtaatgaatgtggcaaagaatttacttgtttctcaaaactcaacattcacataagggttcacactggagaaaaaccgtatgagtgcaacaaatgtgggaaagccttcactgattcatcaggtcttataaaacacaggcgaactcacactggagaaaagccttatgaatgtaaggaatgtgggaaagcttttgctaactcttcacatcttactgtacatatgagaactcacactggtgagaagccttatcaatgtaaggaatgtggaaaagcctttattaattcctcttcctttaaaagtcacatgcagactcatcctggtgtaaaaccctatgactgtcaacagtgtgggaaagccttcattcgatcctcatttcttattcgacatttgagaagtcacagtgcagaaaggccttttgaatgtgaggaatgtgggaaagcctttagatactcctcgcaccttagtcaacataaaagaatacatacaggggagaggccatataaatgtcaaaagtgtgggcaagccttcagtatctcatcaggccttacagtacacatgagaactcacactggtgaacggccctttgaatgtcaggaatgtgggaaagcctttactcggtccacatatcttattcgacatctaagaagtcatagtgtggagaaaccatataaggaatgtgggcaaacctttagtaattcctcatgccttactgaatgtgtgtgaattggggctgatacttggaaagaatgtggtaaagccactacttcctcacacttactgaacatgtactcattcatagtggcaatgtacacagtcataaggaatgtgggaagccttccttggtgtctcagatcttaacaattccaatagaagagaagacatatgaatgtaaggaatgtgggaaaatcttggctccttccataggccttactattcatgtgtctgtgcatcctaggaaacaaactgaacgtaggaaacctgtcgatgcttacatcttactgagtctgtttgaactcatgctggagagaaatgctatgaatgtgaggaaggtggaaaagctttcattattttcctcgggccttactgagcttgtgagcacattggatataaatgcacgtcctctggctgtaaggaatgtgttgaaacctttcactctgccttataccttaatattcagctgtgatctcacaagtgtgaaaaatcttatgaatgtaaaatgtgtggagattcttctttgtttttagcttccactttgggaacatgtcaaagcacacattgagaagtcccatgagtgaaagagatgttggaaagcccttgaacttggtcgttaggaaacatccacactgaagaggaacctgactgtatggaaggtcaaaaaggctgtattaatttacatgcaaaaagtcacactagaggaatgccatatcagaatgcttttggtaaatatacatgttttaaagaggttatatatcattaataaaaatatctagctggtctgaagatcctgagttatctcaattgttcacggttacagatggaactctttattattgaggagttccactctttcccccatttgtcactactacacttccctagtctttaaaacaattttaggctgggtgcagtggctcattcctgtaatcccagcactttgaaaggccgaagcgagtggatcatttgaggtcaggagttcgagaccagcctggccaacgtggtgaaaccccatctctactaaaaatacaaaaattagccaggcatggtggtacgtgcctgtaatcccagctactcgagaggttgaggcagaattgcttgaacccgggaggcggaagctgcagtgagctcagatcacgccactgcactccagcctggatgatatggtaagaccatctcaaaaaaagaaaaaaaaattaaaatatcctcagagggttttttaatgaaaaacttagttatagggaattgaggaacatttaggggtacaaattttcacttattgcacacaagaaaattggtactggccaggcatgctggctcacaccttaattccagcaatttgggaggccaaggcagaaggatcacttgagcccaggagttcaagaccagcctgggcaatatagtgaaacctcatcttgacaaagaataaataagattaactgggtgtactggtttgtgcctatagtcccagctatttaggaggctggggcaagaggattgcttgagcctggtcagggaggcagaggttgcagtgagccctgatcgtgccactacactctagcctgggcaacaggatgagaccctgtct

SEQ ID NO: 10717 - protein, 307 aa, Homo sapiens [sequence omitted]

SEQ ID NO: 10718 - DNA, 541 bp, Homo sapiens
ttaacagcgcgttcccgttggcgtctgaggaacagcatctctgccttcctgttcacggtgaccttcgcttggtgtcctcctggcctcagcaacctgacaattctgtcgtgtcccgagagatggctaatgaatggcgcttgatgacagatgagtaatgcctgttgctgaaagattgacggtatgaggcaagactcccactactacttaatcaagaggaattgagattgacttacccataagttcagacagtgtctcgaagagactttgggaacaagatattcaggcacatttcactgttagactcacaggatgctggccattggtctttccctttgtgatcatctttctcaagatgttttctgtcttcatgagtcaaaatttgaagaggaaaggatggtggctgggtggttgacaaattactctcagagagagggtctctctctgttgaccaggctggtcttgaactgctggactcaagggatcctgccacctcagcctcccagagtgctgggattacagacgtgagccactgctcttggcc

SEQ ID NO: 10719 - protein, 71 aa, Homo sapiens
MLAIGLSLCDHLSQDVFCLHESKFEEERMVAGWLTNYSQREGLSLLTRLVLNCWTQGILPPQPPRVLGLQT

SEQ ID NO: 10720 - DNA, 591 bp, Homo sapiens
aacagcgcgttcccgttggcgtctgaggaacagcatctctgccttcctgttcacggtgaccttcgcttggtgtcctcctggcctcagcaacctgacaattctgtcgtgtcccgagatgcggtcttgctgtgttgcctaggctggtctcaaactcctgctctcaagtgatcctcctgcctcagcctcctgagtacatttatatttaaagtaattattgatggctctgcctgcttaggactctgcccagccaggaaggaaacctacaggaggaagaatggctgcagggtggctgacaacctggtcacagaactcagtaaccttccaggaagtggcagtggacttttcccaggaggagtgggcattgctggaccctgctcaaaaaaatctatacaaagatgtgatgctggagaactttaggaacctggcctcagtagggtatcagctctgcagacacagtctgatctccaaggtggatcaagaacagctgaagacagatgaaagaggaattttacaaggtgactgtgcaggtgagccttgggcagaacagggtgcagccttggccagtgagggttagtacatttgggaatgtca

SEQ ID NO: 10721 - protein, 99 aa, Homo sapiens
MAAGWLTTWSQNSVTFQEVAVDFSQEEWALLDPAQKNLYKDVMLENFRNLASVGYQLCRHSLISKVDQEQLKTDERGILQGDCAGEPWAEQGAALASEG

SEQ ID NO: 10722 - DNA, 2570 bp, Homo sapiens
acagcgcgttcccgttggcgtctgaggaacagcatctctgccttcctgttcacggtgaccttcgcttggtgtcctcctggcctcagcaacctgacaattctgtcgtgtcccggcaggagtacagtggtgagatcacggttcactgcagcattgacctccctaggctcaggtgttgctcccacctcagtcttctgaatagcttggagtataggactcagtgacctttgaggatgtggctgtggacttcacccaggaggagtggactttgctggatcaaactcagagaaacttatacagagatgtgatgctggagaactataagaatctagttgcagtagattgggagagtcatattaataccaaatggtcagcacctcagcagaattttttgcaggggaaaacatccagtgtggtggaaatggagagaaaccattttggagaggaactgtttgactttaaccaatgtgaaaaagccttgagtgaacactcatgccttaagactcacaggagaacttactttagaaagaaaacctgtgagtgtaatcaatgtgaaaaagccttcagaaaaccctctatctttactttacacaagaaaactgatatcggagaggaacttcctaactgtaatcaatgtgaaacagccttcagccaacatctacatcttgtttgcaagaaaactagccaaaatctacatcttgtttgcaagaaaactcacactcaagagaaaccatataaatgcagtgactgtgaaaaaggcttaccttcctcctcacacctcagagaatgtgtaagaatttatggtggagagagaccatatactcataaggagtatgtcgaaaccttttctcattctacagccctttttgtacacatgcaaactcaagatggagaaaaattctatgaatgtaaagcatgtgggaaacccttcactgagtcgtcatatcttactcaacatttaagaactcatagtagagtgttacctatagaacataagaaatttggcaaagcctttgctttttccccagatcttgctaaacatataagacttagaactagaggaaaacactatgtttgtaatgaatgtggcaaagaatttacttgtttctcaaaactcaacattcacataagggttcacactggagaaaaaccgtatgagtgcaacaaatgtgggaaagccttcactgattcatcaggtcttataaaacacaggcgaactcacactggagaaaagccttatgaatgtaaggaatgtgggaaagcttttgctaactcttcacatcttactgtacatatgagaactcacactggtgagaagccttatcaatgtaaggaatgtggaaaagcctttattaattcctcttcctttaaaagtcacatgcagactcatcctggtgtaaaaccctatgactgtcaacagtgtgggaaagccttcattcgatcctcatttcttattcgacatttgagaagtcacagtgcagaaaggccttttgaatgtgaggaatgtgggaaagcctttagatactcctcgcaccttagtcaacataaaagaatacatacaggggagaggccatataaatgtcaaaagtgtgggcaagccttcagtatctcatcaggccttacagtacacatgagaactcacactggtgaacggccctttgaatgtcaggaatgtgggaaagcctttactcggtccacatatcttattcgacatctaagaagtcatagtgtggagaaaccatataaggaatgtgggcaaacctttagtaattcctcatgccttactgaatgtgtgtgaattggggctgatacttggaaagaatgtggtaaagccactacttcctcacacttactgaacatgtactcattcatagtggcaatgtacacagtcataaggaatgtgggaagccttccttggtgtctcagatcttaacaattccaatagaagagaagacatatgaatgtaaggaatgtgggaaaatcttggctccttccataggccttactattcatgtgtctgtgcatcctaggaaacaaactgaacgtaggaaacctgtcgatgcttacatcttactgagtctgtttgaactcatgctggagagaaatgctatgaatgtgaggaaggtggaaaagctttcattattttcctcgggccttactgagcttgtgagcacattggatataaatgcacgtcctctggctgtaaggaatgtgttgaaacctttcactctgccttataccttaatattcagctgtgatctcacaagtgtgaaaaatcttatgaatgtaaaatgtgtggagattcttctttgtttttagcttccactttgggaacatgtcaaagcacacattgagaagtcccatgagtgaaagagatgttggaaagcccttgaacttggtcgttaggaaacatccacactgaagaggaacctgactgtatggaaggtcaaaaaggctgtattaatttacatgcaaaaagtcacactagaggaatgccatatcagaatgcttttggtaaatatacatgttttaaagaggttatatatcattaataaaaatatctagctggtctg

SEQ ID NO: 10723 - protein, 496 aa, Homo sapiens
MLENYKNLVAVDWESHINTKWSAPQQNFLQGKTSSVVEMERNHFGEELFDFNQCEKALSEHSCLKTHRRTYFRKKTCECNQCEKAFRKPSIFTLHKKTDIGEELPNCNQCETAFSQHLHLVCKKTSQNLHLVCKKTHTQEKPYKCSDCEKGLPSSSHLRECVRIYGGERPYTHKEYVETFSHSTALFVHMQTQDGEKFYECKACGKPFTESSYLTQHLRTHSRVLPIEHKKFGKAFAFSPDLAKHIRLRTRGKHYVCNECGKEFTCFSKLNIHIRVHTGEKPYECNKCGKAFTDSSGLIKHRRTHTGEKPYECKECGKAFANSSHLTVHMRTHTGEKPYQCKECGKAFINSSSFKSHMQTHPGVKPYDCQQCGKAFIRSSFLIRHLRSHSAERPFECEECGKAFRYSSHLSQHKRIHTGERPYKCQKCGQAFSISSGLTVHMRTHTGERPFECQECGKAFTRSTYLIRHLRSHSVEKPYKECGQTFSNSSCLTECV

SEQ ID NO: 10724 - DNA, 3374 bp, Homo sapiens
acagcgcgttcccgttggcgtctgaggaacagcatctctgccttcctgttcacggtgaccttcgcttggtgtcctcctggcctcagcaacctgacaattctgtcgtgtcccggcaggagtacagtggtgagatcacggttcactgcagcattgacctccctaggctcaggtgttgctcccacctcagtcttctgaatagcttggagtataggactcagtgacctttgaggatgtggctgtggacttcacccaggaggagtggactttgctggatcaaactcagagaaacttatacagagatgtgatgctggagaactataagaatctagttgcagtagattgggagagtcatattaataccaaatggtcagcacctcagcagaattttttgcaggggaaaacatccagtgtggtggaaatggagagaaaccattttggagaggaactgtttgactttaaccaatgtgaaaaagccttgagtgaacactcatgccttaagactcacaggagaacttactttagaaagaaaacctgtgagtgtaatcaatgtgaaaaagccttcagaaaaccctctatctttactttacacaagaaaactgatatcggagaggaacttcctaactgtaatcaatgtgaaacagccttcagccaacatctacatcttgtttgcaagaaaactagccaaaatctacatcttgtttgcaagaaaactcacactcaagagaaaccatataaatgcagtgactgtgaaaaaggcttaccttcctcctcacacctcagagaatgtgtaagaatttatggtggagagagaccatatactcataaggagtatgtcgaaaccttttctcattctacagccctttttgtacacatgcaaactcaagatggagaaaaattctatgaatgtaaagcatgtgggaaacccttcactgagtcgtcatatcttactcaacatttaagaactcatagtagagtgttacctatagaacataagaaatttggcaaagcctttgctttttccccagatcttgctaaacatataagacttagaactagaggaaaacactatgtttgtaatgaatgtggcaaagaatttacttgtttctcaaaactcaacattcacataagggttcacactggagaaaaaccgtatgagtgcaacaaatgtgggaaagccttcactgattcatcaggtcttataaaacacaggcgaactcacactggagaaaagccttatgaatgtaaggaatgtgggaaagcttttgctaactcttcacatcttactgtacatatgagaactcacactggtgagaagccttatcaatgtaaggaatgtggaaaagcctttattaattcctcttcctttaaaagtcacatgcagactcatcctggtgtaaaaccctatgactgtcaacagtgtgggaaagccttcattcgatcctcatttcttattcgacatttgagaagtcacagtgcagaaaggccttttgaatgtgaggaatgtgggaaagcctttagatactcctcgcaccttagtcaacataaaagaatacatacaggggagaggccatataaatgtcaaaagtgtgggcaagccttcagtatctcatcaggccttacagtacacatgagaactcacactggtgaacggccctttgaatgtcaggaatgtgggaaagcctttactcggtccacatatcttattcgacatctaagaagtcatagtgtggagaaaccatataaggaatgtgggcaaacctttagtaattcctcatgccttactgaatgtgtgtgaattggggctgatacttggaaagaatgtggtaaagccactacttcctcacacttactgaacatgtactcattcatagtggcaatgtacacagtcataaggaatgtgggaagccttccttggtgtctcagatcttaacaattccaatagaagagaagacatatgaatgtaaggaatgtgggaaaatcttggctccttccataggccttactattcatgtgtctgtgcatcctaggaaacaaactgaacgtaggaaacctgtcgatgcttacatcttactgagtctgtttgaactcatgctggagagaaatgctatgaatgtgaggaaggtggaaaagctttcattattttcctcgggccttactgagcttgtgagcacattggatataaatgcacgtcctctggctgtaaggaatgtgttgaaacctttcactctgccttataccttaatattcagctgtgatctcacaagtgtgaaaaatcttatgaatgtaaaatgtgtggagattcttctttgtttttagcttccactttgggaacatgtcaaagcacacattgagaagtcccatgagtgaaagagatgttggaaagcccttgaacttggtcgttaggaaacatccacactgaagaggaacctgactgtatggaaggtcaaaaaggctgtattaatttacatgcaaaaagtcacactagaggaatgccatatcagaatgcttttggtaaatatacatgttttaaagaggttatatatcattaataaaaatatctagctggtctgaagatcctgagttatctcaattgttcacggttacagatggaactctttattattgaggagttccactctttcccccatttgtcactactacacttccctagtctttaaaacaattttaggctgggtgcagtggctcattcctgtaatcccagcactttgaaaggccgaagcgagtggatcatttgaggtcaggagttcgagaccagcctggccaacgtggtgaaaccccatctctactaaaaatacaaaaattagccaggcatggtggtacgtgcctgtaatcccagctactcgagaggttgaggcagaattgcttgaacccgggaggcggaagctgcagtgagctcagatcacgccactgcactccagcctggatgatatggtaagaccatctcaaaaaaagaaaaaaaaattaaaatatcctcagagggttttttaatgaaaaacttagttatagggaattgaggaacatttaggggtacaaattttcacttattgcacacaagaaaattggtactggccaggcatgctggctcacaccttaattccagcaatttgggaggccaaggcagaaggatcacttgagcccaggagttcaagaccagcctgggcaatatagtgaaacctcatcttgacaaagaataaataagattaactgggtgtactggtttgtgcctatagtcccagctatttaggaggctggggcaagaggattgcttgagcctggtcagggaggcagaggttgcagtgagccctgatcgtgccactacactctagcctgggcaacaggatgagaccctgtct

SEQ ID NO: 10725 - protein, 496 aa, Homo sapiens; identical to SEQ ID NO: 10723

SEQ ID NO: 10726 - DNA, 2278 bp, Homo sapiens
gtctgaggtaagtttttgtttctgggcggcgttcggtggtgtcccgattgggagagtcatattaataccaaatggtcagcacctcagcagaattttttgcaggggaaaacatccagtgtggtggaaatggagagaaaccattttggagaggaactgtttgactttaaccaatgtgaaaaagccttgagtgaacactcatgccttaagactcacaggagaacttactttagaaagaaaacctgtgagtgtaatcaatgtgaaaaagccttcagaaaaccctctatctttactttacacaagaaaactgatatcggagaggaacttcctaactgtaatcaatgtgaaacagccttcagccaacatctacatcttgtttgcaagaaaactagccaaaatctacatcttgtttgcaagaaaactcacactcaagagaaaccatataaatgcagtgactgtgaaaaaggcttaccttcctcctcacacctcagagaatgtgtaagaatttatggtggagagagaccatatactcataaggagtatgtcgaaaccttttctcattctacagccctttttgtacacatgcaaactcaagatggagaaaaattctatgaatgtaaagcatgtgggaaacccttcactgagtcgtcatatcttactcaacatttaagaactcatagtagagtgttacctatagaacataagaaatttggcaaagcctttgctttttccccagatcttgctaaacatataagacttagaactagaggaaaacactatgtttgtaatgaatgtggcaaagaatttacttgtttctcaaaactcaacattcacataagggttcacactggagaaaaaccgtatgagtgcaacaaatgtgggaaagccttcactgattcatcaggtcttataaaacacaggcgaactcacactggagaaaagccttatgaatgtaaggaatgtgggaaagcttttgctaactcttcacatcttactgtacatatgagaactcacactggtgagaagccttatcaatgtaaggaatgtggaaaagcctttattaattcctcttcctttaaaagtcacatgcagactcatcctggtgtaaaaccctatgactgtcaacagtgtgggaaagccttcattcgatcctcatttcttattcgacatttgagaagtcacagtgcagaaaggccttttgaatgtgaggaatgtgggaaagcctttagatactcctcgcaccttagtcaacataaaagaatacatacaggggagaggccatataaatgtcaaaagtgtgggcaagccttcagtatctcatcaggccttacagtacacatgagaactcacactggtgaacggccctttgaatgtcaggaatgtgggaaagcctttactcggtccacatatcttattcgacatctaagaagtcatagtgtggagaaaccatataaggaatgtgggcaaacctttagtaattcctcatgccttactgaatgtgtgtgaattggggctgatacttggaaagaatgtggtaaagccactacttcctcacacttactgaacatgtactcattcatagtggcaatgtacacagtcataaggaatgtgggaagccttccttggtgtctcagatcttaacaattccaatagaagagaagacatatgaatgtaaggaatgtgggaaaatcttggctccttccataggccttactattcatgtgtctgtgcatcctaggaaacaaactgaacgtaggaaacctgtcgatgcttacatcttactgagtctgtttgaactcatgctggagagaaatgctatgaatgtgaggaaggtggaaaagctttcattattttcctcgggccttactgagcttgtgagcacattggatataaatgcacgtcctctggctgtaaggaatgtgttgaaacctttcactctgccttataccttaatattcagctgtgatctcacaagtgtgaaaaatcttatgaatgtaaaatgtgtggagattcttctttgtttttagcttccactttgggaacatgtcaaagcacacattgagaagtcccatgagtgaaagagatgttggaaagcccttgaacttggtcgttaggaaacatccacactgaagaggaacctgactgtatggaaggtcaaaaaggctgtattaatttacatgcaaaaagtcacactagaggaatgccatatcagaatgcttttggtaaatatacatgttttaaagaggttatatatcattaataaaaatatctagctggtctg

SEQ ID NO: 10727 - protein, 458 aa, Homo sapiens; identical to SEQ ID NO: 10633

SEQ ID NO: 10728 - DNA, 3082 bp, Homo sapiens
gtctgaggtaagtttttgtttctgggcggcgttcggtggtgtcccgattgggagagtcatattaataccaaatggtcagcacctcagcagaattttttgcaggggaaaacatccagtgtggtggaaatggagagaaaccattttggagaggaactgtttgactttaaccaatgtgaaaaagccttgagtgaacactcatgccttaagactcacaggagaacttactttagaaagaaaacctgtgagtgtaatcaatgtgaaaaagccttcagaaaaccctctatctttactttacacaagaaaactgatatcggagaggaacttcctaactgtaatcaatgtgaaacagccttcagccaacatctacatcttgtttgcaagaaaactagccaaaatctacatcttgtttgcaagaaaactcacactcaagagaaaccatataaatgcagtgactgtgaaaaaggcttaccttcctcctcacacctcagagaatgtgtaagaatttatggtggagagagaccatatactcataaggagtatgtcgaaaccttttctcattctacagccctttttgtacacatgcaaactcaagatggagaaaaattctatgaatgtaaagcatgtgggaaacccttcactgagtcgtcatatcttactcaacatttaagaactcatagtagagtgttacctatagaacataagaaatttggcaaagcctttgctttttccccagatcttgctaaacatataagacttagaactagaggaaaacactatgtttgtaatgaatgtggcaaagaatttacttgtttctcaaaactcaacattcacataagggttcacactggagaaaaaccgtatgagtgcaacaaatgtgggaaagccttcactgattcatcaggtcttataaaacacaggcgaactcacactggagaaaagccttatgaatgtaaggaatgtgggaaagcttttgctaactcttcacatcttactgtacatatgagaactcacactggtgagaagccttatcaatgtaaggaatgtggaaaagcctttattaattcctcttcctttaaaagtcacatgcagactcatcctggtgtaaaaccctatgactgtcaacagtgtgggaaagccttcattcgatcctcatttcttattcgacatttgagaagtcacagtgcagaaaggccttttgaatgtgaggaatgtgggaaagcctttagatactcctcgcaccttagtcaacataaaagaatacatacaggggagaggccatataaatgtcaaaagtgtgggcaagccttcagtatctcatcaggccttacagtacacatgagaactcacactggtgaacggccctttgaatgtcaggaatgtgggaaagcctttactcggtccacatatcttattcgacatctaagaagtcatagtgtggagaaaccatataaggaatgtgggcaaacctttagtaattcctcatgccttactgaatgtgtgtgaattggggctgatacttggaaagaatgtggtaaagccactacttcctcacacttactgaacatgtactcattcatagtggcaatgtacacagtcataaggaatgtgggaagccttccttggtgtctcagatcttaacaattccaatagaagagaagacatatgaatgtaaggaatgtgggaaaatcttggctccttccataggccttactattcatgtgtctgtgcatcctaggaaacaaactgaacgtaggaaacctgtcgatgcttacatcttactgagtctgtttgaactcatgctggagagaaatgctatgaatgtgaggaaggtggaaaagctttcattattttcctcgggccttactgagcttgtgagcacattggatataaatgcacgtcctctggctgtaaggaatgtgttgaaacctttcactctgccttataccttaatattcagctgtgatctcacaagtgtgaaaaatcttatgaatgtaaaatgtgtggagattcttctttgtttttagcttccactttgggaacatgtcaaagcacacattgagaagtcccatgagtgaaagagatgttggaaagcccttgaacttggtcgttaggaaacatccacactgaagaggaacctgactgtatggaaggtcaaaaaggctgtattaatttacatgcaaaaagtcacactagaggaatgccatatcagaatgcttttggtaaatatacatgttttaaagaggttatatatcattaataaaaatatctagctggtctgaagatcctgagttatctcaattgttcacggttacagatggaactctttattattgaggagttccactctttcccccatttgtcactactacacttccctagtctttaaaacaattttaggctgggtgcagtggctcattcctgtaatcccagcactttgaaaggccgaagcgagtggatcatttgaggtcaggagttcgagaccagcctggccaacgtggtgaaaccccatctctactaaaaatacaaaaattagccaggcatggtggtacgtgcctgtaatcccagctactcgagaggttgaggcagaattgcttgaacccgggaggcggaagctgcagtgagctcagatcacgccactgcactccagcctggatgatatggtaagaccatctcaaaaaaagaaaaaaaaattaaaatatcctcagagggttttttaatgaaaaacttagttatagggaattgaggaacatttaggggtacaaattttcacttattgcacacaagaaaattggtactggccaggcatgctggctcacaccttaattccagcaatttgggaggccaaggcagaaggatcacttgagcccaggagttcaagaccagcctgggcaatatagtgaaacctcatcttgacaaagaataaataagattaactgggtgtactggtttgtgcctatagtcccagctatttaggaggctggggcaagaggattgcttgagcctggtcagggaggcagaggttgcagtgagccctgatcgtgccactacactctagcctgggcaacaggatgagaccctgtct

SEQ ID NO: 10729 - protein, 458 aa, Homo sapiens; identical to SEQ ID NO: 10633

SEQ ID NO: 10730 - DNA, 2429 bp, Homo sapiens
atttcgagcatcttgtgggctctcccaagtcgcggcccctcctctgagagccacagtcaggaacagcatctctgccttcctgttcacggtgaccttcgcttggtgtcctcctggcctcagcaacctgacaattctgtcgtgtcccgatcatctttctcaagatgttttctgtcttcatgagtcaaaatttgaagaggaaaggatggtggctgggtggttgacaaattactctcagttgctttgattagaaagtttggctttgctgagatacgtagttggaaaagagagaagcattttcagtttcttcagtgtactagatggctgactgggaagattccagggtcccaacaggcttcagagttgcgaaggctctagagggctgggtataagtaagcaagaagagggcctgggagaagagtctgacgagcaaggggaaggtagccaaggatggagtgaaatacaggagatgcggtcttgctgtgttgcctaggctggtctcaaactcctgctctcaagtgatcctcctgcctcagcctcctgagtacatttatatttaaagtaattattgatggctctgcctgcttaggactctgcccagccaggaaggaaacctacaggaggaagaatggctgcagggtggctgacaacctggtcacagaactcagtaaccttccaggaagtggcagtggacttttcccaggaggagtgggcattgctggaccctgctcaaaaaaatctatacaaagatgtgatgctggagaactttaggaacctggcctcagtagggtatcagctctgcagacacagtctgatctccaaggtggatcaagaacagctgaagacagatgaaagaggaattttacaaggtgactgtgcagactgggaaactcaacttaaaccaaaagatacaattgctatgcagaacattcctgggggaaaaacatccaatggcataaacacgaactgtgtcagaactcactctggagagatgccctatgaatgcagtgactgtgggaaagccttcatttttcagtcttcccttaagaaacacatgagatctcatactggagagaagccttatgagtgtgatcactgtggaaaatcctttagccagagctctcatctgaatgtgcacaaaagaactcacactggagagaaaccctatgactgtaaggaatgtgggaaggctttcactgttccttcatcccttcagaaacatgtgagaacccacactggagagaaaccctatgaatgcagtgactgtggaaaagccttcatcgatcagtcatcccttaagaaacacacacgctctcacactggagagaagccttatgagtgtaaccagtgtggaaagtccttcagcacaggctcttaccttattgtgcacaagagaactcacactggtgagaaaacctatgagtgtaaagaatgtgggaaggcctttaggaattcctcttgcctgagggtacacgtgagaactcacactggagagaagccttataaatgtattcagtgtgaaaaagcctttagcacaagcactaaccttataatgcacaagcgaatccacaatggccagaaactccatgaatgaaatgactcagggaagtgtttgttgcccctcatgcctcctttctcactttagaacatatattggagagaagccctgttatggtcacctggaaacagccttctggcccaactctggatgcctgttatactgggacaaaccttataaatgttatagctatgattgtttttatcagtgagtatttcattcttatatgtgtcacaactgtagatcctatgaatattttagttatcttttcagtttaattgcattgtgaacagaacacatggtcttcaatatgtagattctgtgtgacatagatttgaacataattgctggacactgactgatgtactgtggcagacagaactagttgctgtctcaatatccattcctcccttctttcttaaagtaataaaatttaccatttagttcaagctggcaatgtggacagttttcacccagcttcccttacagctgtgagcggccaaatatgttcacatccctagcccatgcaaagtaggcagaagtcactggatacagctgctaaggaagctcatggaaatgggaatatctcatctggtgtttttttcttaactatttgccctttgtcttgtcccttatttcctagaaaatatatacaccaagaggaggacagagaaaggatactaaatgaaacaacaggggagatacaatattatctggttgcactaatcctgtgctgcttatctctggatttcatgttacatgagaaaaattaactgccatgtggtttaaaccactcttgtgggaagttcctctttcagctgatttcagtcccaactgttacatctaataaatggtcaagttttaggaatcgttc

SEQ ID NO: 10731 - protein, 321 aa, Homo sapiens; identical to SEQ ID NO: 10673

SEQ ID NO: 10732 - DNA, 2792 bp, Homo sapiens
aatgattgtactatcccactgtttactaattcagtctgactgtcatccatgctgatatgctttcattttgctgtgatagggagagaatgcacatgtgcttctcggaatttgtgctgtcactggagcatttatttgagtgtctataatgtattcagggttgtgctaaaacctgtcagtagagaacaataagaagaagtcacaatctagttgtgctgagatatattcagttaggtgaaagaggtgctcttcaagccatatgactagatgagatcaccggtgaatatgtacagacaggggagaagaaagtgaggaccatcaagtgataggagaccaaagagtcttgtcaaggcatgccaagacaaggtccctcattctccagtcaacatagtggagaacgtacttgcctgacgccagcatgtgtgtgatggtttaggactcagtgacctttgaggatgtggctgtggacttcacccaggaggagtggactttgctggatcaaactcagagaaacttatacagagatgtgatgctggagaactataagaatctagttgcagtagattgggagagtcatattaataccaaatggtcagcacctcagcagaattttttgcaggggaaaacatccagtgtggtggaaatggagagaaaccattttggagaggaactgtttgactttaaccaatgtgaaaaagccttgagtgaacactcatgccttaagactcacaggagaacttactttagaaagaaaacctgtgagtgtaatcaatgtgaaaaagccttcagaaaaccctctatctttactttacacaagaaaactgatatcggagaggaacttcctaactgtaatcaatgtgaaacagccttcagccaacatctacatcttgtttgcaagaaaactagccaaaatctacatcttgtttgcaagaaaactcacactcaagagaaaccatataaatgcagtgactgtgaaaaaggcttaccttcctcctcacacctcagagaatgtgtaagaatttatggtggagagagaccatatactcataaggagtatgtcgaaaccttttctcattctacagccctttttgtacacatgcaaactcaagatggagaaaaattctatgaatgtaaagcatgtgggaaacccttcactgagtcgtcatatcttactcaacatttaagaactcatagtagagtgttacctatagaacataagaaatttggcaaagcctttgctttttccccagatcttgctaaacatataagacttagaactagaggaaaacactatgtttgtaatgaatgtggcaaagaatttacttgtttctcaaaactcaacattcacataagggttcacactggagaaaaaccgtatgagtgcaacaaatgtgggaaagccttcactgattcatcaggtcttataaaacacaggcgaactcacactggagaaaagccttatgaatgtaaggaatgtgggaaagcttttgctaactcttcacatcttactgtacatatgagaactcacactggtgagaagccttatcaatgtaaggaatgtggaaaagcctttattaattcctcttcctttaaaagtcacatgcagactcatcctggtgtaaaaccctatgactgtcaacagtgtgggaaagccttcattcgatcctcatttcttattcgacatttgagaagtcacagtgcagaaaggccttttgaatgtgaggaatgtgggaaagcctttagatactcctcgcaccttagtcaacataaaagaatacatacaggggagaggccatataaatgtcaaaagtgtgggcaagccttcagtatctcatcaggccttacagtacacatgagaactcacactggtgaacggccctttgaatgtcaggaatgtgggaaagcctttactcggtccacatatcttattcgacatctaagaagtcatagtgtggagaaaccatataaggaatgtgggcaaacctttagtaattcctcatgccttactgaatgtgtgtgaattggggctgatacttggaaagaatgtggtaaagccactacttcctcacacttactgaacatgtactcattcatagtggcaatgtacacagtcataaggaatgtgggaagccttccttggtgtctcagatcttaacaattccaatagaagagaagacatatgaatgtaaggaatgtgggaaaatcttggctccttccataggccttactattcatgtgtctgtgcatcctaggaaacaaactgaacgtaggaaacctgtcgatgcttacatcttactgagtctgtttgaactcatgctggagagaaatgctatgaatgtgaggaaggtggaaaagctttcattattttcctcgggccttactgagcttgtgagcacattggatataaatgcacgtcctctggctgtaaggaatgtgttgaaacctttcactctgccttataccttaatattcagctgtgatctcacaagtgtgaaaaatcttatgaatgtaaaatgtgtggagattcttctttgtttttagcttccactttgggaacatgtcaaagcacacattgagaagtcccatgagtgaaagagatgttggaaagcccttgaacttggtcgttaggaaacatccacactgaagaggaacctgactgtatggaaggtcaaaaaggctgtattaatttacatgcaaaaagtcacactagaggaatgccatatcagaatgcttttggtaaatatacatgttttaaagaggttatatatcattaataaaaatatctagctggtctg

SEQ ID NO: 10733 - protein, 496 aa, Homo sapiens; identical to SEQ ID NO: 10723

SEQ ID NO: 10734 - DNA, 3596 bp, Homo sapiens
aatgattgtactatcccactgtttactaattcagtctgactgtcatccatgctgatatgctttcattttgctgtgatagggagagaatgcacatgtgcttctcggaatttgtgctgtcactggagcatttatttgagtgtctataatgtattcagggttgtgctaaaacctgtcagtagagaacaataagaagaagtcacaatctagttgtgctgagatatattcagttaggtgaaagaggtgctcttcaagccatatgactagatgagatcaccggtgaatatgtacagacaggggagaagaaagtgaggaccatcaagtgataggagaccaaagagtcttgtcaaggcatgccaagacaaggtccctcattctccagtcaacatagtggagaacgtacttgcctgacgccagcatgtgtgtgatggtttaggactcagtgacctttgaggatgtggctgtggacttcacccaggaggagtggactttgctggatcaaactcagagaaacttatacagagatgtgatgctggagaactataagaatctagttgcagtagattgggagagtcatattaataccaaatggtcagcacctcagcagaattttttgcaggggaaaacatccagtgtggtggaaatggagagaaaccattttggagaggaactgtttgactttaaccaatgtgaaaaagccttgagtgaacactcatgccttaagactcacaggagaacttactttagaaagaaaacctgtgagtgtaatcaatgtgaaaaagccttcagaaaaccctctatctttactttacacaagaaaactgatatcggagaggaacttcctaactgtaatcaatgtgaaacagccttcagccaacatctacatcttgtttgcaagaaaactagccaaaatctacatcttgtttgcaagaaaactcacactcaagagaaaccatataaatgcagtgactgtgaaaaaggcttaccttcctcctcacacctcagagaatgtgtaagaatttatggtggagagagaccatatactcataaggagtatgtcgaaaccttttctcattctacagccctttttgtacacatgcaaactcaagatggagaaaaattctatgaatgtaaagcatgtgggaaacccttcactgagtcgtcatatcttactcaacatttaagaactcatagtagagtgttacctatagaacataagaaatttggcaaagcctttgctttttccccagatcttgctaaacatataagacttagaactagaggaaaacactatgtttgtaatgaatgtggcaaagaatttacttgtttctcaaaactcaacattcacataagggttcacactggagaaaaaccgtatgagtgcaacaaatgtgggaaagccttcactgattcatcaggtcttataaaacacaggcgaactcacactggagaaaagccttatgaatgtaaggaatgtgggaaagcttttgctaactcttcacatcttactgtacatatgagaactcacactggtgagaagccttatcaatgtaaggaatgtggaaaagcctttattaattcctcttcctttaaaagtcacatgcagactcatcctggtgtaaaaccctatgactgtcaacagtgtgggaaagccttcattcgatcctcatttcttattcgacatttgagaagtcacagtgcagaaaggccttttgaatgtgaggaatgtgggaaagcctttagatactcctcgcaccttagtcaacataaaagaatacatacaggggagaggccatataaatgtcaaaagtgtgggcaagccttcagtatctcatcaggccttacagtacacatgagaactcacactggtgaacggccctttgaatgtcaggaatgtgggaaagcctttactcggtccacatatcttattcgacatctaagaagtcatagtgtggagaaaccatataaggaatgtgggcaaacctttagtaattcctcatgccttactgaatgtgtgtgaattggggctgatacttggaaagaatgtggtaaagccactacttcctcacacttactgaacatgtactcattcatagtggcaatgtacacagtcataaggaatgtgggaagccttccttggtgtctcagatcttaacaattccaatagaagagaagacatatgaatgtaaggaatgtgggaaaatcttggctccttccataggccttactattcatgtgtctgtgcatcctaggaaacaaactgaacgtaggaaacctgtcgatgcttacatcttactgagtctgtttgaactcatgctggagagaaatgctatgaatgtgaggaaggtggaaaagctttcattattttcctcgggccttactgagcttgtgagcacattggatataaatgcacgtcctctggctgtaaggaatgtgttgaaacctttcactctgccttataccttaatattcagctgtgatctcacaagtgtgaaaaatcttatgaatgtaaaatgtgtggagattcttctttgtttttagcttccactttgggaacatgtcaaagcacacattgagaagtcccatgagtgaaagagatgttggaaagcccttgaacttggtcgttaggaaacatccacactgaagaggaacctgactgtatggaaggtcaaaaaggctgtattaatttacatgcaaaaagtcacactagaggaatgccatatcagaatgcttttggtaaatatacatgttttaaagaggttatatatcattaataaaaatatctagctggtctgaagatcctgagttatctcaattgttcacggttacagatggaactctttattattgaggagttccactctttcccccatttgtcactactacacttccctagtctttaaaacaattttaggctgggtgcagtggctcattcctgtaatcccagcactttgaaaggccgaagcgagtggatcatttgaggtcaggagttcgagaccagcctggccaacgtggtgaaaccccatctctactaaaaatacaaaaattagccaggcatggtggtacgtgcctgtaatcccagctactcgagaggttgaggcagaattgcttgaacccgggaggcggaagctgcagtgagctcagatcacgccactgcactccagcctggatgatatggtaagaccatctcaaaaaaagaaaaaaaaattaaaatatcctcagagggttttttaatgaaaaacttagttatagggaattgaggaacatttaggggtacaaattttcacttattgcacacaagaaaattggtactggccaggcatgctggctcacaccttaattccagcaatttgggaggccaaggcagaaggatcacttgagcccaggagttcaagaccagcctgggcaatatagtgaaacctcatcttgacaaagaataaataagattaactgggtgtactggtttgtgcctatagtcccagctatttaggaggctggggcaagaggattgcttgagcctggtcagggaggcagaggttgcagtgagccctgatcgtgccactacactctagcctgggcaacaggatgagaccctgtct

SEQ ID NO: 10735 - protein, 496 aa, Homo sapiens; identical to SEQ ID NO: 10723

SEQ ID NO: 10736 - DNA, 2354 bp, Homo sapiens
cattatttctctaagaacttaaaatttttttcatcttatttcagattgggagagtcatattaataccaaatggtcagcacctcagcagaattttttgcaggggaaaacatccagtgtggtggaaatgaattcagagtaaaagggagaatctcaatgaaataaatttggaaaacttctatgaaccatcattaattttcaccaacaggagagaaaccattttggagaggaactgtttgactttaaccaatgtgaaaaagccttgagtgaacactcatgccttaagactcacaggagaacttactttagaaagaaaacctgtgagtgtaatcaatgtgaaaaagccttcagaaaaccctctatctttactttacacaagaaaactgatatcggagaggaacttcctaactgtaatcaatgtgaaacagccttcagccaacatctacatcttgtttgcaagaaaactagccaaaatctacatcttgtttgcaagaaaactcacactcaagagaaaccatataaatgcagtgactgtgaaaaaggcttaccttcctcctcacacctcagagaatgtgtaagaatttatggtggagagagaccatatactcataaggagtatgtcgaaaccttttctcattctacagccctttttgtacacatgcaaactcaagatggagaaaaattctatgaatgtaaagcatgtgggaaacccttcactgagtcgtcatatcttactcaacatttaagaactcatagtagagtgttacctatagaacataagaaatttggcaaagcctttgctttttccccagatcttgctaaacatataagacttagaactagaggaaaacactatgtttgtaatgaatgtggcaaagaatttacttgtttctcaaaactcaacattcacataagggttcacactggagaaaaaccgtatgagtgcaacaaatgtgggaaagccttcactgattcatcaggtcttataaaacacaggcgaactcacactggagaaaagccttatgaatgtaaggaatgtgggaaagcttttgctaactcttcacatcttactgtacatatgagaactcacactggtgagaagccttatcaatgtaaggaatgtggaaaagcctttattaattcctcttcctttaaaagtcacatgcagactcatcctggtgtaaaaccctatgactgtcaacagtgtgggaaagccttcattcgatcctcatttcttattcgacatttgagaagtcacagtgcagaaaggccttttgaatgtgaggaatgtgggaaagcctttagatactcctcgcaccttagtcaacataaaagaatacatacaggggagaggccatataaatgtcaaaagtgtgggcaagccttcagtatctcatcaggccttacagtacacatgagaactcacactggtgaacggccctttgaatgtcaggaatgtgggaaagcctttactcggtccacatatcttattcgacatctaagaagtcatagtgtggagaaaccatataaggaatgtgggcaaacctttagtaattcctcatgccttactgaatgtgtgtgaattggggctgatacttggaaagaatgtggtaaagccactacttcctcacacttactgaacatgtactcattcatagtggcaatgtacacagtcataaggaatgtgggaagccttccttggtgtctcagatcttaacaattccaatagaagagaagacatatgaatgtaaggaatgtgggaaaatcttggctccttccataggccttactattcatgtgtctgtgcatcctaggaaacaaactgaacgtaggaaacctgtcgatgcttacatcttactgagtctgtttgaactcatgctggagagaaatgctatgaatgtgaggaaggtggaaaagctttcattattttcctcgggccttactgagcttgtgagcacattggatataaatgcacgtcctctggctgtaaggaatgtgttgaaacctttcactctgccttataccttaatattcagctgtgatctcacaagtgtgaaaaatcttatgaatgtaaaatgtgtggagattcttctttgtttttagcttccactttgggaacatgtcaaagcacacattgagaagtcccatgagtgaaagagatgttggaaagcccttgaacttggtcgttaggaaacatccacactgaagaggaacctgactgtatggaaggtcaaaaaggctgtattaatttacatgcaaaaagtcacactagaggaatgccatatcagaatgcttttggtaaatatacatgttttaaagaggttatatatcattaataaaaatatctagctggtctg

SEQ ID NO: 10737 - protein, 30 aa, Homo sapiens; identical to SEQ ID NO: 10701

SEQ ID NO: 10738 - DNA, 3158 bp, Homo sapiens
cattatttctctaagaacttaaaatttttttcatcttatttcagattgggagagtcatattaataccaaatggtcagcacctcagcagaattttttgcaggggaaaacatccagtgtggtggaaatgaattcagagtaaaagggagaatctcaatgaaataaatttggaaaacttctatgaaccatcattaattttcaccaacaggagagaaaccattttggagaggaactgtttgactttaaccaatgtgaaaaagccttgagtgaacactcatgccttaagactcacaggagaacttactttagaaagaaaacctgtgagtgtaatcaatgtgaaaaagccttcagaaaaccctctatctttactttacacaagaaaactgatatcggagaggaacttcctaactgtaatcaatgtgaaacagccttcagccaacatctacatcttgtttgcaagaaaactagccaaaatctacatcttgtttgcaagaaaactcacactcaagagaaaccatataaatgcagtgactgtgaaaaaggcttaccttcctcctcacacctcagagaatgtgtaagaatttatggtggagagagaccatatactcataaggagtatgtcgaaaccttttctcattctacagccctttttgtacacatgcaaactcaagatggagaaaaattctatgaatgtaaagcatgtgggaaacccttcactgagtcgtcatatcttactcaacatttaagaactcatagtagagtgttacctatagaacataagaaatttggcaaagcctttgctttttccccagatcttgctaaacatataagacttagaactagaggaaaacactatgtttgtaatgaatgtggcaaagaatttacttgtttctcaaaactcaacattcacataagggttcacactggagaaaaaccgtatgagtgcaacaaatgtgggaaagccttcactgattcatcaggtcttataaaacacaggcgaactcacactggagaaaagccttatgaatgtaaggaatgtgggaaagcttttgctaactcttcacatcttactgtacatatgagaactcacactggtgagaagccttatcaatgtaaggaatgtggaaaagcctttattaattcctcttcctttaaaagtcacatgcagactcatcctggtgtaaaaccctatgactgtcaacagtgtgggaaagccttcattcgatcctcatttcttattcgacatttgagaagtcacagtgcagaaaggccttttgaatgtgaggaatgtgggaaagcctttagatactcctcgcaccttagtcaacataaaagaatacatacaggggagaggccatataaatgtcaaaagtgtgggcaagccttcagtatctcatcaggccttacagtacacatgagaactcacactggtgaacggccctttgaatgtcaggaatgtgggaaagcctttactcggtccacatatcttattcgacatctaagaagtcatagtgtggagaaaccatataaggaatgtgggcaaacctttagtaattcctcatgccttactgaatgtgtgtgaattggggctgatacttggaaagaatgtggtaaagccactacttcctcacacttactgaacatgtactcattcatagtggcaatgtacacagtcataaggaatgtgggaagccttccttggtgtctcagatcttaacaattccaatagaagagaagacatatgaatgtaaggaatgtgggaaaatcttggctccttccataggccttactattcatgtgtctgtgcatcctaggaaacaaactgaacgtaggaaacctgtcgatgcttacatcttactgagtctgtttgaactcatgctggagagaaatgctatgaatgtgaggaaggtggaaaagctttcattattttcctcgggccttactgagcttgtgagcacattggatataaatgcacgtcctctggctgtaaggaatgtgttgaaacctttcactctgccttataccttaatattcagctgtgatctcacaagtgtgaaaaatcttatgaatgtaaaatgtgtggagattcttctttgtttttagcttccactttgggaacatgtcaaagcacacattgagaagtcccatgagtgaaagagatgttggaaagcccttgaacttggtcgttaggaaacatccacactgaagaggaacctgactgtatggaaggtcaaaaaggctgtattaatttacatgcaaaaagtcacactagaggaatgccatatcagaatgcttttggtaaatatacatgttttaaagaggttatatatcattaataaaaatatctagctggtctgaagatcctgagttatctcaattgttcacggttacagatggaactctttattattgaggagttccactctttcccccatttgtcactactacacttccctagtctttaaaacaattttaggctgggtgcagtggctcattcctgtaatcccagcactttgaaaggccgaagcgagtggatcatttgaggtcaggagttcgagaccagcctggccaacgtggtgaaaccccatctctactaaaaatacaaaaattagccaggcatggtggtacgtgcctgtaatcccagctactcgagaggttgaggcagaattgcttgaacccgggaggcggaagctgcagtgagctcagatcacgccactgcactccagcctggatgatatggtaagaccatctcaaaaaaagaaaaaaaaattaaaatatcctcagagggttttttaatgaaaaacttagttatagggaattgaggaacatttaggggtacaaattttcacttattgcacacaagaaaattggtactggccaggcatgctggctcacaccttaattccagcaatttgggaggccaaggcagaaggatcacttgagcccaggagttcaagaccagcctgggcaatatagtgaaacctcatcttgacaaagaataaataagattaactgggtgtactggtttgtgcctatagtcccagctatttaggaggctggggcaagaggattgcttgagcctggtcagggaggcagaggttgcagtgagccctgatcgtgccactacactctagcctgggcaacaggatgagaccctgtct

SEQ ID NO: 10739 - protein, 30 aa, Homo sapiens; identical to SEQ ID NO: 10701

SEQ ID NO: 10740 - DNA, 1171 bp, Homo sapiens
agtgtgggaaagccttcattcgatcctcatttcttattcgacatttgagaagtcacagtgcagaaaggccttttgaatgtgaggaatgtgggaaagcctttagatactcctcgcaccttagtcaacataaaagaatacatacaggggagaggccatataaatgtcaaaagtgtgggcaagccttcagtatctcatcaggccttacagtacacatgagaactcacactggtgaacggccctttgaatgtcaggaatgtgggaaagcctttactcggtccacatatcttattcgacatctaagaagtcatagtgtggagaaaccatataaggaatgtgggcaaacctttagtaattcctcatgccttactgaatgtgtgtgaattggggctgatacttggaaagaatgtggtaaagccactacttcctcacacttactgaacatgtactcattcatagtggcaatgtacacagtcataaggaatgtgggaagccttccttggtgtctcagatcttaacaattccaatagaagagaagacatatgaatgtaaggaatgtgggaaaatcttggctccttccataggccttactattcatgtgtctgtgcatcctaggaaacaaactgaacgtaggaaacctgtcgatgcttacatcttactgagtctgtttgaactcatgctggagagaaatgctatgaatgtgaggaaggtggaaaagctttcattattttcctcgggccttactgagcttgtgagcacattggatataaatgcacgtcctctggctgtaaggaatgtgttgaaacctttcactctgccttataccttaatattcagctgtgatctcacaagtgtgaaaaatcttatgaatgtaaaatgtgtggagattcttctttgtttttagcttccactttgggaacatgtcaaagcacacattgagaagtcccatgagtgaaagagatgttggaaagcccttgaacttggtcgttaggaaacatccacactgaagaggaacctgactgtatggaaggtcaaaaaggctgtattaatttacatgcaaaaagtcacactagaggaatgccatatcagaatgcttttgggctgggtataagtaagcaagaagagggcctgggagaagagtctgacgagcaaggggaaggtagccaaggatgga

SEQ ID NO: 10741 - protein, 49 aa, Homo sapiens
MEGQKGCINLHAKSHTRGMPYQNAFGLGISKQEEGLGEESDEQGEGSQG

SEQ ID NO: 10742 - DNA, 581 bp, Homo sapiens
atagctgtcgcctgcagctgagaaagggttgctgtcccagcaggccaggtccagggctgggtataagtaagcaagaagagggcctgggagaagagtctgacgagcaaggggaaggtagccaaggatggagtgaaatacaggagatgcggtcttgctgtgttgcctaggctggtctcaaactcctgctctcaagtgatcctcctgcctcagcctcctgagtacatttatatttaaagtaattattgatggctctgcctgcttaggactctgcccagccaggaaggaaacctacaggaggaagaatggctgcagggtggctgacaacctggtcacaggtacacaagaaatttctctatttccaaaagcacactgccattcctgaaaagaacacatctcttgcccctgacctgaagcttcacagcccaatctgagctggcttcatcttccgcagctcccaggctgcttcatgtggaagagggaatccctgggaaaggcttctgttcccacatttgttaactttctccagatattcttccatatttttgagtatgaattccatactgtagtgagtgctgtaaaga

SEQ ID NO: 10743 - protein, 42 aa, Homo sapiens [sequence omitted]

SEQ ID NO: 10744 - DNA, 574 bp, Homo sapiens
cattttttttttattttagaccccttaagtttctattgtgtctgttctcttcctcctcccttttcatttttttaatccactgatttattgaagaaataaagttatttgttcttaaaatgtcccacatcatatatggattttgctgactggtttgttttcattgcttaacctggttatctttgtatttcttataaagagtagttagatagtttgtctagcgttttaggttgataagttatttttttctcagcatactgaagacattgtcctgctttcttctgacgtccattgttgctgttgagatgtcagctatcagtctgtttttccttttataggtgacctgtgtttttcccctggctgctttggaaattatgggaaaaaatcaaataccaaggaagaaaaatctataatgaaattagatgtggatttctttttatgtattcagcttgggggcttatgatacttctagtacccaaagagatgcggtcttgctgtgttgcctaggctggtctcaaactcctgctctcaagtgatcctcctgcctcagcctcctgagtacatttatatttaaagt

SEQ ID NO: 10745 - protein, 37 aa, Homo sapiens
MWISFYVFSLGAYDTSSTQRDAVLLCCLGWSQTPALK

SEQ ID NO: 10746 - DNA, 1898 bp, Homo sapiens
gctctccacgacctcaaagggcctgtaagtggtcgacaaaaaggggcggggatgcggtggttccgggcggggtcttcagcccttccggtgcggcccctttaagaggcggggcctgcggggcgggcgccgagaacgccggggcggcccgaagatggcggcggtggctggatctggggctgccgcggctccgagctcactgctcctcgtggtgggcagcgagttcgggagcccggggctcctcacctacgtcctggaggagctcgaaagaggcatccggtcttgggatgtcgatcctggcgtctgcaaccttgatgaacagctcaaggtctttgtgtcccgacactctgccaccttctccagcattgtgaaaggccagcggagcctgcaccaccgtggagacaacctggagaccctggtcctcctgaacccatcagacaagtccctgtatgatgagctccggaaccttctgttggaccctgcctctcacaagctactggtgttggctgggccctgcctggaggagacgggggagctgctgctacagacagggggcttctcgcctcaccacttcctccaggtcctgaaggacagagagatccgggacatcctggccaccacgcccccacctgtgcagccgcccatactcaccatcacctgccccaccttcggtgactgggctcagctggcacccgctgtgcctggccttcagggggcgctccggctccagctgcggctgaaccccccggcgcagctgcccaactctgagggcctgtgcgaattcctggagtacgtggctgagtctctggagccaccgtcccccttcgagctgctggagcccccgacctccgggggcttcctcaggctgggccggccctgctgctacatcttccctggaggcctcggggatgccgccttcttcgccgtcaatggcttcactgtgctggtcaacggtggctcaaaccccaagtccagtttctggaagctggtgcggcacctggaccgcgtggatgccgtgctggtgacccaccctggcgccgacagcctccccggcctcaacagcctgctgcggcgcaaactggcggagcgctccgaggtggctgctggtgggggctcctgggacgacaggctgcgcaggctcatctcccccaacctgggggtcgtgttcttcaacgcctgcgaggccgcgtcgcggctggcgcgcggcgaggatgaggcggagctggcgctgagcctcctggcgcagctgggcatcacgcctctgccactcagccgcggccccgtgccagccaaacccaccgtgctcttcgagaagatgggcgtgggccggctggacatgtatgtgctgcacccgccctccgccggcgccgagcgcacgctggcctctgtgtgcgccctgctggtgtggcaccccgccggccccggcgagaaggtggtgcgcgtgctgttccccggttgcaccccgcccgcctgcctcctggacggcctggtccgcctgcagcacttgaggttcctgcgagagcccgtggtgacgccccaggacctggaggggccggggcgagccgagagcaaagagagcgtgggctcccgggacagctcgaagagagagggcctcctggccacccaccctagacctggccaggagcgccctggggtggcccgcaaggagccagcacgggctgaggccccacgcaagactgagaaagaagccaagaccccccgggagttgaagaaagaccccaaaccgagtgtctcccggacccagccgcgggaggtgcgccgggcagcctcttctgtgcccaacctcaagaagacgaatgcccaggcggcacccaagccccgcaaagcgcccagcaccccgcctgtccctagattcagccacatcagaaataaactgtgac

SEQ ID NO: 10747 - protein, 581 aa, Homo sapiens
MAAVAGSGAAAAPSSLLLVVGSEFGSPGLLTYVLEELERGIRSWDVDPGVCNLDEQLKVFVSRHSATFSSIVKGQRSLHHRGDNLETLVLLNPSDKSLYDELRNLLLDPASHKLLVLAGPCLEETGELLLQTGGFSPHHFLQVLKDREIRDILATTPPPVQPPILTITCPTFGDWAQLAPAVPGLQGALRLQLRLNPPAQLPNSEGLCEFLEYVAESLEPPSPFELLEPPTSGGFLRLGRPCCYIFPGGLGDAAFFAVNGFTVLVNGGSNPKSSFWKLVRHLDRVDAVLVTHPGADSLPGLNSLLRRKLAERSEVAAGGGSWDDRLRRLISPNLGVVFFNACEAASRLARGEDEAELALSLLAQLGITPLPLSRGPVPAKPTVLFEKMGVGRLDMYVLHPPSAGAERTLASVCALLVWHPAGPGEKVVRVLFPGCTPPACLLDGLVRLQHLRFLREPVVTPQDLEGPGRAESKESVGSRDSSKREGLLATHPRPGQERPGVARKEPARAEAPRKTEKEAKTPRELKKDPKPSVSRTQPREVRRAASSVPNLKKTNAQAAPKPRKAPSTPPVPRFSHIRNKL

SEQ ID NO: 10748 - DNA, 3418 bp, Homo sapiens
gctctccacgacctcaaagggcctgtaagtggtcgacaaaaaggggcggggatgcggtggttccgggcggggtcttcagcccttccggtgcggcccctttaagaggcggggcctgcggggcgggcgccgagaacgccggggcggcccgaagatggcggcggtggctggatctggggctgccgcggctccgagctcactgctcctcgtggtgggcagcgagttcgggagcccggggctcctcacctacgtcctggaggagctcgaaagaggcatccggtcttgggatgtcgatcctggcgtctgcaaccttgatgaacagctcaaggtctttgtgtcccgacactctgccaccttctccagcattgtgaaaggccagcggagcctgcaccaccgtggagacaacctggagaccctggtcctcctgaacccatcagacaagtccctgtatgatgagctccggaaccttctgttggaccctgcctctcacaagctactggtgttggctgggccctgcctggaggagacgggggagctgctgctacagacagggggcttctcgcctcaccacttcctccaggtcctgaaggacagagagatccgggacatcctggccaccacgcccccacctgtgcagccgcccatactcaccatcacctgccccaccttcggtgactgggctcagctggcacccgctgtgcctggccttcagggggcgctccggctccagctgcggctgaaccccccggcgcagctgcccaactctgagggcctgtgcgaattcctggagtacgtggctgagtctctggagccaccgtcccccttcgagctgctggagcccccgacctccgggggcttcctcaggctgggccggccctgctgctacatcttccctggaggcctcggggatgccgccttcttcgccgtcaatggcttcactgtgctggtcaacggtggctcaaaccccaagtccagtttctggaagctggtgcggcacctggaccgcgtggatgccgtgctggtgacccaccctggcgccgacagcctccccggcctcaacagcctgctgcggcgcaaactggcggagcgctccgaggtggctgctggtgggggctcctgggacgacaggctgcgcaggctcatctcccccaacctgggggtcgtgttcttcaacgcctgcgaggccgcgtcgcggctggcgcgcggcgaggatgaggcggagctggcgctgagcctcctggcgcagctgggcatcacgcctctgccactcagccgcggccccgtgccagccaaacccaccgtgctcttcgagaagatgggcgtgggccggctggacatgtatgtgctgcacccgccctccgccggcgccgagcgcacgctggcctctgtgtgcgccctgctggtgtggcaccccgccggccccggcgagaaggtggtgcgcgtgctgttccccggttgcaccccgcccgcctgcctcctggacggcctggtccgcctgcagcacttgaggttcctgcgagagcccgtggtgacgccccaggacctggaggggccggggcgagccgagagcaaagagagcgtgggctcccgggacagctcgaagagagagggcctcctggccacccaccctagacctggccaggagcgccctggggtggcccgcaaggagccagcacgggctgaggccccacgcaagactgagaaagaagccaagaccccccgggagttgaagaaagaccccaaaccgagtgtctcccggacccagccgcgggaggtgcgccgggcagcctcttctgtgcccaacctcaagaagacgaatgcccaggcggcacccaagccccgcaaagcgcccagcacgtcccactctggcttcccgccggtggcaaatggaccccgcagcccgcccagcctccgatgtggagaagccagcccccccagtgcagcctgcggctctccggcctcccagctggtggccacgcccagcctggagctggggccgatcccagccggggaggagaaggcactggagctgcctttggccgccagctcaatcccaaggccacgcacaccctcccctgagtcccaccggagccccgcagagggcagcgagcggctgtcgctgagcccactgcggggcggggaggccgggccagacgcctcacccacagtgaccacacccacggtgaccacgccctcactacccgcagaggtgggctccccgcactcgaccgaggtggacgagtccctgtcggtgtcctttgagcaggtgctgccgccatccgcccccaccagtgaggctgggctgagcctcccgctgcgtggcccccgggcgcggcgctcggcttccccacacgatgtggacctgtgcctggtgtcaccctgtgaatttgagcatcgcaaggcggtgccaatggcaccggcacctgcgtcccccggcagctcgaatgacagcagtgcccggtcacaggaacgggcaggtgggctgggggccgaggagacgccacccacatcggtcagcgagtccctgcccaccctgtctgactcggatcccgtgcccctggcccccggtgcggcagactcagacgaagacacagagggctttggagtccctcgccacgaccctttgcctgaccccctcaaggtccccccaccactgcctgacccatccagcatctgcatggtggaccccgagatgctgccccccaagacagcacggcaaacggagaacgtcagccgcacccggaagcccctggcccgccccaactcacgcgctgccgcccccaaagccactccagtggctgctgccaaaaccaaggggcttgctggtggggaccgtgccagccgaccactcagtgcccggagtgagcccagtgagaagggaggccgggcacccctgtccagaaagtcctcaacccccaagactgccactcgaggcccgtcggggtcagccagcagccggcccggggtgtcagccaccccacccaagtccccggtctacctggacctggcctacctgcccagcgggagcagcgcccacctggtggatgaggagttcttccagcgcgtgcgcgcgctctgctacgtcatcagtggccaggaccagcgcaaggaggaaggcatgcgggccgtcctggacgcgctactggccagcaagcagcattgggaccgtgacctgcaggtgaccctgatccccactttcgactcggtggccatgcatacgtggtacgcagagacgcacgcccggcaccaggcgctgggcatcacggtgttgggcagcaacagcatggtgtccatgcaggatgacgccttcccggcctgcaaggtggagttctagccccatcgccgacacgccccccactcagcccagcccgcctgtccctagattcagccacatcagaaataaactgtgactacacttggc

SEQ ID NO: 10749 - protein, 1059 aa, Homo sapiens; identical to SEQ ID NO: 1795

SEQ ID NO: 10750 - DNA, 2634 bp, Homo sapiens
gagaacgccggggcggcccgaagatggcggcggtggctggatctggggctgccgcggctccgagctcactgctcctcgtggtgggcagcgagttcgggagcccggggctcctcacctacgtcctggaggagctcgaaagaggcatccggtcttgggatgtcgatcctggcgtctgcaaccttgatgaacagctcaaggtctttgtgtcccgacactctgccaccttctccagcattgtgaaaggccagcggagcctgcaccaccgtggagacaacctggagaccctggtcctcctgaacccatcagacaagtccctgtatgatgagctccggaaccttctgttggaccctgccccaccttcggtgactgggctcagctggcacccgctgtgcctggccttcagggggcgctccggctccagctgcggctgaaccccccggcgcagctgcccaactctgagggcctgtgcgaattcctggagtacgtggctgagtctctggagccaccgtcccccttcgagctgctggagcccccgacctccgggggcttcctcaggctgggccggccctgctgctacatcttccctggaggcctcggggatgccgccttcttcgccgtcaatggcttcactgtgctggtcaacggtggctcaaaccccaagtccagtttctggaagctggtgcggcacctggaccgcgtggatgccgtgctggtgacccaccctggcgccgacagcctccccggcctcaacagcctgctgcggcgcaaactggcggagcgctccgaggtggctgctggtgggggctcctgggacgacaggctgcgcaggctcatctcccccaacctgggggtcgtgttcttcaacgcctgcgaggccgcgtcgcggctggcgcgcggcgaggatgaggcggagctggcgctgagcctcctggcgcagctgggcatcacgcctctgccactcagccgcggccccgtgccagccaaacccaccgtgctcttcgagaagatgggcgtgggccggctggacatgtatgtgctgcacccgccctccgccggcgccgagcgcacgctggcctctgtgtgcgccctgctggtgtggcaccccgccggccccggcgagaaggtggtgcgcgtgctgttccccggttgcaccccgcccgcctgcctcctggacggcctggtccgcctgcagcacttgaggttcctgcgagagcccgtggtgacgccccaggacctggaggggccggggcgagccgagagcaaagagagcgtgggctcccgggacagctcgaagagagagggcctcctggccacccaccctagacctggccaggagcgccctggggtggcccgcaaggagccagcacgggctgaggccccacgcaagactgagaaagaagccaagaccccccgggagttgaagaaagaccccaaaccgagtgtctcccggacccagccgcgggaggtgcgccgggcagcctcttctgtgcccaacctcaagaagacgaatgcccaggcggcacccaagccccgcaaagcgcccagcacgtcccactctggcttcccgccggtggcaaatggaccccgcagcccgcccagcctccgatgtggagaagccagcccccccagtgcagcctgcggctctccggcctcccagctggtggccacgcccagcctggagctggggccgatcccagccggggaggagaaggcactggagctgcctttggccgccagctcaatcccaaggccacgcacaccctcccctgagtcccaccggagccccgcagagggcagcgagcggctgtcgctgagcccactgcggggcggggaggccgggccagacgcctcacccacagtgaccacacccacggtgaccacgccctcactacccgcagaggtgggctccccgcactcgaccgaggtggacgagtccctgtcggtgtcctttgagcaggtgctgccgccatccgcccccaccagtgaggctgggctgagcctcccgctgcgtggcccccgggcgcggcgctcggcttccccacacgatgtggacctgtgcctggtgtcaccctgtgaatttgagcatcgcaaggcggtgccaatggcaccggcacctgcgtcccccggcagctcgaatgacagcagtgcccggtcacaggaacgggcaggtgggctgggggccgaggagacgccacccacatcggtcagcgagtccctgcccaccctgtctgactcggatcccgtgcccctggcccccggtgcggcagactcagacgaagacacagagggctttggagtccctcgccacgaccctttgcctgaccccctcaaggtccccccaccactgcctgacccatccagcatctgcatggtggaccccgagatgctgccccccaagacagcacggcaaacggagaacgtcagccgcacccggaagcccctggcccgccccaactcacgcgctgccgcccccaaagccactccagtggctgctgccaaaaccaaggggcttgctggtggggaccgtgccagccgaccactcagtgcccggagtgagcccagtgagaagggaggccgggcacccctgtccagaaagtcctcaacccccaagactgccactcgaggcccgtcggg

SEQ ID NO: 10751 - protein, 135 aa, Homo sapiens
MAAVAGSGAAAAPSSLLLVVGSEFGSPGLLTYVLEELERGIRSWDVDPGVCNLDEQLKVFVSRHSATFSSIVKGQRSLHHRGDNLETLVLLNPSDKSLYDELRNLLLDPAPPSVTGLSWHPLCLAFRGRSGSSCG

SEQ ID NO: 10752 - DNA, 2731 bp, Homo sapiens
gagaacgccggggcggcccgaagatggcggcggtggctggatctggggctgccgcggctccgagctcactgctcctcgtggtgggcagcgagttcgggagcccggggctcctcacctacgtcctggaggagctcgaaagaggcatccggtcttgggatgtcgatcctggcgtctgcaaccttgatgaacagctcaaggtctttgtgtcccgacactctgccaccttctccagcattgtgaaaggccagcggagcctgcaccaccgtggagacaacctggagaccctggtcctcctgaacccatcagacaagtccctgtatgatgagctccggaaccttctgttggaccctgcctctcacaagctactggtgttggctgggccctgcctggaggagacgggggagctgctgcccccacctgtgcagccgcccatactcaccatcacctgccccaccttcggtgactgggctcagctggcacccgctgtgcctggccttcagggggcgctccggctccagctgcggctgaaccccccggcgcagctgcccaactctgagggcctgtgcgaattcctggagtacgtggctgagtctctggagccaccgtcccccttcgagctgctggagcccccgacctccgggggcttcctcaggctgggccggccctgctgctacatcttccctggaggcctcggggatgccgccttcttcgccgtcaatggcttcactgtgctggtcaacggtggctcaaaccccaagtccagtttctggaagctggtgcggcacctggaccgcgtggatgccgtgctggtgacccaccctggcgccgacagcctccccggcctcaacagcctgctgcggcgcaaactggcggagcgctccgaggtggctgctggtgggggctcctgggacgacaggctgcgcaggctcatctcccccaacctgggggtcgtgttcttcaacgcctgcgaggccgcgtcgcggctggcgcgcggcgaggatgaggcggagctggcgctgagcctcctggcgcagctgggcatcacgcctctgccactcagccgcggccccgtgccagccaaacccaccgtgctcttcgagaagatgggcgtgggccggctggacatgtatgtgctgcacccgccctccgccggcgccgagcgcacgctggcctctgtgtgcgccctgctggtgtggcaccccgccggccccggcgagaaggtggtgcgcgtgctgttccccggttgcaccccgcccgcctgcctcctggacggcctggtccgcctgcagcacttgaggttcctgcgagagcccgtggtgacgccccaggacctggaggggccggggcgagccgagagcaaagagagcgtgggctcccgggacagctcgaagagagagggcctcctggccacccaccctagacctggccaggagcgccctggggtggcccgcaaggagccagcacgggctgaggccccacgcaagactgagaaagaagccaagaccccccgggagttgaagaaagaccccaaaccgagtgtctcccggacccagccgcgggaggtgcgccgggcagcctcttctgtgcccaacctcaagaagacgaatgcccaggcggcacccaagccccgcaaagcgcccagcacgtcccactctggcttcccgccggtggcaaatggaccccgcagcccgcccagcctccgatgtggagaagccagcccccccagtgcagcctgcggctctccggcctcccagctggtggccacgcccagcctggagctggggccgatcccagccggggaggagaaggcactggagctgcctttggccgccagctcaatcccaaggccacgcacaccctcccctgagtcccaccggagccccgcagagggcagcgagcggctgtcgctgagcccactgcggggcggggaggccgggccagacgcctcacccacagtgaccacacccacggtgaccacgccctcactacccgcagaggtgggctccccgcactcgaccgaggtggacgagtccctgtcggtgtcctttgagcaggtgctgccgccatccgcccccaccagtgaggctgggctgagcctcccgctgcgtggcccccgggcgcggcgctcggcttccccacacgatgtggacctgtgcctggtgtcaccctgtgaatttgagcatcgcaaggcggtgccaatggcaccggcacctgcgtcccccggcagctcgaatgacagcagtgcccggtcacaggaacgggcaggtgggctgggggccgaggagacgccacccacatcggtcagcgagtccctgcccaccctgtctgactcggatcccgtgcccctggcccccggtgcggcagactcagacgaagacacagagggctttggagtccctcgccacgaccctttgcctgaccccctcaaggtccccccaccactgcctgacccatccagcatctgcatggtggaccccgagatgctgccccccaagacagcacggcaaacggagaacgtcagccgcacccggaagcccctggcccgccccaactcacgcgctgccgcccccaaagccactccagtggctgctgccaaaaccaaggggcttgctggtggggaccgtgccagccgaccactcagtgcccggagtgagcccagtgagaagggaggccgggcacccctgtccagaaagtcctcaacccccaagactgccactcgaggcccgtcggg

SEQ ID NO: 10753 - protein, 901 aa, Homo sapiens
MAAVAGSGAAAAPSSLLLVVGSEFGSPGLLTYVLEELERGIRSWDVDPGVCNLDEQLKVFVSRHSATFSSIVKGQRSLHHRGDNLETLVLLNPSDKSLYDELRNLLLDPASHKLLVLAGPCLEETGELLPPPVQPPILTITCPTFGDWAQLAPAVPGLQGALRLQLRLNPPAQLPNSEGLCEFLEYVAESLEPPSPFELLEPPTSGGFLRLGRPCCYIFPGGLGDAAFFAVNGFTVLVNGGSNPKSSFWKLVRHLDRVDAVLVTHPGADSLPGLNSLLRRKLAERSEVAAGGGSWDDRLRRLISPNLGVVFFNACEAASRLARGEDEAELALSLLAQLGITPLPLSRGPVPAKPTVLFEKMGVGRLDMYVLHPPSAGAERTLASVCALLVWHPAGPGEKVVRVLFPGCTPPACLLDGLVRLQHLRFLREPVVTPQDLEGPGRAESKESVGSRDSSKREGLLATHPRPGQERPGVARKEPARAEAPRKTEKEAKTPRELKKDPKPSVSRTQPREVRRAASSVPNLKKTNAQAAPKPRKAPSTSHSGFPPVANGPRSPPSLRCGEASPPSAACGSPASQLVATPSLELGPIPAGEEKALELPLAASSIPRPRTPSPESHRSPAEGSERLSLSPLRGGEAGPDASPTVTTPTVTTPSLPAEVGSPHSTEVDESLSVSFEQVLPPSAPTSEAGLSLPLRGPRARRSASPHDVDLCLVSPCEFEHRKAVPMAPAPASPGSSNDSSARSQERAGGLGAEETPPTSVSESLPTLSDSDPVPLAPGAADSDEDTEGFGVPRHDPLPDPLKVPPPLPDPSSICMVDPEMLPPKTARQTENVSRTRKPLARPNSRAAAPKATPVAAAKTKGLAGGDRASRPLSARSEPSEKGGRAPLSRKSSTPKTATRGP

SEQ ID NO: 10754 - DNA, 2599 bp, Homo sapiens
gagaacgccggggcggcccgaagatggcggcggtggctggatctggggctgccgcggctccgagctcactgctcctcgtggtgggcagcgagttcgggagcccggggctcctcacctacgtcctggaggagctcgaaagaggcatccggtcttgggatgtcgatcctggcgtctgcaaccttgatgaacagctcaaggtctttgtgtcccgacactctgccaccttctccagcattgtgaaaggccagcggagcctgcaccaccgtggagacaacctggagaccctggtcctcccgcccatactcaccatcacctgccccaccttcggtgactgggctcagctggcacccgctgtgcctggccttcagggggcgctccggctccagctgcggctgaaccccccggcgcagctgcccaactctgagggcctgtgcgaattcctggagtacgtggctgagtctctggagccaccgtcccccttcgagctgctggagcccccgacctccgggggcttcctcaggctgggccggccctgctgctacatcttccctggaggcctcggggatgccgccttcttcgccgtcaatggcttcactgtgctggtcaacggtggctcaaaccccaagtccagtttctggaagctggtgcggcacctggaccgcgtggatgccgtgctggtgacccaccctggcgccgacagcctccccggcctcaacagcctgctgcggcgcaaactggcggagcgctccgaggtggctgctggtgggggctcctgggacgacaggctgcgcaggctcatctcccccaacctgggggtcgtgttcttcaacgcctgcgaggccgcgtcgcggctggcgcgcggcgaggatgaggcggagctggcgctgagcctcctggcgcagctgggcatcacgcctctgccactcagccgcggccccgtgccagccaaacccaccgtgctcttcgagaagatgggcgtgggccggctggacatgtatgtgctgcacccgccctccgccggcgccgagcgcacgctggcctctgtgtgcgccctgctggtgtggcaccccgccggccccggcgagaaggtggtgcgcgtgctgttccccggttgcaccccgcccgcctgcctcctggacggcctggtccgcctgcagcacttgaggttcctgcgagagcccgtggtgacgccccaggacctggaggggccggggcgagccgagagcaaagagagcgtgggctcccgggacagctcgaagagagagggcctcctggccacccaccctagacctggccaggagcgccctggggtggcccgcaaggagccagcacgggctgaggccccacgcaagactgagaaagaagccaagaccccccgggagttgaagaaagaccccaaaccgagtgtctcccggacccagccgcgggaggtgcgccgggcagcctcttctgtgcccaacctcaagaagacgaatgcccaggcggcacccaagccccgcaaagcgcccagcacgtcccactctggcttcccgccggtggcaaatggaccccgcagcccgcccagcctccgatgtggagaagccagcccccccagtgcagcctgcggctctccggcctcccagctggtggccacgcccagcctggagctggggccgatcccagccggggaggagaaggcactggagctgcctttggccgccagctcaatcccaaggccacgcacaccctcccctgagtcccaccggagccccgcagagggcagcgagcggctgtcgctgagcccactgcggggcggggaggccgggccagacgcctcacccacagtgaccacacccacggtgaccacgccctcactacccgcagaggtgggctccccgcactcgaccgaggtggacgagtccctgtcggtgtcctttgagcaggtgctgccgccatccgcccccaccagtgaggctgggctgagcctcccgctgcgtggcccccgggcgcggcgctcggcttccccacacgatgtggacctgtgcctggtgtcaccctgtgaatttgagcatcgcaaggcggtgccaatggcaccggcacctgcgtcccccggcagctcgaatgacagcagtgcccggtcacaggaacgggcaggtgggctgggggccgaggagacgccacccacatcggtcagcgagtccctgcccaccctgtctgactcggatcccgtgcccctggcccccggtgcggcagactcagacgaagacacagagggctttggagtccctcgccacgaccctttgcctgaccccctcaaggtccccccaccactgcctgacccatccagcatctgcatggtggaccccgagatgctgccccccaagacagcacggcaaacggagaacgtcagccgcacccggaagcccctggcccgccccaactcacgcgctgccgcccccaaagccactccagtggctgctgccaaaaccaaggggcttgctggtggggaccgtgccagccgaccactcagtgcccggagtgagcccagtgagaagggaggccgggcacccctgtccagaaagtcctcaacccccaagactgccactcgaggcccgtcggg

SEQ ID NO: 10755 - protein, 857 aa, Homo sapiens
MAAVAGSGAAAAPSSLLLVVGSEFGSPGLLTYVLEELERGIRSWDVDPGVCNLDEQLKVFVSRHSATFSSIVKGQRSLHHRGDNLETLVLPPILTITCPTFGDWAQLAPAVPGLQGALRLQLRLNPPAQLPNSEGLCEFLEYVAESLEPPSPFELLEPPTSGGFLRLGRPCCYIFPGGLGDAAFFAVNGFTVLVNGGSNPKSSFWKLVRHLDRVDAVLVTHPGADSLPGLNSLLRRKLAERSEVAAGGGSWDDRLRRLISPNLGVVFFNACEAASRLARGEDEAELALSLLAQLGITPLPLSRGPVPAKPTVLFEKMGVGRLDMYVLHPPSAGAERTLASVCALLVWHPAGPGEKVVRVLFPGCTPPACLLDGLVRLQHLRFLREPVVTPQDLEGPGRAESKESVGSRDSSKREGLLATHPRPGQERPGVARKEPARAEAPRKTEKEAKTPRELKKDPKPSVSRTQPREVRRAASSVPNLKKTNAQAAPKPRKAPSTSHSGFPPVANGPRSPPSLRCGEASPPSAACGSPASQLVATPSLELGPIPAGEEKALELPLAASSIPRPRTPSPESHRSPAEGSERLSLSPLRGGEAGPDASPTVTTPTVTTPSLPAEVGSPHSTEVDESLSVSFEQVLPPSAPTSEAGLSLPLRGPRARRSASPHDVDLCLVSPCEFEHRKAVPMAPAPASPGSSNDSSARSQERAGGLGAEETPPTSVSESLPTLSDSDPVPLAPGAADSDEDTEGFGVPRHDPLPDPLKVPPPLPDPSSICMVDPEMLPPKTARQTENVSRTRKPLARPNSRAAAPKATPVAAAKTKGLAGGDRASRPLSARSEPSEKGGRAPLSRKSSTPKTATRGP

SEQ ID NO: 10756 - DNA, 2383 bp, Homo sapiens
gagaacgccggggcggcccgaagatggcggcggtggctggatctggggctgccgcggctccgagctcactgctcctcgtggtgggcagcgagttcgggagcccggggctcctcacctacgtcctggaggagctcgaaagaggcatccggtcttgggatgtcgatcctggcctgcggctgaaccccccggcgcagctgcccaactctgagggcctgtgcgaattcctggagtacgtggctgagtctctggagccaccgtcccccttcgagctgctggagcccccgacctccgggggcttcctcaggctgggccggccctgctgctacatcttccctggaggcctcggggatgccgccttcttcgccgtcaatggcttcactgtgctggtcaacggtggctcaaaccccaagtccagtttctggaagctggtgcggcacctggaccgcgtggatgccgtgctggtgacccaccctggcgccgacagcctccccggcctcaacagcctgctgcggcgcaaactggcggagcgctccgaggtggctgctggtgggggctcctgggacgacaggctgcgcaggctcatctcccccaacctgggggtcgtgttcttcaacgcctgcgaggccgcgtcgcggctggcgcgcggcgaggatgaggcggagctggcgctgagcctcctggcgcagctgggcatcacgcctctgccactcagccgcggccccgtgccagccaaacccaccgtgctcttcgagaagatgggcgtgggccggctggacatgtatgtgctgcacccgccctccgccggcgccgagcgcacgctggcctctgtgtgcgccctgctggtgtggcaccccgccggccccggcgagaaggtggtgcgcgtgctgttccccggttgcaccccgcccgcctgcctcctggacggcctggtccgcctgcagcacttgaggttcctgcgagagcccgtggtgacgccccaggacctggaggggccggggcgagccgagagcaaagagagcgtgggctcccgggacagctcgaagagagagggcctcctggccacccaccctagacctggccaggagcgccctggggtggcccgcaaggagccagcacgggctgaggccccacgcaagactgagaaagaagccaagaccccccgggagttgaagaaagaccccaaaccgagtgtctcccggacccagccgcgggaggtgcgccgggcagcctcttctgtgcccaacctcaagaagacgaatgcccaggcggcacccaagccccgcaaagcgcccagcacgtcccactctggcttcccgccggtggcaaatggaccccgcagcccgcccagcctccgatgtggagaagccagcccccccagtgcagcctgcggctctccggcctcccagctggtggccacgcccagcctggagctggggccgatcccagccggggaggagaaggcactggagctgcctttggccgccagctcaatcccaaggccacgcacaccctcccctgagtcccaccggagccccgcagagggcagcgagcggctgtcgctgagcccactgcggggcggggaggccgggccagacgcctcacccacagtgaccacacccacggtgaccacgccctcactacccgcagaggtgggctccccgcactcgaccgaggtggacgagtccctgtcggtgtcctttgagcaggtgctgccgccatccgcccccaccagtgaggctgggctgagcctcccgctgcgtggcccccgggcgcggcgctcggcttccccacacgatgtggacctgtgcctggtgtcaccctgtgaatttgagcatcgcaaggcggtgccaatggcaccggcacctgcgtcccccggcagctcgaatgacagcagtgcccggtcacaggaacgggcaggtgggctgggggccgaggagacgccacccacatcggtcagcgagtccctgcccaccctgtctgactcggatcccgtgcccctggcccccggtgcggcagactcagacgaagacacagagggctttggagtccctcgccacgaccctttgcctgaccccctcaaggtccccccaccactgcctgacccatccagcatctgcatggtggaccccgagatgctgccccccaagacagcacggcaaacggagaacgtcagccgcacccggaagcccctggcccgccccaactcacgcgctgccgcccccaaagccactccagtggctgctgccaaaaccaaggggcttgctggtggggaccgtgccagccgaccactcagtgcccggagtgagcccagtgagaagggaggccgggcacccctgtccagaaagtcctcaacccccaagactgccactcgaggcccgtcggg

SEQ ID NO: 10757 - protein, 785 aa, Homo sapiens
MAAVAGSGAAAAPSSLLLVVGSEFGSPGLLTYVLEELERGIRSWDVDPGLRLNPPAQLPNSEGLCEFLEYVAESLEPPSPFELLEPPTSGGFLRLGRPCCYIFPGGLGDAAFFAVNGFTVLVNGGSNPKSSFWKLVRHLDRVDAVLVTHPGADSLPGLNSLLRRKLAERSEVAAGGGSWDDRLRRLISPNLGVVFFNACEAASRLARGEDEAELALSLLAQLGITPLPLSRGPVPAKPTVLFEKMGVGRLDMYVLHPPSAGAERTLASVCALLVWHPAGPGEKVVRVLFPGCTPPACLLDGLVRLQHLRFLREPVVTPQDLEGPGRAESKESVGSRDSSKREGLLATHPRPGQERPGVARKEPARAEAPRKTEKEAKTPRELKKDPKPSVSRTQPREVRRAASSVPNLKKTNAQAAPKPRKAPSTSHSGFPPVANGPRSPPSLRCGEASPPSAACGSPASQLVATPSLELGPIPAGEEKALELPLAASSIPRPRTPSPESHRSPAEGSERLSLSPLRGGEAGPDASPTVTTPTVTTPSLPAEVGSPHSTEVDESLSVSFEQVLPPSAPTSEAGLSLPLRGPRARRSASPHDVDLCLVSPCEFEHRKAVPMAPAPASPGSSNDSSARSQERAGGLGAEETPPTSVSESLPTLSDSDPVPLAPGAADSDEDTEGFGVPRHDPLPDPLKVPPPLPDPSSICMVDPEMLPPKTARQTENVSRTRKPLARPNSRAAAPKATPVAAAKTKGLAGGDRASRPLSARSEPSEKGGRAPLSRKSSTPKTATRGP

SEQ ID NO: 10758 - DNA, 1487 bp, Homo sapiens
ccgaagatggcggcggtggctggatctggggctgccgcggctccgagctcactgctcctcgtggtgggcagcgagttcgggagcccggggctcctcacctacgtcctggaggagctcgaaagaggccacgcacaccctcccctgagtcccaccggagccccgcagagggcagcgagcggctgtcgctgagcccactgcggggcggggaggccgggccagacgcctcacccacagtgaccacacccacggtgaccacgccctcactacccgcagaggtgggctccccgcactcgaccgaggtggacgagtccctgtcggtgtcctttgagcaggtgctgccgccatccgcccccaccagtgaggctgggctgagcctcccgctgcgtggcccccgggcgcggcgctcggcttccccacacgatgtggacctgtgcctggtgtcaccctgtgaatttgagcatcgcaaggcggtgccaatggcaccggcacctgcgtcccccggcagctcgaatgacagcagtgcccggtcacaggaacgggcaggtgggctgggggccgaggagacgccacccacatcggtcagcgagtccctgcccaccctgtctgactcggatcccgtgcccctggcccccggtgcggcagactcagacgaagacacagagggctttggagtccctcgccacgaccctttgcctgaccccctcaaggtccccccaccactgcctgacccatccagcatctgcatggtggaccccgagatgctgccccccaagacagcacggcaaacggagaacgtcagccgcacccggaagcccctggcccgccccaactcacgcgctgccgcccccaaagccactccagtggctgctgccaaaaccaaggggcttgctggtggggaccgtgccagccgaccactcagtgcccggagtgagcccagtgagaagggaggccgggcacccctgtccagaaagtcctcaacccccaagactgccactcgaggcccgtcggggtcagccagcagccggcccggggtgtcagccaccccacccaagtccccggtctacctggacctggcctacctgcccagcgggagcagcgcccacctggtggatgaggagttcttccagcgcgtgcgcgcgctctgctacgtcatcagtggccaggaccagcgcaaggaggaaggcatgcgggccgtcctggacgcgctactggccagcaagcagcattgggaccgtgacctgcaggtgaccctgatccccactttcgactcggtggccatgcatacgtggtacgcagagacgcacgcccggcaccaggcgctgggcatcacggtgttgggcagcaacagcatggtgtccatgcaggatgacgccttcccggcctgcaaggtggagttctagccccatcgccgacacgccccccactcagcccagcccgcctgtccctagattcagccacatcagaaataaactgtgactacacttggc

SEQ ID NO: 10759 - protein, 307 aa, Homo sapiens [sequence omitted]

SEQ ID NO: 10760 - DNA, 541 bp, Homo sapiens
gagtcataggcgcacctgccaggttcacctgcagccacttggctcagtgggactggcgggcgtgatgcgcccgtgggtggagatgggtgttcatcccccatccctcggagcatctggacctggcgtttcattgcatgtaaaatgggacaggaacacgcacctcggttcatgtgcttgaggagtgtttagtgagcacctgctatgcgccaggcctttgggcagtggacacagggatatggccgggatgatagacaggttcagccctgccaacacaggtctggtttggggatggacccaaagcgagtgaggagatggaacaagcttccagctcacatggtgtcaggaaggatgagaaggctgcaagggactgagaggacagtcagtcttagcacccgaaggcatccggtcttgggatgtcgatcctggcgtctgcaaccttgatgaacagctcaaggtctttgtgtcccgacactctgccaccttctccagcattgtgaaaggccagcggagcctgcaccaccgtggagacaacctggagacc

SEQ ID NO: 10761 - protein, 79 aa, Homo sapiens
MRQAFGQWTQGYGRDDRQVQPCQHRSGLGMDPKRVRRWNKLPAHMVSGRMRRLQGTERTVSLSTRRHPVLGCRSWRLQP

SEQ ID NO: 10762 - DNA, 574 bp, Homo sapiens
gagtcataggcgcacctgccaggttcacctgcagccacttggctcagtgggactggcgggcgtgatgcgcccgtgggtggagatgggtgttcatcccccatccctcggagcatctggacctggcgtttcattgcatgtaaaatgggacaggaacacgcacctcggttcatgtgcttgaggagtgtttagtgagcacctgctatgcgccaggcctttgggcagtggacacagggatatggccgggatgatagacaggttcagccctgccaacacaggtctggtttggggatggacccaaagcgagtgaggagatggaacaagcttccagctcacatggtgtcaggaaggatgagaaggctgcaagggactgagaggacagtcagtcttagcacccgaagctcaaggtctttgtgtcccgacactctgccaccttctccagcattgtgaaaggccagcggagcctgcaccaccgtggagacaacctggagaccctggtcctcctgaacccatcagacaagtccctgtatgatgagctccggaaccttctgttggaccctgcctctcacaagctact

SEQ ID NO: 10763 - protein, 81 aa, Homo sapiens
MRQAFGQWTQGYGRDDRQVQPCQHRSGLGMDPKRVRRWNKLPAHMVSGRMRRLQGTERTVSLSTRSSRSLCPDTLPPSPAL

SEQ ID NO: 10764 - DNA, 1314 bp, Homo sapiens
tgctgcacccgccctccgccggcgccgagcgcacgctggcctctgtgtgcgccctgctggtgtggcaccccgccggccccggcgagaaggtggtgcgcgtgctgttccccggttgcaccccgcccgcctgcctcctggacggcctggtccgcctgcagcacttgaggttcctgcgagagcccgtggtgacgccccaggacctggaggggccggggcgagccgagagcaaagagagcgtgggctcccgggacagctcgaagagagagggcctcctggccacccaccctagacctggccaggagcgccctggggtggcccgcaaggagccagcacgggctgaggccccacgcaagactgagaaagaagccaagaccccccgggagttgaagaaagaccccaaaccgagtgtctcccggacccagccgcgggaggtgcgccgggcagcctcttctgtgcccaacctcaagaagacgaatgcccaggcggcacccaagccccgcaaagcgcccagcacgtcccactctggcttcccgccggtggcaaatggaccccgcagcccgcccagcctccgatgtggagaagccagcccccccagtgcagcctgcggctctccggcctcccagctggtggccacgcccagcctggagctggggccgatcccagccggggaggagaaggcactggagctgcctttggccgccagctcaatcccaaggccacgcacaccctcccctgagtcccaccggagccccgcagagggcagcgagcggctgtcgctgagcccactgcggggcggggaggccgggccagacgcctcacccacagtgaccacacccacggtgaccacgccctcactacccgcagaggtgggctccccgcactcgaccgaggtggacgagtccctgtcggtgtcctttgagcagcgcccacctggtggatgaggagttcttccagcgcgtgcgcgcgctctgctacgtcatcagtggccaggaccagcgcaaggaggaaggcatgcgggccgtcctggacgcgctactggccagcaagcagcattgggaccgtgacctgcaggtgaccctgatccccactttcgactcggtggccatgcatacgtggtacgcagagacgcacgcccggcaccaggcgctgggcatcacggtgttgggcagcaacagcatggtgtccatgcaggatgacgccttcccggcctgcaaggtggagttctagccccatcgccgacacgccccccactcagcccagcccgcctgtccctagattcagccacatcagaaataaactgtgactacacttggc

SEQ ID NO: 10765 - protein, 71 aa, Homo sapiens
MRAVLDALLASKQHWDRDLQVTLIPTFDSVAMHTWYAETHARHQALGITVLGSNSMVSMQDDAFPACKVEF

SEQ ID NO: 10766 - DNA, 1109 bp, Homo sapiens
cccccgggagttgaagaaagaccccaaaccgagtgtctcccggacccagccgcgggaggtgcgccgggcagcctcttctgtgcccaacctcaagaagacgaatgcccaggcggcacccaagccccgcaaagcgcccagcacgtcccactctggcttcccgccggtggcaaatggaccccgcagcccgcccagcctccgatgtggagaagccagcccccccagtgcagcctgcggctctccggcctcccagctggtggccacgcccagcctggagctggggccgatcccagccggggaggagaaggcactggagctgcctttggccgccagctcaatcccaaggccacgcacaccctcccctgagtcccaccggagccccgcagagggcagcgagcggctgtcgctgagcccactgcggggcggggaggccgggccagacgcctcacccacagtgaccacacccacggtgaccacgccctcactacccgcagaggtgggctccccgcactcgaccgaggtggacgagtccctgtcggtgtcctttgagcaggtgctgccgccatccgcccccaccagtgaggctgggctgagcctcccgctgcgtggcccccgggcgcggcgctcggcttccccacacgatgtggacctgtgcctggtgtcaccctgtgaatttgagcatcgcaaggcggtgccaatggcaccggcacctgcgtcccccggcagctcgaatgacagcagtgcccggtcacaggaacgggcaggtgggctgggggccgaggagacgccacccacatcggtcagcgagtccctgcccaccctgtctgactcggatcccgtgcccctggcccccggtgcggcagactcagacgaagacacagagggctttggagtccctcgccacgaccctttgcctgaccccctcaaggtccccccaccactgcctgacccatccagcatctgcatggtggaccccgagatgctgccccccaagacagcacggcaaacggagaacgtcagccgcacccggaagccccgacacgccccccactcagcccagcccgcctgtccctagattcagccacatcagaaataaactgtgactacacttg

SEQ ID NO: 10767 - protein, 153 aa, Homo sapiens
MWTCAWCHPVNLSIARRCQWHRHLRPPAARMTAVPGHRNGQVGWGPRRRHPHRSASPCPPCLTRIPCPWPPVRQTQTKTQRALESLATTLCLTPSRSPHHCLTHPASAWWTPRCCPPRQHGKRRTSAAPGSPDTPPTQPSPPVPRFSHIRNKL

SEQ ID NO: 10768 - DNA, 1620 bp, Homo sapiens
gctcaatcccaaggccacgcacaccctcccctgagtcccaccggagccccgcagagggcagcgagcggctgtcgctgagcccactgcggggcggggaggccgggccagacgcctcacccacagtgaccacacccacggtgaccacgccctcactacccgcagaggtgggctccccgcactcgaccgaggtggacgagtccctgtcggtgtcctttgagcaggtgctgccgccatccgcccccaccagtgaggctgggctgagcctcccgctgcgtggcccccgggcgcggcgctcggcttccccacacgatgtggacctgtgcctggtgtcaccctgtgaatttgagcatcgcaaggcggtgccaatggcaccggcacctgcgtcccccggcagctcgaatgacagcagtgcccggtcacaggaacgggcaggtgggctgggggccgaggagacgccacccacatcggtcagcgagtccctgcccaccctgtctgactcggatcccgtgcccctggcccccggtgcggcagactcagacgaagacacagagggctttggagtccctcgccacgaccctttgcctgaccccctcaaggtccccccaccactgcctgacccatccagcatctgcatggtggaccccgagatgctgccccccaagacagcacggcaaacggagaacgtcagccgcacccggaagcccctggcccgccccaactcacgcgctgccgcccccaaagccactccagtggctgctgccaaaaccaaggggcttgctggtggggaccgtgccagccgaccactcagtgcccggagtgagcccagtgagaagggaggccgggcacccctgtccagaaagtcctcaacccccaagactgccactcgaggcccgtcggtagagttggggtttcaccatgttggccaggctggtctcgaactccggacctcaggtgatctgcccaccttggcctcccaaagtgctgggattacaggcatgagccactgcacccagccaagtcctcctgttcgtaattacttcgtgacctcagccgtgcccacctctccggggctcagtttctcctgtgaaatggaaactgacctcagtgttgaagcacttgccattctgaggtgcctggacagggtcagccagcagccggcccggggtgtcagccaccccacccaagtccccggtctacctggacctggcctacctgcccagcgggagcagcgcccacctggtggatgaggagttcttccagcgcgtgcgcgcgctctgctacgtcatcagtggccaggaccagcgcaaggaggaaggcatgcgggccgtcctggacgcgctactggccagcaagcagcattgggaccgtgacctgcaggtgaccctgatccccactttcgactcggtggccatgcatacgtggtacgcagagacgcacgcccggcaccaggcgctgggcatcacggtgttgggcagcaacagcatggtgtccatgcaggatgacgccttcccggcctgcaaggtggagttctagccccatcgccgacacgccccccactcagcccagcccgcctgtccctagattcagccacatcagaaataaactgtgactacacttggc

SEQ ID NO: 10769 - protein, 293 aa, Homo sapiens
MAPAPASPGSSNDSSARSQERAGGLGAEETPPTSVSESLPTLSDSDPVPLAPGAADSDEDTEGFGVPRHDPLPDPLKVPPPLPDPSSICMVDPEMLPPKTARQTENVSRTRKPLARPNSRAAAPKATPVAAAKTKGLAGGDRASRPLSARSEPSEKGGRAPLSRKSSTPKTATRGPSVELGFHHVGQAGLELRTSGDLPTLASQSAGITGMSHCTQPSPPVRNYFVTSAVPTSPGLSFSCEMETDLSVEALAILRCLDRVSQQPARGVSHPTQVPGLPGPGLPAQREQRPPGG

SEQ ID NO: 10770 - DNA, 650 bp, Homo sapiens
cttaaaataagattcactggagtcatgagcgcaccaggcctccccagaaaactctgagttcaggcctcctgctgaggagggagctgctctgagtggtgcaggtcgaacttggagcctcggcccctccccagccccaggagctcatccctgcctccccatccccccgcccgcagggtcagccagcagccggcccggggtgtcagccaccccacccaagtccccggtctacctggacctggcctacctgcccagcgggagcagcgcccacctggtggatgaggagttcttccagcgcgtgcgcgcgctctgctacgtcatcagtggccaggaccagcgcaaggaggaaggcatgcgggccgtcctggacgcgctactggccagcaagcagcattgggaccgtgacctgcaggtgaccctgatccccactttcgactcggtggccatgcatacgtggtacgcagagacgcacgcccggcaccaggcgctgggcatcacggtgttgggcagcaacagcatggtgtccatgcaggatgacgccttcccggcctgcaaggtggagttctagccccatcgccgacacgccccccactcagcccagcccgcctgtccctagattcagccacatcagaaataaactgtgactacacttg

SEQ ID NO: 10771 - protein, 71 aa, Homo sapiens; identical to SEQ ID NO: 10765

SEQ ID NO: 10772 - DNA, 3211 bp, Homo sapiens
cgcgccgcagccgcggagggaggggcggggcgggctccggtgtcagcgaccaagccgcaggtggcggcgagcgcggggctcggcccgagctcaggagatggggaaactgaggcacggagctggacagtgactcagacaccaggagctgcctggagtggagctgagagctcaggtctgggctcagccagtccagagtgcaaatctactgtcccttcctagctgtgtgatcttggcaagcactggacggggcctgcaggggtctccacagagaccatcaggatgtcgtattttggggagcatttttggggcgagaaaaatcatggctttgaggtcctgtaccacagcgtgaagcaggggcccatctccaccaaggagctggcggacttcatccgggagagggccaccatcgaggagacctactcgaaggcgatggcgaaactctccaagctggccagcaacgggacccccatggggaccttcgccccgctctgggaggtcttccgcgtctcctcggacaagctggcgctgtgccacctggaactgacacggaagttacaggatctcatcaaggacgttctccgctacggcgaggaacagctcaagacccacaagaagtgcaaggaggaagtggtgagcaccttggatgctgtgcaggtactctcgggcgtcagccagctcctgcccaagtcccgcgagaactacctgaaccgttgcatggaccaggagcggctgcggagggagagtaccagccagaaggagatggacaaggcggagactaaaaccaagaaggcggcagagagcctgcggcgctcagtggaaaaatacaactcagcccgagctgactttgagcagaagatgctggactcagccctgcgcttccaagccatggaggagacacacctgaggcacatgaaggcactgctgggctcatatgctcactcggtggaggacacgcacgtgcagattgggcaggtgcatgaggaatttaagcagaacatcgagaacgtcagcgtggagatgctactcaggaagtttgcagagagtaagggcacaggccgggagaagcctggacctctggacttcgaggcatacagtgcggctgccctgcaggaagcgatgaaacgtttgcggggagccaaggcctttcgccttccaggactaagccggcgggagcgggagccagagccacctgcagctgtagatttcctggagcccgattcagggacatgtccagaggtggatgaagaaggtttcactgtccggcctgatgtgacccacccacgcacggccgagccctcccgtttctcgtccagcgactccgacttcgacgatgaagagccccgcaagttctatgtgcacatcaagcctgccccggcccgggctccagcctgcagccccgaggcagcagcggcacagctcagggccaccgcgggcagcctcatccttcctcctggcccagggggcaccatgaaacgccattcttcacgggacgctgctgggaaaccccagagacctcggtctgcccccagaaccagcagctgtgcagagagattgcagtcagaggagcaggtgtccaagaacctctttgggccgcccctggagtcagcctttgaccacgaagattttacaggctctagcagcctgggcttcacctccagcccctcccctttctcctcctcgtcgcccgaaaacgtggaggattccggcctggactctccgtcccacgcggcacctggcccctccccagattcctgggtcccccgcccaggcaccccgcagagcccgcccagctgtagggcgccacccccagaggccaggggtatccgggcaccgcctctgccagactcgccgcagcccctcgcctcgtctccaggcccctgggggctggaggccttggccggaggagacctgatgcctgcacctgctgaccccacagccagggagggcctggcagccccacccaggagacttcgctctaggaaggtgtcctgccctctcacacgtagcaatggggacctgtctcgttccctgagcccctccccactgggctcttcagccgccagcactgccttggaacggcccagcttcttatcccagacaggacacggagtctcccggggtccgagccctgtggtcctgggctcccaggatgccctgcccatagccacagccttcacagagtatgtccacgcctacttccgtggccacagccccagctgcctggctcgagtaactggggagctgaccatgaccttccctgctggcatcgtgcgtgtgttcagcgggaccccaccaccacctgtcctcagcttccggcttgtacacacaaccgctattgagcacttccagcccaacgccgatctgctgttcagtgacccctcccagagtgaccctgagaccaaagacttctggctcaacatggcagctctgaccgaagccctgcagcgccaggcagagcagaaccccactgcctcctactacaacgtggtgctgctgcgataccagttctcccgcccgggtccccagtctgtgcctctgcagctcagtgcccactggcagtgtggagccaccctcacccaggtctcagtggagtacggctaccggcccggtgccacggctgtgcccacaccactcacgaacgtccagatcctgctgcctgtgggggagcctgtgaccaacgtccgcttgcagccggctgccacctggaacctggaggagaagcggctcacttggaggcttccagatgtgtccgaggcaggcggttctggccgcctctctgccagctgggagccgctctcagggcccagcacacccagccccgtggctgcacagttcaccagcgaggggaccactctgtcgggcgtggacttggaactggtgggcagcggttaccgcatgtcgctggtgaagaggaggtttgccacagggatgtacctggtgagctgctgaacccgcaaatgctgctgccccagctctacactgcgccctggtgctggctgaccaccccctgccctcctgccggaccctggggcctcccaccccagcctccctgaggcccatactccacggagaggagccccatgcccagcctggctgagcccgagattcgctcctccccctcatgccaaccccacacaggtcccggccttttaatgttctttgaataaacactttattttctaataaaataaaaaaggaaaccttttcctgc

SEQ ID NO: 10773 - protein, 889 aa, Homo sapiens
MSYFGEHFWGEKNHGFEVLYHSVKQGPISTKELADFIRERATIEETYSKAMAKLSKLASNGTPMGTFAPLWEVFRVSSDKLALCHLELTRKLQDLIKDVLRYGEEQLKTHKKCKEEVVSTLDAVQVLSGVSQLLPKSRENYLNRCMDQERLRRESTSQKEMDKAETKTKKAAESLRRSVEKYNSARADFEQKMLDSALRFQAMEETHLRHMKALLGSYAHSVEDTHVQIGQVHEEFKQNIENVSVEMLLRKFAESKGTGREKPGPLDFEAYSAAALQEAMKRLRGAKAFRLPGLSRREREPEPPAAVDFLEPDSGTCPEVDEEGFTVRPDVTHPRTAEPSRFSSSDSDFDDEEPRKFYVHIKPAPARAPACSPEAAAAQLRATAGSLILPPGPGGTMKRHSSRDAAGKPQRPRSAPRTSSCAERLQSEEQVSKNLFGPPLESAFDHEDFTGSSSLGFTSSPSPFSSSSPENVEDSGLDSPSHAAPGPSPDSWVPRPGTPQSPPSCRAPPPEARGIRAPPLPDSPQPLASSPGPWGLEALAGGDLMPAPADPTAREGLAAPPRRLRSRKVSCPLTRSNGDLSRSLSPSPLGSSAASTALERPSFLSQTGHGVSRGPSPVVLGSQDALPIATAFTEYVHAYFRGHSPSCLARVTGELTMTFPAGIVRVFSGTPPPPVLSFRLVHTTAIEHFQPNADLLFSDPSQSDPETKDFWLNMAALTEALQRQAEQNPTASYYNVVLLRYQFSRPGPQSVPLQLSAHWQCGATLTQVSVEYGYRPGATAVPTPLTNVQILLPVGEPVTNVRLQPAATWNLEEKRLTWRLPDVSEAGGSGRLSASWEPLSGPSTPSPVAAQFTSEGTTLSGVDLELVGSGYRMSLVKRRFATGMYLVSC

SEQ ID NO: 10774 - DNA, 595 bp, Homo sapiens
tccggtgtcagcgaccaagccgcaggtggcggcgagcgcggggctcggcccgagctcaggagatggggaaactgaggcacggagctggacagtgactcagacaccaggtgaacactggcttttgagggcagggttgggactcgtgggggcagcaatgccagctgggtcatcacagtgaggagtgagctctgactcccaggagggtacataaggagctgcctggagtggagctgagagctcaggtctgggctcagccagtccagagtgcaaatctactgtcccttcctagctgtgtgatcttggcaagcactggacggggcctgcaggggtctccacagagaccatcaggatgtcgtattttggggagcatttttggggcgagaaaaatcatggctttgaggtcctgtaccacagcgtgaagcaggggcccatctccaccaaggagctggcggacttcatccgggagagggccaccatcgaggagacctactcgaaggcgatggcgaaactctccaagctggccagcaacgggacccccatgggcagggctcagcgtgcagcacatacctgagccagtgccagcgctgtcccgggg

SEQ ID NO: 10775 - protein, 73 aa, Homo sapiens
MSYFGEHFWGEKNHGFEVLYHSVKQGPISTKELADFIRERATIEETYSKAMAKLSKLASNGTPMGRAQRAAHT

SEQ ID NO: 10776 - DNA, 694 bp, Homo sapiens
cagcgaccaagccgcaggtggcggcgagcgcggggctcggcccgagctcaggagatggggaaactgaggcacggagctggacagtgactcagacaccaggagctgcctggagtggagctgagagctcaggtctgggctcagccagtccagagtgcaaatctactgtcccttcctagctgtgtgatcttggcaagcactggacggggcctgcaggggtctccacagagaccatcaggatgtcgtattttggggagcatttttgggtaagacccactcttatttaggcgggggatgctggcagggctgtggggacttttatggagatgggaggactgggtgagttgcggttacagccttggacaggtagaggatctgcaagggatggaagttaaagtgggaagagtcaggctgggtttgaatccacacccaccccagacctcacaggccttacaaccttgggcaagtcatagcttgtgtcatagggagaccaagggccagagtgggaacgtctaggcaacctgaagttgccccatgaaaaagtgcagagtcagtgctcaaacccagggccaaactgaacttccaggacccagggtcattccagccagggaacttccacccccttcccatcctggagaattggggggttttcctgacctggcgtctcatggcctgtgcacccctccactgtccaggc

SEQ ID NO: 10777 - protein, 73 aa, Homo sapiens [sequence omitted]

SEQ ID NO: 10778 - DNA, 458 bp, Homo sapiens
caagccgcaggtggcggcgagcgcggggctcggcccgagctcaggagatggggaaactgaggcacggagctggacagtgactcagacaccagacaggcactggacggggcctgcaggggtctccacagagaccatcaggatgtcgtattttggggagcatttttggggcgagaaaaatcatggctttgaggtcctgtaccacagcgtgaagcaggggcccatctccaccaaggagctggcggacttcatccgggagagggccaccatcgaggagacctactcgaaggcgatggcgaaactctccaagctggccagcaacgggacccccatgggcagggctcagcgtgcagcacatacctgagccagtgccagcgctgtcccggggtggggtgagcctgatgaaccctgggtgtgaccttgcccgcccccaggaccttcgccccgctctgggaggtctt

SEQ ID NO: 10779 - protein, 73 aa, Homo sapiens; identical to SEQ ID NO: 10775

SEQ ID NO: 10780 - DNA, 3215 bp, Homo sapiens
acacaagcctccaacttggtgctgacggaagtggcctcgtggctgtctcctggcgcctgccccgtcagacaggggccccatcccactcgctaccctgtccgatggggaaactgaggcacggagctggacagtgactcagacaccaggagctgcctggagtggagctgagagctcaggtctgggctcagccagtccagagtgcaaatctactgtcccttcctagctgtgtgatcttggcaagcactggacggggcctgcaggggtctccacagagaccatcaggatgtcgtattttggggagcatttttggggcgagaaaaatcatggctttgaggtcctgtaccacagcgtgaagcaggggcccatctccaccaaggagctggcggacttcatccgggagagggccaccatcgaggagacctactcgaaggcgatggcgaaactctccaagctggccagcaacgggacccccatggggaccttcgccccgctctgggaggtcttccgcgtctcctcggacaagctggcgctgtgccacctggaactgacacggaagttacaggatctcatcaaggacgttctccgctacggcgaggaacagctcaagacccacaagaagtgcaaggaggaagtggtgagcaccttggatgctgtgcaggtactctcgggcgtcagccagctcctgcccaagtcccgcgagaactacctgaaccgttgcatggaccaggagcggctgcggagggagagtaccagccagaaggagatggacaaggcggagactaaaaccaagaaggcggcagagagcctgcggcgctcagtggaaaaatacaactcagcccgagctgactttgagcagaagatgctggactcagccctgcgcttccaagccatggaggagacacacctgaggcacatgaaggcactgctgggctcatatgctcactcggtggaggacacgcacgtgcagattgggcaggtgcatgaggaatttaagcagaacatcgagaacgtcagcgtggagatgctactcaggaagtttgcagagagtaagggcacaggccgggagaagcctggacctctggacttcgaggcatacagtgcggctgccctgcaggaagcgatgaaacgtttgcggggagccaaggcctttcgccttccaggactaagccggcgggagcgggagccagagccacctgcagctgtagatttcctggagcccgattcagggacatgtccagaggtggatgaagaaggtttcactgtccggcctgatgtgacccacccacgcacggccgagccctcccgtttctcgtccagcgactccgacttcgacgatgaagagccccgcaagttctatgtgcacatcaagcctgccccggcccgggctccagcctgcagccccgaggcagcagcggcacagctcagggccaccgcgggcagcctcatccttcctcctggcccagggggcaccatgaaacgccattcttcacgggacgctgctgggaaaccccagagacctcggtctgcccccagaaccagcagctgtgcagagagattgcagtcagaggagcaggtgtccaagaacctctttgggccgcccctggagtcagcctttgaccacgaagattttacaggctctagcagcctgggcttcacctccagcccctcccctttctcctcctcgtcgcccgaaaacgtggaggattccggcctggactctccgtcccacgcggcacctggcccctccccagattcctgggtcccccgcccaggcaccccgcagagcccgcccagctgtagggcgccacccccagaggccaggggtatccgggcaccgcctctgccagactcgccgcagcccctcgcctcgtctccaggcccctgggggctggaggccttggccggaggagacctgatgcctgcacctgctgaccccacagccagggagggcctggcagccccacccaggagacttcgctctaggaaggtgtcctgccctctcacacgtagcaatggggacctgtctcgttccctgagcccctccccactgggctcttcagccgccagcactgccttggaacggcccagcttcttatcccagacaggacacggagtctcccggggtccgagccctgtggtcctgggctcccaggatgccctgcccatagccacagccttcacagagtatgtccacgcctacttccgtggccacagccccagctgcctggctcgagtaactggggagctgaccatgaccttccctgctggcatcgtgcgtgtgttcagcgggaccccaccaccacctgtcctcagcttccggcttgtacacacaaccgctattgagcacttccagcccaacgccgatctgctgttcagtgacccctcccagagtgaccctgagaccaaagacttctggctcaacatggcagctctgaccgaagccctgcagcgccaggcagagcagaaccccactgcctcctactacaacgtggtgctgctgcgataccagttctcccgcccgggtccccagtctgtgcctctgcagctcagtgcccactggcagtgtggagccaccctcacccaggtctcagtggagtacggctaccggcccggtgccacggctgtgcccacaccactcacgaacgtccagatcctgctgcctgtgggggagcctgtgaccaacgtccgcttgcagccggctgccacctggaacctggaggagaagcggctcacttggaggcttccagatgtgtccgaggcaggcggttctggccgcctctctgccagctgggagccgctctcagggcccagcacacccagccccgtggctgcacagttcaccagcgaggggaccactctgtcgggcgtggacttggaactggtgggcagcggttaccgcatgtcgctggtgaagaggaggtttgccacagggatgtacctggtgagctgctgaacccgcaaatgctgctgccccagctctacactgcgccctggtgctggctgaccaccccctgccctcctgccggaccctggggcctcccaccccagcctccctgaggcccatactccacggagaggagccccatgcccagcctggctgagcccgagattcgctcctccccctcatgccaaccccacacaggtcccggccttttaatgttctttgaataaacactttattttctaataaaataaaaaaggaaaccttttcctgc

SEQ ID NO: 10781 - protein, 889 aa, Homo sapiens; identical to SEQ ID NO: 10773

SEQ ID NO: 10782 - DNA, 760 bp, Homo sapiens
agtggcctcgtggctgtctcctggcgcctgccccgtcagacaggggccccatcccactcgctaccctgtccgatggggaaactgaggcacggagctggacagtgactcagacaccaggtgaacactggcttttgagggcagggttgggactcgtgggggcagcaatgccagctgggtcatcacagtgaggagtgagctctgactcccaggagggtacataaggagctgcctggagtggagctgagagctcaggtctgggctcagccagtccagagtgcaaatctactgtcccttcctagctgtgtgatcttggcaagcactggacggggcctgcaggggtctccacagagaccatcaggatgtcgtattttggggagcatttttggggcgagaaaaatcatggctttgaggtcctgtaccacagcgtgaagcaggggcccatctccaccaaggagctggcggacttcatccgggagagggccaccatcgaggagacctactcgaaggcgatggcgaaactctccaagctggccagcaacgggacccccatggggaccttcgccccgctctgggaggtcttccgcgtctcctcggacaagctggcgctgtgccacctggaactgacacggaagttacaggatctcatcaaggacgttctccgctacggcgaggaacagctcaagacccacaagaaggtactctcgggcgtcagccagctcctgcccaagtcccgcgagaactacctgaaccgttgcatgga

SEQ ID NO: 10783 - protein, 132 aa, Homo sapiens
MSYFGEHFWGEKNHGFEVLYHSVKQGPISTKELADFIRERATIEETYSKAMAKLSKLASNGTPMGTFAPLWEVFRVSSDKLALCHLELTRKLQDLIKDVLRYGEEQLKTHKKVLSGVSQLLPKSRENYLNRC

SEQ ID NO: 10784 - DNA, 562 bp, Homo sapiens
actgcctgtccgtcccctgccgggcggcctgacccagcctcttgtgcagagacacctggggctccccggcaagatcccttctaagcattccttcttattttgcagatggggaaactgaggcacggagctggacagtgactcagacaccaggtgaacactggcttttgagggcagggttgggactcgtgggggcagcaatgccagctgggtcatcacagtgaggagtgagctctgactcccaggagggtacataaggagctgcctggagtggagctgagagctcaggtctgggctcagccagtccagagtgcaaatctactgtcccttcctagctgtgtgatcttggcaagtgacttcccctctgggggaggggagggctcagttttcccatctgtgaagtggatcagagctttcctgtcaaggttaggggtcatccagcactgctcctacccactgctatgaactcttatacatgcctaaaaaccccacattccatgccccctcctccaatctagactccctcagctcttgtccctccacctagtccagttctgactctgtg

SEQ ID NO: 10785 - protein, 77 aa, Homo sapiens
ALTPRRVHKELPGVELRAQVWAQPVQSANLLSLPSCVILASDFPSGGGEGSVFPSVKWIRAFLSRLGVIQHCSYPLL

SEQ ID NO: 10786 - DNA, 3646 bp, Homo sapiens
ctgcgcggcgcggcgctgcggagaccgttggttcatttgcatgtccccgcctcgcgcggcggcggcggcgggtgaggagcctgaggcggcggcgggggtggctccgcgcgcggtggtctcgggggcaaaataacatggcagccagacgaattacacaggagacttttgatgctgtattacaagaaaaagccaaacgatatcacatggatgccagtggtgaggctgtaagcgaaactcttcagtttaaagctcaagatctcttaagggcagtcccaagatccagagcagagatgtatgatgacgtccacagcgatggcagatactccctcagtggatctgtagctcactctagagatgccggaagagaaggcctgagaagtgacgtatttccagggccttccttcagatcaagcaacccttccatcagtgatgacagctactttcgcaaagaatgtggccgggatctggaattttctcactctgattctcgggaccaggtcattggccaccggaaattggggcatttccgttctcaggactggaaatttgcgctccgtggttcttgggaacaagactttggccatccagtttctcaagagtcctcttggtcacaggagtatagttttggtccctctgcagttttgggggactttggatcttccaggctgattgagaaagagtgtttggagaaggagagtcgggattatgacgtggaccatcctggggaggctgactctgtgcttaggggcggcagtcaagtccaggccagaggtcgagctctaaacatcgttgaccaggaaggttccctcctaggaaagggggagactcagggcctgctcacagctaaggggggtgttgggaaacttgtcacattgagaaatgtgagcacaaaaaaaatacccaccgtgaatcgtattactcccaaaactcagggcactaaccaaatccagaaaaacactccaagtcctgatgtgaccctggggacaaacccagggacagaagatatccagttccccattcagaagatccctctggggctggatctgaagaatcttcggctccccagaagaaagatgagctttgacatcatagataagtctgatgttttttcaagatttgggatagaaataatcaaatgggcaggattccacaccataaaagatgatattaaattttcccaacttttccagactctctttgaacttgaaacagaaacctgtgctaaaatgcttgcctcattcaaatgttccttaaaaccagagcacagagatttttgcttttttactatcaaatttttaaagcactctgctttgaaaacacccagagttgataatgagtttttaaacatgcttttagacaaaggtgctgtgaagaccaaaaattgcttttttgaaatcataaagccttttgacaagtacataatgagacttcaagaccggcttctgaagagtgtcacacctttgcttatggcctgcaatgcctacgagctaagtgtcaagatgaagaccctcagtaaccccctggacttggctcttgccctagaaaccaccaactctctctgccggaagtctttggcccttttgggacagacattttccttggcctcttctttccggcaggagaaaatcttagaagctgtcggcctgcaagatatagctccctcacctgctgcgtttccaaacttcgaagactccactttgtttgggcgagagtacatagaccacctgaaggcctggctagtcagcagcggatgtcccctccaggttaagaaagccgaaccagagccgatgcgagaggaggagaaaatgattcctcctacgaaacctgaaattcaggccaaggctccaagtagtctgagtgatgctgtcccccagcgagcagatcacagggtagtgggcaccatcgaccagcttgtgaaacgtgtcatcgaaggcagcctgtctcccaaagagagaactcttctcaaagaggaccctgcttactggtttttgtctgatgaaaatagtctggagtataaatattacaagctgaagttggcagaaatgcagcggatgagcgagaacttgcgaggagccgaccagaagccgacctcagcagactgtgcagtgagggccatgctgtactcccgggctgtccgcaacctcaagaagaaactccttccgtggcagcggcgggggctcctccgtgctcaagggctccggggctggaaggcgaggagagcgaccaccgggacccagaccctcctatcctcaggcaccaggctgaaacaccacggccggcaggctccaggcctctcacaggcaaaaccatccctgccagacagaaatgatgctgccaaggactgcccgccagacccagttggaccttctcctcaggaccccagcttagaagcctcaggcccatcccccaagccagcaggagtggacatctctgaagcacctcagacctcttctccctgcccatctgctgacattgacatgaagacaatggagactgcagagaaactggctagatttgttgctcaggtgggaccagagatcgaacaattcagcatagaaaacagcaccgataaccctgacctgtggtttctacatgaccaaaatagttctgctttcaaattctatcgaaagaaagtgtttgaactatgtccatcaatttgtttcacgtcatctccgcacaaccttcacactggtggtggtgacaccacgggttctcaggagagccccgtggacctcatggaaggggaagcagagtttgaagacgagccccctccgcgggaggctgagctggagagcccagaggtgatgcctgaggaggaggacgaggacgatgaggatgggggagaggaggcccccgctcctggaggggcgggcaagtctgagggcagcacccctgccgacggccttcccggcgaggctgccgaggacgacctggctggagcacctgccttgtcacaggcctcctcaggtacctgcttccctcggaagaggatcagcagcaagtcattgaaggttggcatgattccagctcccaagagagtgtgtctcatccaggagccaaaagtccatgaaccagttcgaattgcctatgacaggcctcggggtcgtcccatgtccaaaaagaagaaacccaaggacttggacttcgcccagcagaagctgaccgataagaacctgggcttccagatgctgcagaagatgggctggaaggagggccatggcctgggctccctcggaaagggcatcagggagccggtcagcgtgggaaccccctcggaaggggaagggttgggtgctgacgggcaggagcacaaagaagacacattcgatgtgttccgacagaggatgatgcagatgtacagacacaagcgggccaacaaatagttccagggtcacccccgagaggacaacaggcatctggaagtgctctctcgccactctgggtgctttactgtctctggcttgtttccatcactggaaatcacttagagaattgtagtgtttttggtccttgataaagcctagaagacatttgtgatgttacaaaatggaagttttcttttgtttctgttttttaagatctaagaagttgtgaatgttgttaatcatttagccgttgcaataaatgtagaggaaatgcagtgtgc

SEQ ID NO: 10787 - protein, 1082 aa, Homo sapiens
MAARRITQETFDAVLQEKAKRYHMDASGEAVSETLQFKAQDLLRAVPRSRAEMYDDVHSDGRYSLSGSVAHSRDAGREGLRSDVFPGPSFRSSNPSISDDSYFRKECGRDLEFSHSDSRDQVIGHRKLGHFRSQDWKFALRGSWEQDFGHPVSQESSWSQEYSFGPSAVLGDFGSSRLIEKECLEKESRDYDVDHPGEADSVLRGGSQVQARGRALNIVDQEGSLLGKGETQGLLTAKGGVGKLVTLRNVSTKKIPTVNRITPKTQGTNQIQKNTPSPDVTLGTNPGTEDIQFPIQKIPLGLDLKNLRLPRRKMSFDIIDKSDVFSRFGIEIIKWAGFHTIKDDIKFSQLFQTLFELETETCAKMLASFKCSLKPEHRDFCFFTIKFLKHSALKTPRVDNEFLNMLLDKGAVKTKNCFFEIIKPFDKYIMRLQDRLLKSVTPLLMACNAYELSVKMKTLSNPLDLALALETTNSLCRKSLALLGQTFSLASSFRQEKILEAVGLQDIAPSPAAFPNFEDSTLFGREYIDHLKAWLVSSGCPLQVKKAEPEPMREEEKMIPPTKPEIQAKAPSSLSDAVPQRADHRVVGTIDQLVKRVIEGSLSPKERTLLKEDPAYWFLSDENSLEYKYYKLKLAEMQRMSENLRGADQKPTSADCAVRAMLYSRAVRNLKKKLLPWQRRGLLRAQGLRGWKARRATTGTQTLLSSGTRLKHHGRQAPGLSQAKPSLPDRNDAAKDCPPDPVGPSPQDPSLEASGPSPKPAGVDISEAPQTSSPCPSADIDMKTMETAEKLARFVAQVGPEIEQFSIENSTDNPDLWFLHDQNSSAFKFYRKKVFELCPSICFTSSPHNLHTGGGDTTGSQESPVDLMEGEAEFEDEPPPREAELESPEVMPEEEDEDDEDGGEEAPAPGGAGKSEGSTPADGLPGEAAEDDLAGAPALSQASSGTCFPRKRISSKSLKVGMIPAPKRVCLIQEPKVHEPVRIAYDRPRGRPMSKKKKPKDLDFAQQKLTDKNLGFQMLQKMGWKEGHGLGSLGKGIREPVSVGTPSEGEGLGADGQEHKEDTFDVFRQRMMQMYRHKRANK

SEQ ID NO: 10788 - DNA, 1134 bp, Homo sapiens
gggcgtggtggcgggcgcttgtagtcccagctactcaggaggctgaggcaggagaatcacttgaacccgggaggcggaggttgcagtgagccgagattgtgccaccgcactccagcctggcaacagagcgagactctgtctcaaaaaaaaaaaaggaaatcctggctttctttaagccacagacttcctaggctgtggtcccagctccttgtctgcctggtccctgtcaccttgcagtgccaccacccccaggggctctgcttgcttccagtggcttctgtagctttggcaactggcagatctttatggcagtagaggtgccagcatggaggatggagtttgggtttataacccaaccctcgaacgaaccagcctgtgggggcctggagtggagctggttttggggagtcacaggtgcggggggttcatcttctcctttctccttctcctttcctgacccctccgacagcttccatgttggccatgggtcaggtgaatggatggagctccaagcggggctcagcccattgacccgagcgaggcgcacacacctgcagcgtggatcaagcgcactctctccagcatcgccctgaccattccatgtgctttgtcctagcatgttcattcttgactttctccacttcattttattaaaaagttaaatgctttaggaatctgtggcgtgtggccactgaccgccccccacctcctgccgctcctccaagtttgagctgagatggttctgtgagtccttggcaggggtcaaagggcacatctccttgaacctagaaagccccctacactctcagaggacacctctcctgtggattcagcgctggggcagtgaaggtgtcgggagccagcagagcatgttccagggtcacccccgagaggacaacaggcatctggaagtgctctctcgccactctgggtgctttactgtctctggcttgtttccatcactggaaatcacttagagaattgtagtgtttttggtccttgataaagcctagaagacatttgtgatgttacaaaatggaagttttcttttgtttctgttttttaagatctaagaagttgtgaatgttgttaatcatttagccgttgcaataaatgtagaggaaatgcagtgtg

SEQ ID NO: 10789 - protein, 35 aa, Homo sapiens
MFQGHPREDNRHLEVLSRHSGCFTVSGLFPSLEIT

SEQ ID NO: 10790 - DNA, 1774 bp, Homo sapiens
attacagcctttgtaaggagaggcaggctcctcctggggtgggctctgcagctgctctatttccaggcatgtgatcgcccccgctctccagattccccagcactctgctgcgtgtaactccactcaattctccactcatccttccttgtgaagcaggatcgttgaagttttaagtatgggcaaaaatctggaaaacttaggatccctctgacaccccaggattaggggacacagcagtggctagggcatcagccacagaactgagcgggaaatgccacttgtattggctgtaaagaaatcctggctttgggccaggcacagtggctcaagcctgtaatcccagcactttaggaggttgaggcggatggatcacctgaggtcaggagtttgagaccagcctggccaacatggtgtaaccccgtctctactaaaaatacaaaaaaattagccaggcgtggtagcgggcacctgtaatcccagctactcaggaggctgaggcaggagaatcacttgaaccggggaggcagaggttgcagtgagccgagattgtgccaccgcactccagcctggcaacagagcgagactctgtctcaaaaaaaaaaaaggaaatcctggctttctttaagccacagacttcctaggctgtggtcccagctccttgtctgcctggtccctgtcaccttgcagtgccaccacccccaggggctctgcttgcttccagtggcttctgtagctttggcaactggcagatctttatggcagtagaggtgccagcatggaggatggagtttgggtttataacccaaccctcgaacgaaccagcctgtgggggcctggagtggagctggttttggggagtcacaggtgcggggggttcatcttctcctttctccttctcctttcctgacccctccgacagcttccatgttggccatgggtcaggtgaatggatggagctccaagcggggctcagcccattgacccgagcgaggcgcacacacctgcagcgtggatcaagcgcactctctccagcatcgccctgaccattccatgtgctttgtcctagcatgttcattcttgactttctccacttcattttattaaaaagttaaatgctttaggaatctgtggcgtgtggccactgaccgccccccacctcctgccgctcctccaagtttgagctgagatggttctgtgagtccttggcaggggtcaaagggcacatctccttgaacctagaaagccccctacactctcagaggacacctctcctgtggattcagcgctggggcagtgaaggtgtcgggagccagcagagcatggtgcgtgctgccagctgccggccagccgggatagaggagatgccactggccctccgtgcccccagcccctccctcttaaccgaggctgtccttgctctctgcagaggccgctctgcaggatcctcgtgtcgcgcgtgatgtgtggtggcacagccgtgtcaaagtcacagtgtcttttctgtcgttctagttccagggtcacccccgagaggacaacaggcatctggaagtgctctctcgccactctgggtgctttactgtctctggcttgtttccatcactggaaatcacttagagaattgtagtgtttttggtccttgataaagcctagaagacatttgtgatgttacaaaatggaagttttcttttgtttctgttttttaagatctaagaagttgtgaatgttgttaatcatttagccgttgcaataaatgtagaggaaatgcagtgtg

SEQ ID NO: 10791 - protein, 95 aa, Homo sapiens
MAVEVPAWRMEFGFITQPSNEPACGGLEWSWFWGVTGAGGSSSPFSFSFPDPSDSFHVGHGSGEWMELQAGLSPLTRARRTHLQRGSSALSPASP

SEQ ID NO: 10792 - DNA, 914 bp, Homo sapiens
ctgtgacagccactgccacagaggatggcagttggctgtgtccctttgtgagggtcttcaaatccttttccttctgcagggccttgggcctgtaaatatcctcatctttctattcttttttttttttagttgccccctcacctaatttccacctcagttttgaacaaaatcgttctcttcctgaatagatcaaaaccactgatgtgaaagataagccttgaagcagcaattgcccttaaaacatcatccctgccctggatcggcctggagccagtgcccaagtacggtttggtgtgtacatgaaaacaaacgtctctgcagtctctggggcggaggtttcgctggcttttctttctctcaaagaaaaaaacatgcaccattttcaatgtgcttttgcctctcctctctgttcacatgcttttagcagcaagtcccctccaaatctgtcttggttccccttcagaaggtggcgctgcccccgaaaggcacctcagcctgtgagtgctgaggaaccagctcctctggctgattttccagttggactggccattgctctccagaagtgctctgttagcaaacgtgatgtggaaacgatcacagatggtgttttctcgttgttcgccagaatttatacgggggagacaaattcccgttccagggtcacccccgagaggacaacaggcatctggaagtgctctctcgccactctgggtgctttactgtctctggcttgtttccatcactggaaatcacttagagaattgtagtgtttttggtccttgataaagcctagaagacatttgtgatgttacaaaatggaagttttcttttgtttctgttttttaagatctaagaagttgtgaatgttgttaatcatttagccgttgcaataaatgtagaggaaatgcagtgtg

SEQ ID NO: 10793 - protein, 155 aa, Homo sapiens
MKTNVSAVSGAEVSLAFLSLKEKNMHHFQCAFASPLCSHAFSSKSPPNLSWFPFRRWRCPRKAPQPVSAEEPAPLADFPVGLAIALQKCSVSKRDVETITDGVFSLFARIYTGETNSRSRVTPERTTGIWKCSLATLGALLSLACFHHWKSLREL

SEQ ID NO: 10794 - DNA, 2817 bp, Homo sapiens
cacctaccacataacatgaccagcaaacggactgttcctagtccagagggccttgccatcatgcaagtggaagggcgactgtgacagccactgccacagaggatggcagttggctgtgtccctttgtgagggtcttcaaatccttttccttctgcagggccttgggcctgtaaatatcctcatctttctattcttttttttttttagttgccccctcacctaatttccacctcagttttgaacaaaatcgttctcttcctgaatagatcaaaaccactgatgtgaaagataagccttgaagcagcaattgcccttaaaacatcatccctgccctggatcggcctggagccagtgcccaagtacggtttggtgtgtacatgaaaacaaacgtctctgcagtctctggggcggaggtttcgctggcttttctttctctcaaagaaaaaaacatgcaccattttcaatgtgcttttgcctctcctctctgttcacatgcttttagcagcaagtcccctccaaatctgtcttggttccccttcagaaggtggcgctgcccccgaaaggcacctcagcctgtgagtgctgaggaaccagctcctctggctgattttccagttggactggccattgctctccagaagtgctctgttagcaaacgtgatgtggaaacgatcacagatggtgttttctcgttgttcgccagaatttatacgggggagacaaattcccggtaattaccaagtctgcactcgggtaccaaagctctgaagctctctgaacagttgccatacttgagttgatgaatgtgttattcatggtgtctcatctcatcaatgcatcttgagagacttaatgaaattttagcaacagtatagaatagctctatcgggtggggagtaatcattaaacagatgaaatcggccccagatttacatgtctctttagaatccacagtgtaagcaaactacagttacaaagggatgggggttgtaaaccctctgagactctgcacttttcgcacgtatggcatcgtcaagtgctgtcttattacagcctttgtaaggagaggcaggctcctcctggggtgggctctgcagctgctctatttccaggcatgtgatcgcccccgctctccagattccccagcactctgctgcgtgtaactccactcaattctccactcatccttccttgtgaagcaggatcgttgaagttttaagtatgggcaaaaatctggaaaacttaggatccctctgacaccccaggattaggggacacagcagtggctagggcatcagccacagaactgagcgggaaatgccacttgtattggctgtaaagaaatcctggctttgggccaggcacagtggctcaagcctgtaatcccagcactttaggaggttgaggcggatggatcacgaggtcaagagatcgagaccatcctggccaacatggtgaaaccctgtctctactaaaaatgcaaaaaattagctgggcgtggtggcgggcgcttgtagtcccagctactcaggaggctgaggcaggagaatcacttgaacccgggaggcggaggttgcagtgagccgagattgtgccaccgcactccagcctggcaacagagcgagactctgtctcaaaaaaaaaaaaggaaatcctggctttctttaagccacagacttcctaggctgtggtcccagctccttgtctgcctggtccctgtcaccttgcagtgccaccacccccaggggctctgcttgcttccagtggcttctgtagctttggcaactggcagatctttatggcagtagaggtgccagcatggaggatggagtttgggtttataacccaaccctcgaacgaaccagcctgtgggggcctggagtggagctggttttggggagtcacaggtgcggggggttcatcttctcctttctccttctcctttcctgacccctccgacagcttccatgttggccatgggtcaggtgaatggatggagctccaagcggggctcagcccattgacccgagcgaggcgcacacacctgcagcgtggatcaagcgcactctctccagcatcgccctgaccattccatgtgctttgtcctagcatgttcattcttgactttctccacttcattttattaaaaagttaaatgctttaggaatctgtggcgtgtggccactgaccgccccccacctcctgccgctcctccaagtttgagctgagatggttctgtgagtccttggcaggggtcaaagggcacatctccttgaacctagaaagccccctacactctcagaggacacctctcctgtggattcagcgctggggcagtgaaggtgtcgggagccagcagagcatggtgcgtgctgccagctgccggccagccgggatagaggagatgccactggccctccgtgcccccagcccctccctcttaaccgaggctgtccttgctctctgcagaggccgctctgcaggatcctcgtgtcgcgcgtgatgtgtggtggcacagccgtgtcaaagtcacagtgtcttttctgtcgttctagttccagggtcacccccgagaggacaacaggcatctggaagtgctctctcgccactctgggtgctttactgtctctggcttgtttccatcactggaaatcacttagagaattgtagtgtttttggtccttgataaagcctagaagacatttgtgatgttacaaaatggaagttttcttttgtttctgttttttaagatctaagaagttgtgaatgttgttaatcatttagccgttgcaataaatgtagaggaaatgcagtgtg

SEQ ID NO: 10795 - protein, 118 aa, Homo sapiens [sequence omitted]

SEQ ID NO: 10796 - DNA, 940 bp, Homo sapiens
gcagttgatttttgttttttaaacagaaggcatcttcagatgagaagctgatcatttacatgtgcaggtgtttacagggctcctttctgtcctggtgtagattttttaaccagcttgttggccctggtcattttggccacatttgtgaccatcataaaagctaagtggtatttctgtgtagtttccgtctggaactgctttcccattcccgggaacccatagccgggccagccagggtcccgaacacaggcccaaagtttattaaaccccgatcataacctccagcaggcatttcatttaatactgagcttagttcctgctgggtaaggcattccgaggtaaccagggccctctgggcaccccctcaaaagccagctcttcgagggtgagtactccttgtttctactgtgagtcgcgtcttgattttccctttctttgatgtctcagtgtgtgtcccaaacacctgcatctcatggactgtttgtgcccatgcccagttcctggcatgccaggccctgggctcaggtgcacaactgactctctttttcactccctaggggaaccccctcggaaggggaagggttgggtgctgacgggcaggagcacaaagaagacacattcgatgtgttccgacagaggatgatgcagatgtacagacacaagcgggccaacaaatagttccagggtcacccccgagaggacaacaggcatctggaagtgctctctcgccactctgggtgctttactgtctctggcttgtttccatcactggaaatcacttagagaattgtagtgtttttggtccttgataaagcctagaagacatttgtgatgttacaaaatggaagttttcttttgtttctgttttttaagatctaagaagttgtgaatgttgttaatcatttagccgttgcaataaatgtagaggaaatgcagtgtg

SEQ ID NO: 10797 - protein, 56 aa, Homo sapiens
MDCLCPCPVPGMPGPGLRCTTDSLFHSLGEPPRKGKGWVLTGRSTKKTHSMCSDRG

SEQ ID NO: 10798 - DNA, 3121 bp, Homo sapiens
ctgggcttccagatgctgcagaagatgggctggaaggagggccatggcctgggctccctcggaaagggcatcagggagccggtcagcgtgtacgcagcaggcagcctggggtgggagtgggtggggcctcagtccttccacctgcagcctgccgcttggctccttcacagccaagatggcttacagctggcagttgatttttgttttttaaacagaaggcatcttcagatgagaagctgatcatttacatgtgcaggtgtttacagggctcctttctgtcctggtgtagattttttaaccagcttgttggccctggtcattttggccacatttgtgaccatcataaaagctaagtggtatttctgtgtagtttccgtctggaactgctttcccattcccgggaacccatagccgggccagccagggtcccgaacacaggcccaaagtttattaaaccccgatcataacctccagcaggcatttcatttaatactgagcttagttcctgctgggtaaggcattccgaggtaaccagggccctctgggcaccccctcaaaagccagctcttcgagggtgagtactccttgtttctactgtgagtcgcgtcttgattttccctttctttgatgtctcagtgtgtgtcccaaacacctgcatctcatggactgtttgtgcccatgcccagttcctggcatgccaggccctgggctcaggtgcacaactgactctctttttcactccctaggggaaccccctcggaaggggaagggttgggtgctgacgggcaggagcacaaagaagacacattcgatgtgttccgacagaggatgatgcagatgtacagacacaagcgggccaacaaatagatcaaaaccactgatgtgaaagataagccttgaagcagcaattgcccttaaaacatcatccctgccctggatcggcctggagccagtgcccaagtacggtttggtgtgtacatgaaaacaaacgtctctgcagtctctggggcggaggtttcgctggcttttctttctctcaaagaaaaaaacatgcaccattttcaatgtgcttttgcctctcctctctgttcacatgcttttagcagcaagtcccctccaaatctgtcttggttccccttcagaaggtggcgctgcccccgaaaggcacctcagcctgtgagtgctgaggaaccagctcctctggctgattttccagttggactggccattgctctccagaagtgctctgttagcaaacgtgatgtggaaacgatcacagatggtgttttctcgttgttcgccagaatttatacgggggagacaaattcccggtaattaccaagtctgcactcgggtaccaaagctctgaagctctctgaacagttgccatacttgagttgatgaatgtgttattcatggtgtctcatctcatcaatgcatcttgagagacttaatgaaattttagcaacagtatagaatagctctatcgggtggggagtaatcattaaacagatgaaatcggccccagatttacatgtctctttagaatccacagtgtaagcaaactacagttacaaagggatgggggttgtaaaccctctgagactctgcacttttcgcacgtatggcatcgtcaagtgctgtcttattacagcctttgtaaggagaggcaggctcctcctggggtgggctctgcagctgctctatttccaggcatgtgatcgcccccgctctccagattccccagcactctgctgcgtgtaactccactcaattctccactcatccttccttgtgaagcaggatcgttgaagttttaagtatgggcaaaaatctggaaaacttaggatccctctgacaccccaggattaggggacacagcagtggctagggcatcagccacagaactgagcgggaaatgccacttgtattggctgtaaagaaatcctggctttgtcctggctttctttaagccacagacttcctaggctgtggtcccagctccttgtctgcctggtccctgtcaccttgcagtgccaccacccccaggggctctgcttgcttccagtggcttctgtagctttggcaactggcagatctttatggcagtagaggtgccagcatggaggatggagtttgggtttataacccaaccctcgaacgaaccagcctgtgggggcctggagtggagctggttttggggagtcacaggtgcggggggttcatcttctcctttctccttctcctttcctgacccctccgacagcttccatgttggccatgggtcaggtgaatggatggagctccaagcggggctcagcccattgacccgagcgaggcgcacacacctgcagcgtggatcaagcgcactctctccagcatcgccctgaccattccatgtgctttgtcctagcatgttcattcttgactttctccacttcattttattaaaaagttaaatgctttaggaatctgtggcgtgtggccactgaccgccccccacctcctgccgctcctccaagtttgagctgagatggttctgtgagtccttggcaggggtcaaagggcacatctccttgaacctagaaagccccctacactctcagaggacacctctcctgtggattcagcgctggggcagtgaaggtgtcgggagccagcagagcatggtgcgtgctgccagctgccggccagccgggatagaggagatgccactggccctccgtgcccccagcccctccctcttaaccgaggctgtccttgctctctgcagaggccgctctgcaggatcctcgtgtcgcgcgtgatgtgtggtggcacagccgtgtcaaagtcacagtgtcttttctgtcgttctagttccagggtcacccccgagaggacaacaggcatctggaagtgctctctcgccactctgggtgctttactgtctctggcttgtttccatcactggaaatcacttagagaattgtagtgtttttggtccttgataaagcctagaagacatttgtgatgttacaaaatggaagttttcttttgtttctgttttttaagatctaagaagttgtgaatgttgttaatcatttagccgttgcaataaatgtagaggaaatgcagtgtg

SEQ ID NO: 10799 - protein, 118 aa, Homo sapiens [sequence omitted]

SEQ ID NO: 10800 - DNA, 3766 bp, Homo sapiens
ggtttctacatgaccaaaatagttctgctttcaaattctatcgaaagaaagtgtttgaactatgtccatcaatttgtttcacgtcatctccgcacaaccttcacactggtggtggtgacaccacgggttctcaggagagccccgtggacctcatggaaggggaagcagagtttgaagacgagccccctccgcgggaggctgagctggagagcccagaggtgatgcctgaggaggaggacgaggacgatgaggatgggggagaggaggcccccgctcctggaggggcgggcaagtctgagggcagcacccctgccgacggccttcccggcgaggctgccgaggacgacctggctggagcacctgccttgtcacaggcctcctcaggtacctgcttccctcggaagaggatcagcagcaagtcattgaaggttggcatgattccagctcccaagagagtgtgtctcatccaggagccaaaagaggcgagaacccaccagtacagcagagctgaagcctgttcccagaacgggtctcttgtcccattgcagtcccctgcccgattcagcaaccactgactgttttccaagccccagtccatgaaccagttcgaattgcctatgacaggcctcggggtcgtcccatgtccaaaaagaagaaacccaaggacttggacttcgcccagcagaagctgaccgataagaacctgggcttccagatgctgcagaagatgggctggaaggagggccatggcctgggctccctcggaaagggcatcagggagccggtcagcgtgggaaccccctcggaaggggaagggttgggtgctgacgggcaggagcacaaagaagacacattcgatgtgttccgacagaggatgatgcagatgtacagacacaagcgggccaacaaatagatcaaaaccactgatgtgaaagataagccttgaagcagcaattgcccttaaaacatcatccctgccctggatcggcctggagccagtgcccaagtacggtttggtgtgtacatgaaaacaaacgtctctgcagtctctggggcggaggtttcgctggcttttctttctctcaaagaaaaaaacatgcaccattttcaatgtgcttttgcctctcctctctgttcacatgcttttagcagcaagtcccctccaaatctgtcttggttccccttcagaaggtggcgctgcccccgaaaggcacctcagcctgtgagtgctgaggaaccagctcctctggctgattttccagttggactggccattgctctccagaagtgctctgttagcaaacgtgatgtggaaacgatcacagatggtgttttctcgttgttcgccagaatttatacgggggagacaaattcccggtaattaccaagtctgcactcgggtaccaaagctctgaagctctctgaacagttgccatacttgagttgatgaatgtgttattcatggtgtctcatctcatcaatgcatcttgagagacttaatgaaattttagcaacagtatagaatagctctatcgggtggggagtaatcattaaacagatgaaatcggccccagatttacatgtctctttagaatccacagtgtaagcaaactacagttacaaagggatgggggttgtaaaccctctgagactctgcacttttcgcacgtatggcatcgtcaagtgctgtcttattacagcctttgtaaggagaggcaggctcctcctggggtgggctctgcagctgctctatttccaggcatgtgatcgcccccgctctccagattccccagcactctgctgcgtgtaactccactcaattctccactcatccttccttgtgaagcaggatcgttgaagttttaagtatgggcaaaaatctggaaaacttaggatccctctgacaccccaggattaggggacacagcagtggctagggcatcagccacagaactgagcgggaaatgccacttgtattggctgtaaagaaatcctggctttgggccaggcacagtggctcaagcctgtaatcccagcactttaggaggttgaggcggatggatcacctgaggtcaggagtttgagaccagcctggccaacatggtgtaaccccgtctctactaaaaatacaaaaaaattagccaggcgtggtagcgggcacctgtaatcccagctactcaggaggctgaggcaggagaatcacttgaaccggggaggcagaggttgcagtgagctgagatcatgccactccactccagcctgggcgacagagcaagactccatctccaaaaaaaaaaaaaaaaaaggccggcacggtgactcacgcctataattccagcactttgggaggccgaggcaggtggatcacgaggtcaagagatcgagaccatcctggccaacatggtgaaaccctgtctctactaaaaatgcaaaaaattagctgggcgtggtggcgggcgcttgtagtcccagctactcaggaggctgaggcaggagaatcacttgaacccgggaggcggaggttgcagtgagccgagattgtgccaccgcactccagcctggcaacagagcgagactctgtctcaaaaaaaaaaaaggaaatcctggctttctttaagccacagacttcctaggctgtggtcccagctccttgtctgcctggtccctgtcaccttgcagtgccaccacccccaggggctctgcttgcttccagtggcttctgtagctttggcaactggcagatctttatggcagtagaggtgccagcatggaggatggagtttgggtttataacccaaccctcgaacgaaccagcctgtgggggcctggagtggagctggttttggggagtcacaggtgcggggggttcatcttctcctttctccttctcctttcctgacccctccgacagcttccatgttggccatgggtcaggtgaatggatggagctccaagcggggctcagcccattgacccgagcgaggcgcacacacctgcagcgtggatcaagcgcactctctccagcatcgccctgaccattccatgtgctttgtcctagcatgttcattcttgactttctccacttcattttattaaaaagttaaatgctttaggaatctgtggcgtgtggccactgaccgccccccacctcctgccgctcctccaagtttgagctgagatggttctgtgagtccttggcaggggtcaaagggcacatctccttgaacctagaaagccccctacactctcagaggacacctctcctgtggattcagcgctggggcagtgaaggtgtcgggagccagcagagcatggtgcgtgctgccagctgccggccagccgggatagaggagatgccactggccctccgtgcccccagcccctccctcttaaccgaggctgtccttgctctctgcagaggccgctctgcaggatcctcgtgtcgcgcgtgatgtgtggtggcacagccgtgtcaaagtcacagtgtcttttctgtcgttctagttccagggtcacccccgagaggacaacaggcatctggaagtgctctctcgccactctgggtgctttactgtctctggcttgtttccatcactggaaatcacttagagaattgtagtgtttttggtccttgataaagcctagaagacatttgtgatgttacaaaatggaagttttcttttgtttctgttttttaagatctaagaagttgtgaatgttgttaatcatttagccgttgcaataaatgtagaggaaatgcagtgtg

SEQ ID NO: 10801 - protein, 140 aa, Homo sapiens
MEGEAEFEDEPPPREAELESPEVMPEEEDEDDEDGGEEAPAPGGAGKSEGSTPADGLPGEAAEDDLAGAPALSQASSGTCFPRKRISSKSLKVGMIPAPKRVCLIQEPKEARTHQYSRAEACSQNGSLVPLQSPARFSNH

SEQ ID NO: 10802 - DNA, 3703 bp, Homo sapiens
ctgcgcggcgcggcgctgcggagaccgttggttcatttgcatgtccccgcctcgcgcggcggcggcggcgggtgaggagcctgaggcggcggcgggggtggctccgcgcgcggtggtctcgggggcaaaataacatggcagccagacgaattacacaggagacttttgatgctgtattacaagaaaaagccaaacgatatcacatggatgccagtggtgaggctgtaagcgaaactcttcagtttaaagctcaagatctcttaagggcagtcccaagatccagagcagagatgtatgatgacgtccacagcgatggcagatactccctcagtggatctgtagctcactctagagatgccggaagagaaggcctgagaagtgacgtatttccagggccttccttcagatcaagcaacccttccatcagtgatgacagctactttcgcaaagaatgtggccgggatctggaattttctcactctgattctcgggaccaggtcattggccaccggaaattggggcatttccgttctcaggactggaaatttgcgctccgtggttcttgggaacaagactttggccatccagtttctcaagagtcctcttggtcacaggagtatagttttggtccctctgcagttttgggggactttggatcttccaggctgattgagaaagagtgtttggagaaggagagtcgggattatgacgtggaccatcctggggaggctgactctgtgcttaggggcggcagtcaagtccaggccagaggtcgagctctaaacatcgttgaccaggaaggttccctcctaggaaagggggagactcagggcctgctcacagctaaggggggtgttgggaaacttgtcacattgagaaatgtgagcacaaaaaaaatacccaccgtgaatcgtattactcccaaaactcagggcactaaccaaatccagaaaaacactccaagtcctgatgtgaccctggggacaaacccagggacagaagatatccagttccccattcagaagatccctctggggctggatctgaagaatcttcggctccccagaagaaagatgagctttgacatcatagataagtctgatgttttttcaagatttgggatagaaataatcaaatgggcaggattccacaccataaaagatgatattaaattttcccaacttttccagactctctttgaacttgaaacagaaacctgtgctaaaatgcttgcctcattcaaatgttccttaaaaccagagcacagagatttttgcttttttactatcaaatttttaaagcactctgctttgaaaacacccagagttgataatgagtttttaaacatgcttttagacaaaggtgctgtgaagaccaaaaattgcttttttgaaatcataaagccttttgacaagtacataatgagacttcaagaccggcttctgaagagtgtcacacctttgcttatggcctgcaatgcctacgagctaagtgtcaagatgaagaccctcagtaaccccctggacttggctcttgccctagaaaccaccaactctctctgccggaagtctttggcccttttgggacagacattttccttggcctcttctttccggcaggagaaaatcttagaagctgtcggcctgcaagatatagctccctcacctgctgcgtttccaaacttcgaagactccactttgtttgggcgagagtacatagaccacctgaaggcctggctagtcagcagcggatgtcccctccaggttaagaaagccgaaccagagccgatgcgagaggaggagaaaatgattcctcctacgaaacctgaaattcaggccaaggctccaagtagtctgagtgatgctgtcccccagcgagcagatcacagggtagtgggcaccatcgaccagcttgtgaaacgtgtcatcgaaggcagcctgtctcccaaagagagaactcttctcaaagaggaccctgcttactggtttttgtctgatgaaaatagtctggagtataaatattacaagctgaagttggcagaaatgcagcggatgagcgagaacttgcgaggagccgaccagaagccgacctcagcagactgtgcagtgagggccatgctgtactcccgggctgtccgcaacctcaagaagaaactccttccgtggcagcggcgggggctcctccgtgctcaagggctccggggctggaaggcgaggagagcgaccaccgggacccagaccctcctatcctcaggcaccaggctgaaacaccacggccggcaggctccaggcctctcacaggcaaaaccatccctgccagacagaaatgatgctgccaaggactgcccgccagacccagttggaccttctcctcaggaccccagcttagaagcctcaggcccatcccccaagccagcaggagtggacatctctgaagcacctcagacctcttctccctgcccatctgctgacattgacatgaagacaatggagactgcagagaaactggctagatttgttgctcaggtgggaccagagatcgaacaattcagcatagaaaacagcaccgataaccctgacctgtggtttctacatgaccaaaatagttctgctttcaaattctatcgaaagaaagtgtttgaactatgtccatcaatttgtttcacgtcatctccgcacaaccttcacactggtggtggtgacaccacgggttctcaggagagccccgtggacctcatggaaggggaagcagagtttgaagacgagccccctccgcgggaggctgagctggagagcccagaggcctcctcaggtacctgcttccctcggaagaggatcagcagcaagtcattgaaggttggcatgattccagctcccaagagagtgtgtctcatccaggagccaaaagtccatgaaccagttcgaattgcctatgacaggcctcggggtcgtcccatgtccaaaaagaagaaacccaaggacttggacttcgcccagcagaagctgaccgataagaacctgggcttccagatgctgcagaagatgggctggaaggagggccatggcctgggctccctcggaaagggcatcagggagccggtcagcgtgggaaccccctcggaaggggaagggttgggtgctgacgggcaggagcacaaagaagacacattcgatgtgttccgacagaggatgatgcagatgtacagacacaagcgggccaacaaatagttaaatgctttaggaatctgtggcgtgtggccactgaccgccccccacctcctgccgctcctccaagtttgagctgagatggttctgtgagtccttggcaggggtcaaagggcacatctccttgaacctagaaagccccctacactctcagaggacacctctcctgtggattcagcgctggggcagtgaaggtgtcgggagccagcagagcatgttccagggtcacccccgagaggacaacaggcatctggaagtgctctctcgccactctgggtgctttactgtctctggcttgtttccatcactggaaatcacttagagaattgtagtgtttttggtccttgataaagcctagaagacatttgtgatgttacaaaatggaagttttcttttgtttctgttttttaagatctaagaagttgtgaatgttgttaatcatttagccgttgcaataaatgtagaggaaatgcagtgtg

SEQ ID NO: 10803 - protein, 1030 aa, Homo sapiens
MAARRITQETFDAVLQEKAKRYHMDASGEAVSETLQFKAQDLLRAVPRSRAEMYDDVHSDGRYSLSGSVAHSRDAGREGLRSDVFPGPSFRSSNPSISDDSYFRKECGRDLEFSHSDSRDQVIGHRKLGHFRSQDWKFALRGSWEQDFGHPVSQESSWSQEYSFGPSAVLGDFGSSRLIEKECLEKESRDYDVDHPGEADSVLRGGSQVQARGRALNIVDQEGSLLGKGETQGLLTAKGGVGKLVTLRNVSTKKIPTVNRITPKTQGTNQIQKNTPSPDVTLGTNPGTEDIQFPIQKIPLGLDLKNLRLPRRKMSFDIIDKSDVFSRFGIEIIKWAGFHTIKDDIKFSQLFQTLFELETETCAKMLASFKCSLKPEHRDFCFFTIKFLKHSALKTPRVDNEFLNMLLDKGAVKTKNCFFEIIKPFDKYIMRLQDRLLKSVTPLLMACNAYELSVKMKTLSNPLDLALALETTNSLCRKSLALLGQTFSLASSFRQEKILEAVGLQDIAPSPAAFPNFEDSTLFGREYIDHLKAWLVSSGCPLQVKKAEPEPMREEEKMIPPTKPEIQAKAPSSLSDAVPQRADHRVVGTIDQLVKRVIEGSLSPKERTLLKEDPAYWFLSDENSLEYKYYKLKLAEMQRMSENLRGADQKPTSADCAVRAMLYSRAVRNLKKKLLPWQRRGLLRAQGLRGWKARRATTGTQTLLSSGTRLKHHGRQAPGLSQAKPSLPDRNDAAKDCPPDPVGPSPQDPSLEASGPSPKPAGVDISEAPQTSSPCPSADIDMKTMETAEKLARFVAQVGPEIEQFSIENSTDNPDLWFLHDQNSSAFKFYRKKVFELCPSICFTSSPHNLHTGGGDTTGSQESPVDLMEGEAEFEDEPPPREAELESPEASSGTCFPRKRISSKSLKVGMIPAPKRVCLIQEPKVHEPVRIAYDRPRGRPMSKKKKPKDLDFAQQKLTDKNLGFQMLQKMGWKEGHGLGSLGKGIREPVSVGTPSEGEGLGADGQEHKEDTFDVFRQRMMQMYRHKRANK

SEQ ID NO: 10804 - DNA, 6236 bp, Homo sapiens
ctgcgcggcgcggcgctgcggagaccgttggttcatttgcatgtccccgcctcgcgcggcggcggcggcgggtgaggagcctgaggcggcggcgggggtggctccgcgcgcggtggtctcgggggcaaaataacatggcagccagacgaattacacaggagacttttgatgctgtattacaagaaaaagccaaacgatatcacatggatgccagtggtgaggctgtaagcgaaactcttcagtttaaagctcaagatctcttaagggcagtcccaagatccagagcagagatgtatgatgacgtccacagcgatggcagatactccctcagtggatctgtagctcactctagagatgccggaagagaaggcctgagaagtgacgtatttccagggccttccttcagatcaagcaacccttccatcagtgatgacagctactttcgcaaagaatgtggccgggatctggaattttctcactctgattctcgggaccaggtcattggccaccggaaattggggcatttccgttctcaggactggaaatttgcgctccgtggttcttgggaacaagactttggccatccagtttctcaagagtcctcttggtcacaggagtatagttttggtccctctgcagttttgggggactttggatcttccaggctgattgagaaagagtgtttggagaaggagagtcgggattatgacgtggaccatcctggggaggctgactctgtgcttaggggcggcagtcaagtccaggccagaggtcgagctctaaacatcgttgaccaggaaggttccctcctaggaaagggggagactcagggcctgctcacagctaaggggggtgttgggaaacttgtcacattgagaaatgtgagcacaaaaaaaatacccaccgtgaatcgtattactcccaaaactcagggcactaaccaaatccagaaaaacactccaagtcctgatgtgaccctggggacaaacccagggacagaagatatccagttccccattcagaagatccctctggggctggatctgaagaatcttcggctccccagaagaaagatgagctttgacatcatagataagtctgatgttttttcaagatttgggatagaaataatcaaatgggcaggattccacaccataaaagatgatattaaattttcccaacttttccagactctctttgaacttgaaacagaaacctgtgctaaaatgcttgcctcattcaaatgttccttaaaaccagagcacagagatttttgcttttttactatcaaatttttaaagcactctgctttgaaaacacccagagttgataatgagtttttaaacatgcttttagacaaaggtgctgtgaagaccaaaaattgcttttttgaaatcataaagccttttgacaagtacataatgagacttcaagaccggcttctgaagagtgtcacacctttgcttatggcctgcaatgcctacgagctaagtgtcaagatgaagaccctcagtaaccccctggacttggctcttgccctagaaaccaccaactctctctgccggaagtctttggcccttttgggacagacattttccttggcctcttctttccggcaggagaaaatcttagaagctgtcggcctgcaagatatagctccctcacctgctgcgtttccaaacttcgaagactccactttgtttgggcgagagtacatagaccacctgaaggcctggctagtcagcagcggatgtcccctccaggttaagaaagccgaaccagagccgatgcgagaggaggagaaaatgattcctcctacgaaacctgaaattcaggccaaggctccaagtagtctgagtgatgctgtcccccagcgagcagatcacagggtagtgggcaccatcgaccagcttgtgaaacgtgtcatcgaaggcagcctgtctcccaaagagagaactcttctcaaagaggaccctgcttactggtttttgtctgatgaaaatagtctggagtataaatattacaagctgaagttggcagaaatgcagcggatgagcgagaacttgcgaggagccgaccagaagccgacctcagcagactgtgcagtgagggccatgctgtactcccgggctgtccgcaacctcaagaagaaactccttccgtggcagcggcgggggctcctccgtgctcaagggctccggggctggaaggcgaggagagcgaccaccgggacccagaccctcctatcctcaggcaccaggctgaaacaccacggccggcaggctccaggcctctcacaggcaaaaccatccctgccagacagaaatgatgctgccaaggactgcccgccagacccagttggaccttctcctcaggaccccagcttagaagcctcaggcccatcccccaagccagcaggagtggacatctctgaagcacctcagacctcttctccctgcccatctgctgacattgacatgaagacaatggagactgcagagaaactggctagatttgttgctcaggtgggaccagagatcgaacaattcagcatagaaaacagcaccgataaccctgacctgtggtttctacatgaccaaaatagttctgctttcaaattctatcgaaagaaagtgtttgaactatgtccatcaatttgtttcacgtcatctccgcacaaccttcacactggtggtggtgacaccacgggttctcaggagagccccgtggacctcatggaaggggaagcagagtttgaagacgagccccctccgcgggaggctgagctggagagcccagaggtgatgcctgaggaggaggacgaggacgatgaggatgggggagaggaggcccccgctcctggaggggcgggcaagtctgagggcagcacccctgccgacggccttcccggcgaggctgccgaggacgacctggctggagcacctgccttgtcacaggcctcctcaggtacctgcttccctcggaagaggatcagcagcaagtcattgaaggttggcatgattccagctcccaagagagtgtgtctcatccaggagccaaaagtccatgaaccagttcgaattgcctatgacaggcctcggggtcgtcccatgtccaaaaagaagaaacccaaggacttggacttcgcccagcagaagctgaccgataagaacctgggcttccagatgctgcagaagatgggctggaaggagggccatggcctgggctccctcggaaagggcatcagggagccggtcagcgtgggaaccccctcggaaggggaagggttgggtgctgacgggcaggagcacaaagaagacacattcgatgtgttccgacagaggatgatgcagatgtacagacacaagcgggccaacaaatagatcaaaaccactgatgtgaaagataagccttgaagcagcaattgcccttaaaacatcatccctgccctggatcggcctggagccagtgcccaagtacggtttggtgtgtacatgaaaacaaacgtctctgcagtctctggggcggaggtttcgctggcttttctttctctcaaagaaaaaaacatgcaccattttcaatgtgcttttgcctctcctctctgttcacatgcttttagcagcaagtcccctccaaatctgtcttggttccccttcagaaggtggcgctgcccccgaaaggcacctcagcctgtgagtgctgaggaaccagctcctctggctgattttccagttggactggccattgctctccagaagtgctctgttagcaaacgtgatgtggaaacgatcacagatggtgttttctcgttgttcgccagaatttatacgggggagacaaattcccggtaattaccaagtctgcactcgggtaccaaagctctgaagctctctgaacagttgccatacttgagttgatgaatgtgttattcatggtgtctcatctcatcaatgcatcttgagagacttaatgaaattttagcaacagtatagaatagctctatcgggtggggagtaatcattaaacagatgaaatcggccccagatttacatgtctctttagaatccacagtgtaagcaaactacagttacaaagggatgggggttgtaaaccctctgagactctgcacttttcgcacgtatggcatcgtcaagtgctgtcttattacagcctttgtaaggagaggcaggctcctcctggggtgggctctgcagctgctctatttccaggcatgtgatcgcccccgctctccagattccccagcactctgctgcgtgtaactccactcaattctccactcatccttccttgtgaagcaggatcgttgaagttttaagtatgggcaaaaatctggaaaacttaggatccctctgacaccccaggattaggggacacagcagtggctagggcatcagccacagaactgagcgggaaatgccacttgtattggctgtaaagaaatcctggctttgggccaggcacagtggctcaagcctgtaatcccagcactttaggaggttgaggcggatggatcacctgaggtcaggagtttgagaccagcctggccaacatggtgtaaccccgtctctactaaaaatacaaaaaaattagccaggcgtggtagcgggcacctgtaatcccagctactcaggaggctgaggcaggagaatcacttgaaccggggaggcagaggttgcagtgagctgagatcatgccactccactccagcctgggcgacagagcaagactccatctccaaaaaaaaaaaaaaaaaaggccggcacggtgactcacgcctataattccagcactttgggaggccgaggcaggtggatcacgaggtcaagagatcgagaccatcctggccaacatggtgaaaccctgtctctactaaaaatgcaaaaaattagctgggcgtggtggcgggcgcttgtagtcccagctactcaggaggctgaggcaggagaatcacttgaacccgggaggcggaggttgcagtgagccgagattgtgccaccgcactccagcctggcaacagagcgagactctgtctcaaaaaaaaaaaaggaaatcctggctttctttaagccacagacttcctaggctgtggtcccagctccttgtctgcctggtccctgtcaccttgcagtgccaccacccccaggggctctgcttgcttccagtggcttctgtagctttggcaactggcagatctttatggcagtagaggtgccagcatggaggatggagtttgggtttataacccaaccctcgaacgaaccagcctgtgggggcctggagtggagctggttttggggagtcacaggtgcggggggttcatcttctcctttctccttctcctttcctgacccctccgacagcttccatgttggccatgggtcaggtgaatggatggagctccaagcggggctcagcccattgacccgagcgaggcgcacacacctgcagcgtggatcaagcgcactctctccagcatcgccctgaccattccatgtgctttgtcctagcatgttcattcttgactttctccacttcattttattaaaaagttaaatgctttaggaatctgtggcgtgtggccactgaccgccccccacctcctgccgctcctccaagtttgagctgagatggttctgtgagtccttggcaggggtcaaagggcacatctccttgaacctagaaagccccctacactctcagaggacacctctcctgtggattcagcgctggggcagtgaaggtgtcgggagccagcagagcatggtgcgtgctgccagctgccggccagccgggatagaggagatgccactggccctccgtgcccccagcccctccctcttaaccgaggctgtccttgctctctgcagaggccgctctgcaggatcctcgtgtcgcgcgtgatgtgtggtggcacagccgtgtcaaagtcacagtgtcttttctgtcgttctagttccagggtcacccccgagaggacaacaggcatctggaagtgctctctcgccactctgggtgctttactgtctctggcttgtttccatcactggaaatcacttagagaattgtagtgtttttggtccttgataaagcctagaagacatttgtgatgttacaaaatggaagttttcttttgtttctgttttttaagatctaagaagttgtgaatgttgttaatcatttagccgttgcaataaatgtagaggaaatgcagtgtg

SEQ ID NO: 10805 - protein, 1082 aa, Homo sapiens; identical to SEQ ID NO: 10787

SEQ ID NO: 10806 - DNA, 7107 bp, Homo sapiens
ctgcgcggcgcggcgctgcggagaccgttggttcatttgcatgtccccgcctcgcgcggcggcggcggcgggtgaggagcctgaggcggcggcgggggtggctccgcgcgcggtggtctcgggggcaaaataacatggcagccagacgaattacacaggagacttttgatgctgtattacaagaaaaagccaaacgatatcacatggatgccagtggtgaggctgtaagcgaaactcttcagtttaaagctcaagatctcttaagggcagtcccaagatccagagcagagatgtatgatgacgtccacagcgatggcagatactccctcagtggatctgtagctcactctagagatgccggaagagaaggcctgagaagtgacgtatttccagggccttccttcagatcaagcaacccttccatcagtgatgacagctactttcgcaaagaatgtggccgggatctggaattttctcactctgattctcgggaccaggtcattggccaccggaaattggggcatttccgttctcaggactggaaatttgcgctccgtggttcttgggaacaagactttggccatccagtttctcaagagtcctcttggtcacaggagtatagttttggtccctctgcagttttgggggactttggatcttccaggctgattgagaaagagtgtttggagaaggagagtcgggattatgacgtggaccatcctggggaggctgactctgtgcttaggggcggcagtcaagtccaggccagaggtcgagctctaaacatcgttgaccaggaaggttccctcctaggaaagggggagactcagggcctgctcacagctaaggggggtgttgggaaacttgtcacattgagaaatgtgagcacaaaaaaaatacccaccgtgaatcgtattactcccaaaactcagggcactaaccaaatccagaaaaacactccaagtcctgatgtgaccctggggacaaacccagggacagaagatatccagttccccattcagaagatccctctggggctggatctgaagaatcttcggctccccagaagaaagatgagctttgacatcatagataagtctgatgttttttcaagatttgggatagaaataatcaaatgggcaggattccacaccataaaagatgatattaaattttcccaacttttccagactctctttgaacttgaaacagaaacctgtgctaaaatgcttgcctcattcaaatgttccttaaaaccagagcacagagatttttgcttttttactatcaaatttttaaagcactctgctttgaaaacacccagagttgataatgagtttttaaacatgcttttagacaaaggtgctgtgaagaccaaaaattgcttttttgaaatcataaagccttttgacaagtacataatgagacttcaagaccggcttctgaagagtgtcacacctttgcttatggcctgcaatgcctacgagctaagtgtcaagatgaagaccctcagtaaccccctggacttggctcttgccctagaaaccaccaactctctctgccggaagtctttggcccttttgggacagacattttccttggcctcttctttccggcaggagaaaatcttagaagctgtcggcctgcaagatatagctccctcacctgctgcgtttccaaacttcgaagactccactttgtttgggcgagagtacatagaccacctgaaggcctggctagtcagcagcggatgtcccctccaggttaagaaagccgaaccagagccgatgcgagaggaggagaaaatgattcctcctacgaaacctgaaattcaggccaaggctccaagtagtctgagtgatgctgtcccccagcgagcagatcacagggtagtgggcaccatcgaccagcttgtgaaacgtgtcatcgaaggcagcctgtctcccaaagagagaactcttctcaaagaggaccctgcttactggtttttgtctgatgaaaatagtctggagtataaatattacaagctgaagttggcagaaatgcagcggatgagcgagaacttgcgaggagccgaccagaagccgacctcagcagactgtgcagtgagggccatgctgtactcccgggctgtccgcaacctcaagaagaaactccttccgtggcagcggcgggggctcctccgtgctcaagggctccggggctggaaggcgaggagagcgaccaccgggacccagaccctcctatcctcaggcaccaggctgaaacaccacggccggcaggctccaggcctctcacaggcaaaaccatccctgccagacagaaatgatgctgccaaggactgcccgccagacccagttggaccttctcctcaggaccccagcttagaagcctcaggcccatcccccaagccagcaggagtggacatctctgaagcacctcagacctcttctccctgcccatctgctgacattgacatgaagacaatggagactgcagagaaactggctagatttgttgctcaggtgggaccagagatcgaacaattcagcatagaaaacagcaccgataaccctgacctgtggggacctgccttcatctcgggcatcaggaaaaacctccccagagggacatttaatctgcatccaaaggctaaataggagttggccaggggaggggagagaggtttctacatgaccaaaatagttctgctttcaaattctatcgaaagaaagtgtttgaactatgtccatcaatttgtttcacgtcatctccgcacaaccttcacactggtggtggtgacaccacgggttctcaggagagccccgtggacctcatggaaggggaagcagagtttgaagacgagccccctccgcgggaggctgagctggagagcccagaggtgatgcctgaggaggaggacgaggacgatgaggatgggggagaggaggcccccgctcctggaggggcgggcaagtctgagggcagcacccctgccgacggccttcccggcgaggctgccgaggacgacctggctggagcacctgccttgtcacaggcctcctcaggtacctgcttccctcggaagaggatcagcagcaagtcattgaaggttggcatgattccagctcccaagagagtgtgtctcatccaggagccaaaagaggcgagaacccaccagtacagcagagctgaagcctgttcccagaacgggtctcttgtcccattgcagtcccctgcccgattcagcaaccactgactgttttccaagccccagtccatgaaccagttcgaattgcctatgacaggcctcggggtcgtcccatgtccaaaaagaagaaacccaaggacttggacttcgcccagcagaagctgaccgataagaacctgggcttccagatgctgcagaagatgggctggaaggagggccatggcctgggctccctcggaaagggcatcagggagccggtcagcgtgtacgcagcaggcagcctggggtgggagtgggtggggcctcagtccttccacctgcagcctgccgcttggctccttcacagccaagatggcttacagctggcagttgatttttgttttttaaacagaaggcatcttcagatgagaagctgatcatttacatgtgcaggtgtttacagggctcctttctgtcctggtgtagattttttaaccagcttgttggccctggtcattttggccacatttgtgaccatcataaaagctaagtggtatttctgtgtagtttccgtctggaactgctttcccattcccgggaacccatagccgggccagccagggtcccgaacacaggcccaaagtttattaaaccccgatcataacctccagcaggcatttcatttaatactgagcttagttcctgctgggtaaggcattccgaggtaaccagggccctctgggcaccccctcaaaagccagctcttcgagggtgagtactccttgtttctactgtgagtcgcgtcttgattttccctttctttgatgtctcagtgtgtgtcccaaacacctgcatctcatggactgtttgtgcccatgcccagttcctggcatgccaggccctgggctcaggtgcacaactgactctctttttcactccctaggggaaccccctcggaaggggaagggttgggtgctgacgggcaggagcacaaagaagacacattcgatgtgttccgacagaggatgatgcagatgtacagacacaagcgggccaacaaatagatcaaaaccactgatgtgaaagataagccttgaagcagcaattgcccttaaaacatcatccctgccctggatcggcctggagccagtgcccaagtacggtttggtgtgtacatgaaaacaaacgtctctgcagtctctggggcggaggtttcgctggcttttctttctctcaaagaaaaaaacatgcaccattttcaatgtgcttttgcctctcctctctgttcacatgcttttagcagcaagtcccctccaaatctgtcttggttccccttcagaaggtggcgctgcccccgaaaggcacctcagcctgtgagtgctgaggaaccagctcctctggctgattttccagttggactggccattgctctccagaagtgctctgttagcaaacgtgatgtggaaacgatcacagatggtgttttctcgttgttcgccagaatttatacgggggagacaaattcccggtaattaccaagtctgcactcgggtaccaaagctctgaagctctctgaacagttgccatacttgagttgatgaatgtgttattcatggtgtctcatctcatcaatgcatcttgagagacttaatgaaattttagcaacagtatagaatagctctatcgggtggggagtaatcattaaacagatgaaatcggccccagatttacatgtctctttagaatccacagtgtaagcaaactacagttacaaagggatgggggttgtaaaccctctgagactctgcacttttcgcacgtatggcatcgtcaagtgctgtcttattacagcctttgtaaggagaggcaggctcctcctggggtgggctctgcagctgctctatttccaggcatgtgatcgcccccgctctccagattccccagcactctgctgcgtgtaactccactcaattctccactcatccttccttgtgaagcaggatcgttgaagttttaagtatgggcaaaaatctggaaaacttaggatccctctgacaccccaggattaggggacacagcagtggctagggcatcagccacagaactgagcgggaaatgccacttgtattggctgtaaagaaatcctggctttgggccaggcacagtggctcaagcctgtaatcccagcactttaggaggttgaggcggatggatcacctgaggtcaggagtttgagaccagcctggccaacatggtgtaaccccgtctctactaaaaatacaaaaaaattagccaggcgtggtagcgggcacctgtaatcccagctactcaggaggctgaggcaggagaatcacttgaaccggggaggcagaggttgcagtgagctgagatcatgccactccactccagcctgggcgacagagcaagactccatctccaaaaaaaaaaaaaaaaaaggccggcacggtgactcacgcctataattccagcactttgggaggccgaggcaggtggatcacgaggtcaagagatcgagaccatcctggccaacatggtgaaaccctgtctctactaaaaatgcaaaaaattagctgggcgtggtggcgggcgcttgtagtcccagctactcaggaggctgaggcaggagaatcacttgaacccgggaggcggaggttgcagtgagccgagattgtgccaccgcactccagcctggcaacagagcgagactctgtctcaaaaaaaaaaaaggaaatcctggctttctttaagccacagacttcctaggctgtggtcccagctccttgtctgcctggtccctgtcaccttgcagtgccaccacccccaggggctctgcttgcttccagtggcttctgtagctttggcaactggcagatctttatggcagtagaggtgccagcatggaggatggagtttgggtttataacccaaccctcgaacgaaccagcctgtgggggcctggagtggagctggttttggggagtcacaggtgcggggggttcatcttctcctttctccttctcctttcctgacccctccgacagcttccatgttggccatgggtcaggtgaatggatggagctccaagcggggctcagcccattgacccgagcgaggcgcacacacctgcagcgtggatcaagcgcactctctccagcatcgccctgaccattccatgtgctttgtcctagcatgttcattcttgactttctccacttcattttattaaaaagttaaatgctttaggaatctgtggcgtgtggccactgaccgccccccacctcctgccgctcctccaagtttgagctgagatggttctgtgagtccttggcaggggtcaaagggcacatctccttgaacctagaaagccccctacactctcagaggacacctctcctgtggattcagcgctggggcagtgaaggtgtcgggagccagcagagcatggtgcgtgctgccagctgccggccagccgggatagaggagatgccactggccctccgtgcccccagcccctccctcttaaccgaggctgtccttgctctctgcagaggccgctctgcaggatcctcgtgtcgcgcgtgatgtgtggtggcacagccgtgtcaaagtcacagtgtcttttctgtcgttctagttccagggtcacccccgagaggacaacaggcatctggaagtgctctctcgccactctgggtgctttactgtctctggcttgtttccatcactggaaatcacttagagaattgtagtgtttttggtccttgataaagcctagaagacatttgtgatgttacaaaatggaagttttcttttgtttctgttttttaagatctaagaagttgtgaatgttgttaatcatttagccgttgcaataaatgtagaggaaatgcagtgtg

SEQ ID NO: 10807 - protein, 841 aa, Homo sapiens
MAARRITQETFDAVLQEKAKRYHMDASGEAVSETLQFKAQDLLRAVPRSRAEMYDDVHSDGRYSLSGSVAHSRDAGREGLRSDVFPGPSFRSSNPSISDDSYFRKECGRDLEFSHSDSRDQVIGHRKLGHFRSQDWKFALRGSWEQDFGHPVSQESSWSQEYSFGPSAVLGDFGSSRLIEKECLEKESRDYDVDHPGEADSVLRGGSQVQARGRALNIVDQEGSLLGKGETQGLLTAKGGVGKLVTLRNVSTKKIPTVNRITPKTQGTNQIQKNTPSPDVTLGTNPGTEDIQFPIQKIPLGLDLKNLRLPRRKMSFDIIDKSDVFSRFGIEIIKWAGFHTIKDDIKFSQLFQTLFELETETCAKMLASFKCSLKPEHRDFCFFTIKFLKHSALKTPRVDNEFLNMLLDKGAVKTKNCFFEIIKPFDKYIMRLQDRLLKSVTPLLMACNAYELSVKMKTLSNPLDLALALETTNSLCRKSLALLGQTFSLASSFRQEKILEAVGLQDIAPSPAAFPNFEDSTLFGREYIDHLKAWLVSSGCPLQVKKAEPEPMREEEKMIPPTKPEIQAKAPSSLSDAVPQRADHRVVGTIDQLVKRVIEGSLSPKERTLLKEDPAYWFLSDENSLEYKYYKLKLAEMQRMSENLRGADQKPTSADCAVRAMLYSRAVRNLKKKLLPWQRRGLLRAQGLRGWKARRATTGTQTLLSSGTRLKHHGRQAPGLSQAKPSLPDRNDAAKDCPPDPVGPSPQDPSLEASGPSPKPAGVDISEAPQTSSPCPSADIDMKTMETAEKLARFVAQVGPEIEQFSIENSTDNPDLWGPAFISGIRKNLPRGTFNLHPKAK

SEQ ID NO: 10808 - DNA, 7029 bp, Homo sapiens
aaaattctttcattttttttttccccccaaaccacgtacccgagggtcgcgccagcccgaccctgcggcacccccactccccactccgcgcgggacaggcctcggcagccgcagcgtctcacccggtcttcgcggccacgtggggaaaggtggggcgcgcggttgtcacccagggagccgcctctagccccttccggccgccgtacgcgcgcaggcgctgtggcgcccctaggcttggcctcccagagactcgcggacgctcacgataaccaaggacgaccgcgaaccaagggcaaaataacatggcagccagacgaattacacaggagacttttgatgctgtattacaagaaaaagccaaacgatatcacatggatgccagtggtgaggctgtaagcgaaactcttcagtttaaagctcaagatctcttaagggcagtcccaagatccagagcagagatgtatgatgacgtccacagcgatggcagatactccctcagtggatctgtagctcactctagagatgccggaagagaaggcctgagaagtgacgtatttccagggccttccttcagatcaagcaacccttccatcagtgatgacagctactttcgcaaagaatgtggccgggatctggaattttctcactctgattctcgggaccaggtcattggccaccggaaattggggcatttccgttctcaggactggaaatttgcgctccgtggttcttgggaacaagactttggccatccagtttctcaagagtcctcttggtcacaggagtatagttttggtccctctgcagttttgggggactttggatcttccaggctgattgagaaagagtgtttggagaaggagagtcgggattatgacgtggaccatcctggggaggctgactctgtgcttaggggcggcagtcaagtccaggccagaggtcgagctctaaacatcgttgaccaggaaggttccctcctaggaaagggggagactcagggcctgctcacagctaaggggggtgttgggaaacttgtcacattgagaaatgtgagcacaaaaaaaatacccaccgtgaatcgtattactcccaaaactcagggcactaaccaaatccagaaaaacactccaagtcctgatgtgaccctggggacaaacccagggacagaagatatccagttccccattcagaagatccctctggggctggatctgaagaatcttcggctccccagaagaaagatgagctttgacatcatagataagtctgatgttttttcaagatttgggatagaaataatcaaatgggcaggattccacaccataaaagatgatattaaattttcccaacttttccagactctctttgaacttgaaacagaaacctgtgctaaaatgcttgcctcattcaaatgttccttaaaaccagagcacagagatttttgcttttttactatcaaatttttaaagcactctgctttgaaaacacccagagttgataatgagtttttaaacatgcttttagacaaaggtgctgtgaagaccaaaaattgcttttttgaaatcataaagccttttgacaagtacataatgagacttcaagaccggcttctgaagagtgtcacacctttgcttatggcctgcaatgcctacgagctaagtgtcaagatgaagaccctcagtaaccccctggacttggctcttgccctagaaaccaccaactctctctgccggaagtctttggcccttttgggacagacattttccttggcctcttctttccggcaggagaaaatcttagaagctgtcggcctgcaagatatagctccctcacctgctgcgtttccaaacttcgaagactccactttgtttgggcgagagtacatagaccacctgaaggcctggctagtcagcagcggatgtcccctccaggttaagaaagccgaaccagagccgatgcgagaggaggagaaaatgattcctcctacgaaacctgaaattcaggccaaggctccaagtagtctgagtgatgctgtcccccagcgagcagatcacagggtagtgggcaccatcgaccagcttgtgaaacgtgtcatcgaaggcagcctgtctcccaaagagagaactcttctcaaagaggaccctgcttactggtttttgtctgatgaaaatagtctggagtataaatattacaagctgaagttggcagaaatgcagcggatgagcgagaacttgcgaggagccgaccagaagccgacctcagcagactgtgcagtgagggccatgctgtactcccgggctgtccgcaacctcaagaagaaactccttccgtggcagcggcgggggctcctccgtgctcaagggctccggggctggaaggcgaggagagcgaccaccgggacccagaccctcctatcctcaggcaccaggctgaaacaccacggccggcaggctccaggcctctcacaggcaaaaccatccctgccagacagaaatgatgctgccaaggactgcccgccagacccagttggaccttctcctcaggaccccagcttagaagcctcaggcccatcccccaagccagcaggagtggacatctctgaagcacctcagacctcttctccctgcccatctgctgacattgacatgaagacaatggagactgcagagaaactggctagatttgttgctcaggtgggaccagagatcgaacaattcagcatagaaaacagcaccgataaccctgacctgtggtttctacatgaccaaaatagttctgctttcaaattctatcgaaagaaagtgtttgaactatgtccatcaatttgtttcacgtcatctccgcacaaccttcacactggtggtggtgacaccacgggttctcaggagagccccgtggacctcatggaaggggaagcagagtttgaagacgagccccctccgcgggaggctgagctggagagcccagaggtgatgcctgaggaggaggacgaggacgatgaggatgggggagaggaggcccccgctcctggaggggcgggcaagtctgagggcagcacccctgccgacggccttcccggcgaggctgccgaggacgacctggctggagcacctgccttgtcacaggcctcctcaggtacctgcttccctcggaagaggatcagcagcaagtcattgaaggttggcatgattccagctcccaagagagtgtgtctcatccaggagccaaaagtccatgaaccagttcgaattgcctatgacaggcctcggggtcgtcccatgtccaaaaagaagaaacccaaggacttggacttcgcccagcagaagctgaccgataagaacctgggcttccagatgctgcagaagatgggctggaaggagggccatggcctgggctccctcggaaagggcatcagggagccggtcagcgtgggaaccccctcggaaggggaagggttgggtgctgacgggcaggagcacaaagaagacacattcgatgtgttccgacagaggatgatgcagatgtacagacacaagcgggccaacaaataggtatgttcacaggccagtgtgtaaggccgtctgccctcgctggcgtgctggtatgcagagaaatttcccccaacaaagttgatgttccctgctcccccaaaaatgccacacacaaaaaaaatcacaaaattctgtgagggaaacaaaagggtctatggatgtggatatgccccattcttaccttccaggtttgctgaaggagcaaacctcacactggccaagggcagatgcgcatggcctgcctggtgccccggctgtgagcccctcaaggcctccaggccagcctccgtggatgtgcgtgtggaaataggccacgcctgtctcttctcttgctcaagttttctctcacagatgacagccacctaccacataacatgaccagcaaacggactgttcctagtccagagggccttgccatcatgcaagtggaagggcgactgtgacagccactgccacagaggatggcagttggctgtgtccctttgtgagggtcttcaaatccttttccttctgcagggccttgggcctgtaaatatcctcatctttctattcttttttttttttagttgccccctcacctaatttccacctcagttttgaacaaaatcgttctcttcctgaatagatcaaaaccactgatgtgaaagataagccttgaagcagcaattgcccttaaaacatcatccctgccctggatcggcctggagccagtgcccaagtacggtttggtgtgtacatgaaaacaaacgtctctgcagtctctggggcggaggtttcgctggcttttctttctctcaaagaaaaaaacatgcaccattttcaatgtgcttttgcctctcctctctgttcacatgcttttagcagcaagtcccctccaaatctgtcttggttccccttcagaaggtggcgctgcccccgaaaggcacctcagcctgtgagtgctgaggaaccagctcctctggctgattttccagttggactggccattgctctccagaagtgctctgttagcaaacgtgatgtggaaacgatcacagatggtgttttctcgttgttcgccagaatttatacgggggagacaaattcccggtaattaccaagtctgcactcgggtaccaaagctctgaagctctctgaacagttgccatacttgagttgatgaatgtgttattcatggtgtctcatctcatcaatgcatcttgagagacttaatgaaattttagcaacagtatagaatagctctatcgggtggggagtaatcattaaacagatgaaatcggccccagatttacatgtctctttagaatccacagtgtaagcaaactacagttacaaagggatgggggttgtaaaccctctgagactctgcacttttcgcacgtatggcatcgtcaagtgctgtcttattacagcctttgtaaggagaggcaggctcctcctggggtgggctctgcagctgctctatttccaggcatgtgatcgcccccgctctccagattccccagcactctgctgcgtgtaactccactcaattctccactcatccttccttgtgaagcaggatcgttgaagttttaagtatgggcaaaaatctggaaaacttaggatccctctgacaccccaggattaggggacacagcagtggctagggcatcagccacagaactgagcgggaaatgccacttgtattggctgtaaagaaatcctggctttgggccaggcacagtggctcaagcctgtaatcccagcactttaggaggttgaggcggatggatcacctgaggtcaggagtttgagaccagcctggccaacatggtgtaaccccgtctctactaaaaatacaaaaaaattagccaggcgtggtagcgggcacctgtaatcccagctactcaggaggctgaggcaggagaatcacttgaaccggggaggcagaggttgcagtgagctgagatcatgccactccactccagcctgggcgacagagcaagactccatctccaaaaaaaaaaaaaaaaaaggccggcacggtgactcacgcctataattccagcactttgggaggccgaggcaggtggatcacgaggtcaagagatcgagaccatcctggccaacatggtgaaaccctgtctctactaaaaatgcaaaaaattagctgggcgtggtggcgggcgcttgtagtcccagctactcaggaggctgaggcaggagaatcacttgaacccgggaggcggaggttgcagtgagccgagattgtgccaccgcactccagcctggcaacagagcgagactctgtctcaaaaaaaaaaaaggaaatcctggctttctttaagccacagacttcctaggctgtggtcccagctccttgtctgcctggtccctgtcaccttgcagtgccaccacccccaggggctctgcttgcttccagtggcttctgtagctttggcaactggcagatctttatggcagtagaggtgccagcatggaggatggagtttgggtttataacccaaccctcgaacgaaccagcctgtgggggcctggagtggagctggttttggggagtcacaggtgcggggggttcatcttctcctttctccttctcctttcctgacccctccgacagcttccatgttggccatgggtcaggtgaatggatggagctccaagcggggctcagcccattgacccgagcgaggcgcacacacctgcagcgtggatcaagcgcactctctccagcatcgccctgaccattccatgtgctttgtcctagcatgttcattcttgactttctccacttcattttattaaaaagttaaatgctttaggaatctgtggcgtgtggccactgaccgccccccacctcctgccgctcctccaagtttgagctgagatggttctgtgagtccttggcaggggtcaaagggcacatctccttgaacctagaaagccccctacactctcagaggacacctctcctgtggattcagcgctggggcagtgaaggtgtcgggagccagcagagcatggtgcgtgctgccagctgccggccagccgggatagaggagatgccactggccctccgtgcccccagcccctccctcttaaccgaggctgtccttgctctctgcagaggccgctctgcaggatcctcgtgtcgcgcgtgatgtgtggtggcacagccgtgtcaaagtcacagtgtcttttctgtcgttctagttccagggtcacccccgagaggacaacaggcatctggaagtgctctctcgccactctgggtgctttactgtctctggcttgtttccatcactggaaatcacttagagaattgtagtgtttttggtccttgataaagcctagaagacatttgtgatgttacaaaatggaagttttcttttgtttctgttttttaagatctaagaagttgtgaatgttgttaatcatttagccgttgcaataaatgtagaggaaatgcagtgtg

SEQ ID NO: 10809 - protein, 1082 aa, Homo sapiens; identical to SEQ ID NO: 10787

SEQ ID NO: 10810 - DNA, 4417 bp, Homo sapiens
aaaattctttcattttttttttccccccaaaccacgtacccgagggtcgcgccagcccgaccctgcggcacccccactccccactccgcgcgggacaggcctcggcagccgcagcgtctcacccggtcttcgcggccacgtggggaaaggtggggcgcgcggttgtcacccagggagccgcctctagccccttccggccgccgtacgcgcgcaggcgctgtggcgcccctaggcttggcctcccagagactcgcggacgctcacgataaccaaggacgaccgcgaaccaagggcaaaataacatggcagccagacgaattacacaggagacttttgatgctgtattacaagaaaaagccaaacgatatcacatggatgccagtggtgaggctgtaagcgaaactcttcagtttaaagctcaagatctcttaagggcagtcccaagatccagagcagagatgtatgatgacgtccacagcgatggcagatactccctcagtggatctgtagctcactctagagatgccggaagagaaggcctgagaagtgacgtatttccagggccttccttcagatcaagcaacccttccatcagtgatgacagctactttcgcaaagaatgtggccgggatctggaattttctcactctgattctcgggaccaggtcattggccaccggaaattggggcatttccgttctcaggactggaaatttgcgctccgtggttcttgggaacaagactttggccatccagtttctcaagagtcctcttggtcacaggagtatagttttggtccctctgcagttttgggggactttggatcttccaggctgattgagaaagagtgtttggagaaggagagtcgggattatgacgtggaccatcctggggaggctgactctgtgcttaggggcggcagtcaagtccaggccagaggtcgagctctaaacatcgttgaccaggaaggttccctcctaggaaagggggagactcagggcctgctcacagctaaggggggtgttgggaaacttgtcacattgagaaatgtgagcacaaaaaaaatacccaccgtgaatcgtattactcccaaaactcagggcactaaccaaatccagaaaaacactccaagtcctgatgtgaccctggggacaaacccagggacagaagatatccagttccccattcagaagatccctctggggctggatctgaagaatcttcggctccccagaagaaagatgagctttgacatcatagataagtctgatgttttttcaagatttgggatagaaataatcaaatgggcaggattccacaccataaaagatgatattaaattttcccaacttttccagactctctttgaacttgaaacagaaacctgtgctaaaatgcttgcctcattcaaatgttccttaaaaccagagcacagagatttttgcttttttactatcaaatttttaaagcactctgctttgaaaacacccagagttgataatgagtttttaaacatgcttttagacaaaggtgctgtgaagaccaaaaattgcttttttgaaatcataaagccttttgacaagtacataatgagacttcaagaccggcttctgaagagtgtcacacctttgcttatggcctgcaatgcctacgagctaagtgtcaagatgaagaccctcagtaaccccctggacttggctcttgccctagaaaccaccaactctctctgccggaagtctttggcccttttgggacagacattttccttggcctcttctttccggcaggagaaaatcttagaagctgtcggcctgcaagatatagctccctcacctgctgcgtttccaaacttcgaagactccactttgtttgggcgagagtacatagaccacctgaaggcctggctagtcagcagcggatgtcccctccaggttaagaaagccgaaccagagccgatgcgagaggaggagaaaatgattcctcctacgaaacctgaaattcaggccaaggctccaagtagtctgagtgatgctgtcccccagcgagcagatcacagggtagtgggcaccatcgaccagcttgtgaaacgtgtcatcgaaggcagcctgtctcccaaagagagaactcttctcaaagaggaccctgcttactggtttttgtctgatgaaaatagtctggagtataaatattacaagctgaagttggcagaaatgcagcggatgagcgagaacttgcgaggagccgaccagaagccgacctcagcagactgtgcagtgagggccatgctgtactcccgggctgtccgcaacctcaagaagaaactccttccgtggcagcggcgggggctcctccgtgctcaagggctccggggctggaaggcgaggagagcgaccaccgggacccagaccctcctatcctcaggcaccaggctgaaacaccacggccggcaggctccaggcctctcacaggcaaaaccatccctgccagacagaaatgatgctgccaaggactgcccgccagacccagttggaccttctcctcaggaccccagcttagaagcctcaggcccatcccccaagccagcaggagtggacatctctgaagcacctcagacctcttctccctgcccatctgctgacattgacatgaagacaatggagactgcagagaaactggctagatttgttgctcaggtgggaccagagatcgaacaattcagcatagaaaacagcaccgataaccctgacctgtggtttctacatgaccaaaatagttctgctttcaaattctatcgaaagaaagtgtttgaactatgtccatcaatttgtttcacgtcatctccgcacaaccttcacactggtggtggtgacaccacgggttctcaggagagccccgtggacctcatggaaggggaagcagagtttgaagacgagccccctccgcgggaggctgagctggagagcccagaggcctcctcaggtacctgcttccctcggaagaggatcagcagcaagtcattgaaggttggcatgattccagctcccaagagagtgtgtctcatccaggagccaaaagtccatgaaccagttcgaattgcctatgacaggcctcggggtcgtcccatgtccaaaaagaagaaacccaaggacttggacttcgcccagcagaagctgaccgataagaacctgggcttccagatgctgcagaagatgggctggaaggagggccatggcctgggctccctcggaaagggcatcagggagccggtcagcgtgtacgcagcaggcagcctggggtgggagtgggtggggcctcagtccttccacctgcagcctgccgcttggctccttcacagccaagatggcttacagctggcagttgatttttgttttttaaacagaaggcatcttcagatgagaagctgatcatttacatgtgcaggtgtttacagggctcctttctgtcctggtgtagattttttaaccagcttgttggccctggtcattttggccacatttgtgaccatcataaaagctaagtggtatttctgtgtagtttccgtctggaactgctttcccattcccgggaacccatagccgggccagccagggtcccgaacacaggcccaaagtttattaaaccccgatcataacctccagcaggcatttcatttaatactgagcttagttcctgctgggtaaggcattccgaggtaaccagggccctctgggcaccccctcaaaagccagctcttcgagggtgagtactccttgtttctactgtgagtcgcgtcttgattttccctttctttgatgtctcagtgtgtgtcccaaacacctgcatctcatggactgtttgtgcccatgcccagttcctggcatgccaggccctgggctcaggtgcacaactgactctctttttcactccctaggggaaccccctcggaaggggaagggttgggtgctgacgggcaggagcacaaagaagacacattcgatgtgttccgacagaggatgatgcagatgtacagacacaagcgggccaacaaatagatcaaaaccactgatgtgaaagataagccttgaagcagcaattgcccttaaaacatcatccctgccctggatcggcctggagccagtgcccaagtacggtttgttccagggtcacccccgagaggacaacaggcatctggaagtgctctctcgccactctgggtgctttactgtctctggcttgtttccatcactggaaatcacttagagaattgtagtgtttttggtccttgataaagcctagaagacatttgtgatgttacaaaatggaagttttcttttgtttctgttttttaagatctaagaagttgtgaatgttgttaatcatttagccgttgcaataaatgtagaggaaatgcagtgtg

SEQ ID NO: 10811 - protein, 1040 aa, Homo sapiens
MAARRITQETFDAVLQEKAKRYHMDASGEAVSETLQFKAQDLLRAVPRSRAEMYDDVHSDGRYSLSGSVAHSRDAGREGLRSDVFPGPSFRSSNPSISDDSYFRKECGRDLEFSHSDSRDQVIGHRKLGHFRSQDWKFALRGSWEQDFGHPVSQESSWSQEYSFGPSAVLGDFGSSRLIEKECLEKESRDYDVDHPGEADSVLRGGSQVQARGRALNIVDQEGSLLGKGETQGLLTAKGGVGKLVTLRNVSTKKIPTVNRITPKTQGTNQIQKNTPSPDVTLGTNPGTEDIQFPIQKIPLGLDLKNLRLPRRKMSFDIIDKSDVFSRFGIEIIKWAGFHTIKDDIKFSQLFQTLFELETETCAKMLASFKCSLKPEHRDFCFFTIKFLKHSALKTPRVDNEFLNMLLDKGAVKTKNCFFEIIKPFDKYIMRLQDRLLKSVTPLLMACNAYELSVKMKTLSNPLDLALALETTNSLCRKSLALLGQTFSLASSFRQEKILEAVGLQDIAPSPAAFPNFEDSTLFGREYIDHLKAWLVSSGCPLQVKKAEPEPMREEEKMIPPTKPEIQAKAPSSLSDAVPQRADHRVVGTIDQLVKRVIEGSLSPKERTLLKEDPAYWFLSDENSLEYKYYKLKLAEMQRMSENLRGADQKPTSADCAVRAMLYSRAVRNLKKKLLPWQRRGLLRAQGLRGWKARRATTGTQTLLSSGTRLKHHGRQAPGLSQAKPSLPDRNDAAKDCPPDPVGPSPQDPSLEASGPSPKPAGVDISEAPQTSSPCPSADIDMKTMETAEKLARFVAQVGPEIEQFSIENSTDNPDLWFLHDQNSSAFKFYRKKVFELCPSICFTSSPHNLHTGGGDTTGSQESPVDLMEGEAEFEDEPPPREAELESPEASSGTCFPRKRISSKSLKVGMIPAPKRVCLIQEPKVHEPVRIAYDRPRGRPMSKKKKPKDLDFAQQKLTDKNLGFQMLQKMGWKEGHGLGSLGKGIREPVSVYAAGSLGWEWVGPQSFHLQPAAWLLHSQDGLQLAVDFCFLNRRHLQMRS

SEQ ID NO: 10812 - DNA, 2064 bp, Homo sapiens
gggggcccgccccgggctccgtgatggcgtcgcaggctcggccctctggctgcggcggcggccgcgtccccgccgggttggcctgggtggccggctgcggcctcccgggcccggcgcccccatttcctcgcccgcagaggccgggagacggcgggccgcgtccacaaaggctcattggttcagtcgttcattcattcctcccgaactcggagcggcccccgctcgggaggagataacggcgcccagcgctgcatcgggcccttgccctctttagaaccggttcagcccccacaccagcccctttactggctgcccattccatagggcaaaataacatggcagccagacgaattacacaggagacttttgatgctgtattacaagaaaaagccaaacgatatcacatggatgccagtggtgaggctgtaagcgaaactcttcagtttaaagctcaagatctcttaagggcagtcccaagatccagagcagagatgtatgatgacgtccacagcgatggcagatactccctcagtggatctgtagctcactctagagatgccggaagagaaggcctgagaagtgacgtatttccagggccttccttcagatcaagcaacccttccatcagtgatgacagctactttcgcaaagaatgtggccgggatctggaattttctcactctgattctcgggaccaggtcattggccaccggaaattggggcatttccgttctcaggactggaaatttgcgctccgtggttcttgggaacaagactttggccatccagtttctcaagagtcctcttggtcacaggagtatagttttggtccctctgcagttttgggggactttggatcttccaggctgattgagaaagagtgtttggagaaggagagtcgggattatgacgtggaccatcctggggaggctgactctgtgcttaggggcggcagtcaagtccaggccagaggtcgagctctaaacatcgttgaccaggaaggttccctcctaggaaagggggagactcagggcctgctcacagctaaggggggtgttgggaaacttgtcacattgagaaatgtgagcacaaaaaaaatacccaccgtgaatcgtattactcccaaaactcagggcactaaccaaatccagaaaaacactccaagtcctgatgtgaccctggggacaaacccagggacagaagatatccagttccccattcagaagatccctctggggctggatctgaagaatcttcggctccccagaagaaagatgagctttgacatcatagataagtctgatgttttttcaagatttgggatagaaataatcaaatgggcaggattccacaccataaaagatgatattaaattttcccaacttttccagactctctttgaacttgaaacagaaacctgtgctaaaatgcttgcctcattcaaatgttccttaaaaccagagcacagagatttttgcttttttactatcaaatttttaaagcactctgctttgaaaacacccagagttgataatgagtttttaaacatgcttttagacaaaggtgctgtgaagaccaaaaattgcttttttgaaatcataaagccttttgacaagtacataatgagacttcaagaccggcttctgaagagtgtcacacctttgcttatggcctgcaatgcctacgagctaagtgtcaagatgaagaccctcagtaaccccctggacttggctcttgccctagaaaccaccaactctctctgccggaagtctttggcccttttgggacagacattttccttggcctcttctttccggcaggagaaaatcttagaagctgtcggcctgcaagatatagctccctcacctgctgcgtttccaaacttcgaagactccactttgtttgggcgagagtacatagaccacctgaaggcctggctagtcagcagcggatgtcccctccaggttaagaaagccgaaccagagccgatgcgagaggaggagaaaatgattcctcctacgaaacctgaaattcaggccaaggctccaagtagtctgagtgatg

SEQ ID NO: 10813 - protein, 575 aa, Homo sapiens
MAARRITQETFDAVLQEKAKRYHMDASGEAVSETLQFKAQDLLRAVPRSRAEMYDDVHSDGRYSLSGSVAHSRDAGREGLRSDVFPGPSFRSSNPSISDDSYFRKECGRDLEFSHSDSRDQVIGHRKLGHFRSQDWKFALRGSWEQDFGHPVSQESSWSQEYSFGPSAVLGDFGSSRLIEKECLEKESRDYDVDHPGEADSVLRGGSQVQARGRALNIVDQEGSLLGKGETQGLLTAKGGVGKLVTLRNVSTKKIPTVNRITPKTQGTNQIQKNTPSPDVTLGTNPGTEDIQFPIQKIPLGLDLKNLRLPRRKMSFDIIDKSDVFSRFGIEIIKWAGFHTIKDDIKFSQLFQTLFELETETCAKMLASFKCSLKPEHRDFCFFTIKFLKHSALKTPRVDNEFLNMLLDKGAVKTKNCFFEIIKPFDKYIMRLQDRLLKSVTPLLMACNAYELSVKMKTLSNPLDLALALETTNSLCRKSLALLGQTFSLASSFRQEKILEAVGLQDIAPSPAAFPNFEDSTLFGREYIDHLKAWLVSSGCPLQVKKAEPEPMREEEKMIPPTKPEIQAKAPSSLS

SEQ ID NO: 10814 - DNA, 1649 bp, Homo sapiens
gttcatttgcatgtccccgcctcgcgcggcggcggcggcggatctcttaagggcagtcccaagatccagagcagagatgtatgatgacgtccacagcgatggcagatactccctcagtggatctgtagctcactctagagatgccggaagagaaggcctgagaagtgacgtatttccagggccttccttcagatcaagcaacccttccatcagtgatgacagctactttcgcaaagaatgtggccgggatctggaattttctcactctgattctcgggaccaggtcattggccaccggaaattggggcatttccgttctcaggactggaaatttgcgctccgtggttcttgggaacaagactttggccatccagtttctcaagagtcctcttggtcacaggagtatagttttggtccctctgcagttttgggggactttggatcttccaggctgattgagaaagagtgtttggagaaggagagtcgggattatgacgtggaccatcctggggaggctgactctgtgcttaggggcggcagtcaagtccaggccagaggtcgagctctaaacatcgttgaccaggaaggttccctcctaggaaagggggagactcagggcctgctcacagctaaggggggtgttgggaaacttgtcacattgagaaatgtgagcacaaaaaaaatacccaccgtgaatcgtattactcccaaaactcagggcactaaccaaatccagaaaaacactccaagtcctgatgtgaccctggggacaaacccagggacagaagatatccagttccccattcagaagatccctctggggctggatctgaagaatcttcggctccccagaagaaagatgagctttgacatcatagataagtctgatgttttttcaagatttgggatagaaataatcaaatgggcaggattccacaccataaaagatgatattaaattttcccaacttttccagactctctttgaacttgaaacagaaacctgtgctaaaatgcttgcctcattcaaatgttccttaaaaccagagcacagagatttttgcttttttactatcaaatttttaaagcactctgctttgaaaacacccagagttgataatgagtttttaaacatgcttttagacaaaggtgctgtgaagaccaaaaattgcttttttgaaatcataaagccttttgacaagtacataatgagacttcaagaccggcttctgaagagtgtcacacctttgcttatggcctgcaatgcctacgagctaagtgtcaagatgaagaccctcagtaaccccctggacttggctcttgccctagaaaccaccaactctctctgccggaagtctttggcccttttgggacagacattttccttggcctcttctttccggcaggagaaaatcttagaagctgtcggcctgcaagatatagctccctcacctgctgcgtttccaaacttcgaagactccactttgtttgggcgagagtacatagaccacctgaaggcctggctagtcagcagcggatgtcccctccaggttaagaaagccgaaccagagccgatgcgagaggaggagaaaatgattcctcctacgaaacctgaaattcaggccaaggctccaagtagtctgagtgatg

SEQ ID NO: 10815 - protein, 545 aa, Homo sapiens
MSPPRAAAAADLLRAVPRSRAEMYDDVHSDGRYSLSGSVAHSRDAGREGLRSDVFPGPSFRSSNPSISDDSYFRKECGRDLEFSHSDSRDQVIGHRKLGHFRSQDWKFALRGSWEQDFGHPVSQESSWSQEYSFGPSAVLGDFGSSRLIEKECLEKESRDYDVDHPGEADSVLRGGSQVQARGRALNIVDQEGSLLGKGETQGLLTAKGGVGKLVTLRNVSTKKIPTVNRITPKTQGTNQIQKNTPSPDVTLGTNPGTEDIQFPIQKIPLGLDLKNLRLPRRKMSFDIIDKSDVFSRFGIEIIKWAGFHTIKDDIKFSQLFQTLFELETETCAKMLASFKCSLKPEHRDFCFFTIKFLKHSALKTPRVDNEFLNMLLDKGAVKTKNCFFEIIKPFDKYIMRLQDRLLKSVTPLLMACNAYELSVKMKTLSNPLDLALALETTNSLCRKSLALLGQTFSLASSFRQEKILEAVGLQDIAPSPAAFPNFEDSTLFGREYIDHLKAWLVSSGCPLQVKKAEPEPMREEEKMIPPTKPEIQAKAPSSLS

SEQ ID NO: 10816 - DNA, 1708 bp, Homo sapiens
accgttggttcatttgcatgtccccgcctcgcgcggcggcggcggcgggtgaggagcctgaggcggcggcgggggtggctccgcgcgcggtggtctcgggatctcttaagggcagtcccaagatccagagcagagatgtatgatgacgtccacagcgatggcagatactccctcagtggatctgtagctcactctagagatgccggaagagaaggcctgagaagtgacgtatttccagggccttccttcagatcaagcaacccttccatcagtgatgacagctactttcgcaaagaatgtggccgggatctggaattttctcactctgattctcgggaccaggtcattggccaccggaaattggggcatttccgttctcaggactggaaatttgcgctccgtggttcttgggaacaagactttggccatccagtttctcaagagtcctcttggtcacaggagtatagttttggtccctctgcagttttgggggactttggatcttccaggctgattgagaaagagtgtttggagaaggagagtcgggattatgacgtggaccatcctggggaggctgactctgtgcttaggggcggcagtcaagtccaggccagaggtcgagctctaaacatcgttgaccaggaaggttccctcctaggaaagggggagactcagggcctgctcacagctaaggggggtgttgggaaacttgtcacattgagaaatgtgagcacaaaaaaaatacccaccgtgaatcgtattactcccaaaactcagggcactaaccaaatccagaaaaacactccaagtcctgatgtgaccctggggacaaacccagggacagaagatatccagttccccattcagaagatccctctggggctggatctgaagaatcttcggctccccagaagaaagatgagctttgacatcatagataagtctgatgttttttcaagatttgggatagaaataatcaaatgggcaggattccacaccataaaagatgatattaaattttcccaacttttccagactctctttgaacttgaaacagaaacctgtgctaaaatgcttgcctcattcaaatgttccttaaaaccagagcacagagatttttgcttttttactatcaaatttttaaagcactctgctttgaaaacacccagagttgataatgagtttttaaacatgcttttagacaaaggtgctgtgaagaccaaaaattgcttttttgaaatcataaagccttttgacaagtacataatgagacttcaagaccggcttctgaagagtgtcacacctttgcttatggcctgcaatgcctacgagctaagtgtcaagatgaagaccctcagtaaccccctggacttggctcttgccctagaaaccaccaactctctctgccggaagtctttggcccttttgggacagacattttccttggcctcttctttccggcaggagaaaatcttagaagctgtcggcctgcaagatatagctccctcacctgctgcgtttccaaacttcgaagactccactttgtttgggcgagagtacatagaccacctgaaggcctggctagtcagcagcggatgtcccctccaggttaagaaagccgaaccagagccgatgcgagaggaggagaaaatgattcctcctacgaaacctgaaattcaggccaaggctccaagtagtctgagtgatg

SEQ ID NO: 10817 - protein, 41 aa, Homo sapiens
MSPPRAAAAAGEEPEAAAGVAPRAVVSGSLKGSPKIQSRDV

SEQ ID NO: 10818 - DNA, 1791 bp, Homo sapiens
gagaccgttggttcatttgcatgtccccgcctcgcgcggcggcggcggcggggcaaaataacatggcagccagacgaattacacaggagacttttgatgctgtattacaagaaaaagccaaacgatatcacatggatgccagtggtgaggctgtaagcgaaactcttcagtttaaagctcaagatctcttaagggcagtcccaagatccagagcagagatgtatgatgacgtccacagcgatggcagatactccctcagtggatctgtagctcactctagagatgccggaagagaaggcctgagaagtgacgtatttccagggccttccttcagatcaagcaacccttccatcagtgatgacagctactttcgcaaagaatgtggccgggatctggaattttctcactctgattctcgggaccaggtcattggccaccggaaattggggcatttccgttctcaggactggaaatttgcgctccgtggttcttgggaacaagactttggccatccagtttctcaagagtcctcttggtcacaggagtatagttttggtccctctgcagttttgggggactttggatcttccaggctgattgagaaagagtgtttggagaaggagagtcgggattatgacgtggaccatcctggggaggctgactctgtgcttaggggcggcagtcaagtccaggccagaggtcgagctctaaacatcgttgaccaggaaggttccctcctaggaaagggggagactcagggcctgctcacagctaaggggggtgttgggaaacttgtcacattgagaaatgtgagcacaaaaaaaatacccaccgtgaatcgtattactcccaaaactcagggcactaaccaaatccagaaaaacactccaagtcctgatgtgaccctggggacaaacccagggacagaagatatccagttccccattcagaagatccctctggggctggatctgaagaatcttcggctccccagaagaaagatgagctttgacatcatagataagtctgatgttttttcaagatttgggatagaaataatcaaatgggcaggattccacaccataaaagatgatattaaattttcccaacttttccagactctctttgaacttgaaacagaaacctgtgctaaaatgcttgcctcattcaaatgttccttaaaaccagagcacagagatttttgcttttttactatcaaatttttaaagcactctgctttgaaaacacccagagttgataatgagtttttaaacatgcttttagacaaaggtgctgtgaagaccaaaaattgcttttttgaaatcataaagccttttgacaagtacataatgagacttcaagaccggcttctgaagagtgtcacacctttgcttatggcctgcaatgcctacgagctaagtgtcaagatgaagaccctcagtaaccccctggacttggctcttgccctagaaaccaccaactctctctgccggaagtctttggcccttttgggacagacattttccttggcctcttctttccggcaggagaaaatcttagaagctgtcggcctgcaagatatagctccctcacctgctgcgtttccaaacttcgaagactccactttgtttgggcgagagtacatagaccacctgaaggcctggctagtcagcagcggatgtcccctccaggttaagaaagccgaaccagagccgatgcgagaggaggagaaaatgattcctcctacgaaacctgaaattcaggccaaggctccaagtagtctgagtgatg

SEQ ID NO: 10819 - protein, 589 aa, Homo sapiens
MSPPRAAAAAGQNNMAARRITQETFDAVLQEKAKRYHMDASGEAVSETLQFKAQDLLRAVPRSRAEMYDDVHSDGRYSLSGSVAHSRDAGREGLRSDVFPGPSFRSSNPSISDDSYFRKECGRDLEFSHSDSRDQVIGHRKLGHFRSQDWKFALRGSWEQDFGHPVSQESSWSQEYSFGPSAVLGDFGSSRLIEKECLEKESRDYDVDHPGEADSVLRGGSQVQARGRALNIVDQEGSLLGKGETQGLLTAKGGVGKLVTLRNVSTKKIPTVNRITPKTQGTNQIQKNTPSPDVTLGTNPGTEDIQFPIQKIPLGLDLKNLRLPRRKMSFDIIDKSDVFSRFGIEIIKWAGFHTIKDDIKFSQLFQTLFELETETCAKMLASFKCSLKPEHRDFCFFTIKFLKHSALKTPRVDNEFLNMLLDKGAVKTKNCFFEIIKPFDKYIMRLQDRLLKSVTPLLMACNAYELSVKMKTLSNPLDLALALETTNSLCRKSLALLGQTFSLASSFRQEKILEAVGLQDIAPSPAAFPNFEDSTLFGREYIDHLKAWLVSSGCPLQVKKAEPEPMREEEKMIPPTKPEIQAKAPSSLS

SEQ ID NO: 10820 - DNA, 2487 bp, Homo sapiens
tcctggtgcgcaggcgcgggccgccgcggcccggctctcttgcgcaagcgcgctgtccgcttcttctgggcggacgctctggaggcaaaacatttccctgctgggggcggcgaccaccgtgagcgtcccggaaggggcggcaaagacgcctccgtcgcgcacgaggtggcctcgttggctttaccttggttcgcggtcgtccttggttatcgtgagcgtccgcgagtctctgggaggccaagcctaggggcgccacagcgcctgcgcgcgtacggcggccggaaggggctagaggcggctccctgggtgacaaccgcgcgccccacctttccccacgtggccgcgaagaccggcacctgtgcactgagtgcctgctgcgtgtcgggccccgtcctaggcagtggggacaaggaggctacagggtacaaataaatgagtgaacgatgttgctctagatacagctcaggagcatctatcggctgcacgccaacatcaacacaggcgaagatggtctccaagcgcattgcccaggagacctttgatgcagctgtgcgcgagaacatcgaggagtttgcgatggggccagaggaggcagtgaaagaggccgtggagcagtttgaatcgcaaggggttgatctgagcaacattgtaaagacggcacctaaagtctctgcagacggatcccaggagcccacacatgacatcctgcagatgctcagtgacctccaggagtctgtggccagctctcgcccccaggaggtgtcagcatacctcacccgcttctgcgaccagtgcaaacaggacaaggcctgccgcttcctcgcggcccagaagggggcctaccccatcatcttcactgcctggaagctggccactgcaggtgaccagggccttctgctccagtccctcaatgccctgtcggtgctgactgatggacagccagacctcctggatgcccagggcctgcagctcctagtggccacgctgacccagaatgctgatgaggctgacctgacctgctctgggatccgctgtgtgcgtcacgcttgcctgaaacatgaacagaatcggcaagacctggtgaaagctggcgtgctgcctctgctgactggtgccatcacccatcatggccaccacactgacgtggtcagggaagcctgctgggccctgcgtgtcatgaccttcgatgacgacatccgtgtgccctttggccatgcccacaaccatgccaagatgattgtgcaggagaacaaaggcttgaaggtgctcatcgaagccaccaaagcgttcctggataaccctggcatcctgagcgagctctgtggaaccctgtcccgcctggccattcgcaacgagttctgccaggaggtcgtcgacctcgggggcctgagcattctggtgtccctgctagccgactgcaatgaccaccagatgagggaccagagcggcgttcaggagctcgtgaagcaagtgctgagcaccctgcgagccatcgcaggcaacgacgacgtgaaagatgctattgtccgtgctggtgggacggagtccatcgtggctgctatgacccagcatctgaccagcccccaggtgtgtgagcagagctgcgcggccctgtgcttcctggccctgcgtaagcccgacaacagccgcatcatcgtggagggtggcggggctgtggcagcactgcaggccatgaaggcacacccgcagaaggccggcgtgcagaaacaggcttgcatgctgatccgaaacctggtggcccacggccaggccttctcgaagcccatcctggacctgggggctgaggcactcatcatgcaggcccgatctgcccaccgtgactgtgaggacgtggccaaggccgccctgcgggacctgggttgtcatgtcgagctccgagagctgtggacaggccagaggggcaacctggcgccatgaccccaggcccagtctgggccgtgactctgggtgagtcgtgtgactcaggaatgggggtagatccatgtcctccactgtcccccattagttctgtccccttcacaatgagaagtgttttctggcaggccctaggtaaagggtcgggggaggggggagccttgtagggaggcctctacacagaagaaagcagcccccatgtcccagccacttctgggtcccagccagcagcacggatgttactgtcctgctccttcccccagccccacgccctaccagagggggcaaagggcacgtcccatcactcactgccctgtctgaaatgtggcagccactgtgggccaggctcagggcagggcaggcgattccagtggggttgggccccctggcgcctgctgcttactgcagtttcatgcaggcctctgctccttgtctttcttacctgtaaaatgggtctcagatgctccgccctgcttggccccagcttgtctgtctctgggtcctgggccagccaggatacctgataataaaagatcattgggtgaacagcgg

SEQ ID NO: 10821 - protein, 501 aa, Homo sapiens
MSERCCSRYSSGASIGCTPTSTQAKMVSKRIAQETFDAAVRENIEEFAMGPEEAVKEAVEQFESQGVDLSNIVKTAPKVSADGSQEPTHDILQMLSDLQESVASSRPQEVSAYLTRFCDQCKQDKACRFLAAQKGAYPIIFTAWKLATAGDQGLLLQSLNALSVLTDGQPDLLDAQGLQLLVATLTQNADEADLTCSGIRCVRHACLKHEQNRQDLVKAGVLPLLTGAITHHGHHTDVVREACWALRVMTFDDDIRVPFGHAHNHAKMIVQENKGLKVLIEATKAFLDNPGILSELCGTLSRLAIRNEFCQEVVDLGGLSILVSLLADCNDHQMRDQSGVQELVKQVLSTLRAIAGNDDVKDAIVRAGGTESIVAAMTQHLTSPQVCEQSCAALCFLALRKPDNSRIIVEGGGAVAALQAMKAHPQKAGVQKQACMLIRNLVAHGQAFSKPILDLGAEALIMQARSAHRDCEDVAKAALRDLGCHVELRELWTGQRGNLAP

SEQ ID NO: 10822 - DNA, 1080 bp, Homo sapiens
cgggccgccgcggcccggctctcttgcgcaagcgcgctgtccgcttcttctgggcggacgctctggaggcaaaacatttccctgctgggggcggcgaccaccgtgagcgtcccggaaggggcggcaaagacgcctccgtcgcgcacgaggtggcctcgttggctttaccttggttcgcggtcgtccttggttatcgtgagcgtccgcgagtctctgggaggccaagcctaggggcgccacagcgcctgcgcgcgtacggcggccggaaggggctagaggcggctccctgggtgacaaccgcgcgccccacctttccccacgtggccgcgaagaccggctcaggagcatctatcggctgcacgccaacatcaacacaggcgaagatggtctccaagcgcattgcccaggagacctttgatgcagctgtgcgcgagaacatcgaggagtttgcgatggggccagaggaggcagtgaaagaggccgtggagcagtttgaatcgcaaggggttgatctgagcaacattgtaaagacggcacctaaagtctctgcagacggatcccaggagcccacacatgacatcctgcagatgctcagtgacctccaggagtctgtggccagctctcgcccccaggaggtgtcagcatacctcacccgcttctgcgaccagtgcaaacaggacaaggcctgccgcttcctcgcggcccagaagggggcctaccccatcatcttcactgcctggaagctggccactgcaggtgaccagggccttctgctccagtccctcaatgccctgtcggtgctgactgatggacagccagacctcctggatgcccagggcctgcagctcctagtggccacgctgacccagaatgctgatgaggctgacctgacctgctctgggatccgctgtgtgcgtcacgcttgcctgaaacatgaacagaatcggcaagacctggtgaaagctggcgtgctgcctctgctgactggtgccatcacccatcatggccaccacactgacgtggtcagggaagcctgctgggccctgcgtgtcatgaccttcgatgacgacatccgtgtgc

SEQ ID NO: 10823 - protein, 231 aa, Homo sapiens
MVSKRIAQETFDAAVRENIEEFAMGPEEAVKEAVEQFESQGVDLSNIVKTAPKVSADGSQEPTHDILQMLSDLQESVASSRPQEVSAYLTRFCDQCKQDKACRFLAAQKGAYPIIFTAWKLATAGDQGLLLQSLNALSVLTDGQPDLLDAQGLQLLVATLTQNADEADLTCSGIRCVRHACLKHEQNRQDLVKAGVLPLLTGAITHHGHHTDVVREACWALRVMTFDDDIR

SEQ ID NO: 10824 - DNA, 924 bp, Homo sapiens
cgggccgccgcggcccggctctcttgcgcaagcgcgctgtccgcttcttctgggcggacgctctggaggcaaaacatttccctgctgggggcggcgaccaccgtgagcgtcccggaaggggcggcaaagacgcctccgtcgcgcacgaggtggcctcgttggctttaccttggttcgcggtcgtccttggttatcgtgagcgtccgcgagtctctgggaggccaagcctaggggcgccacagcgcctgcgcgcgtacggcggccggaaggggctagaggcggctccctgggtgacaaccgcgcgccccacctttccccacgtggccgcgaagaccggctcaggagcatctatcggctgcacgccaacatcaacacaggcgaagatggtctccaagcgcattgcccaggagacctttgatgcagctgtgcgcgagaacatcgaggagtttgcgatggggccagaggaggcagtgaaagaggccgtggagcagtttgaatcgcaaggggttgatctgagcaacattgtaaagacggcacctaaagtctctgcagacggatcccaggagcccacacatgacatcctgcagtccctcaatgccctgtcggtgctgactgatggacagccagacctcctggatgcccagggcctgcagctcctagtggccacgctgacccagaatgctgatgaggctgacctgacctgctctgggatccgctgtgtgcgtcacgcttgcctgaaacatgaacagaatcggcaagacctggtgaaagctggcgtgctgcctctgctgactggtgccatcacccatcatggccaccacactgacgtggtcagggaagcctgctgggccctgcgtgtcatgaccttcgatgacgacatccgtgtgccctttggccatgcccacaaccatgccaagatgattg

SEQ ID NO: 10825 - protein, 179 aa, Homo sapiens
MVSKRIAQETFDAAVRENIEEFAMGPEEAVKEAVEQFESQGVDLSNIVKTAPKVSADGSQEPTHDILQSLNALSVLTDGQPDLLDAQGLQLLVATLTQNADEADLTCSGIRCVRHACLKHEQNRQDLVKAGVLPLLTGAITHHGHHTDVVREACWALRVMTFDDDIRVPFGHAHNHAKM

SEQ ID NO: 10826 - DNA, 2363 bp, Homo sapiens
cgggccgccgcggcccggctctcttgcgcaagcgcgctgtccgcttcttctgggcggacgctctggaggcaaaacatttccctgctgggggcggcgaccaccgtgagcgtcccggaaggggcggcaaagacgcctccgtcgcgcacgaggtggcctcgttggctttaccttggttcgcggtcgtccttggttatcgtgagcgtccgcgagtctctgggaggccaagcctaggggcgccacagcgcctgcgcgcgtacggcggccggaaggggctagaggcggctccctgggtgacaaccgcgcgccccacctttccccacgtggccgcgaagaccggctcaggagcatctatcggctgcacgccaacatcaacacaggcgaagatggtctccaagcgcattgcccaggagacctttgatgcagctgtgcgcgagaacatcgaggagtttgcgatggggccagaggaggcagtgaaagaggccgtggagcagtttgaatcgcaaggggttgatctgagcaacattgtaaagacggcacctaaagtctctgcagacggatcccaggagcccacacatgacatcctgcagatgctcagtgacctccaggagtctgtggccagctctcgcccccaggaggtgtcagcatacctcacccgcttctgcgaccagtgcaaacaggacaaggcctgccgcttcctcgcggcccagaagggggcctaccccatcatcttcactgcctggaagctggccactgcaggtgaccagggccttctgctccagtccctcaatgccctgtcggtgctgactgatggacagccagacctcctggatgcccagggcctgcagctcctagtggccacgctgacccagaatgctgatgaggctgacctgacctgctctgggatccgctgtgtgcgtcacgcttgcctgaaacatgaacagaatcggcaagacctggtgaaagctggcgtgctgcctctgctgactggtgccatcacccatcatggccaccacactgacgtggtcagggaagcctgctgggccctgcgtgtcatgaccttcgatgacgacatccgtgtgccctttggccatgcccacaaccatgccaagatgattgtgcaggagaacaaaggcttgaaggtgctcatcgaagccaccaaagcgttcctggataaccctggcatcctgagcgagctctgtggaaccctgtcccgcctggccattcgcaacgagttctgccaggaggtcgtcgacctcgggggcctgagcattctggtgtccctgctagccgactgcaatgaccaccagatgagggaccagagcggcgttcaggagctcgtgaagcaagtgctgagcaccctgcgagccatcgcaggcaacgacgacgtgaaagatgctattgtccgtgctggtgggacggagtccatcgtggctgctatgacccagcatctgaccagcccccaggtgtgtgagcagagctgcgcggccctgtgcttcctggccctgcgtaagcccgacaacagccgcatcatcgtggagggtggcggggctgtggcagcactgcaggccatgaaggcacacccgcagaaggccggcgtgcagaaacaggcttgcatgctgatccgaaacctggtggcccacggccaggccttctcgaagcccatcctggacctgggggctgaggcactcatcatgcaggcccgatctgcccaccgtgactgtgaggacgtggccaaggccgccctgcgggacctgggttgtcatgtcgagctccgagagctgtggacaggccagaggggcaacctggcgccatgaccccaggcccagtctgggccgtgactctgggtgagtcgtgtgactcaggaatgggggtagatccatgtcctccactgtcccccattagttctgtccccttcacaatgagaagtgttttctggcaggccctaggtaaagggtcgggggaggggggagccttgtagggaggcctctacacagaagaaagcagcccccatgtcccagccacttctgggtcccagccagcagcacggatgttactgtcctgctccttcccccagccccacgccctaccagagggggcaaagggcacgtcccatcactcactgccctgtctgaaatgtggcagccactgtgggccaggctcagggcagggcaggcgattccagtggggttgggccccctggcgcctgctgcttactgcagtttcatgcaggcctctgctccttgtctttcttacctgtaaaatgggtctcagatgctccgccctgcttggccccagcttgtctgtctctgggtcctgggccagccaggatacctgataataaaagatcattgggtgaacagcgg

SEQ ID NO: 10827 - protein, 476 aa, Homo sapiens; identical to SEQ ID NO: 1803

SEQ ID NO: 10828 - DNA, 2446 bp, Homo sapiens
cgggccgccgcggcccggctctcttgcgcaagcgcgctgtccgcttcttctgggcggacgctctggaggcaaaacatttccctgctgggggcggcgaccaccgtgagcgtcccggaaggggcggcaaagacgcctccgtcgcgcacgaggtggcctcgttggctttaccttggttcgcggtcgtccttggttatcgtgagcgtccgcgagtctctgggaggccaagcctaggggcgccacagcgcctgcgcgcgtacggcggccggaaggggctagaggcggctccctgggtgacaaccgcgcgccccacctttccccacgtggccgcgaagaccgggtgagacgctgcggctgccgaggcctgtcccgcgcggagtggggagtgggggtgccgcagggtcgggctggcgcgaccctcggctcaggagcatctatcggctgcacgccaacatcaacacaggcgaagatggtctccaagcgcattgcccaggagacctttgatgcagctgtgcgcgagaacatcgaggagtttgcgatggggccagaggaggcagtgaaagaggccgtggagcagtttgaatcgcaaggggttgatctgagcaacattgtaaagacggcacctaaagtctctgcagacggatcccaggagcccacacatgacatcctgcagatgctcagtgacctccaggagtctgtggccagctctcgcccccaggaggtgtcagcatacctcacccgcttctgcgaccagtgcaaacaggacaaggcctgccgcttcctcgcggcccagaagggggcctaccccatcatcttcactgcctggaagctggccactgcaggtgaccagggccttctgctccagtccctcaatgccctgtcggtgctgactgatggacagccagacctcctggatgcccagggcctgcagctcctagtggccacgctgacccagaatgctgatgaggctgacctgacctgctctgggatccgctgtgtgcgtcacgcttgcctgaaacatgaacagaatcggcaagacctggtgaaagctggcgtgctgcctctgctgactggtgccatcacccatcatggccaccacactgacgtggtcagggaagcctgctgggccctgcgtgtcatgaccttcgatgacgacatccgtgtgccctttggccatgcccacaaccatgccaagatgattgtgcaggagaacaaaggcttgaaggtgctcatcgaagccaccaaagcgttcctggataaccctggcatcctgagcgagctctgtggaaccctgtcccgcctggccattcgcaacgagttctgccaggaggtcgtcgacctcgggggcctgagcattctggtgtccctgctagccgactgcaatgaccaccagatgagggaccagagcggcgttcaggagctcgtgaagcaagtgctgagcaccctgcgagccatcgcaggcaacgacgacgtgaaagatgctattgtccgtgctggtgggacggagtccatcgtggctgctatgacccagcatctgaccagcccccaggtgtgtgagcagagctgcgcggccctgtgcttcctggccctgcgtaagcccgacaacagccgcatcatcgtggagggtggcggggctgtggcagcactgcaggccatgaaggcacacccgcagaaggccggcgtgcagaaacaggcttgcatgctgatccgaaacctggtggcccacggccaggccttctcgaagcccatcctggacctgggggctgaggcactcatcatgcaggcccgatctgcccaccgtgactgtgaggacgtggccaaggccgccctgcgggacctgggttgtcatgtcgagctccgagagctgtggacaggccagaggggcaacctggcgccatgaccccaggcccagtctgggccgtgactctgggtgagtcgtgtgactcaggaatgggggtagatccatgtcctccactgtcccccattagttctgtccccttcacaatgagaagtgttttctggcaggccctaggtaaagggtcgggggaggggggagccttgtagggaggcctctacacagaagaaagcagcccccatgtcccagccacttctgggtcccagccagcagcacggatgttactgtcctgctccttcccccagccccacgccctaccagagggggcaaagggcacgtcccatcactcactgccctgtctgaaatgtggcagccactgtgggccaggctcagggcagggcaggcgattccagtggggttgggccccctggcgcctgctgcttactgcagtttcatgcaggcctctgctccttgtctttcttacctgtaaaatgggtctcagatgctccgccctgcttggccccagcttgtctgtctctgggtcctgggccagccaggatacctgataataaaagatcattgggtgaacagcgg

SEQ ID NO: 10829 - protein, 476 aa, Homo sapiens; identical to SEQ ID NO: 1803

SEQ ID NO: 10830 - DNA, 2190 bp, Homo sapiens
cgggccgccgcggcccggctctcttgcgcaagcgcgctgtccgcttcttctgggcggacgctctggaggcaaaacatttccctgctgggggcggcgaccaccgtgagcgtcccggaaggggcggcaaagacgcctccgtcgcgcacgaggtggcctcgttggctttaccttggttcgcggtcgtccttggttatcgtgagcgtccgcgagtctctgggaggccaagcctaggggcgccacagcgcctgcgcgcgtacggcggccggaaggggctagaggcggctccctgggtgacaaccgcgcgccccacctttccccacgtggccgcgaagaccggaggaggctacagggtacaaataaatgagtgaacgatgttgctctagatacagctcaggagcatctatcggctgcacgccaacatcaacacaggcgaagatggtctccaagcgcattgcccaggagacctttgatgcagctgtgcgcgagaacatcgaggagtttgcgatggggccagaggaggcagtgaaagaggccgtggagcagtttgaatcgcaaggggttgatctgagcaacattgtaaagacggcacctaaagtctctgcagacggatcccaggagcccacacatgacatcctgcagatgctcagtgacctccaggagtctgtggccagctctcgcccccaggaggtgtcagcatacctcacccgcttctgcgaccactgctctgggatccgctgtgtgcgtcacgcttgcctgaaacatgaacagaatcggcaagacctggtgaaagctggcgtgctgcctctgctgactggtgccatcacccatcatggccaccacactgacgtggtcagggaagcctgctgggccctgcgtgtcatgaccttcgatgacgacatccgtgtgccctttggccatgcccacaaccatgccaagatgattgtgcaggagaacaaaggcttgaaggtgctcatcgaagccaccaaagcgttcctggataaccctggcatcctgagcgagctctgtggaaccctgtcccgcctggccattcgcaacgagttctgccaggaggtcgtcgacctcgggggcctgagcattctggtgtccctgctagccgactgcaatgaccaccagatgagggaccagagcggcgttcaggagctcgtgaagcaagtgctgagcaccctgcgagccatcgcaggcaacgacgacgtgaaagatgctattgtccgtgctggtgggacggagtccatcgtggctgctatgacccagcatctgaccagcccccaggtgtgtgagcagagctgcgcggccctgtgcttcctggccctgcgtaagcccgacaacagccgcatcatcgtggagggtggcggggctgtggcagcactgcaggccatgaaggcacacccgcagaaggccggcgtgcagaaacaggcttgcatgctgatccgaaacctggtggcccacggccaggccttctcgaagcccatcctggacctgggggctgaggcactcatcatgcaggcccgatctgcccaccgtgactgtgaggacgtggccaaggccgccctgcgggacctgggttgtcatgtcgagctccgagagctgtggacaggccagaggggcaacctggcgccatgaccccaggcccagtctgggccgtgactctgggtgagtcgtgtgactcaggaatgggggtagatccatgtcctccactgtcccccattagttctgtccccttcacaatgagaagtgttttctggcaggccctaggtaaagggtcgggggaggggggagccttgtagggaggcctctacacagaagaaagcagcccccatgtcccagccacttctgggtcccagccagcagcacggatgttactgtcctgctccttcccccagccccacgccctaccagagggggcaaagggcacgtcccatcactcactgccctgtctgaaatgtggcagccactgtgggccaggctcagggcagggcaggcgattccagtggggttgggccccctggcgcctgctgcttactgcagtttcatgcaggcctctgctccttgtctttcttacctgtaaaatgggtctcagatgctccgccctgcttggccccagcttgtctgtctctgggtcctgggccagccaggatacctgataataaaagatcattgggtgaacagcgg

SEQ ID NO: 10831 - protein, 426 aa, Homo sapiens
MSERCCSRYSSGASIGCTPTSTQAKMVSKRIAQETFDAAVRENIEEFAMGPEEAVKEAVEQFESQGVDLSNIVKTAPKVSADGSQEPTHDILQMLSDLQESVASSRPQEVSAYLTRFCDHCSGIRCVRHACLKHEQNRQDLVKAGVLPLLTGAITHHGHHTDVVREACWALRVMTFDDDIRVPFGHAHNHAKMIVQENKGLKVLIEATKAFLDNPGILSELCGTLSRLAIRNEFCQEVVDLGGLSILVSLLADCNDHQMRDQSGVQELVKQVLSTLRAIAGNDDVKDAIVRAGGTESIVAAMTQHLTSPQVCEQSCAALCFLALRKPDNSRIIVEGGGAVAALQAMKAHPQKAGVQKQACMLIRNLVAHGQAFSKPILDLGAEALIMQARSAHRDCEDVAKAALRDLGCHVELRELWTGQRGNLAP

SEQ ID NO: 10832 - DNA, 3127 bp, Homo sapiens
ggggccgtggcggctggaggtagcggcggcggcgacgcgtccgggccggtgagggggcgcggggggcgccgggggggcccaagcgtcagcggcccgcgcctgtcgggctgaactgaggaccgagtctcctgccattccgagcaggcctggtatgggtaatggtgtgaaggaaggcccggtgcgattgcatgaggatgctgaggctgtcctgtcctcgtccgtctcatcaaagcgtgaccacaggcaagtgctcagctccctgctgtctggggccctggctggtgcccttgccaaaacagcggtagctcccctggaccgaaccaaaatcatcttccaagtgtcttcaaaaagattttctgccaaggaggccttccgggtcctctactacacctacctcaacgagggatttctcagcttgtggcgcgggaactcggccaccatggtgcgcgtggtgccctacgccgccatccagttcagcgcacacgaggagtacaagcgcatcctgggcagctactatggcttccgtggagaagccctgcccccttggcctcgcctcttcgccggcgcactggctggaacgacagccgcttcactgacctaccccctggacctggtcagagcgcggatggccgtaaccccgaaggaaatgtacagcaacatctttcatgtcttcatccgcatctcgagagaagaggggctgaagactctctaccatggatttatgcccaccgtgctgggggtcattccctacgctggcctgagcttcttcacctatgagacgctcaagagcttgcacagagagtacagcggccgccggcagccctaccccttcgagcgcatgatcttcggcgcctgcgctggcctcatcgggcagtcggcctcgtacccgctggatgtggtgcggcggcgcatgcagacggccggcgtcacgggctacccgcgcgcctccatcgcccgcacgctgcgcaccatcgtgcgggaggagggcgccgtgcgcggcctctacaaaggcttgagcatgaactgggtcaagggtcccatcgccgtgggcatcagcttcaccaccttcgacctcatgcagatcctgctgcggcacctgcagagctaggggaccctgagctgctctcaggacggtggaccggtgacccctttgtattctgggcccatggaacggtgggggggtgcgcttgattctacttcaggaggcacatggggcgctttatggaacgagcaggtgggcctgaggggcctgggctcagagtccacgtccaaacgcaaagctggcagccctggaagtgcagtgttggggcgatggtgtggggggtcccgcagctcccctcttccttcctctgcagacgctggcgctgtctgccggaggtgttgcccaaaaggccctagtggggcgtggtcagctccacctcctgatcctgtgtgtcctccgacatgctgctgattctagtgacccctgtccccaccaggctcagagccagaccgcgcctggaccttcttgttctgactccacgtgcctgcccggcctccagggtgcgggggcgcctttcttgcaggcggaccctgcccaggatggggccagcctcgtgctcagctttggccacaaatgcagcccctggcccaccccaccctgccggccctgccttctccagtatttcccacatggccacgactcctcagtcactagagcctcctgctgggaacagtgtcccccagagcctcatgtctatcctagaccctgcaagcagctgggtccccaagagtgcatctccccctagagttgcctgcccatgcccacctgctttgtaaccttcccaggagattcatgcttgctctgcacagcagggctcgaggcccaggccatgacacggaactgcctcaggtttgggtcagacctgcatcctggggcatctgctgaaatgtgagcacacaaaccacctcctttggcccagaagccccccaggcctagcatctcagtgccccaaccctctgcccagctgtggtatccagcaggtccttgggtccccacttgagcaggcacttggctgggatatggagcaatttaaagcccacaggggttgttcagtttctatgaaatggagcatggggtgcctgctagcctcaatcccccgaagtgggagcctcatgatagagtatagcttgggggtgggaggtgaggaaaatctgaggtacccaggggaacccccagctaactggtctctcagaggagtcccccagggcccgccagctatcacagggactcagaaacacccatttcctaatgacatggtgagtttcttgatttcttttttttgtttgttttgttttggttttcaacttggctgaccccgggtctatgatctattcacatcgaacccctgactggtctgcctggtgccagggtgagcgtgaccgtgagtgttgctttcgacagctggctcagcacacgctgtgtgaagggatctgagcttgttcatctccagtcgtgacttcatttcccttccttctgtcctcctcctgttcttgccttggacctgcaggtgtgcagaccgctctctctgccttccttgcatgtggccaccagccatccctgatcttgtccccagaggcccaggcagcctgtgatggctgtgaggggctgtcccactgtgtgggtatcccttacccagcacttaaacttggcaggagaggcagggcaaccctcacagggagatgggagggcacccaactcccacaagcatgcaacagcagtaggaattgggggtctgccccaggtgggtgagaccaaatgagtggatttggggccacaggctaggcaggagagacaaggggtaggtgggagggtcccccagtccctgctgaccccagtgtgtctccccggagatggctcctagctgagtgggacccggcaggagttggggacagtgctgtcccccacccctgcacacagccaggccctcaggctctgcggtcactcgcctccctgctggtcactggtcttggtctggagttatattttgatgccatgaagacactgtttatatctaatgtttatatattttaaagatttgtgccaagagagtatatttaataaaaacttaaatgacttcttctcctg

SEQ ID NO: 10833 - protein, 318 aa, Homo sapiens
MGNGVKEGPVRLHEDAEAVLSSSVSSKRDHRQVLSSLLSGALAGALAKTAVAPLDRTKIIFQVSSKRFSAKEAFRVLYYTYLNEGFLSLWRGNSATMVRVVPYAAIQFSAHEEYKRILGSYYGFRGEALPPWPRLFAGALAGTTAASLTYPLDLVRARMAVTPKEMYSNIFHVFIRISREEGLKTLYHGFMPTVLGVIPYAGLSFFTYETLKSLHREYSGRRQPYPFERMIFGACAGLIGQSASYPLDVVRRRMQTAGVTGYPRASIARTLRTIVREEGAVRGLYKGLSMNWVKGPIAVGISFTTFDLMQILLRHLQS

SEQ ID NO: 10834 - DNA, 519 bp, Homo sapiens
gtagcggcggcggcgacgcgtccgggccggaccgagtctcctgccattccgagcaggcctggtatgggtaatggtgtgaaggaaggcccggtgcgattgcatgaggatgctgaggctgtcctgtcctcgtccgtctcatcaaagtgtcttcaaaaagattttctgccaaggaggccttccgggtcctctactacacctacctcaacgagggatttctcagcttgtggcgcgggaactcggccaccatggtgcgcgtggtgccctacgccgccatccagttcagcgcacacgaggagtacaagcgcatcctgggcagctactatggcttccgtggagaagccctgcccccttggcctcgcctcttcgccggcgcactggctggaacgacagccgcttcactgacctaccccctggacctggtcagagcgcggatggccgtaaccccgaaggaaatgtgagtccttacatcggtgatgcgcatcagccccgggggctctgtgtctcgggggctcccaggtc

SEQ ID NO: 10835 - protein, 138 aa, Homo sapiens
MRMLRLSCPRPSHQSVFKKIFCQGGLPGPLLHLPQRGISQLVARELGHHGARGALRRHPVQRTRGVQAHPGQLLWLPWRSPAPLASPLRRRTGWNDSRFTDLPPGPGQSADGRNPEGNVSPYIGDAHQPRGLCVSGAP

SEQ ID NO: 10836 - DNA, 3002 bp, Homo sapiens
gggagactcctcacccaggccctcctgagggaccccctgactctgtcacatgccctattctgtcttcagagctcctctcctttgcccgtttgtctccagacgtttctccacccccacgcataaatcccagaggggcaggttactatgcccccagggccgtagggaaaatacgcatcattaatttatgccagcaggggggaagggaaggcagccatgtaaacctcaaaatgaggcccactccagagaccccatcagcttggccaggaggaagccaaacccgcctcgtgttcctcggtccccacccctgtccccgccccagcagagacgtgcgggtgctccaggctgggcctctgtgcatctgcaaccccctcactgccgtctcgccttctcctcctgccctgttcagagccctgcccccttggcctcgcctcttcgccggcgcactggctggaacgacagccgcttcactgacctaccccctggacctggtcagagcgcggatggccgtaaccccgaaggaaatgtacagcaacatctttcatgtcttcatccgcatctcgagagaagaggggctgaagactctctaccatggatttatgcccaccgtgctgggggtcattccctacgctggcctgagcttcttcacctatgagacgctcaagagcttgcacagagagtacagcggccgccggcagccctaccccttcgagcgcatgatcttcggcgcctgcgctggcctcatcgggcagtcggcctcgtacccgctggatgtggtgcggcggcgcatgcagacggccggcgtcacgggctacccgcgcgcctccatcgcccgcacgctgcgcaccatcgtgcgggaggagggcgccgtgcgcggcctctacaaaggcttgagcatgaactgggtcaagggtcccatcgccgtgggcatcagcttcaccaccttcgacctcatgcagatcctgctgcggcacctgcagagctaggggaccctgagctgctctcaggacggtggaccggtgacccctttgtattctgggcccatggaacggtgggggggtgcgcttgattctacttcaggaggcacatggggcgctttatggaacgagcaggtgggcctgaggggcctgggctcagagtccacgtccaaacgcaaagctggcagccctggaagtgcagtgttggggcgatggtgtggggggtcccgcagctcccctcttccttcctctgcagacgctggcgctgtctgccggaggtgttgcccaaaaggccctagtggggcgtggtcagctccacctcctgatcctgtgtgtcctccgacatgctgctgattctagtgacccctgtccccaccaggctcagagccagaccgcgcctggaccttcttgttctgactccacgtgcctgcccggcctccagggtgcgggggcgcctttcttgcaggcggaccctgcccaggatggggccagcctcgtgctcagctttggccacaaatgcagcccctggcccaccccaccctgccggccctgccttctccagtatttcccacatggccacgactcctcagtcactagagcctcctgctgggaacagtgtcccccagagcctcatgtctatcctagaccctgcaagcagctgggtccccaagagtgcatctccccctagagttgcctgcccatgcccacctgctttgtaaccttcccaggagattcatgcttgctctgcacagcagggctcgaggcccaggccatgacacggaactgcctcaggtttgggtcagacctgcatcctggggcatctgctgaaatgtgagcacacaaaccacctcctttggcccagaagccccccaggcctagcatctcagtgccccaaccctctgcccagctgtggtatccagcaggtccttgggtccccacttgagcaggcacttggctgggatatggagcaatttaaagcccacaggggttgttcagtttctatgaaatggagcatggggtgcctgctagcctcaatcccccgaagtgggagcctcatgatagagtatagcttgggggtgggaggtgaggaaaatctgaggtacccaggggaacccccagctaactggtctctcagaggagtcccccagggcccgccagctatcacagggactcagaaacacccatttcctaatgacatggtgagtttcttgatttcttttttttgtttgttttgttttggttttcaacttggctgaccccgggtctatgatctattcacatcgaacccctgactggtctgcctggtgccagggtgagcgtgaccgtgagtgttgctttcgacagctggctcagcacacgctgtgtgaagggatctgagcttgttcatctccagtcgtgacttcatttcccttccttctgtcctcctcctgttcttgccttggacctgcaggtgtgcagaccgctctctctgccttccttgcatgtggccaccagccatccctgatcttgtccccagaggcccaggcagcctgtgatggctgtgaggggctgtcccactgtgtgggtatcccttacccagcacttaaacttggcaggagaggcagggcaaccctcacagggagatgggagggcacccaactcccacaagcatgcaacagcagtaggaattgggggtctgccccaggtgggtgagaccaaatgagtggatttggggccacaggctaggcaggagagacaaggggtaggtgggagggtcccccagtccctgctgaccccagtgtgtctccccggagatggctcctagctgagtgggacccggcaggagttggggacagtgctgtcccccacccctgcacacagccaggccctcaggctctgcggtcactcgcctccctgctggtcactggtcttggtctggagttatattttgatgccatgaagacactgtttatatctaatgtttatatattttaaagatttgtgccaagagagtatatttaataaaaacttaaatgacttcttctcctg

SEQ ID NO: 10837 - protein, 251 aa, Homo sapiens
MRPTPETPSAWPGGSQTRLVFLGPHPCPRPSRDVRVLQAGPLCICNPLTAVSPSPPALFRALPPWPRLFAGALAGTTAASLTYPLDLVRARMAVTPKEMYSNIFHVFIRISREEGLKTLYHGFMPTVLGVIPYAGLSFFTYETLKSLHREYSGRRQPYPFERMIFGACAGLIGQSASYPLDVVRRRMQTAGVTGYPRASIARTLRTIVREEGAVRGLYKGLSMNWVKGPIAVGISFTTFDLMQILLRHLQS

SEQ ID NO: 10838 - DNA, 3137 bp, Homo sapiens
gggagactcctcacccaggccctcctgagggaccccctgactctgtcacatgccctattctgtcttcagagctcctctcctttgcccgtttgtctccagacgtttctccacccccacgcataaatcccagaggggcaggttactatgcccccagggccgtagggaaaatacgcatcattaatttatgccagcaggggggaagggaaggcagccatgtaaacctcaaaatgaggcccactccagagaccccatcagcttggccaggaggaagccaaacccgcctcgtgttcctcggtccccacccctgtccccgccccagcagagacgtgcgggtgctccaggctgggcctctgtgcatctgcaaccccctcactgccgtctcgccttctcctcctgccctgttcagagccctgcccccttggcctcgcctcttcgccggcgcactggctggaacgacagccgcttcactgacctaccccctggacctggtcagagcgcggatggccgtaaccccgaaggaaatgtacagcaacatctttcatgtcttcatccgcatctcgagagaagaggggctgaagactctctaccatggatttatgcccaccgtgctgggggtcattccctacgctggcctgagcttcttcacctatgagacgctcaagagcttgcacagagagtacagcggccgccggcagccctaccccttcgagcgcatgatcttcggcgcctgcgctggcctcatcgggcagtcggcctcgtacccgctggatgtggtgcggcggcgcatgcagacggccggcgtcacgggctacccgcgcgcctccatcgcccgcacgctgcgcaccatcgtgcgggaggagggcgccgtgcgcggcctctacaaaggcttgagcatgaactgggtcaagggtcccatcgccgtgggcatcagcttcaccaccttcgacctcatgcagatcctgctgcggcacctgcagagctaggggaccctgagctgctctcaggacggtggaccggtgacccctttgtattctgggcccatggaacggtgggggggtgcgcttgattctacttcaggaggcacatggggcgctttatggaacgagcaggtgggcctgaggggcctgggctcagagtccacgtccaaacgcaaagctggcagccctggaagtgcagtgttggggcgatggtgtggggggtcccgcagctcccctcttccttcctctgcagacgctggcgctgtctgccggaggtgttgcccaaaaggccctagtggggcgtggtcagctccacctcctgatcctgtgtgtcctccgacatgctgctgattctagtgacccctgtccccaccaggctcagagccagaccgcgcctggaccttcttgttctgactccacgtgcctgcccggcctccagggtgcgggggcgcctttcttgcaggcggaccctgcccaggatggggccagcctcgtgctcagctttggccacaaatgcagcccctggcccaccccaccctgccggccctgccttctccagtatttcccacatggccacgactcctcagtcactagagcctcctgctgggaacagtgtcccccagagcctcatgtctatcctagaccctgcaagcagctgggtccccaagagtgcatctccccctagagttgcctgcccatgcccacctgctttgtaaccttcccaggagattcatgcttgctctgcacagcagggctcgaggcccaggccatgacacggaactgcctcaggtttgggtcagacctgcatcctggggcatctgctgaaatgtgagcacacaaaccacctcctttggcccagaagccccccaggcctagcatctcagtgccccaaccctctgcccagctgtggtatccagcaggtccttgggtccccacttgagcaggcacttggctgggatatggagcaatttaaagcccacaggggttgttcagtttctatgaaatggagcatggggtgcctgctagcctcaatcccccgaagtgggagcctcatgatagagtatagcttgggggtgggaggtgaggaaaatctgaggtacccaggggaacccccagctaactggtctctcagaggagtcccccagggcccgccagctatcacagggactcagaaacacccatttcctaatgacatggtgagtttcttgatttcttttttttgtttgttttgttttggttttcaacttggctgaccccgggtctatgatctattcacatcgaacccctgactggtctgcctggtgccagggtgagcgtgaccgtgagtgttgctttcgacagctggctcagcacacgctgtgtgaagggatctgagcttgttcatctccagtcgtgacttcatttcccttccttctgtcctcctcctgttcttgccttggacctgcaggtgtgcagaccgctctctctgccttccttgcatgtggccaccagccatccctgatcttgtccccagaggcccaggcagcctgtgatggctgtgaggggctgtcccactgtgtgggtatcccttacccagcacttaaacttggcaggagaggcagggcaaccctcacagggagatgggagggcacccaactcccacaagcatgcaacagcagtaggaattgggggtctgccccaggtgggtgagaccaaatgagtggatttggggccacaggctaggcaggagagacaaggggtaggtgggagggtcccccagtccctgctgaccccagtgtgtctccccggagatggctcctagctgagtgggacccggcaggagttggggacagtgctgtcccccacccctgcacacagccaggccctcaggctctgcggtcactcgcctccctgctggtcactggtcttggtctggagttatattttgatgccatgaagacactgtttatatctaatgtttatatattttaaagatttgtgccaagagagtatatttaataaaaacttaaatgacttcttctcctgctcctggctcttctttggctctgaccgcccccccatcttcccccatgaacccccaaacagggttgaagtgcttttgacacatttgtgataaaagttctgaataaaagtcttgaataaagaagtttttaaatgcaa

SEQ ID NO: 10839 - protein, 251 aa, Homo sapiens; identical to SEQ ID NO: 10837

SEQ ID NO: 10840 - DNA, 452 bp, Homo sapiens
gtgtctcctgtctggctgtttttttgagacggagtctcactctgccgcccaggctggagtgcagtggaacgatctcagctcactgcaacctccacttcctgggttcaagccattctcctgcctcagcctcctttggaggctgagacagaattgcttgaacccgggaggcggagggtgcagtgagccgagattgggccattgccctccagcctgggcaacaagagtgaaattacatctccaaaaaaaaaattttttttatttctcgagtttgagtgaaaggagcgacccggaggtgaggcagtggggcgtgtgggtgcgcatgagtgcgaacacacgtgggggtgcaagtgcatgtgtgtatgtgcacgcaggttgctcctaggggtgcaaaggcgcgcgcacgggtgcggggtgcgcgccccctcgcggcgccttcacggccctcccgcccc

SEQ ID NO: 10841 - protein, 32 aa, Homo sapiens
MCVCARRLLLGVQRRAHGCGVRAPSRRLHGPP

SEQ ID NO: 10842 - DNA, 1764 bp, Homo sapiens
gcggccgccggcagccctaccccttcgagcgcatgatcttcggcgcctgcgctggcctcatcgggcagtcggcctcgtacccgctggatgtggtgcggcggcgcatgcagacggccggcgtcacgggctacccgcgcgcctccatcgcccgcacgctgcgcaccatcgtgcgggaggagggcgccgtgcgcggcctctacaaaggcttgagcatgaactgggtcaagggtcccatcgccgtgggcatcagcttcaccaccttcgacctcatgcagatcctgctgcggcacctgcagagctaggggaccctgagctgctctcaggacggtggaccggtgacccctttgtattctgggcccatggaacggtgggggggtgcgcttgattctacttcaggaggcacatggggcgctttatggaacgagcaggtgggcctgaggggcctgggctcagagtccacgtccaaacgcaaagctggcagccctggaagtgcagtgttggggcgatggtgtggggggtcccgcagctcccctcttccttcctctgcagacgctggcgctgtctgccggaggtgttgcccaaaaggccctagtggggcgtggtcagctccacctcctgatcctgtgtgtcctccgacatgctgctgattctagtgacccctgtccccaccaggctcagagccagaccgcgcctggaccttcttgttctgactccacgtgcctgcccggcctccagggtgcgggggcgcctttcttgcaggcggaccctgcccaggatggggccagcctcgtgctcagctttggccacaaatgcagcccctggcccaccccaccctgccggccctgccttccccagctaactggtctctcagaggagtcccccagggcccgccagctatcacagggactcagaaacacccatttcctaatgacatggtgagtttcttgatttcttttttttgtttgttttgttttggttttcaacttggctgaccccgggtctatgatctattcacatcgaacccctgactggtctgcctggtgccagggtgagcgtgaccgtgagtgttgctttcgacagctggctcagcacacgctgtgtgaagggatctgagcttgttcatctccagtcgtgacttcatttcccttccttctgtcctcctcctgttcttgccttggacctgcaggtgtgcagaccgctctctctgccttccttgcatgtggccaccagccatccctgatcttgtccccagaggcccaggcagcctgtgatggctgtgaggggctgtcccactgtgtgggtatcccttacccagcacttaaacttggcaggagaggcagggcaaccctcacagggagatgggagggcacccaactcccacaagcatgcaacagcagtaggaattgggggtctgccccaggtgggtgagaccaaatgagtggatttggggccacaggctaggcaggagagacaaggggtaggtgggagggtcccccagtccctgctgaccccagtgtgtctccccggagatggctcctagctgagtgggacccggcaggagttggggacagtgctgtcccccacccctgcacacagccaggccctcaggctctgcggtcactcgcctccctgctggtcactggtcttggtctggagttatattttgatgccatgaagacactgtttatatctaatgtttatatattttaaagatttgtgccaagagagtatatttaataaaaacttaaatgacttcttctcctg

SEQ ID NO: 10843 - protein, 73 aa, Homo sapiens
MLLILVTPVPTRLRARPRLDLLVLTPRACPASRVRGRLSCRRTLPRMGPASCSALATNAAPGPPHPAGPAFPS

SEQ ID NO: 10844 - DNA, 1899 bp, Homo sapiens
gcggccgccggcagccctaccccttcgagcgcatgatcttcggcgcctgcgctggcctcatcgggcagtcggcctcgtacccgctggatgtggtgcggcggcgcatgcagacggccggcgtcacgggctacccgcgcgcctccatcgcccgcacgctgcgcaccatcgtgcgggaggagggcgccgtgcgcggcctctacaaaggcttgagcatgaactgggtcaagggtcccatcgccgtgggcatcagcttcaccaccttcgacctcatgcagatcctgctgcggcacctgcagagctaggggaccctgagctgctctcaggacggtggaccggtgacccctttgtattctgggcccatggaacggtgggggggtgcgcttgattctacttcaggaggcacatggggcgctttatggaacgagcaggtgggcctgaggggcctgggctcagagtccacgtccaaacgcaaagctggcagccctggaagtgcagtgttggggcgatggtgtggggggtcccgcagctcccctcttccttcctctgcagacgctggcgctgtctgccggaggtgttgcccaaaaggccctagtggggcgtggtcagctccacctcctgatcctgtgtgtcctccgacatgctgctgattctagtgacccctgtccccaccaggctcagagccagaccgcgcctggaccttcttgttctgactccacgtgcctgcccggcctccagggtgcgggggcgcctttcttgcaggcggaccctgcccaggatggggccagcctcgtgctcagctttggccacaaatgcagcccctggcccaccccaccctgccggccctgccttccccagctaactggtctctcagaggagtcccccagggcccgccagctatcacagggactcagaaacacccatttcctaatgacatggtgagtttcttgatttcttttttttgtttgttttgttttggttttcaacttggctgaccccgggtctatgatctattcacatcgaacccctgactggtctgcctggtgccagggtgagcgtgaccgtgagtgttgctttcgacagctggctcagcacacgctgtgtgaagggatctgagcttgttcatctccagtcgtgacttcatttcccttccttctgtcctcctcctgttcttgccttggacctgcaggtgtgcagaccgctctctctgccttccttgcatgtggccaccagccatccctgatcttgtccccagaggcccaggcagcctgtgatggctgtgaggggctgtcccactgtgtgggtatcccttacccagcacttaaacttggcaggagaggcagggcaaccctcacagggagatgggagggcacccaactcccacaagcatgcaacagcagtaggaattgggggtctgccccaggtgggtgagaccaaatgagtggatttggggccacaggctaggcaggagagacaaggggtaggtgggagggtcccccagtccctgctgaccccagtgtgtctccccggagatggctcctagctgagtgggacccggcaggagttggggacagtgctgtcccccacccctgcacacagccaggccctcaggctctgcggtcactcgcctccctgctggtcactggtcttggtctggagttatattttgatgccatgaagacactgtttatatctaatgtttatatattttaaagatttgtgccaagagagtatatttaataaaaacttaaatgacttcttctcctgctcctggctcttctttggctctgaccgcccccccatcttcccccatgaacccccaaacagggttgaagtgcttttgacacatttgtgataaaagttctgaataaaagtcttgaataaagaagtttttaaatgcaa

SEQ ID NO: 10845 - protein, 73 aa, Homo sapiens; identical to SEQ ID NO: 10843

SEQ ID NO: 10846 - DNA, 1936 bp, Homo sapiens
agccctaggccggtgggtgagtgcaccgcgttctcgcacgcgtcatggcggtcctcggagtacagctggtggtgaccctgctcactgccaccctcatgcacaggctggcgccacactgctccttcgcgcgctggctgctctgtaacggcagtttgttccgatacaagcacccgtctgaggaggagcttcgggccctggcggggaagccgaggcccagaggcaggaaagagcggtgggccaatggccttagtgaggagaagccactgtctgtgccccgagatgccccgttccagctggagacctgccccctcacgaccgtggatgccctgggtctggccagcatgacccagaacttagagccacttctgaagaagcagggctgggactgggcgcttcctgtggccaagctggctatccgcgtgggactggcagtggtgggctctgtgctgggtgccttcctcaccttcccaggcctgcggctggcccagacccaccgggacgcactgaccatgtcggaggacagacccatgctgcagttcctcctgcacaccagcttcctgtctcccctgttcatcctgtggctctggacaaagcccattgcacgggacttcctgcaccagccgccgtttggggagacgcgtttctccctgctgtccgattctgccttcgactctgggcgcctctggttgctggtggtgctgtgcctgctgcggctggcggtgacccggccccacctgcaggcctacctgtgcctggccaaggcccgggtggagcagctgcgaagggaggctggccgcatcgaagcccgtgaaatccagcagagggtggtccgagtctactgctatgtgaccgtggtgagcttgcagtacctgacgccgctcatcctcaccctcaactgcacacttctgctcaagacgctgggaggctattcctggggcctgggcccagctcctctactatcccccgacccatcctcagccagcgctgcccccatcggctctggggaggacgaagtccagcagactgcagcgcggattgccggggctctgggtggcctgcttactcccctcttcctccgtggcgtcctggcctacctcatctggtggacggctgcctgccagctgctcgccagccttttcggcctctacttccaccagcacttggcaggctcctagctgcctgcagaccctcctggggccctgaggtctgttcctggggcagcgggacactagcctgccccctctgtttgcgcccccgtgtccccagctgcaaggtggggccggactccccggcgttcccttcaccacagtgcctgacccgcggccccccttggacgccgagtttctgcctcagaactgtctctcctgggcccagcagcatgagggtcccgaggccattgtctccgaagcgtatgtgccaggtttgagtggcaagggtgatgctggctgctcttctgaacaaataaaggagcatgccgatttttacaaacagggtctgagtggtttgggactcgggcttgtgcagggtggtagctgtcttgcacgtccctgtggcacctgcccgggtgcagggtgggggctgcgcgggagggagagaggagcaggactgagaggggagcaaaggtctgggaggagaaaggagagcaagaaggaggccaggctcggcggctcacgcccgtaatcccaaatcccagcactttgggaagccaaggcgggcagatcacttgaggccagcagtttgagaccagcctggtcaacgcatggtgaaacccagtctttactaaaataacaaaaattaggcatggtggcgcatgcatgtagttccagctactgagaaggatgagccagaagagtcgcttgaacctgagaggtggaggctgcagtgagccgagatcgcatcacactccagcctgggtgacagagtgaaactctgtctc

SEQ ID NO: 10847 - protein, 376 aa, Homo sapiens
MAVLGVQLVVTLLTATLMHRLAPHCSFARWLLCNGSLFRYKHPSEEELRALAGKPRPRGRKERWANGLSEEKPLSVPRDAPFQLETCPLTTVDALGLASMTQNLEPLLKKQGWDWALPVAKLAIRVGLAVVGSVLGAFLTFPGLRLAQTHRDALTMSEDRPMLQFLLHTSFLSPLFILWLWTKPIARDFLHQPPFGETRFSLLSDSAFDSGRLWLLVVLCLLRLAVTRPHLQAYLCLAKARVEQLRREAGRIEAREIQQRVVRVYCYVTVVSLQYLTPLILTLNCTLLLKTLGGYSWGLGPAPLLSPDPSSASAAPIGSGEDEVQQTAARIAGALGGLLTPLFLRGVLAYLIWWTAACQLLASLFGLYFHQHLAGS

SEQ ID NO: 10848 - DNA, 779 bp, Homo sapiens
gacctaggccagagggaacctggggctcagggtggggttcctggtcctttgggcgtggagtcgtcccaaaccagaaggcctcctgctgcagccacccctgctacctgcccacaggtggtccgagtctactgctatgtgaccgtggtgagcttgcagtacctgacgccgctcatcctcaccctcaactgcacacttctgctcaagacgctgggaggctattcctggggcctgggcccagctcctctactatcccccgacccatcctcagccagcgctgcccccatcggctctggggaggacgaagtccagcagactgcagcgcggattgccggggctctgggtggcctgcttactcccctcttcctccgtggcgtcctggcctacctcatctggtggacggctgcctgccagctgctcgccagccttttcggcctctacttccaccagcacttggcaggctcctagctgcctgcagaccctcctggggccctgaggtctgttcctggggcagcgggacactagcctgccccctctgtttgcgcccccgtgtccccagctgcaaggtggggccggactccccggcgttcccttcaccacagtgcctgacccgcggccccccttggacgccgagtttctgcctcagaactgtctctcctgggcccagcagcatgagggtcccgaggccattgtctccgaagcgtatgtgccaggtttgagtggcaagggtgatgctggctgctcttctgaacaaataaaggagcatgccgatttttacaaac

SEQ ID NO: 10849 - protein, 154 aa, Homo sapiens
DLGQREPGAQGGVPGPLGVESSQTRRPPAAATPATCPQVVRVYCYVTVVSLQYLTPLILTLNCTLLLKTLGGYSWGLGPAPLLSPDPSSASAAPIGSGEDEVQQTAARIAGALGGLLTPLFLRGVLAYLIWWTAACQLLASLFGLYFHQHLAGS

SEQ ID NO: 10850 - DNA, 1832 bp, Homo sapiens
cggtgggtgagtgcaccgcgttctcgcacgcgtcatgtttgttccgatacaagcacccgtctgaggaggagcttcgggccctggcggggaagccgaggcccagaggcaggaaagagcggtgggccaatggccttagtgaggagaagccactgtctgtgccccgagatgccccgttccagctggagacctgccccctcacgaccgtggatgccctgggtaatagcccagtcccatccctaaactctactccctcagccctgaaggtctccacaccctcatgggggtggggaggatttgaaggaagaatgttctattaggaggggagcgagctgggccccagggctgagcagagtgccccccacagtcctgcgcttcttcctggagtaccagtggtttgtggactttgctgtgtactcgggcggcgtgtacctcttcacagaggcctactactacatgctgggaccagccaaggagactaacattgctgtgttctggtgcctgctcacggtgaccttctccatcaagatgttcctgacagtgacacggctgtacttcagcgccgaggaggggggtgagcgctctgtctgcctcacctttgccttcctcttcctgctgctggccatgctggtgcaagtggtgcgggaggagaccctcgagctgggcctggagcctggtctggccagcatgacccagaacttagagccacttctgaagaagcagggctgggactgggcgcttcctgtggccaagctggctatccgcgtgggactggcagtggtgggctctgtgctgggtgccttcctcaccttcccaggcctgcggctggcccagacccaccgggacgcactgaccatgtcggaggacagacccatgctgcagttcctcctgcacaccagcttcctgtctcccctgttcatcctgtggctctggacaaagcccattgcacgggacttcctgcaccagccgccgtttggggagacgcgtttctccctgctgtccgattctgccttcgactctgggcgcctctggttgctggtggtgctgtgcctgctgcggctggcggtgacccggccccacctgcaggcctacctgtgcctggccaaggcccgggtggagcagctgcgaagggaggctggccgcatcgaagcccgtgaaatccagcagagggtggtccgagtctactgctatgtgaccgtggtgagcttgcagtacctgacgccgctcatcctcaccctcaactgcacacttctgctcaagacgctgggaggctattcctggggcctgggcccagctcctctactatcccccgacccatcctcagccagcgctgcccccatcggctctggggaggacgaagtccagcagactgcagcgcggattgccggggctctgggtggcctgcttactcccctcttcctccgtggcgtcctggcctacctcatctggtggacggctgcctgccagctgctcgccagccttttcggcctctacttccaccagcacttggcaggctcctagctgcctgcagaccctcctggggccctgaggtctgttcctggggcagcgggacactagcctgccccctctgtttgcgcccccgtgtccccagctgcaaggtggggccggactccccggcgttcccttcaccacagtgcctgacccgcggccccccttggacgccgagtttctgcctcagaactgtctctcctgggcccagcagcatgagggtcccgaggccattgtctccgaagcgtatgtgccaggtttgagtggcaagggtgatgctggctgctcttctgaacaaataaaggagcatgccgatttttacaaac

SEQ ID NO: 10851 - protein, 354 aa, Homo sapiens
MLGPAKETNIAVFWCLLTVTFSIKMFLTVTRLYFSAEEGGERSVCLTFAFLFLLLAMLVQVVREETLELGLEPGLASMTQNLEPLLKKQGWDWALPVAKLAIRVGLAVVGSVLGAFLTFPGLRLAQTHRDALTMSEDRPMLQFLLHTSFLSPLFILWLWTKPIARDFLHQPPFGETRFSLLSDSAFDSGRLWLLVVLCLLRLAVTRPHLQAYLCLAKARVEQLRREAGRIEAREIQQRVVRVYCYVTVVSLQYLTPLILTLNCTLLLKTLGGYSWGLGPAPLLSPDPSSASAAPIGSGEDEVQQTAARIAGALGGLLTPLFLRGVLAYLIWWTAACQLLASLFGLYFHQHLAGS

SEQ ID NO: 10852 - DNA, 1716 bp, Homo sapiens
ggccggtgggtgagtgcaccgcgttctcgcacgcgtcatggcggtcctcggagtacagctggtggtgaccctgctcactgccaccctcatgcacaggctggcgccacactgctccttcgcgcgctggctgctctgtaacggcagtttgttccgatacaagcacccgtctgaggaggagcttcgggccctggcggggaagccgaggcccagaggcaggaaagagcggtgggccaatggccttagtgaggagaagccactgtctgtgccccgagatgccccgttccagctggagacctgccccctcacgaccgtggatgccctggaggcctactactacatgctgggaccagccaaggagactaacattgctgtgttctggtgcctgctcacggtgaccttctccatcaagatgttcctgacagtgacacggctgtacttcagcgccgaggaggggggtgagcgctctgtctgcctcacctttgccttcctcttcctgctgctggccatgctggtgcaagtggtgcgggaggagaccctcgagctgggcctggagcctggtctggccagcatgacccagaacttagagccacttctgaagaagcagggctgggactgggcgcttcctgtggccaagctggctatccgcgtgggactggcagtggtgggctctgtgctgggtgccttcctcaccttcccaggcctgcggctggcccagacccaccgggacgcactgaccatgtcggaggacagacccatgctgcagttcctcctgcacaccagcttcctgtctcccctgttcatcctgtggctctggacaaagcccattgcacgggacttcctgcaccagccgccgtttggggagacgcgtttctccctgctgtccgattctgccttcgactctgggcgcctctggttgctggtggtgctgtgcctgctgcggctggcggtgacccggccccacctgcaggcctacctgtgcctggccaaggcccgggtggagcagctgcgaagggaggctggccgcatcgaagcccgtgaaatccagcagagggtggtccgagtctactgctatgtgaccgtggtgagcttgcagtacctgacgccgctcatcctcaccctcaactgcacacttctgctcaagacgctgggaggctattcctggggcctgggcccagctcctctactatcccccgacccatcctcagccagcgctgcccccatcggctctggggaggacgaagtccagcagactgcagcgcggattgccggggctctgggtggcctgcttactcccctcttcctccgtggcgtcctggcctacctcatctggtggacggctgcctgccagctgctcgccagccttttcggcctctacttccaccagcacttggcaggctcctagctgcctgcagaccctcctggggccctgaggtctgttcctggggcagcgggacactagcctgccccctctgtttgcgcccccgtgtccccagctgcaaggtggggccggactccccggcgttcccttcaccacagtgcctgacccgcggccccccttggacgccgagtttctgcctcagaactgtctctcctgggcccagcagcatgagggtcccgaggccattgtctccgaagcgtatgtgccaggtttgagtggcaagggtgatgctggctgctcttctgaacaaataaaggagcatgccgatttttacaaac

SEQ ID NO: 10853 - protein, 454 aa, Homo sapiens
MAVLGVQLVVTLLTATLMHRLAPHCSFARWLLCNGSLFRYKHPSEEELRALAGKPRPRGRKERWANGLSEEKPLSVPRDAPFQLETCPLTTVDALEAYYYMLGPAKETNIAVFWCLLTVTFSIKMFLTVTRLYFSAEEGGERSVCLTFAFLFLLLAMLVQVVREETLELGLEPGLASMTQNLEPLLKKQGWDWALPVAKLAIRVGLAVVGSVLGAFLTFPGLRLAQTHRDALTMSEDRPMLQFLLHTSFLSPLFILWLWTKPIARDFLHQPPFGETRFSLLSDSAFDSGRLWLLVVLCLLRLAVTRPHLQAYLCLAKARVEQLRREAGRIEAREIQQRVVRVYCYVTVVSLQYLTPLILTLNCTLLLKTLGGYSWGLGPAPLLSPDPSSASAAPIGSGEDEVQQTAARIAGALGGLLTPLFLRGVLAYLIWWTAACQLLASLFGLYFHQHLAGS

SEQ ID NO: 10854 - DNA, 988 bp, Homo sapiens
aggccggtgggtgagtgcaccgcgttctcgcacgcgtcatggcggtcctcggagtacagctggtggtgaccctgctcactgccaccctcatgcacaggctggcgccacactgctccttcgcgcgctggctgctctgtaacggcagtttgttccgatacaagcacccgtctgaggaggagcttcgggccctggcggggaagccgaggcccagaggcaggaaagagcggtgggccaatggccttagtgaggagaagccactgtctgtgccccgagatgccccgttccagctggagacctgccccctcacgaccgtggatgccctggtcctgcgcttcttcctggagtaccagtggtttgtggactttgctgtgtactcgggcggcgtgtacctcttcacagaggcctactactacatgctgggaggctattcctggggcctgggcccagctcctctactatcccccgacccatcctcagccagcgctgcccccatcggctctggggaggacgaagtccagcagactgcagcgcggattgccggggctctgggtggcctgcttactcccctcttcctccgtggcgtcctggcctacctcatctggtggacggctgcctgccagctgctcgccagccttttcggcctctacttccaccagcacttggcaggctcctagctgcctgcagaccctcctggggccctgaggtctgttcctggggcagcgggacactagcctgccccctctgtttgcgcccccgtgtccccagctgcaaggtggggccggactccccggcgttcccttcaccacagtgcctgacccgcggccccccttggacgccgagtttctgcctcagaactgtctctcctgggcccagcagcatgagggtcccgaggccattgtctccgaagcgtatgtgccaggtttgagtggcaagggtgatgctggctgctcttctgaacaaataaaggagcatgccgatttttacaaac

SEQ ID NO: 10855 - protein, 211 aa, Homo sapiens
MAVLGVQLVVTLLTATLMHRLAPHCSFARWLLCNGSLFRYKHPSEEELRALAGKPRPRGRKERWANGLSEEKPLSVPRDAPFQLETCPLTTVDALVLRFFLEYQWFVDFAVYSGGVYLFTEAYYYMLGGYSWGLGPAPLLSPDPSSASAAPIGSGEDEVQQTAARIAGALGGLLTPLFLRGVLAYLIWWTAACQLLASLFGLYFHQHLAGS

SEQ ID NO: 10856 - DNA, 1839 bp, Homo sapiens
gagtcgggctctaattggtcgagtttccgcagagtgcccggagccctaggccggtgggtgagtgcaccgcgttctcgcacgcgtcatggcggtcctcggagtacagctggtggtgaccctgctcactgccaccctcatgcacaggctggcgccacactgctccttcgcgcgctggctgctctgtaacggcagtttgttccgatacaagcacccgtctgaggaggagcttcgggccctggcggggaagccgaggcccagaggcaggaaagagcggtgggccaatggccttagtgaggagaagccactgtctgtgccccgagatgccccgttccagctggagacctgccccctcacgaccgtggatgccctggtcctgcgcttcttcctggagtaccagtggtttgtggactttgctgtgtactcgggcggcgtgtacctcttcacagaggcctactactacatgctgggaccagccaaggagactaacattgctgtgttctggtgcctgctcacggtgaccttctccatcaagatgttcctgacagtgacacggctgtacttcagcgccgaggaggggggtgagcgctctgtctgcctcacctttgccttcctcttcctgctgctggccatgctggtgcaagtggtgcgggaggagaccctcgagctgggcctggagcctggtctggccagcatgacccagaacttagagccacttctgaagaagcagggctgggactgggcgcttcctgtggccaagctggctatccgcgtgggactggcagtggtgggctctgtgctgggtgccttcctcaccttcccaggcctgcggctggcccagacccaccgggacgcactgaccatgtcggaggacagacccatgctgcagttcctcctgcacaccagcttcctgtctcccctgttcatcctgtggctctggacaaagcccattgcacgggacttcctgcaccagccgccgtttggggagacgcgtttctccctgctgtccgattctgccttcgactctgggcgcctctggttgctggtggtgctgtgcctgctgcggctggcggtgacccggccccacctgcaggcctacctgtgcctggccaaggcccgggtggagcagctgcgaagggaggctggccgcatcgaagcccgtgaaatccagcagagggtggtccgagtctactgctatgtgaccgtggtgagcttgcagtacctgacgccgctcatcctcaccctcaactgcacacttctgctcaagacgctgggaggctattcctggggcctgggcccagctcctctactatcccccgacccatcctcagccagcgctgcccccatcggctctggggaggacgaagtccagcagactgcagcgcggattgccggggctctgggtggcctgcttactcccctcttcctccgtggcgtcctggcctacctcatctggtggacggctgcctgccagctgctcgccagccttttcggcctctacttccaccagcacttggcaggctcctagctgcctgcagaccctcctggggccctgaggtctgttcctggggcagcgggacactagcctgccccctctgtttgcgcccccgtgtccccagctgcaaggtggggccggactccccggcgttcccttcaccacagtgcctgacccgcggccccccttggacgccgagtttctgcctcagaactgtctctcctgggcccagcagcatgagggtcccgaggccattgtctccgaagcgtatgtgccaggtttgagtggcaagggtgatgctggctgctcttctgaacaaataaaggagcatgccgatttttacaaac

SEQ ID NO: 10857 - protein, 479 aa, Homo sapiens; identical to SEQ ID NO: 1807

SEQ ID NO: 10858 - DNA, 729 bp, Homo sapiens
gagtcgggctctaattggtcgagtttccgcagagtgcccggagccctaggccggtgggtgagtgcaccgcgttctcgcacgcgtcatggcggtcctcggagtacagctggtggtgaccctgctcactgccaccctcatgcacaggctggcgccacactgctccttcgcgcgctggctgctctgtaacggcagtttgttccgatacaagcacccgtctgaggaggagcttcgggccctggcggggaagccgaggcccagaggcaggaaagagcggtgggccaatggccttagtgaggagaagccactgtctgtgccccgagatgccccgttccagctggagacctgccccctcacgaccgtggatgccctggtcctgcgcttcttcctggagtaccagtggtttgtggactttgctgtgtactcgggcggcgtgtacctcttcacagaggcctactactacatgctgggaccagccaaggagactaacattgctgtgttctggtgcctgctcacggtgaccttctccatcaagatgttcctgacagtgacacggctgtacttcagcgccgaggaggggggtgagcgctctgtctgcctcacctttgccttcctcttcctgctgctggccatgctggtgcaagtggtgcgggaggagaccctcgagctgggcctggagcctggtgatctgtcttaactccctggctgctttgtaatttttttgtttttggt

SEQ ID NO: 10859 - protein, 202 aa, Homo sapiens
MAVLGVQLVVTLLTATLMHRLAPHCSFARWLLCNGSLFRYKHPSEEELRALAGKPRPRGRKERWANGLSEEKPLSVPRDAPFQLETCPLTTVDALVLRFFLEYQWFVDFAVYSGGVYLFTEAYYYMLGPAKETNIAVFWCLLTVTFSIKMFLTVTRLYFSAEEGGERSVCLTFAFLFLLLAMLVQVVREETLELGLEPGDLS

SEQ ID NO: 10860 - DNA, 482 bp, Homo sapiens
agccctaggccggtgggtgagtgcaccgcgttctcgcacgcgtcatggcggtcctcggagtacagctggtggtgaccctgctcactgccaccctcatgcacaggctggcgccacactgctccttcgcgcgctggctgctctgtaacggcagtttgttccgatacaagcacccgtctgaggaggagcttcgggccctggcggggaagccgaggcccagaggcaggaaagagcggtgagtgacctgggccccagccccagccttgggagggtggctcctccccaggaacggcctcacccctgctcagggggctctgggctcagggacacaggaccggcccacccatacttccaggcgctgatctgggcacaggtgaaccgggagaccctagtccaaggagatggtcactgtcaagttagcatctgtttcctggcagtttgctctagccagtcctgtgggtgggtggggggatccccatatccca

SEQ ID NO: 10861 - protein, 63 aa, Homo sapiens
MAVLGVQLVVTLLTATLMHRLAPHCSFARWLLCNGSLFRYKHPSEEELRALAGKPRPRGRKER

SEQ ID NO: 10862 - DNA, 566 bp, Homo sapiens
atggcagacagcgtggaccacatagacatttacgagatgtgggtgaagagttaaaccaggaagctgaatatcgtgggtatggccagatagatttgtatgactgtgtcatatctccatctgcaaataatggagatgccacagaagactgggattacatggatactctcccaccaactgttggtgatgatatgggtaaaggagtggcacctaatgttgtctatacacatactggaaagagaattgcattatatgttggaaatctaacatggtggacaacagatgaagacttaactgaagcagttcattctttgggagtaaatgatattttggagataattttttttttcttgccccctctcaacaggaaaacccaagtgctgttggggagattggctgatgaccactctaactgcttcctgctgaattggggtgtagtaggggtcttgcagttgagatttccttgagaggagtgccttcgatgtcatcaactttggactgtatctggggctccatttgaagaaccatttgtagctttacagcttcgattctggaggagacaaacttaa

SEQ ID NO: 10863 - protein, 102 aa, Homo sapiens
MDTLPPTVGDDMGKGVAPNVVYTHTGKRIALYVGNLTWWTTDEDLTEAVHSLGVNDILEIIFFFLPPLNRKTQVLLGRLADDHSNCFLLNWGVVGVLQLRFP

SEQ ID NO: 10864 - DNA, 3449 bp, Homo sapiens
ttatatgttctcattttgcccaagacctttgggcagagcaggacatgaaagattcttttcaagaagcgattctgaaaaaatatggaaaatgtggacatgacaatttacagttacaaaaaggctataaaagtgtggatgagtgtaaggtacacaaagaagataacaaactaaacctgtgtttgataactaccaagagcaatatatttcaatgtgatccatatgaaaaagtctttcatacattttcaaattgaaatagacataagataagacatactagaaagaaacctttcaaatgtaaaaaatgtgaaaaatcattttgcatgcttttacacctaactcaacataaaagatttcatattacagagaattcctaccaatgtgaagattgtggcaaaaccttcaactgcttctcaattcttactgaacacaggagaattcatactggagagaaatcctacaaatgtgaagaatgtgagaaagaatttaaacggtcctcacaccttactacacataagataattcatactggagagaaaccgtacagatgtgaagaatgtgggaaagcctttaaccggtgttcacacctcactacacatagaagaattcatattggagagaaaccctacaaatgtgaagaatgtggcaaagcttttcaccaatcctcaaccctaactgcccataagataactcatgctggagaggagccctacaaatgtgaagaatgtggcaaagcttttgcaagattctcataccttaagaaccataagataagtcatactggagataaattctacaaatgtgaagaatgtggcaaagtctttaaccactcctcaactcctactacacataagagaattcatactggagagaaaccatacaaatgtgaaaaatgtggcaaagcctttaactagtcctcaactcttactaaacataaaaaaattcatgctagagagaacccctgttagtgtgaagaatatggcaaagcctttaataagttctcaattcttaacagatataagataattcatactagagataaattctataaaccagaaagatgtgacagtgcttttgaaaacacctcaaacttttctaaacataaaagaaatcatagtgttgagaaatcctagaaatgtgaagaatgtgataaagttttaagtggttgtcacacttgattgtaggtaagataagttatactggagaaaacttctacatgtgtgaacagtgtgacaaaacttttaaccagtgctcacaccttacttcacaggaaagcatttatacttgagaaatattgtataaatataaagactgtgaaaaagccattaatacatgctcacatcttactcaacatcagagagttcatacttaataaaaacattataagtgcaactactgtcaaaatatctttaagaaaatggaagcctctaaagtaaagaagattattttgaagaagaacattgtagtagggttgtaatatgtttacttgtgtcacagatcttattgtacacattttgtattagaggaaacctcagaagcaattgctcaaactttgtttaatatcagggaatttatattgaaaaaaaaaccctgcaaatgtaataaatttggaaaaatactttttcaaaaactacagcttagaaaacaccacagagttcatactaaaacatatttttgcagatgcagtaaaaatttaaagaaattttaatacaaaattaagtctatgtaaatatcagagaatttacagtagaaatatataaggcactgacacttcagatattatactaaatcacagtgctcatgatagaaaataatctaaaactaaagttgatagaaaaattattcatatataagtttaaaagaattttttgcagaattataattacattcaaagtatgcttaacttttggaaaacatagattttttgaaaagtgaataatgatgtaattcaattctcaaattatttcctgctgtttcttcattcctatttacatgtgagagcatgtgatgaattgttgctgcatccaagatatgagagattcttttttattaggtgagcattatttataaactttgttatgaaaatgtaaggacattaaaatgtaagatgcatgatgaaaatctaagtgaagagacctttgtggttaacttataatattgagtaatgtgtgagttaagtgttcagtcatattcttctgtattatgagaagaaaacatttttaatttcataagtaaattaaaatttagtatattgtactaattatacttttatataaaatgcagtatattttgaaaatttcagattatatgtgatgttaatatattcaacatctttaacattttaaatactgttgtgcattcagtgaagtgttatgtaacaaacattaattcccccttactcaaggttgtacataaaatatggtaataatatactatttgttaacataatggattaacttctctagtacttttgccagtggctttgactgcaaataagttaaacaatattatttctttaaattaaatttttgtttctattttatttaattttttttgagagggagtcttgctctgtcacccagtctggagtgcagtggcacaatctcagctcactgcaaccttgcctcctgggttcaagcaattcttctgcctcgatctcccaagtagctgggattacaggcacccgccaccacacccagctaatttttgtattttagtagagacagggtttcactatgcaggtcaagctggtctcaaactcctgacctcaaatgatccacacgtctcggcctcccaaagtgctgggattacaggtgtgagtcaccatgcccagccaaatttttattttatttaaatttatttttcttaattatttggggtacataatatgagtatatattcatgcaatatatggcatattttgatacaagaatacactatataataatcacaccagggtaaatgaggtatccatcacctctagtatttatcttttttttgttgttgagacagagtcttgctgtgctgcccaggctagagggtagtggtgcaagcttggctcactgcaacctccacctcctgggttcaaatgattcttctgcctcagcctcctgagtagctgggtttacaggcatgcaccaccatgcccagctaatttttgtgtttttagtagagacagggtttcaccttgttggtcaggctggtctcaaactcctgaactcatgatctgcctgccttggcctcccaaagtgctgggattacaggtgtgagccaccgtgcccggcttagcatttatcctttgtataacaaacaatccaattgtatgcttttagttatttaaagatgtacatttaaattgttattgattacagtgtaatttttatggtcaaaataaaagttatgtagaaatatgaataaaatccatacatttctgagtcctgaataaatatttt

SEQ ID NO: 10865 - protein, 196 aa, Homo sapiens [sequence omitted]

SEQ ID NO: 10866 - DNA, 5477 bp, Homo sapiens
cagacttttacttctaagtggctctttgcattgttctcaccaggggcacttcacacacttaactcatttataatttttttcagatgtaatttggttggtttttttttttttacatttatatgtctataaaggaatgagggcctttggtattttcctatgccatcttatttatgtagtttgtatattagaggttagatttgtaaactatctgtgtctagtaagtaaagtaatttgttatttttatttctttcagttatatgttctcattttccccaagacctttgggcagagcaggacattaaagattcttttcaagaagcgattctgaaaaaatatggaaaatatggacatgacaatttacagttacaaaaaggctgtaaaagtgtggatgagtgtaaagtgcacaaagaacatgataacaaattaaaccagtgtttgataactacccagagcaacatatttcaatgtgatccatctgcaaaagtctttcatacattttcaaattcaaacagacataagataagacatactagaaagaaacctttcaaatgtaaaaaatgtgaaaaatcattttgcatgcttttacacctaactcaacataaaagatttcatattacagagaattcctaccaatgtaaagattgtggcaaagccttcaactggttctcaacccttactacacacaggagaattcatactggagagaaaccctacaaatgtgaagaatgtgggaaagcatttaaccggtcctcacaccttactacacataagataattcatactggagagaaaccatacagatgtgaagaatgtgggaaagcttttaaccggtcttcacaccttactacacataaaagaattcatactggagtgaaaccctacaaatgtacagaatgtggcaaagcttttaaccggtcctcacaccttactacacacaggataattcatactggagagaaaccctacaaatgtgaagaatgtggcaaagcctttaaccagtcctcaacccttactacacataagataactcatgctggagagaaaccttacaaatgtgaagaatgtggcaaagctttttaccgattctcataccttactaaacataagacaagtcatactggagagaaattctacaaatgtgaagaatgcggcaaaggctttaactggtcctcagccctcactaaacataagagaattcatactggagagaaaccctacaaatgtgaagaatgtggcaaagcttttaatgagtcctcaaaccttactacccataagatgattcatactggagagaaaccctacaaatgtgacgaatgtggcaaagcctttaaccggtcctcacaactaactgcacataagatgattcatactggagagaaaccctacaaatgtgaggaatgtggcaaagcttttaaccgatcctcaacccttactaaacataagataactcatactggagagaaatcttacaaatgggaagaatgtggtaaagactttaaccagtccctaagccttattaaacaaaataactcatactggagagaaaccctacaaatgtgaaaaatgtggcaaagccttttaccagtcctcaactcttactaaacataaaaaaattcatactggagggaactcctgtgactgtgaagaatatggcaaagcctttaataaattctcaattcctaacagacataagataattcatactagagagaaattctacaaaccagaaagatgtgacagtgctttgaaaacacctcaaacttttcaaaacataaatcatagtgttgagaaatcctagaaatgtgaagaatgtgataaagttttaaatggttgtcacacttgattgtaggtaaggtaagttatactggagaaaacttctacatgtgtgaacagtgtgacaaaacttttaactaatgctcacaccttcacaggaaagcatttatacttgagaaatattgtacaaatataaagactgtgaaaaagccattaatacatgctcacatcttactcaacatcagagagttcatactcaataaaaacataagtgcaactactgtcaaaatatctttaagaaaatataagcttttaaagtgaagagtattttgaagaagaacattgtagtagaattgtaatatgtttacttgtatcacagatcttactgtacacgttttgtattagaggaaacctctgaagcagttgctcaaactttgttcaatatcagggaatttatattgaaaaaaactgtgcgaatgtaataaagttggaaaaatactttttcaaaaactacagcttagaaaacaccagagagttcatactaaaacatatttttgcagatacaggaaaaattttttaaaaattttaatcattaagtctgtaaatatcagagaatttacagtagaaatatgtaaggcactgatgcttcaggtattttactaaatcagagtgctgagtatagaaaataatctaaaactaaaattggtaaaatatttgtatataactttaaaagtagaaattttttgcagttattgcattcaaagtatgcttaactttttgaaaaaattagattttttgaaaagtgagtaataatgtaattcaactcttaaattatttcctgccttttcttcactcctatttacatgtgaaagcatgtgatcaattgttgctgcatcagatatgagagattcttttttattaggtgagcattatttataaactttgctatgaaaaagacattaaaatatgagatgtatgatgaaaatctaagtgaagagacttttatggttaacttataatattaagcaatgtgtgcgttaggcattcagagtaatattctgcattatgagaaaacttaatttcatttataagtaaattaaaattagtatattttactaatacttttatataaaatgcagtatattttttaaatttcagattatatgtgatgttaatatattcaacctttttaacatgttaaatactattgtgcattcagtgaagtgttattatgccacagacattaacctattccaccttactcaagggtgtacgtaaaacatggtaacagtatactatttggtaacataatggattaacatctctagtaatctcttttgctagtggctttgactgcaaataagttaaagaatattatttctgtaggttaaatttttgtttttattttattttatttttgagaggtagtcttgctctgtcacccaggctggagtgcagtggcacgatctcggctcactgtaacctccacctcctgggttcacgcaattctcctgcctcagcctcctaagtagctgggattacaggcacccaccaccatgcccagctaatttttgtattttagtagagacagggtttcataatgtaagtcaagctggtctcgaactcctgaccttaaatgatttgcctgcctcggcttcccaaagttctgggattacaggcatgagccaccgtgcccagccaaatgtttattttatttaaatttatttttcttaattatttggggtacataatatgagtatatattcatgcaatatatggcatattttgatacaagaatacagtatataataatcacatcagggtaaatgaggtatccatcacctctagtatttatcctttgtattacaagcaacccagttttatacttttagttattttaaaatgtaaaattaaattgttattgattacagtgttatttttatggtcataataaaagttatgtagaagtataataaaatccctacatttctgaggcctgaataagtatttttaaagttttctaatatttattttttgagcatgtttcctgtctgcctgcaaacacatgcagacatttagttttgatttacatatagttaaatatatgttagtctaaagataaaccttaagtgtaagaaaattatagagtgagtttgtgtgtatgaatttgtacctgttttccgaagaaaaaagcaatactgaacaaaacaaatcattttaacaagatgactactagaaaactaaaagcctcaaaaatgctaaaagaaaatgtattctctgctttgtattgaatttattactgtacattctgtggcttatagttctgaatctccccatgaaaattctgtttatacttgcctggtactcatgatagacccctaattattttgtatcttttttcatataaatattttacagattatgaagtattcattatgtgagctggtctgtgattataagaataatttttacaaaatttagtgcatacaaaatttttaaatgtaattccacaattagtgtattaagttacattttatttagttagaacacttcattttgtttttagttggagaactctatagccctttagttatttttcttttcactttttatagttgacataagtaaatttatttattgagtcaatttgttcaggtaagtactagggaagctttataagtcgtgaggatgtttttatatttaaatgtagcaaacatacatgacagttcttgctgtgtaacagatgctccatagtaagccataagtattcctgctaaagttagcttgtaacttcagttcagagatggaaaacatcagtggtgaagaaataaaattgattcttcatgtggagaggacatagtttccaggctgcaatgctgaatcttgctgaatttaaagagaagttctgcatcttttatttcttaattatcttcagatttctctgtatttattatgtgtatccccagctatgtatgcagcacagcccatctcctttttctgtgttatggcttcagttttctcactgttgtcttaatgccatttcatttcacatggtactttgtaaattttgacgagaaagttggttgtttttttttttttttttttttttgagacagagtctcactcttgttgcccaagctggagtgcagtggtgcaatgtgggctcactgcaacctctgccttccaggttcaagcaattatcctgcctcagcctcccaagtagctgggattacaggcacctgccaccacatctggctgaatttttttttttttaattttttgtagagacgaagtttcaccatgttggccaggctggtttcaaactcctgacctcatatgatccacctgcctcagcctcccaaagtgcttggattacaggcataagccactgcacccagctgaaagttggtattttttaatgcactgaataattgtttttaactggagagtttggttatcaatataactttcggattagttaagataaaagcatacattgtccacaggtgagaagattaaatcagaatagttgttctttgttaaaaaaaaaattagattcttaaagtgtggcaaacataaaatttgcaagaaaatgtagaaattaaatttttaagagttaatggtaagtgaacaattttaaatttattttttattatgtaacatacttttattaaaatatatacttatataataaaagtataaca

SEQ ID NO: 10867 - protein, 327 aa, Homo sapiens
MLLHLTQHKRFHITENSYQCKDCGKAFNWFSTLTTHRRIHTGEKPYKCEECGKAFNRSSHLTTHKIIHTGEKPYRCEECGKAFNRSSHLTTHKRIHTGVKPYKCTECGKAFNRSSHLTTHRIIHTGEKPYKCEECGKAFNQSSTLTTHKITHAGEKPYKCEECGKAFYRFSYLTKHKTSHTGEKFYKCEECGKGFNWSSALTKHKRIHTGEKPYKCEECGKAFNESSNLTTHKMIHTGEKPYKCDECGKAFNRSSQLTAHKMIHTGEKPYKCEECGKAFNRSSTLTKHKITHTGEKSYKWEECGKDFNQSLSLIKQNNSYWRETLQM

SEQ ID NO: 10868 - DNA, 2281 bp, Homo sapiens
agcagccgcccctcccccaacaatggcgcagcccaggctgcacccgcgcaagcaggtgcctcctcgctggcagttcacccgcccaccccgcgacccgccccgggcagggctccggcctccctgcacgctcgccgcgctgccgctgcctccgcctccccaagctgactcatctggagataattatgtgtttttctctttcgttctctttatgtgatggattacatttattgatttacatatgttgaaccagccttgcatcccaggggccattgacgtttagggatgtggccatagaattctctctggaggagtggcaatgcctggacagtgctcagcagggtttgtataggaaagtgatgttagagaactacagaaacctggtcttcttgggtattgctctcactaagccagacctgatcacctgtctggagcaaggaaaagagccctggaatataaagagacatgagatggtagccaaacccccagttatatgttctcattttccccaagacctttgggcagagcaggacattaaagattcttttcaagaagcgattctgaaaaaatatggaaaatatggacatgacaatttacagttacaaaaaggctgtaaaagtgtggatgagtgtaaagtgcacaaagaacatgataacaaattaaaccagtgtttgataactacccagagcaacatatttcaatgtgatccatctgcaaaagtctttcatacattttcaaattcaaacagacataagataagacatactagaaagaaacctttcaaatgtaaaaaatgtgaaaaatcattttgcatgcttttacacctaactcaacataaaagatttcatattacagagaattcctaccaatgtaaagattgtggcaaagccttcaactggttctcaacccttactacacacaggagaattcatactggagagaaaccctacaaatgtgaagaatgtgggaaagcatttaaccggtcctcacaccttactacacataagataattcatactggagagaaaccatacagatgtgaagaatgtgggaaagcttttaaccggtcttcacaccttactacacataaaagaattcatactggagtgaaaccctacaaatgtacagaatgtggcaaagcttttaaccggtcctcacaccttactacacacaggataattcatactggagagaaaccctacaaatgtgaagaatgtggcaaagcctttaaccagtcctcaacccttactacacataagataactcatgctggagagaaaccttacaaatgtgaagaatgtggcaaagctttttaccgattctcataccttactaaacataagacaagtcatactggagagaaattctacaaatgtgaagaatgcggcaaaggctttaactggtcctcagccctcactaaacataagagaattcatactggagagaaaccctacaaatgtgaagaatgtggcaaagcttttaatgagtcctcaaaccttactacccataagatgattcatactggagagaaaccctacaaatgtgacgaatgtggcaaagcctttaaccggtcctcacaactaactgcacataagatgattcatactggagagaaaccctacaaatgtgaggaatgtggcaaagcttttaaccgatcctcaacccttactaaacataagataactcatactggagagaaatcttacaaatgggaagaatgtggtaaagactttaaccagtccctaagccttattaaacaaaataactcatactggagagaaaccctacaaatgtgaaaaatgtggcaaagccttttaccagtcctcaactcttactaaacataaaaaaattcatactggagggaactcctgtgactgtgaagaatatggcaaagcctttaataaattctcaattcctaacagacataagataattcatactagagagaaattctacaaaccagaaagatgtgacagtgctttgaaaacacctcaaacttttcaaaacataaatcatagtgttgagaaatcctagaaatgtgaagaatgtgataaagttttaaatggttgtcacacttgattgtaggtaaggtaagttatactggagaaaacttctacatgtgtgaacagtgtgacaaaacttttaactaatgctcacaccttcacaggaaagcatttatacttgagaaatattgtacaaatataaagactgtgaaaaagccattaatacatgctcacatcttactcaacatcagagagttcatactcaataaaaacataagtgc

SEQ ID NO: 10869 - protein, 478 aa, Homo sapiens
MLENYRNLVFLGIALTKPDLITCLEQGKEPWNIKRHEMVAKPPVICSHFPQDLWAEQDIKDSFQEAILKKYGKYGHDNLQLQKGCKSVDECKVHKEHDNKLNQCLITTQSNIFQCDPSAKVFHTFSNSNRHKIRHTRKKPFKCKKCEKSFCMLLHLTQHKRFHITENSYQCKDCGKAFNWFSTLTTHRRIHTGEKPYKCEECGKAFNRSSHLTTHKIIHTGEKPYRCEECGKAFNRSSHLTTHKRIHTGVKPYKCTECGKAFNRSSHLTTHRIIHTGEKPYKCEECGKAFNQSSTLTTHKITHAGEKPYKCEECGKAFYRFSYLTKHKTSHTGEKFYKCEECGKGFNWSSALTKHKRIHTGEKPYKCEECGKAFNESSNLTTHKMIHTGEKPYKCDECGKAFNRSSQLTAHKMIHTGEKPYKCEECGKAFNRSSTLTKHKITHTGEKSYKWEECGKDFNQSLSLIKQNNSYWRETLQM

SEQ ID NO: 10870 - DNA, 1352 bp, Homo sapiens
tgatgttagagaactacagaaacctggtcttcttggttatatgttctcattttccccaagacctttgggcagagcaggacattaaagattcttttcaagaagcgattctgaaaaaatatggaaaatatggacatgacaatttacagttacaaaaaggctgtaaaagtgtggatgagtgtaaagtgcacaaagaacatgataacaaattaaaccagtgtttgataactacccagagcaacatatttcaatgtgatccatctgcaaaagtctttcatacattttcaaattcaaacagacataagataagacatactagaaagaaacctttcaaatgtaaaaaatgtgaaaaatcattttgcatgcttttacacctaactcaacataaaagatttcatattacagagaattcctaccaatgtaaagattgtggcaaagccttcaactggttctcaacccttactacacacaggagaattcatactggagagaaaccctacaaatgtgaagaatgtgggaaagcatttaaccggtcctcacaccttactacacataagataattcatactggagagaaaccatacagatgtgaagaatgtgggaaagcttttaaccggtcttcacaccttactacacataaaagaattcatactggagtgaaaccctacaaatgtacagaatgtggcaaagcttttaaccggtcctcacaccttactacacacaggataattcatactggagagaaaccctacaaatgtgaagaatgtggcaaagcctttaaccagtcctcaacccttactacacataagataactcatgctggagagaaaccttacaaatgtgaagaatgtggcaaagctttttaccgattctcataccttactaaacataagacaagtcatactggagagaaattctacaaatgtgaagaatgcggcaaaggctttaactggtcctcagccctcactaaacataagagaattcatactggagagaaaccctacaaatgtgaagaatgtggcaaagcttttaatgagtcctcaaaccttactacccataagatgattcatactggagagaaaccctacaaatgtgacgaatgtggcaaagcctttaaccggtcctcacaactaactgcacataagatgattcatactggagagaaaccctacaaatgtgaggaatgtggcaaagcttttaaccgatcctcaacccttactaaacataagataactcatactggagagaaatcttacaaatgggaagaatgtggtaaagactttaaccagtccctaagccttattaaacaaaataactcatactggagagaaaccctacaaatgtgaaaaatgtgg

SEQ ID NO: 10871 - protein, 446 aa, Homo sapiens
MLENYRNLVFLVICSHFPQDLWAEQDIKDSFQEAILKKYGKYGHDNLQLQKGCKSVDECKVHKEHDNKLNQCLITTQSNIFQCDPSAKVFHTFSNSNRHKIRHTRKKPFKCKKCEKSFCMLLHLTQHKRFHITENSYQCKDCGKAFNWFSTLTTHRRIHTGEKPYKCEECGKAFNRSSHLTTHKIIHTGEKPYRCEECGKAFNRSSHLTTHKRIHTGVKPYKCTECGKAFNRSSHLTTHRIIHTGEKPYKCEECGKAFNQSSTLTTHKITHAGEKPYKCEECGKAFYRFSYLTKHKTSHTGEKFYKCEECGKGFNWSSALTKHKRIHTGEKPYKCEECGKAFNESSNLTTHKMIHTGEKPYKCDECGKAFNRSSQLTAHKMIHTGEKPYKCEECGKAFNRSSTLTKHKITHTGEKSYKWEECGKDFNQSLSLIKQNNSYWRETLQM

SEQ ID NO: 10872 - DNA, 1525 bp, Homo sapiens
gctctcacttctctgtgtcttctgctcctaggggcctagcctgtgtggccctctgacctgcagatattgggagatccacagctaagacgccaggaccccctagaagcctagaaatggatgacccgaggtatggaatgtgtcctctcaagggagcaagtggatgccctggggctgagaggagtcttctggtgcagtcttattttgaaaagttatatgttctcattttccccaagacctttgggcagagcaggacattaaagattcttttcaagaagcgattctgaaaaaatatggaaaatatggacatgacaatttacagttacaaaaaggctgtaaaagtgtggatgagtgtaaagtgcacaaagaacatgataacaaattaaaccagtgtttgataactacccagagcaacatatttcaatgtgatccatctgcaaaagtctttcatacattttcaaattcaaacagacataagataagacatactagaaagaaacctttcaaatgtaaaaaatgtgaaaaatcattttgcatgcttttacacctaactcaacataaaagatttcatattacagagaattcctaccaatgtaaagattgtggcaaagccttcaactggttctcaacccttactacacacaggagaattcatactggagagaaaccctacaaatgtgaagaatgtgggaaagcatttaaccggtcctcacaccttactacacataagataattcatactggagagaaaccatacagatgtgaagaatgtgggaaagcttttaaccggtcttcacaccttactacacataaaagaattcatactggagtgaaaccctacaaatgtacagaatgtggcaaagcttttaaccggtcctcacaccttactacacacaggataattcatactggagagaaaccctacaaatgtgaagaatgtggcaaagcctttaaccagtcctcaacccttactacacataagataactcatgctggagagaaaccttacaaatgtgaagaatgtggcaaagctttttaccgattctcataccttactaaacataagacaagtcatactggagagaaattctacaaatgtgaagaatgcggcaaaggctttaactggtcctcagccctcactaaacataagagaattcatactggagagaaaccctacaaatgtgaagaatgtggcaaagcttttaatgagtcctcaaaccttactacccataagatgattcatactggagagaaaccctacaaatgtgacgaatgtggcaaagcctttaaccggtcctcacaactaactgcacataagatgattcatactggagagaaaccctacaaatgtgaggaatgtggcaaagcttttaaccgatcctcaacccttactaaacataagataactcatactggagagaaatcttacaaatgggaagaatgtggtaaagactttaaccagtccctaagccttattaaacaaaataactcatactggagagaaaccctacaaatgtgaaaaatgtgg

SEQ ID NO: 10873 - protein, 56 aa, Homo sapiens
MDDPRYGMCPLKGASGCPGAERSLLVQSYFEKLYVLIFPKTFGQSRTLKILFKKRF

SEQ ID NO: 10874 - DNA, 1834 bp, Homo sapiens
aatcaggcatgcagctggagcggactggacggcttccgggtttggcggggtctttgtctctcgctgtagccggagctccaggttttgctctcacttctctgtgtcttctgctcctaggggcctagcctgtgtggccctctgacctgcagatattgggagatccacagctaagacgccaggaccccctagaagcctagaaatggatgacccgaggtatggaatgtgtcctctcaagggagcaagtggatgccctggggctgagaggagtcttctggtgcagtcttattttgaaaaggggccattgacgtttagggatgtggccatagaattctctctggaggagtggcaatgcctggacagtgctcagcagggtttgtataggaaagtgatgttagagaactacagaaacctggtcttcttgggtattgctctcactaagccagacctgatcacctgtctggagcaaggaaaagagccctggaatataaagagacatgagatggtagccaaacccccagttatatgttctcattttccccaagacctttgggcagagcaggacattaaagattcttttcaagaagcgattctgaaaaaatatggaaaatatggacatgacaatttacagttacaaaaaggctgtaaaagtgtggatgagtgtaaagtgcacaaagaacatgataacaaattaaaccagtgtttgataactacccagagcaacatatttcaatgtgatccatctgcaaaagtctttcatacattttcaaattcaaacagacataagataagacatactagaaagaaacctttcaaatgtaaaaaatgtgaaaaatcattttgcatgcttttacacctaactcaacataaaagatttcatattacagagaattcctaccaatgtaaagattgtggcaaagccttcaactggttctcaacccttactacacacaggagaattcatactggagagaaaccctacaaatgtgaagaatgtgggaaagcatttaaccggtcctcacaccttactacacataagataattcatactggagagaaaccatacagatgtgaagaatgtgggaaagcttttaaccggtcttcacaccttactacacataaaagaattcatactggagtgaaaccctacaaatgtacagaatgtggcaaagcttttaaccggtcctcacaccttactacacacaggataattcatactggagagaaaccctacaaatgtgaagaatgtggcaaagcctttaaccagtcctcaacccttactacacataagataactcatgctggagagaaaccttacaaatgtgaagaatgtggcaaagctttttaccgattctcataccttactaaacataagacaagtcatactggagagaaattctacaaatgtgaagaatgcggcaaaggctttaactggtcctcagccctcactaaacataagagaattcatactggagagaaaccctacaaatgtgaagaatgtggcaaagcttttaatgagtcctcaaaccttactacccataagatgattcatactggagagaaaccctacaaatgtgacgaatgtggcaaagcctttaaccggtcctcacaactaactgcacataagatgattcatactggagagaaaccctacaaatgtgaggaatgtggcaaagcttttaaccgatcctcaacccttactaaacataagataactcatactggagagaaatcttacaaatgggaagaatgtggtaaagactttaaccagtccctaagccttattaaacaaaataactcatactggagagaaaccctacaaatgtgaaaaatgtgg

SEQ ID NO: 10875 - protein, 541 aa, Homo sapiens
MDDPRYGMCPLKGASGCPGAERSLLVQSYFEKGPLTFRDVAIEFSLEEWQCLDSAQQGLYRKVMLENYRNLVFLGIALTKPDLITCLEQGKEPWNIKRHEMVAKPPVICSHFPQDLWAEQDIKDSFQEAILKKYGKYGHDNLQLQKGCKSVDECKVHKEHDNKLNQCLITTQSNIFQCDPSAKVFHTFSNSNRHKIRHTRKKPFKCKKCEKSFCMLLHLTQHKRFHITENSYQCKDCGKAFNWFSTLTTHRRIHTGEKPYKCEECGKAFNRSSHLTTHKIIHTGEKPYRCEECGKAFNRSSHLTTHKRIHTGVKPYKCTECGKAFNRSSHLTTHRIIHTGEKPYKCEECGKAFNQSSTLTTHKITHAGEKPYKCEECGKAFYRFSYLTKHKTSHTGEKFYKCEECGKGFNWSSALTKHKRIHTGEKPYKCEECGKAFNESSNLTTHKMIHTGEKPYKCDECGKAFNRSSQLTAHKMIHTGEKPYKCEECGKAFNRSSTLTKHKITHTGEKSYKWEECGKDFNQSLSLIKQNNSYWRETLQM

SEQ ID NO: 10876 - DNA, 585 bp, Homo sapiens
aggttttgctctcacttctctgtgtcttctgctcctaggggcctagcctgtgtggccctctgacctgcagatattgggagatccacagctaagacgccaggaccccctagaagcctagaaatggatgacccgaggtatggaatgtgtcctctcaagggagcaagtggatgccctggggctgagaggagtcttctggtgcagtcttattttgaaaaggggccattgacgtttagggatgtggccatagaattctctctggaggagtggcaatgcctggacagtgctcagcagggtttgtataggaaagtgatgttagagaactacagaaacctggtcttcttgggtattgctctcactaagccagacctgatcacctgtctggagcaaggaaaagagccctggaatataaagagacatgagatggtagccaaacccccagacggagtctcgctctgtcatcaagttggagtgcagtggcgcgatcttggttcactgcaacctccacctcctgggttcaagcaatcttcctgcctcagcctcctgagtagctgcgactacaggcacatgccaccacgccaagctaat

SEQ ID NO: 10877 - protein, 154 aa, Homo sapiens
MDDPRYGMCPLKGASGCPGAERSLLVQSYFEKGPLTFRDVAIEFSLEEWQCLDSAQQGLYRKVMLENYRNLVFLGIALTKPDLITCLEQGKEPWNIKRHEMVAKPPDGVSLCHQVGVQWRDLGSLQPPPPGFKQSSCLSLLSSCDYRHMPPRQA

SEQ ID NO: 10878 - DNA, 2699 bp, Homo sapiens
ggtgcagcctgggctgcgccattgttgggggaggggcggctgctgagggcggcgagtagggggctagagaaggcgccagccccggcccagaggagcagagacgccccatggggaacacgctgacctattgcgtgtccccccagtaccagcctcaagctgggccggtgcgtggtgccagagctgtactgcgcaaccgacatctacgaggcggcacccggggatgcggtggcggtagcgcccgcttctgtggagcctaccagttggatttcgcagcgggcgagggccaccacctgcagcacatcagcgaccacgagatgccctaagatttagctttggagtcaaacccttctgaccatccaagggcaagcacaagtttcctgagcaaatctcaaaccgatgtgcgagacaagaggaagagcaaccacttaaatcatctatctccagggcagcttactaaaaagtatagctcatgctcaacaatatttctaggtgacagaacagtcagccagcctaaccttagaaccacagtaaaatgtgaccttagaaatatattaccacataaagaacagagatgcaaacagatccctggatatttttgatgagagatcacatcccctcacacgagaaaaagttccacaggaatagtttaagcatgatcctgagcacaaatttatttacagatttgttcatactctttttagtgctgcacagctaacagctgaatgtgcaacagtaactctggtttacttagaaaggcttttaacttatgctgaaatcgacatttgccccactaactagaaaaggattgttctgggagccactcttcttgcctccaaggtttgggatgatcaggctgtatggaatgtggactactgccagatcctcaaggacattacagttgaggacatgaatgaaatggaaaggcatttttcggagcttcttcagtttaatattaatgttcctgctagtgtttatgccaaacactaccttgaccatcgctccttagcagatgaccacctgaattttctatttgctcctcttagcaaagaaagagcacagaacctagaggctatttctagattatgtgaagacaaagacttgtgtggagcagctgtaagaaggtctttcagcgctgatcaacttcattggtattcagcactctaaagccatcctctcttaaagggagaaatgaggggttataatgtcacgggaccttcatctacaaagactggagaaataccacctttcctgctcaaaaaccagcaaaattagtgttttcatcaaaaggaaagatctcaaattcaagagacgcacggacaacaaggatcatactccatagaaaagaatgggaccttgtcaatgcaacaaaacactcttctgtcctttttaatgtaaacagagtcaccaaaaccactccaaagtgaaggctcccatcccacacacagatatttgcttacaatgtgggccagtaactgaactatgttaggttttttaaacaatagtttaaatttttagactttaaagacattaaccatataacttttatgtttcttccagtttttctccccctgctcattttgctgcatatgcctttagaatcaatgcagtattgcccttaaaacaagggactctaactaaagccacttaggagcagactgcagcattgttaggtattgaagggttcttcctccctactgttaccattaaagctgctagtcattggcaatcattttaaaccaaaaagctgatggataacatttgtcattcatattctttgcaagcattactttagcattttagcatgtctgcggtcataaacaaaggaagtatcagttatgatatctacttctattggggtccatgttgcatttcttgtgaactataaatggtacttctcattttctgataatttttatcttattaaataaatgtattaaaagatattttcataatgccaatgaacatggtggttcagtgacagtgaaaaaaaagtaaagcagttttaagctttaatatagtttgggccctccaaggtactgcagcaggagtataaatgctataaacctttgaaaaacatcatttgagagttttgttttttttctttaagagatgggggtcttgctgtgttgtccaggctggagtatggtggctgttcaccagtgcagtcatggtgcactgcagcctagaacttcctggcttcgcgccatcctctagcctcggccacacgagtggctgggactgcaggcgcaccctgcatttgtctcctgaatgttaggcttttgattttttgtttcagtcactcttgaagtcactcttgactgaagcaaaaaattaaaagctttatattcaaaattctcaaaatgaagctgggtgtggtggtgcacacctgaggttccagctacttgggtggctggaggattgcttggggtcaggtattggaggctgcagtgtatcgtgatggtgcctatagaaatagctactgcacttcaacctggacaacatatcgggaccccatctcttagaaaaatgcaaaattaaatgcaaaagaaatgcaccgggcatagtgattcatgcctataatctcagtactttgggaggctgaggtgggaggattacttgagcgcagcagttcaagaccagtctagtcaacacagtgagcccctgtctgtaaaaaataataataaataaaaataattagc

SEQ ID NO: 10879 - protein, 85 aa, Homo sapiens
MNEMERHFSELLQFNINVPASVYAKHYLDHRSLADDHLNFLFAPLSKERAQNLEAISRLCEDKDLCGAAVRRSFSADQLHWYSAL

SEQ ID NO: 10880 - DNA, 1235 bp, Homo sapiens
attaatatgtgctcatatcttactcaacatcagagagtctgtacttaataaaaccattatagatgcaactagtgtcaaaagatctttcagaaaataaaagcctttaaagtgaagaagataattcattctgaagacaaacattacaaatattaagagggttgtagtaccattacttgcatcacagatcttattgtacacattttgtactaaagaaaaccctgaagcagttgctcaaatactgttcaacatcagaaaatttatattggaaaaaacccctggaaaatgtaataaatttgtaaaaacagttttgaaaaactacagcttataaaacatgagggtctataatgcttggttgatagtacaaagtttattcaacatcagggaatttatattggagaaaaaccctacaaatgtaatcagtttggaaaaacatttttaaaaaaaccacagcatagaaaacaccacagggttcatactaaaatatgtttttgcagatgcagtaaaaatgaaaaaaatttaatccgaaattaagtttatgtaaatatctgagaattcacagtagaaatatctaaggcgcggacacttcagacattacactaaatcagtgctaagtacagaaaacaacacaaaataaaacttggtggataaattatttgtatataacattaaaagaagtagaagattttcagttataattacaattaaagtatacttttatcttgaaaaaattactgatttttaaattagtgaataatgatgtaattaaactctcaaataactttatgctcttttttcattcctgctatattcacatgtgaaagcatgtgaccaattgttgctgcaccaaagatatgagagattcttttattaggtgggcattatttaaaacattttttatggaacagtaaggatattaaagtgtaagatgcagccaggcatggtggctcatgcctataatcccaagttctgggaccacaggcatgagccactgcacctggccaaatgtgtatatatttatgcaatatataacatgttttgatacaggcatataatatgtattagtcacatcaggataaagtatctattaccttcagcatttatcctttgtattacaagccaattctacacttcattattttaatgtacaattaaattgttattgactacagggtcattttaattataaaaattatatagaagtataaataaagtccatacattcctgagtcatgaat

SEQ ID NO: 10881 - protein, 37 aa, Homo sapiens [sequence omitted]

SEQ ID NO: 10882 - DNA, 4859 bp, Homo sapiens
cagttatgtgttctcattttacccaagacttttggccagagcagcatataaaagatcctttccaaaaagcgacactgagaagatataaaaactgtgaacataaaaatgtacatttaaaaaaagaccataaaagtgtggatgagtgtaaggtgcacagaggaggttataatggatttaaccaatgtttgccagctacccagagcaaaatatttctatttgataaatgtgtgaaagcctttcataaattttcaaattcaaacagacataagataagccatactgaaaaaaaacttttcaaatgcaaagaatgtggcaaatcattttgcatgcttccacatctagctcaacataaaataattcataccagagtgaatttctgcaaatgtgaaaaatgtggaaaagcttttaactgcccttcaatcatcactaaacataagagaattaatactggagagaaaccctacacatgtgaagaatgtggcaaagtctttaattggtcctcacgccttactacacataaaaaaaattatactagatacaaactctacaaatgtgaagaatgtggcaaagcttttaacaagtcctcaatccttactacccataagataattcgcactggagagaaattctacaaatgtaaagaatgtgccaaagcttttaaccaatcctcaaaccttactgaacataagaaaattcatcctggagagaaaccttacaaatgtgaagaatgtggcaaagcctttaactggccctcaactcttactaaacataagagaattcatactggagagaaaccctacacatgtgaagaatgtggcaaagcctttaaccagttctcaaaccttactacacataagagaatccatactgcagagaaattctataaatgtacagaatgtggtgaagcttttagccggtcctcaaaccttactaaacataagaaaattcatactgaaaagaaaccctacaaatgtgaagaatgtggcaaagcttttaagtggtcctcaaagcttactgaacataagttaactcatactggagagaaaccctacaaatgtgaagaatgtggcaaagcctttaactggccctcaacccttactaaacataacagaattcatactggagagaaaccctacaaatgtgaagtatgtggcaaagcctttaaccagttctcaaaccttactacacataagagaattcatactgcagaaaaaccgtacaaatgtgaagaatgtggcaaagcttttagccggtcctcaaaccttactaaacataagaaaattcacattgaaaagaaaccctacaaatgtgaagaatgtggcaaagcttttaagtggtcctcaaagcttactgaacataagataactcatactggagagaaaccctacaaatgtgaagaatgtggcaaagcttttaaccatttctcaatccttaccaaacataagaggattcatactggagagaaaccctacaagtgtgaagaatgtggcaaagcttttacccaatcctcaaaccttactacacataagaaaattcatactggagagaaattctacaaatgtgaagaatgtggcaaagcttttacccaatcttcaaaccttactacacataaaaaaattcatactggaggaaaaccctacaaatgtgaagaatgtggcaaagcttttaaccagttctcaactcttactaaacataagataattcacactgaggagaaaccctacaaatgtgaagaatgtggcaaagcctttaagtggtcctcaacccttactaaacataagataattcatactggagagaaaccctacaaatgtgaagaatgtggcaaagcttttaaactgtcctcaaccctttctacacataagattattcatactggagagaaaccctacaaatgtgaaaaatgtggcaaagcttttaaccgatcctcaaaccttattgaacataagaaaattcatactggagagcaaccctacaaatgtgaagaatgtggcaaagcatttaactattcctcacaccttaatacacataagagaattcatactaaagagcaaccctacaaatgtaaagaatgtggcaaagctttcaaccaatattcaaaccttactacacataacaaaattcatactggagagaaactctacaaacctgaagatgtgacagtgattttgacaacacctcaaactttttcaaacataaaataaattatactggtgagaaattctagaaatgtaaagaatgtgataaaggctttacatggttgtcacacttgattgtaggtaagataatttacattggagtaaacttctacaagtgtgaagaatgtggcaaaacttttaattaatgctcgtaccttattgcacaggaaagaatttttacttggaaaaaggtatatacacaaagaatgtggaaaagccattaatatgtgctcatatcttactcaacatcagagagtctgtacttaataaaaccattatagatgcaactagtgtcaaaagatctttcagaaaataaaagcctttaaagtgaagaagataattcattctgaagacaaacattacaaatattaagagggttgtagtaccattacttgcatcacagatcttattgtacacattttgtactaaagaaaaccctgaagcagttgctcaaatactgttcaacatcagaaaatttatattggaaaaaacccctggaaaatgtaataaatttgtaaaaacagttttgaaaaactacagcttataaaacatgagggtctataatgcttggttgatagtacaaagtttattcaacatcagggaatttatattggagaaaaaccctacaaatgtaatcagtttggaaaaacatttttaaaaaaaccacagcatagaaaacaccacagggttcatactaaaatatgtttttgcagatgcagtaaaaatgaaaaaaatttaatccgaaattaagtttatgtaaatatctgagaattcacagtagaaatatctaaggcgcggacacttcagacattacactaaatcagtgctaagtacagaaaacaacacaaaataaaacttggtggataaattatttgtatataacattaaaagaagtagaagattttcagttataattacaattaaagtatacttttatcttgaaaaaattactgatttttaaattagtgaataatgatgtaattaaactctcaaataactttatgctcttttttcattcctgctatattcacatgtgaaagcatgtgaccaattgttgctgcaccaaagatatgagagattcttttattaggtgggcattatttaaaacattttttatggaacagtaaggatattaaagtgtaagatgcagccaggcatggtggctcatgcctataatcccagcactttgggaggctgaggccggtggatcacctgaggtcaggagtttgagaccagcctgaccaacatggtgaaaccctgtctttactaaaaatacaaaaatttaccaggcacctataatcccagctacttcaaaggctgaagcaggagaatcacttgaacctggaaagtggaggtctcagtgagccgaaatcataccattgcactccaacctgggcaacaaaagtcaaactccatctcaaaaagaaaaaaaaaaaaaaaaaagatgcgtgatgaaaatgtaactggagaggctctttgtggttaacttataaaggagtgatgcaggagataggttttcagagtaatattcttctgcattatagtgacaaaagttttttattttagttaaaattggttaaattagtaagtcattttacttattgtaattttatgtaattaaatgtacatttttaaatttttagattacatgtaaatataacttttaaaaaaatgtgttaagaccattgtacattcaatgaagcattattatgcttctaactttaacctatttcaccttactcaagagtgtatgtaaaagatggtaacaatatactatttggtaacataatggactaacatttctattaatctatttcaccagtggctttcaactgcaaataagttaaagaatatttttctataggttaaatattcttttttgtcttatttaaacttactgttcttaatttctgtgggtacatagtatgattttaattaccttattttattctttgtgctattcataattttttttgtttgtttggtttttttttttgagacagagtcttgctctcgcccaggctggagtgcagtggcgcgatcttggctcactgcaagctccgcctcccaggttcactccattctcctgcctcagcctcccaagtagctgggaccacaggcgcccactacttgtttgggtttttttttggagatggagtctcgctctgtcacccaggctggagtacagtggcatgatcttggctcactgcaacccccacctccccggttcaagtgattctcctgcctcagcctcccgaatagctgggattacaggcgtccaccatcacaccaggctaatttttgtatttttagtagagatggagtttcaccatgttggccaggatggtctcgatcttctgacctcatgatctgcctgcctcggcctcccagagttctgggaccacaggcatgagccactgcacctggccaaatgtgtatatatttatgcaatatataacatgttttgatacaggcatataatatgtattagtcacatcaggataaagtatctattaccttcagcatttatcctttgtattacaagccaattctacacttcattattttaatgtacaattaaattgttattgactacagggtcattttaattataaaaattatatagaagtataaataaagtccatacattcctgagtcatg

SEQ ID NO: 10883 - protein, 732 aa, Homo sapiens [sequence omitted]

SEQ ID NO: 10884 - DNA, 4822 bp, Homo sapiens
aaaaaatgttctctttttgtatatgctttttaatttgcttttaaaacatgtgcataacatttccttgaattctattaatggacctcaatgctttaaaaaaattttttgataaaataattcagtctgaatgtgatggttcatgcctataatcccagtactttgggaggctgactttgtaggattcattgagcccaagagtttgagaccattctgggctatctagtgaggcttcatctctacaaataaaaatatgataacaaattagctgagcatggggccacatgccagtggtcccagctactcagaaggctgagacaggtaaattgctcaagcctagattgctgaggctgcagtgagctgcagtcatgaccctgcactccagcctgggtaacagagactccctctcaagaataagaaaaaccccacagaggataaataataaaatattcaatgtttgtaatacttcctactcaaagggccagaagccaggaaggtcataaaagctgaaattcaaaaacaattgttttcattttttagtatccatatagtatattacttataagtgaagatgaccttatacacaaggttaaaggcaaataccctctgggttgggcctgctctgctcagggaggaagccctgcctgaaaaggcggcagcctaggctgtcattctttcttctttcagcccagcgtctgatcacatctttcattcagggtttgcgggggcaggaccttagaagttatccaatcagggacgctgggctggaaaccgtccaatcaggcacggggcaggagaggacagggcggcttccgggatgtggcggggcctttgtctctggctgcagttggagctctgcgtctcgtcttcgttcttctgtgtcctctgctgctagaggtccagcctctgtggctctgtgacctgcgggtattgggggatccacagctaagacgccaggaccccccggaagcctagaaatgggaccattgacatttatggatgtggccatagaattctgtctggaggagtggcaatgcctggacattgcacagcagaatttatataggaatgtgatgttagagaactacagaaacctggtcttcctgggtattgctgtctctaagccagacctgatcacctgtctggagcaagaaaaagagccttgggagcctatgaggagacatgaaatggtagccaaacccccagttatgtgttctcattttacccaagacttttggccagagcagcatataaaagatcctttccaaaaagcgacactgagaagatataaaaactgtgaacataaaaatgtacatttaaaaaaagaccataaaagtgtggatgagtgtaaggtgcacagaggaggttataatggatttaaccaatgtttgccagctacccagagcaaaatatttctatttgataaatgtgtgaaagcctttcataaattttcaaattcaaacagacataagataagccatactgaaaaaaaacttttcaaatgcaaagaatgtggcaaatcattttgcatgcttccacatctagctcaacataaaataattcataccagagtgaatttctgcaaatgtgaaaaatgtggaaaagcttttaactgcccttcaatcatcactaaacataagagaattaatactggagagaaaccctacacatgtgaagaatgtggcaaagtctttaattggtcctcacgccttactacacataaaaaaaattatactagatacaaactctacaaatgtgaagaatgtggcaaagcttttaacaagtcctcaatccttactacccataagataattcgcactggagagaaattctacaaatgtaaagaatgtgccaaagcttttaaccaatcctcaaaccttactgaacataagaaaattcatcctggagagaaaccttacaaatgtgaagaatgtggcaaagcctttaactggccctcaactcttactaaacataagagaattcatactggagagaaaccctacacatgtgaagaatgtggcaaagcctttaaccagttctcaaaccttactacacataagagaatccatactgcagagaaattctataaatgtacagaatgtggtgaagcttttagccggtcctcaaaccttactaaacataagaaaattcatactgaaaagaaaccctacaaatgtgaagaatgtggcaaagcttttaagtggtcctcaaagcttactgaacataagttaactcatactggagagaaaccctacaaatgtgaagaatgtggcaaagcctttaactggccctcaacccttactaaacataacagaattcatactggagagaaaccctacaaatgtgaagtatgtggcaaagcctttaaccagttctcaaaccttactacacataagagaattcatactgcagaaaaaccgtacaaatgtgaagaatgtggcaaagcttttagccggtcctcaaaccttactaaacataagaaaattcacattgaaaagaaaccctacaaatgtgaagaatgtggcaaagcttttaagtggtcctcaaagcttactgaacataagataactcatactggagagaaaccctacaaatgtgaagaatgtggcaaagcttttaaccatttctcaatccttaccaaacataagaggattcatactggagagaaaccctacaagtgtgaagaatgtggcaaagcttttacccaatcctcaaaccttactacacataagaaaattcatactggagagaaattctacaaatgtgaagaatgtggcaaagcttttacccaatcttcaaaccttactacacataaaaaaattcatactggaggaaaaccctacaaatgtgaagaatgtggcaaagcttttaaccagttctcaactcttactaaacataagataattcacactgaggagaaaccctacaaatgtgaagaatgtggcaaagcctttaagtggtcctcaacccttactaaacataagataattcatactggagagaaaccctacaaatgtgaagaatgtggcaaagcttttaaactgtcctcaaccctttctacacataagattattcatactggagagaaaccctacaaatgtgaaaaatgtggcaaagcttttaaccgatcctcaaaccttattgaacataagaaaattcatactggagagcaaccctacaaatgtgaagaatgtggcaaagcatttaactattcctcacaccttaatacacataagagaattcatactaaagagcaaccctacaaatgtaaagaatgtggcaaagctttcaaccaatattcaaaccttactacacataacaaaattcatactggagagaaactctacaaacctgaagatgtgacagtgattttgacaacacctcaaactttttcaaacataaaataaattatactggtgagaaattctagaaatgtaaagaatgtgataaaggctttacatggttgtcacacttgattgtaggtaagataatttacattggagtaaacttctacaagtgtgaagaatgtggcaaaacttttaattaatgctcgtaccttattgcacaggaaagaatttttacttggaaaaaggtatatacacaaagaatgtggaaaagccattaatatgtgctcatatcttactcaacatcagagagtctgtacttaataaaaccattatagatgcaactagtgtcaaaagatctttcagaaaataaaagcctttaaagtgaagaagataattcattctgaagacaaacattacaaatattaagagggttgtagtaccattacttgcatcacagatcttattgtacacattttgtactaaagaaaaccctgaagcagttgctcaaatactgttcaacatcagaaaatttatattggaaaaaacccctggaaaatgtaataaatttgtaaaaacagttttgaaaaactacagcttataaaacatgagggtctataatgcttggttgatagtacaaagtttattcaacatcagggaatttatattggagaaaaaccctacaaatgtaatcagtttggaaaaacatttttaaaaaaaccacagcatagaaaacaccacagggttcatactaaaatatgtttttgcagatgcagtaaaaatgaaaaaaatttaatccgaaattaagtttatgtaaatatctgagaattcacagtagaaatatctaaggcgcggacacttcagacattacactaaatcagtgctaagtacagaaaacaacacaaaataaaacttggtggataaattatttgtatataacattaaaagaagtagaagattttcagttataattacaattaaagtatacttttatcttgaaaaaattactgatttttaaattagtgaataatgatgtaattaaactctcaaataactttatgctcttttttcattcctgctatattcacatgtgaaagcatgtgaccaattgttgctgcaccaaagatatgagagattcttttattaggtgggcattatttaaaacattttttatggaacagtaaggatattaaagtgtaagatgcagccaggcatggtggctcatgcctataatcccagcactttgggaggctgaggccggtggatcacctgaggtcaggagtttgagaccagcctgaccaacatggtgaaaccctgtctttactaaaaatacaaaaatttaccaggcacctataatcccagctacttcaaaggctgaagcaggagaatcacttgaacctggaaagtggaggtctcagtgagccgaaatcataccattgcactccaacctgggcaacaaaagtcaaactccatctcaaaaa

SEQ ID NO: 10885 - protein, 809 aa, Homo sapiens; identical to SEQ ID NO: 1811

SEQ ID NO: 10886 - DNA, 4695 bp, Homo sapiens
aaaaaatgttctctttttgtatatgctttttaatttgcttttaaaacatgtgcataacatttccttgaattctattaatggacctcaatgctttaaaaaaattttttgataaaataattcagtctgaatgtgatggttcatgcctataatcccagtactttgggaggctgactttgtaggattcattgagcccaagagtttgagaccattctgggctatctagtgaggcttcatctctacaaataaaaatatgataacaaattagctgagcatggggccacatgccagtggtcccagctactcagaaggctgagacaggtaaattgctcaagcctagattgctgaggctgcagtgagctgcagtcatgaccctgcactccagcctgggtaacagagactccctctcaagaataagaaaaaccccacagaggataaataataaaatattcaatgtttgtaatacttcctactcaaagggccagaagccaggaaggtcataaaagctgaaattcaaaaacaattgttttcattttttagtatccatatagtatattacttataagtgaagatgaccttatacacaaggttaaaggcaaataccctctgggttgggcctgctctgctcagggaggaagccctgcctgaaaaggcggcagcctaggctgtcattctttcttctttcagcccagcgtctgatcacatctttcattcagggtttgcgggggcaggaccttagaagttatccaatcagggacgctgggctggaaaccgtccaatcaggcacggggcaggagaggacagggcggcttccgggatgtggcggggcctttgtctctggctgcagttggagctctgcgtctcgtcttcgttcttctgtgtcctctgctgctagaggtccagcctctgtggctctgtgacctgcgggtattgggggatccacagctaagacgccaggaccccccggaagcctagaaatggtattgctgtctctaagccagacctgatcacctgtctggagcaagaaaaagagccttgggagcctatgaggagacatgaaatggtagccaaacccccagttatgtgttctcattttacccaagacttttggccagagcagcatataaaagatcctttccaaaaagcgacactgagaagatataaaaactgtgaacataaaaatgtacatttaaaaaaagaccataaaagtgtggatgagtgtaaggtgcacagaggaggttataatggatttaaccaatgtttgccagctacccagagcaaaatatttctatttgataaatgtgtgaaagcctttcataaattttcaaattcaaacagacataagataagccatactgaaaaaaaacttttcaaatgcaaagaatgtggcaaatcattttgcatgcttccacatctagctcaacataaaataattcataccagagtgaatttctgcaaatgtgaaaaatgtggaaaagcttttaactgcccttcaatcatcactaaacataagagaattaatactggagagaaaccctacacatgtgaagaatgtggcaaagtctttaattggtcctcacgccttactacacataaaaaaaattatactagatacaaactctacaaatgtgaagaatgtggcaaagcttttaacaagtcctcaatccttactacccataagataattcgcactggagagaaattctacaaatgtaaagaatgtgccaaagcttttaaccaatcctcaaaccttactgaacataagaaaattcatcctggagagaaaccttacaaatgtgaagaatgtggcaaagcctttaactggccctcaactcttactaaacataagagaattcatactggagagaaaccctacacatgtgaagaatgtggcaaagcctttaaccagttctcaaaccttactacacataagagaatccatactgcagagaaattctataaatgtacagaatgtggtgaagcttttagccggtcctcaaaccttactaaacataagaaaattcatactgaaaagaaaccctacaaatgtgaagaatgtggcaaagcttttaagtggtcctcaaagcttactgaacataagttaactcatactggagagaaaccctacaaatgtgaagaatgtggcaaagcctttaactggccctcaacccttactaaacataacagaattcatactggagagaaaccctacaaatgtgaagtatgtggcaaagcctttaaccagttctcaaaccttactacacataagagaattcatactgcagaaaaaccgtacaaatgtgaagaatgtggcaaagcttttagccggtcctcaaaccttactaaacataagaaaattcacattgaaaagaaaccctacaaatgtgaagaatgtggcaaagcttttaagtggtcctcaaagcttactgaacataagataactcatactggagagaaaccctacaaatgtgaagaatgtggcaaagcttttaaccatttctcaatccttaccaaacataagaggattcatactggagagaaaccctacaagtgtgaagaatgtggcaaagcttttacccaatcctcaaaccttactacacataagaaaattcatactggagagaaattctacaaatgtgaagaatgtggcaaagcttttacccaatcttcaaaccttactacacataaaaaaattcatactggaggaaaaccctacaaatgtgaagaatgtggcaaagcttttaaccagttctcaactcttactaaacataagataattcacactgaggagaaaccctacaaatgtgaagaatgtggcaaagcctttaagtggtcctcaacccttactaaacataagataattcatactggagagaaaccctacaaatgtgaagaatgtggcaaagcttttaaactgtcctcaaccctttctacacataagattattcatactggagagaaaccctacaaatgtgaaaaatgtggcaaagcttttaaccgatcctcaaaccttattgaacataagaaaattcatactggagagcaaccctacaaatgtgaagaatgtggcaaagcatttaactattcctcacaccttaatacacataagagaattcatactaaagagcaaccctacaaatgtaaagaatgtggcaaagctttcaaccaatattcaaaccttactacacataacaaaattcatactggagagaaactctacaaacctgaagatgtgacagtgattttgacaacacctcaaactttttcaaacataaaataaattatactggtgagaaattctagaaatgtaaagaatgtgataaaggctttacatggttgtcacacttgattgtaggtaagataatttacattggagtaaacttctacaagtgtgaagaatgtggcaaaacttttaattaatgctcgtaccttattgcacaggaaagaatttttacttggaaaaaggtatatacacaaagaatgtggaaaagccattaatatgtgctcatatcttactcaacatcagagagtctgtacttaataaaaccattatagatgcaactagtgtcaaaagatctttcagaaaataaaagcctttaaagtgaagaagataattcattctgaagacaaacattacaaatattaagagggttgtagtaccattacttgcatcacagatcttattgtacacattttgtactaaagaaaaccctgaagcagttgctcaaatactgttcaacatcagaaaatttatattggaaaaaacccctggaaaatgtaataaatttgtaaaaacagttttgaaaaactacagcttataaaacatgagggtctataatgcttggttgatagtacaaagtttattcaacatcagggaatttatattggagaaaaaccctacaaatgtaatcagtttggaaaaacatttttaaaaaaaccacagcatagaaaacaccacagggttcatactaaaatatgtttttgcagatgcagtaaaaatgaaaaaaatttaatccgaaattaagtttatgtaaatatctgagaattcacagtagaaatatctaaggcgcggacacttcagacattacactaaatcagtgctaagtacagaaaacaacacaaaataaaacttggtggataaattatttgtatataacattaaaagaagtagaagattttcagttataattacaattaaagtatacttttatcttgaaaaaattactgatttttaaattagtgaataatgatgtaattaaactctcaaataactttatgctcttttttcattcctgctatattcacatgtgaaagcatgtgaccaattgttgctgcaccaaagatatgagagattcttttattaggtgggcattatttaaaacattttttatggaacagtaaggatattaaagtgtaagatgcagccaggcatggtggctcatgcctataatcccagcactttgggaggctgaggccggtggatcacctgaggtcaggagtttgagaccagcctgaccaacatggtgaaaccctgtctttactaaaaatacaaaaatttaccaggcacctataatcccagctacttcaaaggctgaagcaggagaatcacttgaacctggaaagtggaggtctcagtgagccgaaatcataccattgcactccaacctgggcaacaaaagtcaaactccatctcaaaaa

SEQ ID NO: 10887 - protein, 744 aa, Homo sapiens
MRRHEMVAKPPVMCSHFTQDFWPEQHIKDPFQKATLRRYKNCEHKNVHLKKDHKSVDECKVHRGGYNGFNQCLPATQSKIFLFDKCVKAFHKFSNSNRHKISHTEKKLFKCKECGKSFCMLPHLAQHKIIHTRVNFCKCEKCGKAFNCPSIITKHKRINTGEKPYTCEECGKVFNWSSRLTTHKKNYTRYKLYKCEECGKAFNKSSILTTHKIIRTGEKFYKCKECAKAFNQSSNLTEHKKIHPGEKPYKCEECGKAFNWPSTLTKHKRIHTGEKPYTCEECGKAFNQFSNLTTHKRIHTAEKFYKCTECGEAFSRSSNLTKHKKIHTEKKPYKCEECGKAFKWSSKLTEHKLTHTGEKPYKCEECGKAFNWPSTLTKHNRIHTGEKPYKCEVCGKAFNQFSNLTTHKRIHTAEKPYKCEECGKAFSRSSNLTKHKKIHIEKKPYKCEECGKAFKWSSKLTEHKITHTGEKPYKCEECGKAFNHFSILTKHKRIHTGEKPYKCEECGKAFTQSSNLTTHKKIHTGEKFYKCEECGKAFTQSSNLTTHKKIHTGGKPYKCEECGKAFNQFSTLTKHKIIHTEEKPYKCEECGKAFKWSSTLTKHKIIHTGEKPYKCEECGKAFKLSSTLSTHKIIHTGEKPYKCEKCGKAFNRSSNLIEHKKIHTGEQPYKCEECGKAFNYSSHLNTHKRIHTKEQPYKCKECGKAFNQYSNLTTHNKIHTGEKLYKPEDVTVILTTPQTFSNIK

SEQ ID NO: 10888 - DNA, 4123 bp, Homo sapiens
tccttgctggatcctgcttgcaggaagcattataatctatctgcatccatcacccaagtaatgtgactctctttctaccaggttgctgcttacagaaagaattgttacctatcactgggccagcacctagctgttgtgatgcttctttttctacctacattcagctcacaatgtagattttgacatactgctgggctaaacaccaaaaatgaagttacgtttttcctcagcactttcctcatcaggcattgtgacatattgtttggcccagaactaagggaccattgacatttatggatgtggccatagaattctgtctggaggagtggcaatgcctggacattgcacagcagaatttatataggaatgtgatgttagagaactacagaaacctggtcttcctgggtattgctgtctctaagccagacctgatcacctgtctggagcaagaaaaagagccttgggagcctatgaggagacatgaaatggtagccaaacccccagttatgtgttctcattttacccaagacttttggccagagcagcatataaaagatcctttccaaaaagcgacactgagaagatataaaaactgtgaacataaaaatgtacatttaaaaaaagaccataaaagtgtggatgagtgtaaggtgcacagaggaggttataatggatttaaccaatgtttgccagctacccagagcaaaatatttctatttgataaatgtgtgaaagcctttcataaattttcaaattcaaacagacataagataagccatactgaaaaaaaacttttcaaatgcaaagaatgtggcaaatcattttgcatgcttccacatctagctcaacataaaataattcataccagagtgaatttctgcaaatgtgaaaaatgtggaaaagcttttaactgcccttcaatcatcactaaacataagagaattaatactggagagaaaccctacacatgtgaagaatgtggcaaagtctttaattggtcctcacgccttactacacataaaaaaaattatactagatacaaactctacaaatgtgaagaatgtggcaaagcttttaacaagtcctcaatccttactacccataagataattcgcactggagagaaattctacaaatgtaaagaatgtgccaaagcttttaaccaatcctcaaaccttactgaacataagaaaattcatcctggagagaaaccttacaaatgtgaagaatgtggcaaagcctttaactggccctcaactcttactaaacataagagaattcatactggagagaaaccctacacatgtgaagaatgtggcaaagcctttaaccagttctcaaaccttactacacataagagaatccatactgcagagaaattctataaatgtacagaatgtggtgaagcttttagccggtcctcaaaccttactaaacataagaaaattcatactgaaaagaaaccctacaaatgtgaagaatgtggcaaagcttttaagtggtcctcaaagcttactgaacataagttaactcatactggagagaaaccctacaaatgtgaagaatgtggcaaagcctttaactggccctcaacccttactaaacataacagaattcatactggagagaaaccctacaaatgtgaagtatgtggcaaagcctttaaccagttctcaaaccttactacacataagagaattcatactgcagaaaaaccgtacaaatgtgaagaatgtggcaaagcttttagccggtcctcaaaccttactaaacataagaaaattcacattgaaaagaaaccctacaaatgtgaagaatgtggcaaagcttttaagtggtcctcaaagcttactgaacataagataactcatactggagagaaaccctacaaatgtgaagaatgtggcaaagcttttaaccatttctcaatccttaccaaacataagaggattcatactggagagaaaccctacaagtgtgaagaatgtggcaaagcttttacccaatcctcaaaccttactacacataagaaaattcatactggagagaaattctacaaatgtgaagaatgtggcaaagcttttacccaatcttcaaaccttactacacataaaaaaattcatactggaggaaaaccctacaaatgtgaagaatgtggcaaagcttttaaccagttctcaactcttactaaacataagataattcacactgaggagaaaccctacaaatgtgaagaatgtggcaaagcctttaagtggtcctcaacccttactaaacataagataattcatactggagagaaaccctacaaatgtgaagaatgtggcaaagcttttaaactgtcctcaaccctttctacacataagattattcatactggagagaaaccctacaaatgtgaaaaatgtggcaaagcttttaaccgatcctcaaaccttattgaacataagaaaattcatactggagagcaaccctacaaatgtgaagaatgtggcaaagcatttaactattcctcacaccttaatacacataagagaattcatactaaagagcaaccctacaaatgtaaagaatgtggcaaagctttcaaccaatattcaaaccttactacacataacaaaattcatactggagagaaactctacaaacctgaagatgtgacagtgattttgacaacacctcaaactttttcaaacataaaataaattatactggtgagaaattctagaaatgtaaagaatgtgataaaggctttacatggttgtcacacttgattgtaggtaagataatttacattggagtaaacttctacaagtgtgaagaatgtggcaaaacttttaattaatgctcgtaccttattgcacaggaaagaatttttacttggaaaaaggtatatacacaaagaatgtggaaaagccattaatatgtgctcatatcttactcaacatcagagagtctgtacttaataaaaccattatagatgcaactagtgtcaaaagatctttcagaaaataaaagcctttaaagtgaagaagataattcattctgaagacaaacattacaaatattaagagggttgtagtaccattacttgcatcacagatcttattgtacacattttgtactaaagaaaaccctgaagcagttgctcaaatactgttcaacatcagaaaatttatattggaaaaaacccctggaaaatgtaataaatttgtaaaaacagttttgaaaaactacagcttataaaacatgagggtctataatgcttggttgatagtacaaagtttattcaacatcagggaatttatattggagaaaaaccctacaaatgtaatcagtttggaaaaacatttttaaaaaaaccacagcatagaaaacaccacagggttcatactaaaatatgtttttgcagatgcagtaaaaatgaaaaaaatttaatccgaaattaagtttatgtaaatatctgagaattcacagtagaaatatctaaggcgcggacacttcagacattacactaaatcagtgctaagtacagaaaacaacacaaaataaaacttggtggataaattatttgtatataacattaaaagaagtagaagattttcagttataattacaattaaagtatacttttatcttgaaaaaattactgatttttaaattagtgaataatgatgtaattaaactctcaaataactttatgctcttttttcattcctgctatattcacatgtgaaagcatgtgaccaattgttgctgcaccaaagatatgagagattcttttattaggtgggcattatttaaaacattttttatggaacagtaaggatattaaagtgtaagatgcagccaggcatggtggctcatgcctataatcccagcactttgggaggctgaggccggtggatcacctgaggtcaggagtttgagaccagcctgaccaacatggtgaaaccctgtctttactaaaaatacaaaaatttaccaggcacctataatcccagctacttcaaaggctgaagcaggagaatcacttgaacctggaaagtggaggtctcagtgagccgaaatcataccattgcactccaacctgggcaacaaaagtcaaactccatctcaaaaa

SEQ ID NO: 10889 - protein, 803 aa, Homo sapiens
MDVAIEFCLEEWQCLDIAQQNLYRNVMLENYRNLVFLGIAVSKPDLITCLEQEKEPWEPMRRHEMVAKPPVMCSHFTQDFWPEQHIKDPFQKATLRRYKNCEHKNVHLKKDHKSVDECKVHRGGYNGFNQCLPATQSKIFLFDKCVKAFHKFSNSNRHKISHTEKKLFKCKECGKSFCMLPHLAQHKIIHTRVNFCKCEKCGKAFNCPSIITKHKRINTGEKPYTCEECGKVFNWSSRLTTHKKNYTRYKLYKCEECGKAFNKSSILTTHKIIRTGEKFYKCKECAKAFNQSSNLTEHKKIHPGEKPYKCEECGKAFNWPSTLTKHKRIHTGEKPYTCEECGKAFNQFSNLTTHKRIHTAEKFYKCTECGEAFSRSSNLTKHKKIHTEKKPYKCEECGKAFKWSSKLTEHKLTHTGEKPYKCEECGKAFNWPSTLTKHNRIHTGEKPYKCEVCGKAFNQFSNLTTHKRIHTAEKPYKCEECGKAFSRSSNLTKHKKIHIEKKPYKCEECGKAFKWSSKLTEHKITHTGEKPYKCEECGKAFNHFSILTKHKRIHTGEKPYKCEECGKAFTQSSNLTTHKKIHTGEKFYKCEECGKAFTQSSNLTTHKKIHTGGKPYKCEECGKAFNQFSTLTKHKIIHTEEKPYKCEECGKAFKWSSTLTKHKIIHTGEKPYKCEECGKAFKLSSTLSTHKIIHTGEKPYKCEKCGKAFNRSSNLIEHKKIHTGEQPYKCEECGKAFNYSSHLNTHKRIHTKEQPYKCKECGKAFNQYSNLTTHNKIHTGEKLYKPEDVTVILTTPQTFSNIK

SEQ ID NO: 10890 - DNA, 4004 bp, Homo sapiens
gcactctgcctacaggaaaaattttgacttatcactagactcaggtgatgtgactcttcttcagcctgcaccctgccaaaagaggattgtgatgtatcactggacccagcacctagatgacgtaactctcatcttttgcctggaccttgcatattttggggaccattgacatttatggatgtggccatagaattctgtctggaggagtggcaatgcctggacattgcacagcagaatttatataggaatgtgatgttagagaactacagaaacctggtcttcctgggtattgctgtctctaagccagacctgatcacctgtctggagcaagaaaaagagccttgggagcctatgaggagacatgaaatggtagccaaacccccagttatgtgttctcattttacccaagacttttggccagagcagcatataaaagatcctttccaaaaagcgacactgagaagatataaaaactgtgaacataaaaatgtacatttaaaaaaagaccataaaagtgtggatgagtgtaaggtgcacagaggaggttataatggatttaaccaatgtttgccagctacccagagcaaaatatttctatttgataaatgtgtgaaagcctttcataaattttcaaattcaaacagacataagataagccatactgaaaaaaaacttttcaaatgcaaagaatgtggcaaatcattttgcatgcttccacatctagctcaacataaaataattcataccagagtgaatttctgcaaatgtgaaaaatgtggaaaagcttttaactgcccttcaatcatcactaaacataagagaattaatactggagagaaaccctacacatgtgaagaatgtggcaaagtctttaattggtcctcacgccttactacacataaaaaaaattatactagatacaaactctacaaatgtgaagaatgtggcaaagcttttaacaagtcctcaatccttactacccataagataattcgcactggagagaaattctacaaatgtaaagaatgtgccaaagcttttaaccaatcctcaaaccttactgaacataagaaaattcatcctggagagaaaccttacaaatgtgaagaatgtggcaaagcctttaactggccctcaactcttactaaacataagagaattcatactggagagaaaccctacacatgtgaagaatgtggcaaagcctttaaccagttctcaaaccttactacacataagagaatccatactgcagagaaattctataaatgtacagaatgtggtgaagcttttagccggtcctcaaaccttactaaacataagaaaattcatactgaaaagaaaccctacaaatgtgaagaatgtggcaaagcttttaagtggtcctcaaagcttactgaacataagttaactcatactggagagaaaccctacaaatgtgaagaatgtggcaaagcctttaactggccctcaacccttactaaacataacagaattcatactggagagaaaccctacaaatgtgaagtatgtggcaaagcctttaaccagttctcaaaccttactacacataagagaattcatactgcagaaaaaccgtacaaatgtgaagaatgtggcaaagcttttagccggtcctcaaaccttactaaacataagaaaattcacattgaaaagaaaccctacaaatgtgaagaatgtggcaaagcttttaagtggtcctcaaagcttactgaacataagataactcatactggagagaaaccctacaaatgtgaagaatgtggcaaagcttttaaccatttctcaatccttaccaaacataagaggattcatactggagagaaaccctacaagtgtgaagaatgtggcaaagcttttacccaatcctcaaaccttactacacataagaaaattcatactggagagaaattctacaaatgtgaagaatgtggcaaagcttttacccaatcttcaaaccttactacacataaaaaaattcatactggaggaaaaccctacaaatgtgaagaatgtggcaaagcttttaaccagttctcaactcttactaaacataagataattcacactgaggagaaaccctacaaatgtgaagaatgtggcaaagcctttaagtggtcctcaacccttactaaacataagataattcatactggagagaaaccctacaaatgtgaagaatgtggcaaagcttttaaactgtcctcaaccctttctacacataagattattcatactggagagaaaccctacaaatgtgaaaaatgtggcaaagcttttaaccgatcctcaaaccttattgaacataagaaaattcatactggagagcaaccctacaaatgtgaagaatgtggcaaagcatttaactattcctcacaccttaatacacataagagaattcatactaaagagcaaccctacaaatgtaaagaatgtggcaaagctttcaaccaatattcaaaccttactacacataacaaaattcatactggagagaaactctacaaacctgaagatgtgacagtgattttgacaacacctcaaactttttcaaacataaaataaattatactggtgagaaattctagaaatgtaaagaatgtgataaaggctttacatggttgtcacacttgattgtaggtaagataatttacattggagtaaacttctacaagtgtgaagaatgtggcaaaacttttaattaatgctcgtaccttattgcacaggaaagaatttttacttggaaaaaggtatatacacaaagaatgtggaaaagccattaatatgtgctcatatcttactcaacatcagagagtctgtacttaataaaaccattatagatgcaactagtgtcaaaagatctttcagaaaataaaagcctttaaagtgaagaagataattcattctgaagacaaacattacaaatattaagagggttgtagtaccattacttgcatcacagatcttattgtacacattttgtactaaagaaaaccctgaagcagttgctcaaatactgttcaacatcagaaaatttatattggaaaaaacccctggaaaatgtaataaatttgtaaaaacagttttgaaaaactacagcttataaaacatgagggtctataatgcttggttgatagtacaaagtttattcaacatcagggaatttatattggagaaaaaccctacaaatgtaatcagtttggaaaaacatttttaaaaaaaccacagcatagaaaacaccacagggttcatactaaaatatgtttttgcagatgcagtaaaaatgaaaaaaatttaatccgaaattaagtttatgtaaatatctgagaattcacagtagaaatatctaaggcgcggacacttcagacattacactaaatcagtgctaagtacagaaaacaacacaaaataaaacttggtggataaattatttgtatataacattaaaagaagtagaagattttcagttataattacaattaaagtatacttttatcttgaaaaaattactgatttttaaattagtgaataatgatgtaattaaactctcaaataactttatgctcttttttcattcctgctatattcacatgtgaaagcatgtgaccaattgttgctgcaccaaagatatgagagattcttttattaggtgggcattatttaaaacattttttatggaacagtaaggatattaaagtgtaagatgcagccaggcatggtggctcatgcctataatcccagcactttgggaggctgaggccggtggatcacctgaggtcaggagtttgagaccagcctgaccaacatggtgaaaccctgtctttactaaaaatacaaaaatttaccaggcacctataatcccagctacttcaaaggctgaagcaggagaatcacttgaacctggaaagtggaggtctcagtgagccgaaatcataccattgcactccaacctgggcaacaaaagtcaaactccatctcaaaaa

SEQ ID NO: 10891 - protein, 803 aa, Homo sapiens; identical to SEQ ID NO: 10889

SEQ ID NO: 10892 - DNA, 4028 bp, Homo sapiens
ctgaatctcacactcggaggctgtcaaaagttggataattgactttcatatgcgggcctggtccacaggtgatgtgactcttcttcagcctgcaccctgccaaaagaggattgtgatgtatcactggacccagcacctagatgacgtaactctcatcttttgcctggaccttgcatattttggggaccattgacatttatggatgtggccatagaattctgtctggaggagtggcaatgcctggacattgcacagcagaatttatataggaatgtgatgttagagaactacagaaacctggtcttcctgggtattgctgtctctaagccagacctgatcacctgtctggagcaagaaaaagagccttgggagcctatgaggagacatgaaatggtagccaaacccccagttatgtgttctcattttacccaagacttttggccagagcagcatataaaagatcctttccaaaaagcgacactgagaagatataaaaactgtgaacataaaaatgtacatttaaaaaaagaccataaaagtgtggatgagtgtaaggtgcacagaggaggttataatggatttaaccaatgtttgccagctacccagagcaaaatatttctatttgataaatgtgtgaaagcctttcataaattttcaaattcaaacagacataagataagccatactgaaaaaaaacttttcaaatgcaaagaatgtggcaaatcattttgcatgcttccacatctagctcaacataaaataattcataccagagtgaatttctgcaaatgtgaaaaatgtggaaaagcttttaactgcccttcaatcatcactaaacataagagaattaatactggagagaaaccctacacatgtgaagaatgtggcaaagtctttaattggtcctcacgccttactacacataaaaaaaattatactagatacaaactctacaaatgtgaagaatgtggcaaagcttttaacaagtcctcaatccttactacccataagataattcgcactggagagaaattctacaaatgtaaagaatgtgccaaagcttttaaccaatcctcaaaccttactgaacataagaaaattcatcctggagagaaaccttacaaatgtgaagaatgtggcaaagcctttaactggccctcaactcttactaaacataagagaattcatactggagagaaaccctacacatgtgaagaatgtggcaaagcctttaaccagttctcaaaccttactacacataagagaatccatactgcagagaaattctataaatgtacagaatgtggtgaagcttttagccggtcctcaaaccttactaaacataagaaaattcatactgaaaagaaaccctacaaatgtgaagaatgtggcaaagcttttaagtggtcctcaaagcttactgaacataagttaactcatactggagagaaaccctacaaatgtgaagaatgtggcaaagcctttaactggccctcaacccttactaaacataacagaattcatactggagagaaaccctacaaatgtgaagtatgtggcaaagcctttaaccagttctcaaaccttactacacataagagaattcatactgcagaaaaaccgtacaaatgtgaagaatgtggcaaagcttttagccggtcctcaaaccttactaaacataagaaaattcacattgaaaagaaaccctacaaatgtgaagaatgtggcaaagcttttaagtggtcctcaaagcttactgaacataagataactcatactggagagaaaccctacaaatgtgaagaatgtggcaaagcttttaaccatttctcaatccttaccaaacataagaggattcatactggagagaaaccctacaagtgtgaagaatgtggcaaagcttttacccaatcctcaaaccttactacacataagaaaattcatactggagagaaattctacaaatgtgaagaatgtggcaaagcttttacccaatcttcaaaccttactacacataaaaaaattcatactggaggaaaaccctacaaatgtgaagaatgtggcaaagcttttaaccagttctcaactcttactaaacataagataattcacactgaggagaaaccctacaaatgtgaagaatgtggcaaagcctttaagtggtcctcaacccttactaaacataagataattcatactggagagaaaccctacaaatgtgaagaatgtggcaaagcttttaaactgtcctcaaccctttctacacataagattattcatactggagagaaaccctacaaatgtgaaaaatgtggcaaagcttttaaccgatcctcaaaccttattgaacataagaaaattcatactggagagcaaccctacaaatgtgaagaatgtggcaaagcatttaactattcctcacaccttaatacacataagagaattcatactaaagagcaaccctacaaatgtaaagaatgtggcaaagctttcaaccaatattcaaaccttactacacataacaaaattcatactggagagaaactctacaaacctgaagatgtgacagtgattttgacaacacctcaaactttttcaaacataaaataaattatactggtgagaaattctagaaatgtaaagaatgtgataaaggctttacatggttgtcacacttgattgtaggtaagataatttacattggagtaaacttctacaagtgtgaagaatgtggcaaaacttttaattaatgctcgtaccttattgcacaggaaagaatttttacttggaaaaaggtatatacacaaagaatgtggaaaagccattaatatgtgctcatatcttactcaacatcagagagtctgtacttaataaaaccattatagatgcaactagtgtcaaaagatctttcagaaaataaaagcctttaaagtgaagaagataattcattctgaagacaaacattacaaatattaagagggttgtagtaccattacttgcatcacagatcttattgtacacattttgtactaaagaaaaccctgaagcagttgctcaaatactgttcaacatcagaaaatttatattggaaaaaacccctggaaaatgtaataaatttgtaaaaacagttttgaaaaactacagcttataaaacatgagggtctataatgcttggttgatagtacaaagtttattcaacatcagggaatttatattggagaaaaaccctacaaatgtaatcagtttggaaaaacatttttaaaaaaaccacagcatagaaaacaccacagggttcatactaaaatatgtttttgcagatgcagtaaaaatgaaaaaaatttaatccgaaattaagtttatgtaaatatctgagaattcacagtagaaatatctaaggcgcggacacttcagacattacactaaatcagtgctaagtacagaaaacaacacaaaataaaacttggtggataaattatttgtatataacattaaaagaagtagaagattttcagttataattacaattaaagtatacttttatcttgaaaaaattactgatttttaaattagtgaataatgatgtaattaaactctcaaataactttatgctcttttttcattcctgctatattcacatgtgaaagcatgtgaccaattgttgctgcaccaaagatatgagagattcttttattaggtgggcattatttaaaacattttttatggaacagtaaggatattaaagtgtaagatgcagccaggcatggtggctcatgcctataatcccagcactttgggaggctgaggccggtggatcacctgaggtcaggagtttgagaccagcctgaccaacatggtgaaaccctgtctttactaaaaatacaaaaatttaccaggcacctataatcccagctacttcaaaggctgaagcaggagaatcacttgaacctggaaagtggaggtctcagtgagccgaaatcataccattgcactccaacctgggcaacaaaagtcaaactccatctcaaaaa

SEQ ID NO: 10893 - protein, 803 aa, Homo sapiens; identical to SEQ ID NO: 10889

SEQ ID NO: 10894 - DNA, 4006 bp, Homo sapiens
gtctccagctcccgctagaccttgggacccgcctctgcttttccgcgttctccaactcgggaatccccggtgactttgtcgcagcctccgttaccctgtgatctgcaagtcctgggagacgcacagctaagatgcccggacatcctggaagctgggaaatgggaccattgacatttatggatgtggccatagaattctgtctggaggagtggcaatgcctggacattgcacagcagaatttatataggaatgtgatgttagagaactacagaaacctggtcttcctgggtattgctgtctctaagccagacctgatcacctgtctggagcaagaaaaagagccttgggagcctatgaggagacatgaaatggtagccaaacccccagttatgtgttctcattttacccaagacttttggccagagcagcatataaaagatcctttccaaaaagcgacactgagaagatataaaaactgtgaacataaaaatgtacatttaaaaaaagaccataaaagtgtggatgagtgtaaggtgcacagaggaggttataatggatttaaccaatgtttgccagctacccagagcaaaatatttctatttgataaatgtgtgaaagcctttcataaattttcaaattcaaacagacataagataagccatactgaaaaaaaacttttcaaatgcaaagaatgtggcaaatcattttgcatgcttccacatctagctcaacataaaataattcataccagagtgaatttctgcaaatgtgaaaaatgtggaaaagcttttaactgcccttcaatcatcactaaacataagagaattaatactggagagaaaccctacacatgtgaagaatgtggcaaagtctttaattggtcctcacgccttactacacataaaaaaaattatactagatacaaactctacaaatgtgaagaatgtggcaaagcttttaacaagtcctcaatccttactacccataagataattcgcactggagagaaattctacaaatgtaaagaatgtgccaaagcttttaaccaatcctcaaaccttactgaacataagaaaattcatcctggagagaaaccttacaaatgtgaagaatgtggcaaagcctttaactggccctcaactcttactaaacataagagaattcatactggagagaaaccctacacatgtgaagaatgtggcaaagcctttaaccagttctcaaaccttactacacataagagaatccatactgcagagaaattctataaatgtacagaatgtggtgaagcttttagccggtcctcaaaccttactaaacataagaaaattcatactgaaaagaaaccctacaaatgtgaagaatgtggcaaagcttttaagtggtcctcaaagcttactgaacataagttaactcatactggagagaaaccctacaaatgtgaagaatgtggcaaagcctttaactggccctcaacccttactaaacataacagaattcatactggagagaaaccctacaaatgtgaagtatgtggcaaagcctttaaccagttctcaaaccttactacacataagagaattcatactgcagaaaaaccgtacaaatgtgaagaatgtggcaaagcttttagccggtcctcaaaccttactaaacataagaaaattcacattgaaaagaaaccctacaaatgtgaagaatgtggcaaagcttttaagtggtcctcaaagcttactgaacataagataactcatactggagagaaaccctacaaatgtgaagaatgtggcaaagcttttaaccatttctcaatccttaccaaacataagaggattcatactggagagaaaccctacaagtgtgaagaatgtggcaaagcttttacccaatcctcaaaccttactacacataagaaaattcatactggagagaaattctacaaatgtgaagaatgtggcaaagcttttacccaatcttcaaaccttactacacataaaaaaattcatactggaggaaaaccctacaaatgtgaagaatgtggcaaagcttttaaccagttctcaactcttactaaacataagataattcacactgaggagaaaccctacaaatgtgaagaatgtggcaaagcctttaagtggtcctcaacccttactaaacataagataattcatactggagagaaaccctacaaatgtgaagaatgtggcaaagcttttaaactgtcctcaaccctttctacacataagattattcatactggagagaaaccctacaaatgtgaaaaatgtggcaaagcttttaaccgatcctcaaaccttattgaacataagaaaattcatactggagagcaaccctacaaatgtgaagaatgtggcaaagcatttaactattcctcacaccttaatacacataagagaattcatactaaagagcaaccctacaaatgtaaagaatgtggcaaagctttcaaccaatattcaaaccttactacacataacaaaattcatactggagagaaactctacaaacctgaagatgtgacagtgattttgacaacacctcaaactttttcaaacataaaataaattatactggtgagaaattctagaaatgtaaagaatgtgataaaggctttacatggttgtcacacttgattgtaggtaagataatttacattggagtaaacttctacaagtgtgaagaatgtggcaaaacttttaattaatgctcgtaccttattgcacaggaaagaatttttacttggaaaaaggtatatacacaaagaatgtggaaaagccattaatatgtgctcatatcttactcaacatcagagagtctgtacttaataaaaccattatagatgcaactagtgtcaaaagatctttcagaaaataaaagcctttaaagtgaagaagataattcattctgaagacaaacattacaaatattaagagggttgtagtaccattacttgcatcacagatcttattgtacacattttgtactaaagaaaaccctgaagcagttgctcaaatactgttcaacatcagaaaatttatattggaaaaaacccctggaaaatgtaataaatttgtaaaaacagttttgaaaaactacagcttataaaacatgagggtctataatgcttggttgatagtacaaagtttattcaacatcagggaatttatattggagaaaaaccctacaaatgtaatcagtttggaaaaacatttttaaaaaaaccacagcatagaaaacaccacagggttcatactaaaatatgtttttgcagatgcagtaaaaatgaaaaaaatttaatccgaaattaagtttatgtaaatatctgagaattcacagtagaaatatctaaggcgcggacacttcagacattacactaaatcagtgctaagtacagaaaacaacacaaaataaaacttggtggataaattatttgtatataacattaaaagaagtagaagattttcagttataattacaattaaagtatacttttatcttgaaaaaattactgatttttaaattagtgaataatgatgtaattaaactctcaaataactttatgctcttttttcattcctgctatattcacatgtgaaagcatgtgaccaattgttgctgcaccaaagatatgagagattcttttattaggtgggcattatttaaaacattttttatggaacagtaaggatattaaagtgtaagatgcagccaggcatggtggctcatgcctataatcccagcactttgggaggctgaggccggtggatcacctgaggtcaggagtttgagaccagcctgaccaacatggtgaaaccctgtctttactaaaaatacaaaaatttaccaggcacctataatcccagctacttcaaaggctgaagcaggagaatcacttgaacctggaaagtggaggtctcagtgagccgaaatcataccattgcactccaacctgggcaacaaaagtcaaactccatctcaaaaa

SEQ ID NO: 10895 - protein, 818 aa, Homo sapiens
MPGHPGSWEMGPLTFMDVAIEFCLEEWQCLDIAQQNLYRNVMLENYRNLVFLGIAVSKPDLITCLEQEKEPWEPMRRHEMVAKPPVMCSHFTQDFWPEQHIKDPFQKATLRRYKNCEHKNVHLKKDHKSVDECKVHRGGYNGFNQCLPATQSKIFLFDKCVKAFHKFSNSNRHKISHTEKKLFKCKECGKSFCMLPHLAQHKIIHTRVNFCKCEKCGKAFNCPSIITKHKRINTGEKPYTCEECGKVFNWSSRLTTHKKNYTRYKLYKCEECGKAFNKSSILTTHKIIRTGEKFYKCKECAKAFNQSSNLTEHKKIHPGEKPYKCEECGKAFNWPSTLTKHKRIHTGEKPYTCEECGKAFNQFSNLTTHKRIHTAEKFYKCTECGEAFSRSSNLTKHKKIHTEKKPYKCEECGKAFKWSSKLTEHKLTHTGEKPYKCEECGKAFNWPSTLTKHNRIHTGEKPYKCEVCGKAFNQFSNLTTHKRIHTAEKPYKCEECGKAFSRSSNLTKHKKIHIEKKPYKCEECGKAFKWSSKLTEHKITHTGEKPYKCEECGKAFNHFSILTKHKRIHTGEKPYKCEECGKAFTQSSNLTTHKKIHTGEKFYKCEECGKAFTQSSNLTTHKKIHTGGKPYKCEECGKAFNQFSTLTKHKIIHTEEKPYKCEECGKAFKWSSTLTKHKIIHTGEKPYKCEECGKAFKLSSTLSTHKIIHTGEKPYKCEKCGKAFNRSSNLIEHKKIHTGEQPYKCEECGKAFNYSSHLNTHKRIHTKEQPYKCKECGKAFNQYSNLTTHNKIHTGEKLYKPEDVTVILTTPQTFSNIK

SEQ ID NO: 10896 - DNA, 560 bp, Homo sapiens
aacagagaagattacgacaaatttctaagtgcagtgtatcttgtttatcttgtgctgacctcctatctcatcctgtgactaagaatgcctaacctggggaggcagccaaatatgcaggttcactgagccagactaaattgtattcagttgaatgcttatcaaggactcaagaatccagacttttatctcttatttacttatgacctggaagccctcacctcaagttgtcctgcattactggatcaaaccaagaaagagagagaggaaggaggaggtggagaaggaaaaagggaccattgacatttatggatgtggccatagaattctgtctggaggagtggcaatgcctggacattgcacagcagaatttatataggaatgtgatgttagagaactacagaaacctggtcttcctgggtattgctgtctctaagccagacctgatcacctgtctggagcaagaaaaagagccttgggagcctatgaggagacatgaaatggtagccaaacccccaggaggcattgtctctctattgaatgttttctttgatgtacagtaa

SEQ ID NO: 10897 - protein, 84 aa, Homo sapiens
MDVAIEFCLEEWQCLDIAQQNLYRNVMLENYRNLVFLGIAVSKPDLITCLEQEKEPWEPMRRHEMVAKPPGGIVSLLNVFFDVQ

SEQ ID NO: 10898 - DNA, 407 bp, Homo sapiens
gagaaggaaccaaccatttacctcttcatttattattttttatttttttgagatggacctgggcaacaagagcgaaactccatctcacgaaaaaaaaaaaaaaaaaaaaaaaggcctgattctttcttgcccggcttatcattgggcagtcagctctgggtcactggaatcctctcacaatcaactagacatctttgcgacatttgaaaatgtccagaacagaattgtgtcatgctgacaagaatggttaattctgctctgtctcagtctaggataaattagtcatgctgttcttgtttctcatcttgtgtaagatggtacccagatgagagtttttgcagttttcttgtagttgggtgaaaaacaggagatctggagactcaaacagataaactaatttctaccat

SEQ ID NO: 10899 - protein, 61 aa, Homo sapiens [sequence omitted]

SEQ ID NO: 10900 - DNA, 577 bp, Homo sapiens
gcttttccgcgttctccaactcgggaatccccggtgactttgtcgcagcctccgttaccctgtgatctgcaagtcctgggagacgcacagctaagatgcccggacatcctggaagctgggaaatgagatggggtttcaccatgttggccaggctgatctcgaactccagacctcaggtcatacgcccgcctcagcctcccaaaagtcctgggattacaggcgtgagccaccgcgcccggcctcttaggaacatttctgaatctcacactcggaggctgtcaaaagttggataattgactttcatatgcgggcctggtccacaggtgatgtgactcttcttcagcctgcaccctgccaaaagaggattgtgatgtatcactggacccagcacctagatgacgtaactctcatcttttgcctggaccttgcatattttgggtgtgattgtgacacatacctctgctcagaatgtgagcgatttgactctcctgcctgggcccagtacacagatgggattgtgacatatcgctggacccagcatgtagatcatgtgaccctatactcttgccttggtgct

SEQ ID NO: 10901 - protein, 90 aa, Homo sapiens
MRAWSTGDVTLLQPAPCQKRIVMYHWTQHLDDVTLIFCLDLAYFGCDCDTYLCSECERFDSPAWAQYTDGIVTYRWTQHVDHVTLYSCLG

SEQ ID NO: 10902 - DNA, 533 bp, Homo sapiens
tgcttttccgcgttctccaactcgggaatccccggtgactttgtcgcagcctccgttaccctgtgatctgcaagtcctgggagacgcacagctaagatgcccggacatcctggaagctgggaaatggtgggttggttactctcagaccaagattcagtacacatgtgaggctgtgactgcactgaaaagcacagtccgcagacaaaattgtggctctcttgcaataccgtcaaccattgagattgtgactcacgtacttagacagacccaacatacaggaggtgttgaccctcatacctggaacctggacatgtgtggaatttctaatctcattcctggactttcctgcagaaaagactgtgacatattcctgacccaaaacgcacgtgatgcgactcctctctccctattcacaggtgatgtgactcttcttcagcctgcaccctgccaaaagaggattgtgatgtatcactggacccagcacctagatgacgtaactctcatcttttgcctggaccttgcatattttgggt

SEQ ID NO: 10903 - protein, 73 aa, Homo sapiens
MCGISNLIPGLSCRKDCDIFLTQNARDATPLSLFTGDVTLLQPAPCQKRIVMYHWTQHLDDVTLIFCLDLAYF

SEQ ID NO: 10904 - DNA, 518 bp, Homo sapiens
tccaactacaaaaatgaaaggagagacccaatcttgctatgctgcccaggctagtcttgaacccctgacctcaagcaatcctcctgtctcagcctcccaagtctctgggattacagacacttccaataagaagactgagccaccaggcagatgttataagcaatgtgagcttgtgctggaagaagagagaatccaccagtgtcctgggccctccaaggcctctctgagggaaagacatttggacagagatgccaaggacaaggaagaggcagtcacccacctctgggcaaggtgcaaaagcccaagattcacgttcatgtgttgcaagcacaaaaagaagatcctgtggctggagtagagtgaggaacagtgagaatggtaggagcagagggcagagaaagtggcaaaaacaaggtcgcatgaggccttgtaagccatggtcaagaggtgatattttattttaaatgaatccaaagtaattgcaagtttttgagcaagtaagcaaaatgctcctttgc

SEQ ID NO: 10905 - protein, 114 aa, Homo sapiens
MKGETQSCYAAQASLEPLTSSNPPVSASQVSGITDTSNKKTEPPGRCYKQCELVLEEERIHQCPGPSKASLRERHLDRDAKDKEEAVTHLWARCKSPRFTFMCCKHKKKILWLE

SEQ ID NO: 10906 - DNA, 2904 bp, Homo sapiens
acagtctactctttccccactgaactgtgtgtcttcatggggagtttgactttgcttctctctctggtgccttctggagcctggaggctctcaacttccatttcaactgcctgacctgggccagccatatctccatgacccatctcccacctggacccattgctagggtgggcggatcccagaggccaggctgttggatttctgcatgactggcctttttctctttgcagtttaattgtcgggacatcagactaacagtgacaataacacatctctgcaaaatataggccacagagcgctggtggaggtagaggtgggggcaggtgtatgtgtcttgttggagggtttcaaaaatggaagacatttccctaaagtttgatcgtcaatgaccttgtcttctagtgatcttcctttaagtttcttgtgtgcatatctgatttctccaactaaactaattaatttatttgataacgcatactacttggttagcattgtgataaatttttaaaggtatttactttttatgtttaattctagcaacaaatccctgatttgttggtagaatcggtacagttaacatccccattttaagatgagtaaactgaggcctgtgggtgggaaaggccgacttcaaaatgaggcagaacgcttcaccactatattgcttcttgcattaaaccttttcctgctctgagtgagcggggtggaaccgatcctctattcctccccaggtcattcactacttaaaaaaaaaatccatggattcttttaatacatgcttgttgtgtgtgtccaggctctgaggatggtggtggactagtcagaccagctgcctcttcttgtcgggacaggactcatgcccgagctctgtttctgatcagtttgcaaggagaatgtatatacccacattgccacttaccacgaggaagctcggcttttcagcgttgcctaagtgcttgagttgcaaaggttcagcaacccagcttgtgttgggtggactggaaaaaggagacagggtccactttttggttacgcagtgggctgccttcaaccccccactcccctcttttctggcagaaaggggctggagtgaaggtgcggggtgggtgttggggagtggcagaaagcggtttccctaggggcggggcccggggtaaggccgaccacagttattccaggattatgactcaaagcacactaacaagaagcatttattacctccgaagtagtgctggctctgtagtgctgaatggagaggtgaggtattgcagctgttatcttttgaactaactgctattgcgtgtcccatgaccagccgtggcagggtttttgttcccatgaatgaatgggctataaatctgtcggagctgacagtagcagcagtactagagggtgtaaagagaaaatgtgcagaagaatcttgtggtctttgcttgcctagaaaatgagttcaataaaatggaggtgatcagtgcttatttatagggcaaacggatacatccagcattggccgtcagagcctaacttagtgttttctcatttacagtcactctgttgtaaagcacatctgtgcaccgagggcactcgtggagcttccagcaattgcagtggtggagacacgtgcagataaaggggtgttttcctctctgtttctaagcttcaggagccttcagaggtagctgtctggagagctgtagttttgagggttctaacaggcaggaaaacccgaggccgagaacagctccttatttatatttcagttttgagggtgaatggcaggaaatggaataaaattaatcgccattttttcaggcccctgaaacaataaatttcagcagccataaatttggagctgggttaagtactgaaaacaatttattgctattttttcccttaattgcattcccaagaagaagggtttggtgcttactggtggcattattatataaaaattattcgttagaaagcacaatgaacagtaaatcagaagcttacctgaaatagggtcagggttcctcacaattcatcttcgcccccacccagcctgtctccagcgaagtcttcaggaaagaaaaggatcagagaaaatgctcccgctgtcccctcgcccctcctccgtgacactgtgtgcagattaggtgttgattcaataagatgcttcaccttctaaaagtgatagtgtgagtcacgtgtggaagcagaggggacataatggaacgatcactgcacggcatccctgcctcgtttaatttgttttgaggctgctagccgtgtcaggctaactgcagtcgaggccaatcaacagcctgaccctgttggtggagaaagttgaaagatagtggcattgtgtcagaagctgctgggatgaagtcaacatccgttcctgtctccccttgggagagccatgttccagggcaaagagagtgatggatttgccattccaaaccagccataagtggagcctgtgcccatcggagagctgctggtggctgaaactgcaattctgatagccatttggggaagagccaatgggtgccaagtgtttatgatgtgacaagtacatctgcatcactgatggtgagagtctcactctgtctcctaggctggagtgcagtggcgtgatctcatctcattgcaacctccacctcctggattcaagtgattctcccgccttgacttcccaagtagctgggtttacggtgcctgccaccacacctggctaatttttgtatttttagtagagatgaggtttcaccatgttggccaggatggtcttgaactcccgacctcaggccacccaaggcagaggctcacagatggaactgcaggccacagtatcaccccatccctcactcttatgacaactaattatcaagaaatttctgtaaaatgaaatcattatac

SEQ ID NO: 10907 - protein, 49 aa, Homo sapiens
MRFHHVGQDGLELPTSGHPRQRLTDGTAGHSITPSLTLMTTNYQEISVK

SEQ ID NO: 10908 - DNA, 835 bp, Homo sapiens
gttcccatccatggcctgctctaggcctgaaggaacacagatggcatttgcaggaagatgacatctcaccatccccatctgagcaaagcctgcccatcaaacaaccaaaggatagccagtcccctgcacagtgtaaagtgacttgcagtgatcctcttccccaaggccagccccagctctcagacctccagtcccaacaagtctttttttgcaaaggaggctcaccctggaacatggctctcccaaggggagacaggaacggatgttgacttcatcccagcagcttctgacacaatgccactatctttcaactttctccaccaacagggtcaggctgttgattggcctcgactgcagttagcctgacacggctagcagcctcaaaacaaattaaacgaggcagggatgccgtgcagtgatcgttccattatgtcccctctgcttccacacgtgactcacactatcacttttagaaggtgaagcatcttattgaatcaacacctaatctgcacacagtgtcacggaggaggggcgaggggacagcgggagcattttctctgatccttttctttcctgaagacttcgctggagacaggctgggtgggggcgaagatgaattgtgaggaaccctgaccctatttcagtactgctgctactgtcagctccgacagatttatagcccattcattcatgggaacaaaaaccctgccacggctggtcatgggacacgcaatagcagttagttcaaaagataacagctgcaatacctcacctctccattcagcactacagagccagcactacttcggaggtaataaatgcttcttgttagtgt

SEQ ID NO: 10909 - protein, 47 aa, Homo sapiens
MGTKTLPRLVMGHAIAVSSKDNSCNTSPLHSALQSQHYFGGNKCFLL

SEQ ID NO: 10910 - DNA, 406 bp, Homo sapiens
tgctgctactgtcagctccgacagatttatagcccattcattcatgggaacaaaaaccctgccacggctggtcatgggacacgcaatagcagttagttcaaaagataacagctgcaatacctcacctctccattcagcactacagagccagcactacttcggagtccacccaacacaagctgggttgctgaacctttgcaactcaagcacttaggcaacgctgaaaagccgagcttcctcgtggtaagtggcaatgtgggtatatacattctccttgcaaactgatcagaaacagagctcgggcatgagtcctgtcccgacaagaagaggcagctggtctgactagtccaccaccatcctcagagcctggacacacacaacaagcatgtattaaaagaatccatgg

SEQ ID NO: 10911 - protein, 56 aa, Homo sapiens
MGTKTLPRLVMGHAIAVSSKDNSCNTSPLHSALQSQHYFGVHPTQAGLLNLCNSST

SEQ ID NO: 10912 - DNA, 361 bp, Homo sapiens
tgaagatcccggtccttcctgccgtggtgctcctctccctcctggtgctccactctgcccagggagccaccctgggtggtcctgaggaagaaagcaccattgagaattatgcgtcacgacccgaggcgtttaaggctgatgagttcctgaactggcacgccctctttgagtctatcaaaaggaaacttcctttcctcaactgggatgcctttcctaagctgaaaggactgaggagcgcaactcctgatgcccagtgaccatgacctccactggaagagggggctagcgtgagcgctgattctcaacctaccataactctttcctgcctcaggaactccaataaaacattttccatccaaca

SEQ ID NO: 10913 - protein, 84 aa, Homo sapiens
KIPVLPAVVLLSLLVLHSAQGATLGGPEEESTIENYASRPEAFKADEFLNWHALFESIKRKLPFLNWDAFPKLKGLRSATPDAQ

SEQ ID NO: 10914 - DNA, 426 bp, Homo sapiens
agagcaccccaaacttgacgccatgaagatcccggtccttcctgccgtggtgctcctctccctcctggtgctccactctgcccagggagccaccctgggtggtcctgaggaagaaagcaccattgagaattatgcgtcacgacccgaggcctttaacaccccgttcctgaacatcgacaaattgcgatctgcgtttaaggctgatgagttcctgaactggcacgccctctttgagtctatcaaaaggaaacttcctttcctcaactgggatgcctttcctaagctgaaaggactgaggagcgcaactcctgatgcccagtgaccatgacctccactggaagagggggctagcgtgagcgctgattctcaacctaccataactctttcctgcctcaggaactccaataaaacattttccatccaaca

SEQ ID NO: 10915 - protein, 99 aa, Homo sapiens; identical to SEQ ID NO: 1813

SEQ ID NO: 10916 - DNA, 485 bp, Homo sapiens
ttgcagtacctcctagaggccacaggggggagagcgcggggccctcccagggaggacgctccgtcctcgctgcacagagagcttcccggagcgtgggtgggggtggaaacccgtggggagctgaagtctcctcagcccagtcactgaggcaccgggggagacgcggaggaagaaagcaccattgagaattatgcgtcacgacccgaggcctttaacaccccgttcctgaacatcgacaaattgcgatctgcgtttaaggctgatgagttcctgaactggcacgccctctttgagtctatcaaaaggaaacttcctttcctcaactgggatgcctttcctaagctgaaaggactgaggagcgcaactcctgatgcccagtgaccatgacctccactggaagagggggctagcgtgagcgctgattctcaacctaccataactctttcctgcctcaggaactccaataaaacattttccatccaaca

SEQ ID NO: 10917 - protein, 77 aa, Homo sapiens
GTGGDAEEESTIENYASRPEAFNTPFLNIDKLRSAFKADEFLNWHALFESIKRKLPFLNWDAFPKLKGLRSATPDAQ

SEQ ID NO: 10918 - DNA, 608 bp, Homo sapiens
gaaagcaagcaagagagaaagaagaaagaaaatgacctaggaccctcggaaagcaccttagggtgggaccacataggcacagctctgagaagatggtgttctagatggagcacagggaccgggatagagatgttacaggggaactgtggagaaaagagcctcctggtggaagggttcagaggtgggacgcagcgaggctgcatgggcgagaggtgatagcttggctcggcagaaccacaaactctgttttaggcggagcaaaagtgaggggcaccacaggcgaacaggcaatttcttgcaaccaccaccgaggccccgaaaagcactggtcgtcagggagctcctccccttggcccccagcctgtgccagccctggcccggctgccacacctctgtttcctaggctggggacccagcttgtctctccttgtttcttcccactgcactgtggtgcttcagtggccaccagcctcgtcacatacaccagcatctttctgtacctcctccctttggtgacctgaagtcactgtgacagttctccaggaaggaggagcttcctacttttgagtttctctgtggaaataaaacatgaatcttgtttccctacg

SEQ ID NO: 10919 - protein, 138 aa, Homo sapiens
MEHRDRDRDVTGELWRKEPPGGRVQRWDAARLHGREVIAWLGRTTNSVLGGAKVRGTTGEQAISCNHHRGPEKHWSSGSSSPWPPACASPGPAATPLFPRLGTQLVSPCFFPLHCGASVATSLVTYTSIFLYLLPLVT

SEQ ID NO: 10920 - DNA, 1811 bp, Homo sapiens
ccttggtcagtacgtgcccaggaaccatgttcaatatcatcttggatcaagtgcactcaggatgataaacgtgctgtgaaaccaactccacagcctgaatgtccacagtcagactggaaaaccttggtgatagccctggtgtgagcctgcccttgctgctgggcccttcatgagcgtggaggccatggcagagtacagggaggccatgaccccacatcactttcctttgatctttttgcaggggggagtctcaccttcttcctcggcttcccgggtgcaacctggcctgctgcagtgggtgaagttttggtaggtgagtgtcagagtgagccgacccaggccacatcctggcagtggaggcacagtcacccggggcagggccaggatcttggtatatcctcagatctcagtgggcagcgacatgaagtcaggtatgctctgggtgcgtgctctaaaggtgataaggaagaggggacctcatggtggggtgtggagaaagacccataataaagtgatctagggctgggtgcagtggctcatgcctgtaatctctgtgctttgggaggctggggtgggaggatcacttgagtctgggagtttgagaccagactgggcaatatagcaagaccccatctctaaaagaacaaaacaaaacaaaccaaaacaaaacaaaccattccagcctgggaaacatggcaaaaccccgtctactaaaaatacaaaaaattagccaggtgaggtggtgcatgattgtaatcccagctactctggaggctgaggtgggagaatcacctgagcttgggaggttgaggctgctgcgaactgcgattgcaccgctgcactccagcctgggcaatcacagtgagaccttgtctcaaaacaaacaaacaaacaaatgaaaaaccttagccaggcatggtgacacatgcctgtagttctagctacttggaaggcagaggcaggaagatcgcttgagcccaggagttcaaaactgcagtgagctatgatcacaccattgcactccaagtctgggcaacagagggagaccctgtctggaaagaaagagagaaagagagagagagagaaagagggaaagaaagcaagcaagagagaaagaagaaagaaaatgacctaggaccctcggaaagcaccttagggtgggaccacataggcacagctctgagaagatggtgttctagatggagcacagggaccgggatagagatgttacaggggaactgtggagaaaagagcctcctggtggaagggttcagaggtgggacgcagcgaggctgcatgggcgagaggtgatagcttggctcggcagaaccacaaactctgttttaggcggagcaaaagtgaggggcaccacaggcgaacaggtaggacagcaaaagaatggtgggtgcccagacgctgggtgaaaagatgccccgtttccgcaggcttaggagtggccacgtgctaccatttgattttctttcttctaggcaatttcttgcaaccaccaccgaggccccgaaaagcactggtcgtcagggagctcctccccttggcccccagcctgtgccagccctggcccggctgccacacctctgtttcctaggctggggacccagcttgtctctccttgtttcttcccactgcactgtggtgcttcagtggccaccagcctcgtcacatacaccagcatctttctgtacctcctccctttggtgacctgaagtcactgtgacagttctccaggaaggaggagcttcctacttttgagtttctctgtggaaataaaacatgaatcttgtttccctacg

SEQ ID NO: 10921 - protein, 47 aa, Homo sapiens
MSVEAMAEYREAMTPHHFPLIFLQGGVSPSSSASRVQPGLLQWVKFW

SEQ ID NO: 10922 - DNA, 602 bp, Homo sapiens
acaagcacatgaacatgaagccggccactgcctctgctctgctcctgctcctgctgggcctggcctggacccaggggagccacggctggggtgcggacgcgtcatcactgcagaaacgtgcaggcagagacgatcagaactacaattacaaccagcatgcgtatcccactgcctatggtgggaagtactcagtcaagacccctgcaaaggggggagtctcaccttcttcctcggcttcccgggtgcaacctggcctgctgcagtgggtgaagttttggtaggcaatttcttgcaaccaccaccgaggccccgaaaagcactggtcgtcagggagctcctccccttggcccccagcctgtgccagccctggcccggctgccacacctctgtttcctaggctggggacccagcttgtctctccttgtttcttcccactgcactgtggtgcttcagtggccaccagcctcgtcacatacaccagcatctttctgtacctcctccctttggtgacctgaagtcactgtgacagttctccaggaaggaggagcttcctacttttgagtttctctgtggaaataaaacatgaatcttgtttccctacg

SEQ ID NO: 10923 - protein, 90 aa, Homo sapiens
MNMKPATASALLLLLLGLAWTQGSHGWGADASSLQKRAGRDDQNYNYNQHAYPTAYGGKYSVKTPAKGGVSPSSSASRVQPGLLQWVKFW

SEQ ID NO: 10924 - DNA, 925 bp, Homo sapiens
cggcggaggaaatggacataaacccgggtgtgaaaagccagggaatgaagcccgcgggagcggggaatctgggattcagggcttcagaggacagggagtttccagcaacatgagggaaataagcaaagagggcaatcgcctccttggaggctctggagacaattataggaactctgagacgtctcctgggatgtttaactttgacactttctggaagaattttaaatccaagctgggtttcatcaactgggatgccataaacaagaaccaggtcccgccccccagcacccgagccctcctctacttcagccgactctgggaggatttcaaacagaacactcctttcctcaactggaaagcaattattgagggtgcggacgcgtcatcactgcagaaacgtgcaggcagagacgatcagccgggtgcaggatggcaggaggtggcagctgtaacttccaagaactacaattacaaccagcatgcgtatcccactgcctatggtgggaagtactcagtcaagacccctgcaaaggggggagtctcaccttcttcctcggcttcccgggtgcaacctggcctgctgcagtgggtgaagttttggtaggcaatttcttgcaaccaccaccgaggccccgaaaagcactggtcgtcagggagctcctccccttggcccccagcctgtgccagccctggcccggctgccacacctctgtttcctaggctggggacccagcttgtctctccttgtttcttcccactgcactgtggtgcttcagtggccaccagcctcgtcacatacaccagcatctttctgtacctcctccctttggtgacctgaagtcactgtgacagttctccaggaaggaggagcttcctacttttgagtttctctgtggaaataaaacatgaatcttgtttccctacg

SEQ ID NO: 10925 - protein, 164 aa, Homo sapiens
MREISKEGNRLLGGSGDNYRNSETSPGMFNFDTFWKNFKSKLGFINWDAINKNQVPPPSTRALLYFSRLWEDFKQNTPFLNWKAIIEGADASSLQKRAGRDDQPGAGWQEVAAVTSKNYNYNQHAYPTAYGGKYSVKTPAKGGVSPSSSASRVQPGLLQWVKFW

SEQ ID NO: 10926 - DNA, 786 bp, Homo sapiens
tggccttctccatgctcggaataacttcctgcagcgaccaacaggctaaagagggggaagggatccagcaccggctcctcctccggcaaccacggtgggagcggcggaggaaatggacataaacccgggaactctgagacgtctcctgggatgtttaactttgacactttctggaagaattttaaatccaagctgggtttcatcaactgggatgccataaacaaggatttcaaacagaacactcctttcctcaactggaaagcaattattgagggtgcggacgcgtcatcactgcagaaacgtgcaggcagagacgatcagaactacaattacaaccagcatgcgtatcccactgcctatggtgggaagtactcagtcaagacccctgcaaaggggggagtctcaccttcttcctcggcttcccgggtgcaacctggcctgctgcagtgggtgaagttttggtaggcaatttcttgcaaccaccaccgaggccccgaaaagcactggtcgtcagggagctcctccccttggcccccagcctgtgccagccctggcccggctgccacacctctgtttcctaggctggggacccagcttgtctctccttgtttcttcccactgcactgtggtgcttcagtggccaccagcctcgtcacatacaccagcatctttctgtacctcctccctttggtgacctgaagtcactgtgacagttctccaggaaggaggagcttcctacttttgagtttctctgtggaaataaaacatgaatcttgtttccctacg

SEQ ID NO: 10927 - protein, 104 aa, Homo sapiens
MFNFDTFWKNFKSKLGFINWDAINKDFKQNTPFLNWKAIIEGADASSLQKRAGRDDQNYNYNQHAYPTAYGGKYSVKTPAKGGVSPSSSASRVQPGLLQWVKFW

SEQ ID NO: 10928 - DNA, 878 bp, Homo sapiens
tggccttctccatgctcggaataacttcctgcagcgaccaacaggctaaagagggggaagggatccagcaccggctcctcctccggcaaccacggtgggagcggcggaggaaatggacataaacccgggaactctgagacgtctcctgggatgtttaactttgacactttctggaagaattttaaatccaagctgggtttcatcaactgggatgccataaacaagaaccaggtcccgccccccagcacccgagccctcctctacttcagccgactctgggaggatttcaaacagaacactcctttcctcaactggaaagcaattattgagggtgcggacgcgtcatcactgcagaaacgtgcaggcagagacgatcagaactacaattacaaccagcatgcgtatcccactgcctatggtgggaagtactcagtcaagacccctgcaaaggggggagtctcaccttcttcctcggcttcccgggtgcaacctggcctgctgcagtgggtgaagttttggtaggcggagcaaaagtgaggggcaccacaggcgaacaggcaatttcttgcaaccaccaccgaggccccgaaaagcactggtcgtcagggagctcctccccttggcccccagcctgtgccagccctggcccggctgccacacctctgtttcctaggctggggacccagcttgtctctccttgtttcttcccactgcactgtggtgcttcagtggccaccagcctcgtcacatacaccagcatctttctgtacctcctccctttggtgacctgaagtcactgtgacagttctccaggaaggaggagcttcctacttttgagtttctctgtggaaataaaacatgaatcttgtttccctacg

SEQ ID NO: 10929 - protein, 123 aa, Homo sapiens
MFNFDTFWKNFKSKLGFINWDAINKNQVPPPSTRALLYFSRLWEDFKQNTPFLNWKAIIEGADASSLQKRAGRDDQNYNYNQHAYPTAYGGKYSVKTPAKGGVSPSSSASRVQPGLLQWVKFW

SEQ ID NO: 10930 - DNA, 885 bp, Homo sapiens
tggccttctccatgctcggaataacttcctgcagcgaccaacaggctaaagagggggaagggatccagcaccggctcctcctccggcaaccacggtgggagcggcggaggaaatggacataaacccgggaactctgagacgtctcctgggatgtttaactttgacactttctggaagaattttaaatccaagctgggtttcatcaactgggatgccataaacaagaaccaggtcccgccccccagcacccgagccctcctctacttcagccgactctgggaggatttcaaacagaacactcctttcctcaactggaaagcaattattgagggtgcggacgcgtcatcactgcagaaacgtgcaggcagagacgatcagccgggtgcaggatggcaggaggtggcagctgtaacttccaagaactacaattacaaccagcatgcgtatcccactgcctatggtgggaagtactcagtcaagacccctgcaaaggggggagtctcaccttcttcctcggcttcccgggtgcaacctggcctgctgcagtgggtgaagttttggtaggcaatttcttgcaaccaccaccgaggccccgaaaagcactggtcgtcagggagctcctccccttggcccccagcctgtgccagccctggcccggctgccacacctctgtttcctaggctggggacccagcttgtctctccttgtttcttcccactgcactgtggtgcttcagtggccaccagcctcgtcacatacaccagcatctttctgtacctcctccctttggtgacctgaagtcactgtgacagttctccaggaaggaggagcttcctacttttgagtttctctgtggaaataaaacatgaatcttgtttccctacg

SEQ ID NO: 10931 - protein, 137 aa, Homo sapiens
MFNFDTFWKNFKSKLGFINWDAINKNQVPPPSTRALLYFSRLWEDFKQNTPFLNWKAIIEGADASSLQKRAGRDDQPGAGWQEVAAVTSKNYNYNQHAYPTAYGGKYSVKTPAKGGVSPSSSASRVQPGLLQWVKFW

SEQ ID NO: 10932 - DNA, 694 bp, Homo sapiens
cacctggccttctccatgctcggaataacttcctgcagcgaccaacaggctaaagagggggaagggatccagcaccggctcctcctccggcaaccacggtgggagcggcggaggaaatggacataaacccgggaattttaaatccaagctgggtttcatcaactgggatgccataaacaagggtgcggacgcgtcatcactgcagaaacgtgcaggcagagacgatcagaactacaattacaaccagcatgcgtatcccactgcctatggtgggaagtactcagtcaagacccctgcaaaggggggagtctcaccttcttcctcggcttcccgggtgcaacctggcctgctgcagtgggtgaagttttggtaggcaatttcttgcaaccaccaccgaggccccgaaaagcactggtcgtcagggagctcctccccttggcccccagcctgtgccagccctggcccggctgccacacctctgtttcctaggctggggacccagcttgtctctccttgtttcttcccactgcactgtggtgcttcagtggccaccagcctcgtcacatacaccagcatctttctgtacctcctccctttggtgacctgaagtcactgtgacagttctccaggaaggaggagcttcctacttttgagtttctctgtggaaataaaacatgaatcttgtttccctacg

SEQ ID NO: 10933 - protein, 37 aa, Homo sapiens
MRIPLPMVGSTQSRPLQRGESHLLPRLPGCNLACCSG

SEQ ID NO: 10934 - DNA, 853 bp, Homo sapiens
cggccacacctggccttctccatgctcggaataacttcctgcagcgaccaacaggctaaagagggggaagggatccagcaccggctcctcctccggcaaccacggtgggagcggcggaggaaatggacataaacccgggaactctgagacgtctcctgggatgtttaactttgacactttctggaagaattttaaatccaagctgggtttcatcaactgggatgccataaacaagaaccaggtcccgccccccagcacccgagccctcctctacttcagccgactctgggaggatttcaaacagaacactcctttcctcaactggaaagcaattattgagggtgcggacgcgtcatcactgcagaaacgtgcaggcagagacgatcagaactacaattacaaccagcatgcgtatcccactgcctatggtgggaagtactcagtcaagacccctgcaaaggggggagtctcaccttcttcctcggcttcccgggtgcaacctggcctgctgcagtgggtgaagttttggtaggcaatttcttgcaaccaccaccgaggccccgaaaagcactggtcgtcagggagctcctccccttggcccccagcctgtgccagccctggcccggctgccacacctctgtttcctaggctggggacccagcttgtctctccttgtttcttcccactgcactgtggtgcttcagtggccaccagcctcgtcacatacaccagcatctttctgtacctcctccctttggtgacctgaagtcactgtgacagttctccaggaaggaggagcttcctacttttgagtttctctgtggaaataaaacatgaatcttgtttccctacg

SEQ ID NO: 10935 - protein, 123 aa, Homo sapiens; identical to SEQ ID NO: 10929

SEQ ID NO: 10936 - DNA, 984 bp, Homo sapiens
ttccgaataccctcggccacacctggccttctccatgctcggaataacttcctgcagcgaccaacaggctaaagagggggaagggatccagcaccggctcctcctccggcaaccacggtgggagcggcggaggaaatggacataaacccgggaactctgagacgtctcctgggatgtttaactttgacactttctggaagaattttaaatccaagctgggtttcatcaactgggatgccataaacaagaaccaggtcccgccccccagcacccgagccctcctctacttcagccgactctgggaggatttcaaacagaacactcctttcctcaactggaaagcaattattgagggtgcggacgcgtcatcactgcagaaacgtgcaggcagagacgatcagaactacaattacaaccagcatgcgtatcccactgcctatggtgggaagtactcagtcaagacccctgcaaaggggggagtctcaccttcttcctcggcttcccgggtgcaacctggcctgctgcagtgggtgaagttttggtaggtgagtgtcagagtgagccgacccaggccacatcctggcagtggaggcacagtcacccggggcagggccaggatcttggtatatcctcagatctcagtgggcagcgacatgaagtcaggcaatttcttgcaaccaccaccgaggccccgaaaagcactggtcgtcagggagctcctccccttggcccccagcctgtgccagccctggcccggctgccacacctctgtttcctaggctggggacccagcttgtctctccttgtttcttcccactgcactgtggtgcttcagtggccaccagcctcgtcacatacaccagcatctttctgtacctcctccctttggtgacctgaagtcactgtgacagttctccaggaaggaggagcttcctacttttgagtttctctgtggaaataaaacatgaatcttgtttccctacg

SEQ ID NO: 10937 - protein, 123 aa, Homo sapiens; identical to SEQ ID NO: 10929

SEQ ID NO: 10938 - DNA, 904 bp, Homo sapiens
agttccgaataccctcggccacacctggccttctccatgctcggaataacttcctgcagcgaccaacaggctaaagagggggaagggatccagcaccggctcctcctccggcaaccacggtgggagcggcggaggaaatggacataaacccgggtgtgaaaagccagggaatgaagcccgcgggagcggggaatctgggattcagaactctgagacgtctcctgggatgtttaactttgacactttctggaagaattttaaatccaagctgggtttcatcaactgggatgccataaacaaggatttcaaacagaacactcctttcctcaactggaaagcaattattgagggtgcggacgcgtcatcactgcagaaacgtgcaggcagagacgatcagccgggtgcaggatggcaggaggtggcagctgtaacttccaagaactacaattacaaccagcatgcgtatcccactgcctatggtgggaagtactcagtcaagacccctgcaaaggggggagtctcaccttcttcctcggcttcccgggtgcaacctggcctgctgcagtgggtgaagttttggtaggcaatttcttgcaaccaccaccgaggccccgaaaagcactggtcgtcagggagctcctccccttggcccccagcctgtgccagccctggcccggctgccacacctctgtttcctaggctggggacccagcttgtctctccttgtttcttcccactgcactgtggtgcttcagtggccaccagcctcgtcacatacaccagcatctttctgtacctcctccctttggtgacctgaagtcactgtgacagttctccaggaaggaggagcttcctacttttgagtttctctgtggaaataaaacatgaatcttgtttccctacg

SEQ ID NO: 10939 - protein, 118 aa, Homo sapiens
MFNFDTFWKNFKSKLGFINWDAINKDFKQNTPFLNWKAIIEGADASSLQKRAGRDDQPGAGWQEVAAVTSKNYNYNQHAYPTAYGGKYSVKTPAKGGVSPSSSASRVQPGLLQWVKFW

SEQ ID NO: 10940 - DNA, 1582 bp, Homo sapiens
attgcgtagttccgaataccctcggccacacctggccttctccatgctcggaataacttcctgcagcgaccaacaggctaaagagggggaagggatccagcaccggctcctcctccggcaaccacggtgggagcggcggaggaaatggacataaacccgggtgtgaaaagccagggaatgaagcccgcgggagcggggaatctgggattcagaactctgagacgtctcctgggatgtttaactttgacactttctggaagaattttaaatccaagctgggtttcatcaactgggatgccataaacaagaaccaggtcccgccccccagcacccgagccctcctctacttcagccgactctgggaggatttcaaacagaacactcctttcctcaactggaaagcaattattgagggtgcggacgcgtcatcactgcagaaacgtgcaggcagagacgatcaggtgagtctctgtcctcaagttaccctgcagggcccttggtcccccttggccttgctcccgggtctgggcaatctgaaattctctttcactcctccattcaatggctttctcagccgggtgcaggatggcaggaggtggcagctgtaacttccaaggtgagacatctaccatggacccgctgggttacgtcctggcacttcttttcttggtctcctaccctcacctcccaagtaacacttgaagagttggcagaggtcttgagggcaggaggaggagtaggaggaggaggcggcggccatttgggctaggacagtaaaggcaggtgagggtgggggccctggctggctggaggagattgtataaaagaaaacacgtgacacaaggaggggagcaggcaggtgttttaggaaaggtctggtccaggcaggaaggtgggatgtttattccagagcaaaatggccttcgtccgtctgttctaaccgccatgcccacttcttccacagaactacaattacaaccagcatgcgtatcccactgcctatggtgggaagtactcagtcaagacccctgcaaaggggggagtctcaccttcttcctcggcttcccgggtgcaacctggcctgctgcagtgggtgaagttttggtaggtgagtgtcagagtgagccgacccaggccacatcctggcagtggaggcacagtcacccggggcagggccaggatcttggtatatcctcagatctcagtgggcagcgacatgaagtcaggcggagcaaaagtgaggggcaccacaggcgaacaggcaatttcttgcaaccaccaccgaggccccgaaaagcactggtcgtcagggagctcctccccttggcccccagcctgtgccagccctggcccggctgccacacctctgtttcctaggctggggacccagcttgtctctccttgtttcttcccactgcactgtggtgcttcagtggccaccagcctcgtcacatacaccagcatctttctgtacctcctccctttggtgacctgaagtcactgtgacagttctccaggaaggaggagcttcctacttttgagtttctctgtggaaataaaacatgaatcttgtttccctacg

SEQ ID NO: 10941 - protein, 159 aa, Homo sapiens
MFIPEQNGLRPSVLTAMPTSSTELQLQPACVSHCLWWEVLSQDPCKGGSLTFFLGFPGATWPAAVGEVLVGECQSEPTQATSWQWRHSHPGQGQDLGISSDLSGQRHEVRRSKSEGHHRRTGNFLQPPPRPRKALVVRELLPLAPSLCQPWPGCHTSVS

SEQ ID NO: 10942 - DNA, 1118 bp, Homo sapiens
attgcgtagttccgaataccctcggccacacctggccttctccatgctcggaataacttcctgcagcgaccaacaggctaaagagggggaagggatccagcaccggctcctcctccggcaaccacggtgggagcggcggaggaaatggacataaacccgggtgtgaaaagccagggaatgaagcccgcgggagcggggaatctgggattcagggcttcagaggacagggagtttccagcaacatgagggaaataagcaaagagggcaatcgcctccttggaggctctggagacaattatagggggcaagggtcgagctggggcagtggaggaggtgacgctgttggtggagtcaatactgtgaactctgagacgtctcctgggatgtttaactttgacactttctggaagaattttaaatccaagctgggtttcatcaactgggatgccataaacaagaaccaggtcccgccccccagcacccgagccctcctctacttcagccgactctgggaggatttcaaacagaacactcctttcctcaactggaaagcaattattgagggtgcggacgcgtcatcactgcagaaacgtgcaggcagagacgatcagccgggtgcaggatggcaggaggtggcagctgtaacttccaagaactacaattacaaccagcatgcgtatcccactgcctatggtgggaagtactcagtcaagacccctgcaaaggggggagtctcaccttcttcctcggcttcccgggtgcaacctggcctgctgcagtgggtgaagttttggtaggcaatttcttgcaaccaccaccgaggccccgaaaagcactggtcgtcagggagctcctccccttggcccccagcctgtgccagccctggcccggctgccacacctctgtttcctaggctggggacccagcttgtctctccttgtttcttcccactgcactgtggtgcttcagtggccaccagcctcgtcacatacaccagcatctttctgtacctcctccctttggtgacctgaagtcactgtgacagttctccaggaaggaggagcttcctacttttgagtttctctgtggaaataaaacatgaatcttgtttccctacg

SEQ ID NO: 10943 - protein, 184 aa, Homo sapiens
MREISKEGNRLLGGSGDNYRGQGSSWGSGGGDAVGGVNTVNSETSPGMFNFDTFWKNFKSKLGFINWDAINKNQVPPPSTRALLYFSRLWEDFKQNTPFLNWKAIIEGADASSLQKRAGRDDQPGAGWQEVAAVTSKNYNYNQHAYPTAYGGKYSVKTPAKGGVSPSSSASRVQPGLLQWVKFW

SEQ ID NO: 10944 - DNA, 1003 bp, Homo sapiens
attgcgtagttccgaataccctcggccacacctggccttctccatgctcggaataacttcctgcagcgaccaacaggctaaagagggggaagggatccagcaccggctcctcctccggcaaccacggtgggagcggcggaggaaatggacataaacccgggtgtgaaaagccagggaatgaagcccgcgggagcggggaatctgggattcagaactctgagacgtctcctgggatgtttaactttgacactttctggaagaattttaaatccaagctgggtttcatcaactgggatgccataaacaagaaccaggtcccgccccccagcacccgagccctcctctacttcagccgactctgggaggatttcaaacagaacactcctttcctcaactggaaagcaattattgagggtgcggacgcgtcatcactgcagaaacgtgcaggcagagacgatcagccgggtgcaggatggcaggaggtggcagctgtaacttccaagaactacaattacaaccagcatgcgtatcccactgcctatggtgggaagtactcagtcaagacccctgcaaaggggggagtctcaccttcttcctcggcttcccgggtgcaacctggcctgctgcagtgggtgaagttttggtaggcggagcaaaagtgaggggcaccacaggcgaacaggcaatttcttgcaaccaccaccgaggccccgaaaagcactggtcgtcagggagctcctccccttggcccccagcctgtgccagccctggcccggctgccacacctctgtttcctaggctggggacccagcttgtctctccttgtttcttcccactgcactgtggtgcttcagtggccaccagcctcgtcacatacaccagcatctttctgtacctcctccctttggtgacctgaagtcactgtgacagttctccaggaaggaggagcttcctacttttgagtttctctgtggaaataaaacatgaatcttgtttccctacg

SEQ ID NO: 10945 - protein, 147 aa, Homo sapiens
MAGGGSCNFQELQLQPACVSHCLWWEVLSQDPCKGGSLTFFLGFPGATWPAAVGEVLVGGAKVRGTTGEQAISCNHHRGPEKHWSSGSSSPWPPACASPGPAATPLFPRLGTQLVSPCFFPLHCGASVATSLVTYTSIFLYLLPLVT

SEQ ID NO: 10946 - DNA, 968 bp, Homo sapiens
attgcgtagttccgaataccctcggccacacctggccttctccatgctcggaataacttcctgcagcgaccaacaggctaaagagggggaagggatccagcaccggctcctcctccggcaaccacggtgggagcggcggaggaaatggacataaacccgggtgtgaaaagccagggaatgaagcccgcgggagcggggaatctgggattcagaactctgagacgtctcctgggatgtttaactttgacactttctggaagaattttaaatccaagctgggtttcatcaactgggatgccataaacaagaaccaggtcccgccccccagcacccgagccctcctctacttcagccgactctgggaggatttcaaacagaacactcctttcctcaactggaaagcaattattgagggtgcggacgcgtcatcactgcagaaacgtgcaggcagagacgatcagccgggtgcaggatggcaggaggtggcagctgtaacttccaagaactacaattacaaccagcatgcgtatcccactgcctatggtgggaagtactcagtcaagacccctgcaaaggggggagtctcaccttcttcctcggcttcccgggtgcaacctggcctgctgcagtgggtgaagttttggtaggcaatttcttgcaaccaccaccgaggccccgaaaagcactggtcgtcagggagctcctccccttggcccccagcctgtgccagccctggcccggctgccacacctctgtttcctaggctggggacccagcttgtctctccttgtttcttcccactgcactgtggtgcttcagtggccaccagcctcgtcacatacaccagcatctttctgtacctcctccctttggtgacctgaagtcactgtgacagttctccaggaaggaggagcttcctacttttgagtttctctgtggaaataaaacatgaatcttgtttccctacg

SEQ ID NO: 10947 - protein, 137 aa, Homo sapiens; identical to SEQ ID NO: 10931

SEQ ID NO: 10948 - DNA, 964 bp, Homo sapiens
ccggcctgcggtgggcagcagctcaggttctccaaatcattgcgtagttccgaataccctcggccacacctggccttctccatgctcggaataacttcctgcagcgaccaacaggctaaagagggggaagggatccagcaccggctcctcctccggcaaccacggtgggagcggcggaggaaatggacataaacccgggtgtgaaaagccagggaatgaagcccgcgggagcggggaatctgggattcagaactctgagacgtctcctgggatgtttaactttgacactttctggaagaattttaaatccaagctgggtttcatcaactgggatgccataaacaagaaccaggtcccgccccccagcacccgagccctcctctacttcagccgactctgggaggatttcaaacagaacactcctttcctcaactggaaagcaattattgagggtgcggacgcgtcatcactgcagaaacgtgcaggcagagacgatcagaactacaattacaaccagcatgcgtatcccactgcctatggtgggaagtactcagtcaagacccctgcaaaggggggagtctcaccttcttcctcggcttcccgggtgcaacctggcctgctgcagtgggtgaagttttggtaggcaatttcttgcaaccaccaccgaggccccgaaaagcactggtcgtcagggagctcctccccttggcccccagcctgtgccagccctggcccggctgccacacctctgtttcctaggctggggacccagcttgtctctccttgtttcttcccactgcactgtggtgcttcagtggccaccagcctcgtcacatacaccagcatctttctgtacctcctccctttggtgacctgaagtcactgtgacagttctccaggaaggaggagcttcctacttttgagtttctctgtggaaataaaacatgaatcttgtttccctacg

SEQ ID NO: 10949 - protein, 123 aa, Homo sapiens; identical to SEQ ID NO: 10929

SEQ ID NO: 10950 - DNA, 873 bp, Homo sapiens
cccggcctgcggtgggcagcagctcagggatccagcaccggctcctcctccggcaaccacggtgggagcggcggaggaaatggacataaacccgggatctcccgactctggctcacaaagtgggttcttctctcatcccatatctccttggttccatagaactctgagacgtctcctgggatgtttaactttgacactttctggaagaattttaaatccaagctgggtttcatcaactgggatgccataaacaagaaccaggtcccgccccccagcacccgagccctcctctacttcagccgactctgggaggatttcaaacagaacactcctttcctcaactggaaagcaattattgagggtgcggacgcgtcatcactgcagaaacgtgcaggcagagacgatcagaactacaattacaaccagcatgcgtatcccactgcctatggtgggaagtactcagtcaagacccctgcaaaggggggagtctcaccttcttcctcggcttcccgggtgcaacctggcctgctgcagtgggtgaagttttggtaggcaatttcttgcaaccaccaccgaggccccgaaaagcactggtcgtcagggagctcctccccttggcccccagcctgtgccagccctggcccggctgccacacctctgtttcctaggctggggacccagcttgtctctccttgtttcttcccactgcactgtggtgcttcagtggccaccagcctcgtcacatacaccagcatctttctgtacctcctccctttggtgacctgaagtcactgtgacagttctccaggaaggaggagcttcctacttttgagtttctctgtggaaataaaacatgaatcttgtttccctacg

SEQ ID NO: 10951 - protein, 123 aa, Homo sapiens; identical to SEQ ID NO: 10929

SEQ ID NO: 10952 - DNA, 410 bp, Homo sapiens
tcgcctcccctcctgccactcagatctcccgactctggctcacaaagtgggttcttctctcatcccatatctccttggttccatagaactctgagacgtctcctgggatgtttaactttgacactttctggaagaattttaaatccaagctgggtttcatcaactgggatgccataaacaagaaccaggtcccgccccccagcacccgagccctcctctacttcagccgactctgggaggatttcaaacagaacactcctttcctcaactggaaagcaattattgagggtgcggacgcgtcatcactgcagaaacgtgcaggcagagacgatcaggtgagtctctgtcctcaagttaccctgcagggcccttggtcccccttggccttgctcccgggtctgggcaatctg

SEQ ID NO: 10953 - protein, 100 aa, Homo sapiens
MFNFDTFWKNFKSKLGFINWDAINKNQVPPPSTRALLYFSRLWEDFKQNTPFLNWKAIIEGADASSLQKRAGRDDQVSLCPQVTLQGPWSPLALLPGLGN

SEQ ID NO: 10954 - DNA, 306 bp, Homo sapiens
tcggaataacttcctgcagcgaccaacaggctaaagagggggaagggatccagcaccggctcctcctccggcaaccacggtgggagcggcggaggaaatggacataaacccgggaattttaaatccaagctgggtttcatcaactgggatgccataaacaaggaccagagaagctctcgcatcccgtgacctccagacaaggagccaccagattggatgggagcccccacactccctccttaaaacaccaccctctcatcactaatctcagcccttgcccttgaaataaaccttagctgccccaca

SEQ ID NO: 10955 - protein, 59 aa, Homo sapiens
LPAATNRLKRGKGSSTGSSSGNHGGSGGGNGHKPGNFKSKLGFINWDAINKDQRSSRIP

SEQ ID NO: 10956 - DNA, 515 bp, Homo sapiens
ggccttctccatgctcggaataacttcctgcagcgaccaacaggctaaagagggggaagggatccagcaccggctcctcctccggcaaccacggtgggagcggcggaggaaatggacataaacccgggtgtgaaaagccagggaatgaagcccgcgggagcggggaatctgggattcagggcttcagaggacagggagtttccagcaacatgagggggcaagggtcgagctggggcagtggaggaggtgacgctgttggtggagtcaatactgtgaactctgagacgtctcctgggatgtttaactttgacactttctggaagaattttaaatccaagctgggtttcatcaactgggatgccataaacaaggaccagagaagctctcgcatcccgtgacctccagacaaggagccaccagattggatgggagcccccacactccctccttaaaacaccaccctctcatcactaatctcagcccttgcccttgaaataaaccttagctgccccaca

SEQ ID NO: 10957 - protein, 62 aa, Homo sapiens
MRGQGSSWGSGGGDAVGGVNTVNSETSPGMFNFDTFWKNFKSKLGFINWDAINKDQRSSRIP

SEQ ID NO: 10958 - DNA, 577 bp, Homo sapiens
ttgcgtagttccgaataccctcggccacacctggccttctccatgctcggaataacttcctgcagcgaccaacaggctaaagagggggaaggtctggaggttggaaagaggactggaatctgattggggttccaacaaatctgtaacaccgctgggaacgactgggtcccctttaggtcctttaggacagcgtttgaaatcttgctttcccctgcagggatccagcaccggctcctcctccggcaaccacggtgggagcggcggaggaaatggacataaacccgggtgtgaaaagccagggaatgaagcccgcgggagcggggaatctgggattcagaactctgagacgtctcctgggatgtttaactttgacactttctggaagaattttaaatccaagctgggtttcatcaactgggatgccataaacaaggaccagagaagctctcgcatcccgtgacctccagacaaggagccaccagattggatgggagcccccacactccctccttaaaacaccaccctctcatcactaatctcagcccttgcccttgaaataaaccttagctgccccaca

SEQ ID NO: 10959 - protein, 52 aa, Homo sapiens
MDINPGVKSQGMKPAGAGNLGFRTLRRLLGCLTLTLSGRILNPSWVSSTGMP

SEQ ID NO: 10960 - DNA, 452 bp, Homo sapiens
attgcgtagttccgaataccctcggccacacctggccttctccatgctcggaataacttcctgcagcgaccaacaggctaaagagggggaagggatccagcaccggctcctcctccggcaaccacggtgggagcggcggaggaaatggacataaacccgggtgtgaaaagccagggaatgaagcccgcgggagcggggaatctgggattcagaactctgagacgtctcctgggatgtttaactttgacactttctggaagaattttaaatccaagctgggtttcatcaactgggatgccataaacaaggaccagagaagctctcgcatcccgtgacctccagacaaggagccaccagattggatgggagcccccacactccctccttaaaacaccaccctctcatcactaatctcagcccttgcccttgaaataaaccttagctgccccaca

SEQ ID NO: 10961 - protein, 52 aa, Homo sapiens; identical to SEQ ID NO: 10959

SEQ ID NO: 10962 - DNA, 406 bp, Homo sapiens
aaatcattgcgtagttccgaataccctcggccacacctggccttctccatgctcggaataacttcctgcagcgaccaacaggctaaagagggggaagggatccagcaccggctcctcctccggcaaccacggtgggagcggcggaggaaatggacataaacccgggaactctgagacgtctcctgggatgtttaactttgacactttctggaagaattttaaatccaagctgggtttcatcaactgggatgccataaacaaggaccagagaagctctcgcatcccgtgacctccagacaaggagccaccagattggatgggagcccccacactccctccttaaaacaccaccctctcatcactaatctcagcccttgcccttgaaataaaccttagctgccccaca

SEQ ID NO: 10963 - protein, 36 aa, Homo sapiens
MLGITSCSDQQAKEGEGIQHRLLLRQPRWERRRKWT

SEQ ID NO: 10964 - DNA, 580 bp, Homo sapiens
gggaggcagcggctcacagtcgggcagcagtggcagtggcagcaatggtgacaacaacaatggcagcagcagtggtggcagcagcagtggcagcagcagtggcggcagcagtggcggcagcagtggtggcagcagtggcaacagtggtggcagcagaggtgacagcggcagtgagtcctcctggggatccagcaccggctcctcctccggcaaccacggtgggagcggcggaggaaatggacataaacccgggtgtgaaaagccagggaatgaagcccgcgggagcggggaatctgggattcagggcttcagaggacagggagtttccagcaacatgaggaactctgagacgtctcctgggatgtttaactttgacactttctggaagaattttaaatccaagctgggtttcatcaactgggatgccataaacaaggaccagagaagctctcgcatcccgtgacctccagacaaggagccaccagattggatgggagcccccacactccctccttaaaacaccaccctctcatcactaatctcagcccttgcccttgaaataaaccttagctgccccaca

SEQ ID NO: 10965 - protein, 97 aa, Homo sapiens [sequence omitted]

SEQ ID NO: 10966 - DNA, 2810 bp, Homo sapiens
ttaaaatgcctcttgtaaataccttagtattttggggagtttctgggaattctgtcggacaggactgctttatttatggtagctttagagtatgttactatctacctcttatcttcacttaccatttatcttttccagtgttttcttacctattcttaaactttcattctcctaaaaaaatgtcagtgtttggaccagttccaaaagagagtgccattaggattcttagaggaatcatattaaatcaatacattaattttcgggggtggcctcaggatcttcagcaggggtctgtgtttctttgtctcaccctgcagggcttcagaggacagggagtttccagcaacatgagggtaagaggatggtagatgtggggtcagagactgtgccggtagtaagtggggtagaggtctgttctccaggagcaatactggcagacaggtggtcccacatccctgccaggtctacctgagagctctgggaacgaggaagtactgatgggtctggccatgtttcacagcagataaagcaggactccagaggagcccacctctcccttaagaggggaccagccagtctactctatgccgcctcagcccccactggctctccagctagcatctcctttttttactaatgccaatcagcccagacagggtccttcagtttgaatcaatttagtgtaacagcctggcccactccagctccaaagccaggggagaattcggatgctttgctggcaaagccctccctgatggattttgggcggcttgcagaaatgaacataaacagagatggcgatgttatctatggacatcgtaagtgagcagccacccgacccacaggagcttgaaacgagatctcagggcagatggaacttccccgagagaaggacctctttctcaggcctctgggaagtcctctgtcatgctcatgtctcagtcccccgattcaggaatccctcgccgacaccctgcttccttgccctctcgtccccctgcccgcctgcctccccatcaactcctctccgttttctgtctccctaggaaataagcaaagagggcaatcgcctccttggaggctctggagacaattatagggtgagcctaggggcaggcagggttggctttaggagaagggatggtgaagcatgctaagatcctgggaaaagaaacaaaaatatcagtttcttcttgcaagctgctctgaatctgcgtccagtgaccatcaagagaccaaaacagggttctgggatccccatctccatctttggttcattcattccttccttccttttgatttggatcggagccatgttacttttgtaaggggagaaaacagataaaagtaacagaagaatggtcaaggggatttccatacttagggaggcagtgttgagaaggagaaagtcactgagctttgaggtagaagatgaggtttcgaaagccagctctggccaggcaccagcataactgtaatcccagcactttgggaggctgaggtgtggggatcatttgagcccagaagtttgagaccagcctgagcaacgtaggaagaccctgtctctactttttaaaaagaaaataataggccatgtgcagtggctcacacctgtaatcccaggtagctaggattacatgcctcagcctcccaagtagctgggattacaggcatgtgccaccatgcctgactaattttgtatttttagtagagatggggtttcactatgttggccaggctgttttcaaactcctgacctcaggtgatccacccacctcggcctctcaaagtgctgggattacaggcgtgacccacgatgcccagcctcaaaaaaatttaagatatatattaaaatcaccaccagctctatcatgtcatctgtatatcttcaggcaagtcagctaacctctccgagcctgagcttcctccagtaaaatgaggacagtgaaacctgactcacgcagccttcagttactgtacagctttccatgtcaccaccagaccaaggtgttgtggagtccagactctggagacagatgctgcataaggcatggtgcttggcgtgccgtgggactacacgttagctaatctcatttgcttgaggtgttttggggacagaccaggatggaggcaagagtctgaatattgagattcaggggactgggtggggttccatgggagcaatccattctaagaaagctttcccaagtgaactttttggtgctgtgtaaggaagagaaggcagctttatagagaggaggacaggaagcctggaccgaggtggggatgaagcaatccggggcaggttgacaggtggcaggcatgataggaagcataagccttggacatcggtcccccttttccccacccaggggcaagggtcgagctggggcagtggaggaggtgacgctgttggtggagtcaatactgtggtgagtggaggcaacactccaccttgggctgggaccatggtgtcacacaatcctcgcctcccctcctgccactcagatctcccgactctggctcacaaagtgggttcttctctcatcccatatctccttggttccatagaactctgagacgtctcctgggatgtttaactttgacactttctggaagaattttaaatccaagctgggtttcatcaactgggatgccataaacaaggaccagagaagctctcgcatcccgtgacctccagacaaggagccaccagattggatgggagcccccacactccctccttaaaacaccaccctctcatcactaatctcagcccttgcccttgaaataaaccttagctgccccac

SEQ ID NO: 10967 - protein, 33 aa, Homo sapiens
MFNFDTFWKNFKSKLGFINWDAINKDQRSSRIP

SEQ ID NO: 10968 - DNA, 350 bp, Homo sapiens
tccggcaaccacggtgggagcggcggaggaaatggacataaacccgggatctcccgactctggctcacaaagtgggttcttctctcatcccatatctccttggttccatagaactctgagacgtctcctgggatgtttaactttgacactttctggaagaattttaaatccaagctgggtttcatcaactgggatgccataaacaaggaccagagaagctctcgcatcccgtgacctccagacaaggagccaccagattggatgggagcccccacactccctccttaaaacaccaccctctcatcactaatctcagcccttgcccttgaaataaaccttagctgccccac

SEQ ID NO: 10969 - protein, 56 aa, Homo sapiens
MDINPGSPDSGSQSGFFSHPISPWFHRTLRRLLGCLTLTLSGRILNPSWVSSTGMP

SEQ ID NO: 10970 - DNA, 442 bp, Homo sapiens
cttctccatgctcggaataacttcctgcagcgaccaacaggctaaagagggggaaggtctggaggttggaaagaggactggaatctgattggggttccaacaaatctgtaacaccgctgggaacgactgggtcccctttaggtcctttaggacagcgtttgaaatcttgctttcccctgcagggatccagcaccggctcctcctccggcaaccacggtgggagcggcggaggaaatggacataaacccgggaattttaaatccaagctgggtttcatcaactgggatgccataaacaaggaccagagaagctctcgcatcccgtgacctccagacaaggagccaccagattggatgggagcccccacactccctccttaaaacaccaccctctcatcactaatctcagcccttgcccttgaaataaaccttagctgccccac

SEQ ID NO: 10971 - protein, 101 aa, Homo sapiens
LPAATNRLKRGKVWRLERGLESDWGSNKSVTPLGTTGSPLGPLGQRLKSCFPLQGSSTGSSSGNHGGSGGGNGHKPGNFKSKLGFINWDAINKDQRSSRIP

SEQ ID NO: 10972 - DNA, 369 bp, Homo sapiens
gccttctccatgctcggaataacttcctgcagcgaccaacaggctaaagagggggaagggatccagcaccggctcctcctccggcaaccacggtgggagcggcggaggaaatggacataaacccgggtgtgaaaagccagggaatgaagcccgcgggagcggggaatctgggattcagaattttaaatccaagctgggtttcatcaactgggatgccataaacaaggaccagagaagctctcgcatcccgtgacctccagacaaggagccaccagattggatgggagcccccacactccctccttaaaacaccaccctctcatcactaatctcagcccttgcccttgaaataaaccttagctgccccac

SEQ ID NO: 10973 - protein, 36 aa, Homo sapiens; identical to SEQ ID NO: 10963

SEQ ID NO: 10974 - DNA, 609 bp, Homo sapiens
gattacagacgccagccaccacctctggctaatttttttttgtatttttagtagagatggggtttcaccatgttggccaggctggtctcaaactcctgatctcaggtgatctgtccgcctcggcctctcaaagtgctgggattacaggcgtgacccacgatgcccagcctcaaaaaaatttaagatatatattaaaatcaccaccagctctatcatgtcatctgtatatcttcaggcaagtcagctaacctctccgagcctgagcttcctccagtaaaatgaggacagtgaaacctgactcacgcagccttcagttactgtacagctttccatgtcaccaccagaccaaggtgttgtggagtccagactctggagacagatgctgcataaggcatggtgcttggcgtgccgtgggactacacgttagctaatctcatttgcttgaggtgttttggggacagaccaggatggaggcaagagtctgaatattgagattcaggggactgggtggggttccatgggagcaatccattctaagaaagctttcccaagtgaactttttggtgctgtgtaaggaagagaaggcagctttatagagaggaggacagg

SEQ ID NO: 10975 - protein, 63 aa, Homo sapiens [sequence omitted]

SEQ ID NO: 10976 - DNA, 686 bp, Homo sapiens
ataacttcctgcagcgaccaacaggctaaagagggggaagggatccagcaccggctcctcctccggcaaccacggtgggagcggcggaggaaatggacataaacccgggtgtgaaaagccagggaatgaagcccgcgggagcggggaatctgggattcaggtgagagccaaagtctcttaagtctcctggggactgcagttcctgcccaggactgtgcccactcctcctaactcaactctgctcaaccccctcctgccttgtctgcagggaactgactatttcggcagaagaaaccaaatgcactcctaaaaatgctaacgatttccaaagtactaattaattgcaaatcttgctgtgatatacctcaccttataccacagatggggctgggagaaattccatgtaaaccggtccttttagaagcacaattgtcttaaatgtcctctatccagccggggaacagactgtggtgaactctgggggattcagagtgctttggaaaaacattccccccagttatgctggaaatgtgggctttatgtcagcacctgtggtgctgagagttagtgtcacggagatcttgtgaaagtgcaggttgctctaacagggctgggtggggctgagcctgttagccgcgttgctaacaagctcctgggtgaggcgttggtgggaaaggacccacgtg

SEQ ID NO: 10977 - protein, 41 aa, Homo sapiens
MLTISKVLINCKSCCDIPHLIPQMGLGEIPCKPVLLEAQLS

SEQ ID NO: 10978 - DNA, 418 bp, Homo sapiens
gaataccctcggccacacctggccttctccatgctcggaataacttcctgcagcgaccaacaggctaaagagggggaagggatccagcaccggctcctcctccggcaaccacggtgggagcggcggaggaaatggacataaacccggggtgagtggctggcgtgaatctcccaccaaccgcgggaaggaaaaggagagcagctggtttcactcgcaggatcggggagccaaggctccgcggagatggggctggatggccgcggaggtggagcggaagcggctcgccccagggttaaaatgctgccattttggggctgggactggtctgggaggggactgagggaaagtctcccctttctctccccggcagtgtgaaaagccagggaatgaagcccgcgggagcggggaatctgggatt

SEQ ID NO: 10979 - protein, 36 aa, Homo sapiens; identical to SEQ ID NO: 10963

SEQ ID NO: 10980 - DNA, 857 bp, Homo sapiens
tctgagaagcccaggcagttgaggacaggagagagaaggctgcagacccagagggagggaggacagggagtcggaaggaggaggacagaggagggcacagagacgcagagcaagggcggcaaggaggagaccctggtgggaggaagacactctggagagagagggggctgggcagagatgaagttccaggggcccctggcctgcctcctgctggccctctgcctgggcagtggggaggctggccccctgcagagcggagaggaaagcactgggacaaatattggggaggcccttggacatggcctgggagacgccctgagcgaaggggtgggaaaggccattggcaaagaggccggaggggcagctggctctaaagtcagtgaggcccttggccaagggaccagagaagcagttggcactggagtcaggcaggttccaggctttggcgtagcagatgctttgggcaacagggtcggggaagcagcccatgctctgggaaacactgggcacgagattggcagacaggcagaagatgtcattcgacacggagcagatgctgtccgcggctcctggcagggggtgcctggccacaatggtgcttgggaaacttctggaggccatggcatctttggctctcaaggtggccttggaggccagggccagggcaatcctggaggtctggggactccgtgggtccacggataccccggaaactcagcaggcagctttggaatgaatcctcagggagctccctggggtcaaggaggcaatggagggccaccaaactttgggaccaacactcagggagctgtggcccagcctggctatggttcagtgagagccagcaaccagaatga

SEQ ID NO: 10981 - protein, 225 aa, Homo sapiens
MKFQGPLACLLLALCLGSGEAGPLQSGEESTGTNIGEALGHGLGDALSEGVGKAIGKEAGGAAGSKVSEALGQGTREAVGTGVRQVPGFGVADALGNRVGEAAHALGNTGHEIGRQAEDVIRHGADAVRGSWQGVPGHNGAWETSGGHGIFGSQGGLGGQGQGNPGGLGTPWVHGYPGNSAGSFGMNPQGAPWGQGGNGGPPNFGTNTQGAVAQPGYGSVRASNQ

SEQ ID NO: 10982 - DNA, 2151 bp, Homo sapiens
agaattctttggcaggggcgaccttagaatcctggggaggagcgagaatggaatcccggggaggaacaggggtggaatccggggggcggggtcagaacgccaggagggggcggggccggagccagggtcggcttgactcgggggagcagcgggtggatcctgtgacgtcagcgggttcgaaccgccggagctgagcgagaggccgggggtgccgagccgggcggggagagctgggccgggagagcagaacagggaggctagagcgcagcgggaaccggcccggagccggagccggagccccacaggcacctactaaaccgcccagccgatcggcccccacagagtggcccgcgggcctccggccgggcccagtcccctcccgggccctccatggcccgggccgctgccctcctgccgtcgagatcgccgccgacgccgctgctgtggccgctgctgctgctgctgctcctggaaaccggagcccaggatgtgcgagttcaagtgctacccgaggtgcgaggccagctcgggggcaccgtggagctgccgtgccacctgctgccacctgttcctggactgtacatctccctggtgacctggcagcgcccagatgcacctgcgaaccaccagaatgtggccgccttccaccctaagatgggtcccagcttccccagcccgaagcctggcagcgagcggctgtccttcgtctctgccaagcagagcactgggcaagacacagaggcagagctccaggacgccacgctggccctccacgggctcacggtggaggacgagggcaactacacttgcgagtttgccaccttccccaaggggtccgtccgagggatgacctggctcagagtcatagccaagcccaagaaccaagctgaggcccagaaggtcacgttcagccaggaccctacgacagtggccctctgcatctccaaagagggccgcccacctgcccggatctcctggctctcatccctggactgggaagccaaagagactcaggtgtcagggaccctggccggaactgtcactgtcaccagccgcttcaccttggtgccctcgggccgagcagatggtgtcacggtcacctgcaaagtggagcatgagagcttcgaggaaccagccctgatacctgtgaccctctctgtacgctaccctcctgaagtgtccatctccggctatgatgacaactggtacctcggccgtactgatgccaccctgagctgtgacgtccgcagcaacccagagcccacgggctatgactggagcacgacctcaggcaccttcccgacctccgcagtggcccagggctcccagctggtcatccacgcagtggacagtctgttcaataccaccttcgtctgcacagtcaccaatgccgtgggcatgggccgcgctgagcaggtcatctttgtccgagaaacccccagggcctcgccccgagatgtgggcccgctggtgtggggggccgtgggggggacactgctggtgctgctgcttctggctggggggtccttggccttcatcctgctgagggtgaggaggaggaggaagagccctggaggagcaggaggaggagccagtggcgacgggggattctacgatccgaaagctcaggtgttgggaaatggggaccccgtcttctggacaccagtagtccctggtcccatggaaccagatggcaaggatgaggaggaggaggaggaggaagagaaggcagagaaaggcctcatgttgcctccacccccagcactcgaggatgacatggagtcccagctggacggctccctcatctcacggcgggcagtttatgtgtgacctggacacagacagagacagagccaggcccggccctcccgcccccgacctgaccacgccggcctagggttccagactggttggacttgttcgtctggacgacactggagtggaacactgcctcccactttcttgggacttggagggaggtggaacagcacactggacttctcccgtctctagggctgcatggggagcccggggagctgagtagtggggatccagagaggacccccgcccccagagacttggttttggctccagccttcccctggccccgtgacactcaggagttaataaatgccttggaggaaaacatca

SEQ ID NO: 10983 - protein, 479 aa, Homo sapiens; identical to SEQ ID NO: 1819

SEQ ID NO: 10984 - DNA, 2856 bp, Homo sapiens
agaattctttggcaggggcgaccttagaatcctggggaggagcgagaatggaatcccggggaggaacaggggtggaatccggggggcggggtcagaacgccaggagggggcggggccggagccagggtcggcttgactcgggggagcagcgggtggatcctgtgacgtcagcgggttcgaaccgccggagctgagcgagaggccgggggtgccgagccgggcggggagagctgggccgggagagcagaacagggaggctagagcgcagcgggaaccggcccggagccggagccggagccccacaggcacctactaaaccgcccagccgatcggcccccacagagtggcccgcgggcctccggccgggcccagtcccctcccgggccctccatggcccgggccgctgccctcctgccgtcgagatcgccgccgacgccgctgctgtggccgctgctgctgctgctgctcctggaaaccggagcccaggatgtgcgagttcaagtgctacccgaggtgcgaggccagctcgggggcaccgtggagctgccgtgccacctgctgccacctgttcctggactgtacatctccctggtgacctggcagcgcccagatgcacctgcgaaccaccagaatgtggccgccttccaccctaagatgggtcccagcttccccagcccgaagcctggcagcgagcggctgtccttcgtctctgccaagcagagcactgggcaagacacagaggcagagctccaggacgccacgctggccctccacgggctcacggtggaggacgagggcaactacacttgcgagtttgccaccttccccaaggggtccgtccgagggatgacctggctcagagtcatagccaagcccaagaaccaagctgaggcccagaaggtcacgttcagccaggaccctacgacagtggccctctgcatctccaaagagggccgcccacctgcccggatctcctggctctcatccctggactgggaagccaaagagactcaggtgtcagggaccctggccggaactgtcactgtcaccagccgcttcaccttggtgccctcgggccgagcagatggtgtcacggtcacctgcaaagtggagcatgagagcttcgaggaaccagccctgatacctgtgaccctctctgtacgctaccctcctgaagtgtccatctccggctatgatgacaactggtacctcggccgtactgatgccaccctgagctgtgacgtccgcagcaacccagagcccacgggctatgactggagcacgacctcaggcaccttcccgacctccgcagtggcccagggctcccagctggtcatccacgcagtggacagtctgttcaataccaccttcgtctgcacagtcaccaatgccgtgggcatgggccgcgctgagcaggtcatctttgtccgagagacccccaacacagcaggcgcaggggccacaggcggcatcatcgggggcatcatcgccgccatcattgctactgctgtggctgccacgggcatccttatctgccggcagcagcggaaggagcagacgctgcagggggcagaggaggacgaagacctggagggacctccctcctacaagccaccaaccccaaaagcgaagctggaggcacaggagatgccctcccagctcttcactctgggggcctcggagcacagcccactcaagaccccctactttgatgctggcgcctcatgcactgagcaggaaatgcctcgataccatgagctgcccaccttggaagaacggtcaggacccttgcaccctggagccacaagcctggggtcccccatcccggtgcctccagggccacctgctgtggaagacgtttccctggatctagaggatgaggagggggaggaggaggaagagtatctggacaagatcaaccccatctatgatgctctgtcctatagcagcccctctgattcctaccagggcaaaggctttgtcatgtcccgggccatgtatgtgtgagctgccatgcgcctggcgtctcacatctcacctgttgatcccttagctttcttgccaaggatctagtgccccctgacctctggccaggccactgtcagttaacacatatgcattccatttgtgatgtctaccttggtggctccactatgacccctaacccatgagcccagagaaattcaccgtgataatggaatcctggcaaccttatctcatgaggcaggaggtggggaaggtgcttctgcacaacctctgatcccaaggactcctctcccagactgtgaccttagaccatacctctcaccccccaatgcctcgactcccccaaaatcacaaagaagaccctagacctataatttgtcttcaggtagtaaattcccaataggtctgctggagtgggcgctgagggctccctgctgctcagacctgagccctccaggcagcagggtcccacttaccccctccccaccctgttccccaaaggtgggaaagaggggattccccagcccaaggcagggttttcccagcaccctcctgtaagcagaagtctcagggtccagacccttccctgagcccccacccccaccccaattcctgcctaccaagcaagcagccccagcctagggtcagacagggtgagcctcatacagactgtgccttgatggccccagccttgggagaagaatttactgttaacctggaagactactgaatcattttacccttgcccagtggaataggacctaaacatcccccttccggggaaagtgggtcatctgaattgggggtagcaattgatactgttttgtaaactacatttcctacaaaatatgaatttatactttgaccagg

SEQ ID NO: 10985 - protein, 538 aa, Homo sapiens
MARAAALLPSRSPPTPLLWPLLLLLLLETGAQDVRVQVLPEVRGQLGGTVELPCHLLPPVPGLYISLVTWQRPDAPANHQNVAAFHPKMGPSFPSPKPGSERLSFVSAKQSTGQDTEAELQDATLALHGLTVEDEGNYTCEFATFPKGSVRGMTWLRVIAKPKNQAEAQKVTFSQDPTTVALCISKEGRPPARISWLSSLDWEAKETQVSGTLAGTVTVTSRFTLVPSGRADGVTVTCKVEHESFEEPALIPVTLSVRYPPEVSISGYDDNWYLGRTDATLSCDVRSNPEPTGYDWSTTSGTFPTSAVAQGSQLVIHAVDSLFNTTFVCTVTNAVGMGRAEQVIFVRETPNTAGAGATGGIIGGIIAAIIATAVAATGILICRQQRKEQTLQGAEEDEDLEGPPSYKPPTPKAKLEAQEMPSQLFTLGASEHSPLKTPYFDAGASCTEQEMPRYHELPTLEERSGPLHPGATSLGSPIPVPPGPPAVEDVSLDLEDEEGEEEEEYLDKINPIYDALSYSSPSDSYQGKGFVMSRAMYV

SEQ ID NO: 10986 - DNA, 702 bp, Homo sapiens
gacctcaggcaccttcccgacctccgcagtggcccagggctcccagctggtcatccacgcagtggacagtctgttcaataccaccttcgtctgcacagtcaccaatgccgtgggcatgggccgcgctgagcaggaggaggagccagtggcgacgggggattctacgatccgaaagctcaggtgttgggaaatggggaccccgtcttctggacaccagtagtccctggtcccatggaaccagatggcaaggatgaggaggaggaggaggaggaagagaaggcagagaaaggcctcatgttgcctccacccccagcactcgaggatgacatggagtcccagctggacggctccctcatctcacggcgggcagtttatgtgtgacctggacacagacagagacagagccaggcccggccctcccgcccccgacctgaccacgccggcctagggttccagactggttggacttgttcgtctggacgacactggagtggaacactgcctcccactttcttgggacttggagggaggtggaacagcacactggacttctcccgtctctagggctgcatggggagcccggggagctgagtagtggggatccagagaggacccccgcccccagagacttggttttggctccagccttcccctggccccgtgacactcaggagttaataaatgccttggaggaaaacatca

SEQ ID NO: 10987 - protein, 49 aa, Homo sapiens
MPWAWAALSRRRSQWRRGILRSESSGVGKWGPRLLDTSSPWSHGTRWQG

SEQ ID NO: 10988 - DNA, 1296 bp, Homo sapiens
gttggaggcgtgggtagcagctgggagaaccggctgggtgctgcccctccccttgggccgggcacggagtaggcacctggcgggctccccaggtggcagacgctgtcgctgcgcacacctggcctctgtgccgcctgctccctgctcgtcctcccctccccaccctcacccacctgccatggacgggcccgccgagccccagatcccgggcttgtgggacacctatgaagatgacatctcggaaatcagccagaagttgccaggtgaatacttccggtacaagggcgtccccttccccgtcggcctgtactcgctcgagagcatcagcttggcggagaacacccaagatgtgcgggacgacgacatctttatcatcacctaccccaagtcaggcacgacctggatgatcgagatcatctgcttaatcctgaaggaaggggatccatcctggatccgctccgtgcccatctgggagcgggcaccctggtgtgagaccattgtgggtgccttcagcctcccggaccagtacagcccccgcctcatgagctcccatcttcccatccagatcttcaccaaggccttcttcagctccaaggccaaggtgatctacatgggccgcaacccccgggacgttgtggtctccctctatcattactccaagatcgccgggcagttaaaggacccgggcacacccgaccagttcctgagggacttcctcaaaggcgaagtgcagtttggctcctggttcgaccacattaagggctggcttcggatgaagggcaaagacaacttcctatttatcacctacgaggagctgcagcaggacttacagggctccgtggagcgcatctgtgggttcctgggccgtccgctgggcaaggaggcactgggctccgtcgtggcacactcaaccttcagcgccatgaaggccaacaccatgtccaactacacgctgctgcctcccagcctgctggaccaccgtcgcggggccttcctccggaaaggggtctgcggcgactggaagaaccacttcacggtggcccagagcgaagccttcgatcgtgcctaccgcaagcagatgcgggggatgccgaccttcccctgggatgaagacccggaggaggacggcagcccagatcctgagcccagccctgagcctgagcccaagcccagccttgagcccaacaccagcctggagcgtgagcccagacccaactccagccccagccccagccccggccaggcctctgagaccccgcacccacgaccctcataataaacacgtcgattctgtcc

SEQ ID NO: 10989 - protein, 365 aa, Homo sapiens; identical to SEQ ID NO: 1823

SEQ ID NO: 10990 - DNA, 1448 bp, Homo sapiens
ccgtgatctcggctcactgcaacctccgcctcctgggttcaaacgattctcctgcctcagcctccggagtaactgggagtacaggcatgcgccaccacgcctggctgatttttgtctttttagtaggggcggggtttcaccatgttggccaggctggtctcaaactcctgacctcaggtgatccacccacctctgtctcccaaagtgctgggattacaggagtgtgccactgcgcctgaccagctttataaagtttatagggacagtgtcaccactttacagaagagggactgaggctctgaggaggaagttccttgccagggtccgagtgtcgccaccctgagaactccagcacccacctccctactctccctcatggcgtctcccccacctttccacagccagaagttgccaggtgaatacttccggtacaagggcgtccccttccccgtcggcctgtactcgctcgagagcatcagcttggcggagaacacccaagatgtgcgggacgacgacatctttatcatcacctaccccaagtcaggcacgacctggatgatcgagatcatctgcttaatcctgaaggaaggggatccatcctggatccgctccgtgcccatctgggagcgggcaccctggtgtgagaccattgtgggtgccttcagcctcccggaccagtacagcccccgcctcatgagctcccatcttcccatccagatcttcaccaaggccttcttcagctccaaggccaaggtgatctacatgggccgcaacccccgggacgttgtggtctccctctatcattactccaagatcgccgggcagttaaaggacccgggcacacccgaccagttcctgagggacttcctcaaaggcgaagtgcagtttggctcctggttcgaccacattaagggctggcttcggatgaagggcaaagacaacttcctatttatcacctacgaggagctgcagcaggacttacagggctccgtggagcgcatctgtgggttcctgggccgtccgctgggcaaggaggcactgggctccgtcgtggcacactcaaccttcagcgccatgaaggccaacaccatgtccaactacacgctgctgcctcccagcctgctggaccaccgtcgcggggccttcctccggaaaggggtctgcggcgactggaagaaccacttcacggtggcccagagcgaagccttcgatcgtgcctaccgcaagcagatgcgggggatgccgaccttcccctgggatgaagacccggaggaggacggcagcccagatcctgagcccagccctgagcctgagcccaagcccagccttgagcccaacaccagcctggagcgtgagcccagacccaactccagccccagccccagccccggccaggcctctgagaccccgcacccacgaccctcataataaacacgtcgattctgtcc

SEQ ID NO: 10991 - protein, 350 aa, Homo sapiens; identical to SEQ ID NO: 1821

SEQ ID NO: 10992 - DNA, 865 bp, Homo sapiens
gggattacagacatgagccaccgcagctggccaagtgttctttctcagcctccctccctttatgcctttgtcattccctcaagcaatttccagaacctcctgtgtgtggggctctgggctaaggctctaggaacgtgtaagaccttgcctgtcctcaaggggttcctcaatctgtgatctacatgggccgcaacccccgggacgttgtggtctccctctatcattactccaagatcgccgggcagttaaaggacccgggcacacccgaccagttcctgagggacttcctcaaaggcgaagtgcagtttggctcctggttcgaccacattaagggctggcttcggatgaagggcaaagacaacttcctatttatcacctacgaggagctgcagcaggacttacagggctccgtggagcgcatctgtgggttcctgggccgtccgctgggcaaggaggcactgggctccgtcgtggcacactcaaccttcagcgccatgaaggccaacaccatgtccaactacacgctgctgcctcccagcctgctggaccaccgtcgcggggccttcctccggaaaggggtctgcggcgactggaagaaccacttcacggtggcccagagcgaagccttcgatcgtgcctaccgcaagcagatgcgggggatgccgaccttcccctgggatgaagacccggaggaggacggcagcccagatcctgagcccagccctgagcctgagcccaagcccagccttgagcccaacaccagcctggagcgtgagcccagacccaactccagccccagccccagccccggccaggcctctgagaccccgcacccacgaccctcataataaacacgtcgattctg

SEQ ID NO: 10993 - protein, 221 aa, Homo sapiens
MGRNPRDVVVSLYHYSKIAGQLKDPGTPDQFLRDFLKGEVQFGSWFDHIKGWLRMKGKDNFLFITYEELQQDLQGSVERICGFLGRPLGKEALGSVVAHSTFSAMKANTMSNYTLLPPSLLDHRRGAFLRKGVCGDWKNHFTVAQSEAFDRAYRKQMRGMPTFPWDEDPEEDGSPDPEPSPEPEPKPSLEPNTSLEREPRPNSSPSPSPGQASETPHPRPS

SEQ ID NO: 10994 - DNA, 374 bp, Homo sapiens
gtgtttattatgagggtcgtgggtgcggggtctcagaggcctggccggggctggggctggggctggagttgggtctgggctcacgctccaggctggtgttgggctcaaggctgggcttgggctcaggctcagggctgggctcaggatctgggctgccgtcctcctccgggtcttcatcccaggggaaggtcggcatcccccgcatctgcttgcggtaggcacgatcgaaggcttcgctctgggccaccgtgaagtggttcttccagtctccctcaggaactggtcgggtgtgcccgggtcctttaactgcccggcgatcttggagtaatgatagagggagaccacaacgtcccgggggttgcggcccatgtaga

SEQ ID NO: 10995 - protein, 80 aa, Homo sapiens
MRVVGAGSQRPGRGWGWGWSWVWAHAPGWCWAQGWAWAQAQGWAQDLGCRPPPGLHPRGRSASPASACGRHDRRLRSGPP

SEQ ID NO: 10996 - DNA, 2346 bp, Homo sapiens
tagagcaagactctgtctccagaaaaacaaaaacaaaaacaaaaaggtaattttatatggttttcccaaatgttgttattatccctattttatcgacgaggaaactggaggtttgtaacttaagagagggttgataatttgcccagggcacatggctcttgcctgcagactccatgtttattttttcccaacctggtaactttcttttaatggaaagctccagaagaggtgtcggtgctactcctccccctcttttccagcaagcattcttctccaaacccagaactgggccacagagcctaacagcttctgggctgcccctgggtgtgaggcgccgcccacatgttagaatttctgggacacgtcagtggttcaagaaggtaaagagaaggaaggttatgaaaccaggagtgacctggaaaatcggagccatggggttggcggagctgaccagagggctgaccatgctgggtgctgcatatcagaaggtagtgatggccgggcatggtggctcatgcctgtaatcccagcactttgggaggccgaggcaggcagatcacttgaggtcaggagttcgagatcagcctggccaacgtggtgaaatcctgtctctattaaaaatacaaaaattagccaggcatggtggtgcatgcctataatcccagcagctactttggaggctgaggcaggagaatcactggaacccaggaggtggaggttgcagtaagctgagatagcaccactgcactccagcctgggtgacagagccaggcttagtctcattgtaatcccagcactttgggaggccgaagtgagcagatcacccgagggtgggagttcgagactaccctgaccaacatggagaaaccctgtctttactaaaaatacaaaattagccaggcgtggtggcacatgccttctcccgagcacctgggattacaggtgcccgccaccacacccagctaatttttgtattgttagtagaaacagggttttaccatgttggccagactggtctcgaactcccgacacctgtctcagcctcccaaagtgctgggattacagacatgagccactgcacctgccccacatctgtgcttgaaagccgggtctgggtctgggactgtgtcccagggcactcgggagccacggaagagttgggagccagtgaggagcagggtcagctggggtgtgggggatgagctggagggggatggagactggaggcaggaaggctgtggagcagccggctgctgaggcatggatccaggaaggggaggatgaggcctaagcagttctaggctacagggacacagaggaggggatatggcaaggggaggcaggtggggagggacagggctcatgatggacaggttttgggggtgaggggtacccagagagggaggccaggctcctgggtggatggtggggccatcctgcaatgggggcctgggggaggagcaggtttgagatgtagaccagccaatgcctgtctctaacctgaaggagggtgattccaggtaaggtgatgcactgacctctgcccccggatgtgacctctgccccccactgtgacctctgcccccggctgtgacctctgccccctgctgtgacctctgccccctgctgtgacctctgccccaagcccacctattccctcccacctagagaaccctccaaagacagaaactgcaaaaacccttagaggcgatatagcccaacccctcagtttggagttggggaaactgaggcaaagaggcagcgtccctcaggcagccccaggttaggacccagacatgcggatcccaggttccacgctccttccttggccgagtgccctccctccgctgacccctctcccctgcctgcaggacttacagggctccgtggagcgcatctgtgggttcctgggccgtccgctgggcaaggaggcactgggctccgtcgtggcacactcaaccttcagcgccatgaaggccaacaccatgtccaactacacgctgctgcctcccagcctgctggaccaccgtcgcggggccttcctccggaaaggggtctgcggcgactggaagaaccacttcacggtggcccagagcgaagccttcgatcgtgcctaccgcaagcagatgcgggggatgccgaccttcccctgggatgaagacccggaggaggacggcagcccagatcctgagcccagccctgagcctgagcccaagcccagccttgagcccaacaccagcctggagcgtgagcccagacccaactccagccccagccccagccccggccaggcctctgagaccccgcacccacgaccctcataataaacacgtcgattctgtccag

SEQ ID NO: 10997 - protein, 175 aa, Homo sapiens
MRIPGSTLLPWPSALPPLTPLPCLQDLQGSVERICGFLGRPLGKEALGSVVAHSTFSAMKANTMSNYTLLPPSLLDHRRGAFLRKGVCGDWKNHFTVAQSEAFDRAYRKQMRGMPTFPWDEDPEEDGSPDPEPSPEPEPKPSLEPNTSLEREPRPNSSPSPSPGQASETPHPRPS

SEQ ID NO: 10998 - DNA, 1027 bp, Homo sapiens
cgtgggctcaaggctggcggttgcctgggactgacgacggagcagagaaagccccctcatcttgctttcatcctcggacacagcacaaggaagatgaactcttccggatgcctgtctgaggaggtggggtccctccgcccactgactgtggttatcctgtctgcgtccattgtcgtcggagtgctgggcaatgggctggtgctgtggatgactgtcttccgtatggcacgcacggtctccaccgtctgcttcttccacctggcccttgccgatttcatgctctcactgtctctgcccattgccatgtactatattgtctccaggcagtggctcctcggagagtgggcctgcaaactctacatcacctttgtgttcctcagctactttgccagtaactgcctccttgtcttcatctctgtggaccgttgcatctctgtcctctaccccgtctgggccctgaaccaccgcactgtgcagcgggcgagctggctggcctttggggtgtggctcctggccgccgccttgtgctctgcgcacctgaaattccggacaaccagaaaatggaatggctgtacgcactgctacttggcgttcaactctgacaatgagactgcccagatttggattgaaggggtcgtggagggacacattatagggaccattggccacttcctgctgggcttcctggggcccttagcaatcataggcacctgcgcccacctcatccgggccaagctcttgcgggagggctgggtccatgccaaccggcccaagaggctgctgctggtgctggtgagcgctttctttatcttctggtccccgtttaacgtggtgctgttggtccatctgtggcgacgggtgatgctcaaggaaatctaccacccccggatgctgctcatcctccaggctagctttgccttgggctgtgtcaacagcagcctcaaccccttcctctacgtcttcgttggcagagatttccaagaaaagtttttccagtctttgacttctgccctggcgagggcgtttg

SEQ ID NO: 10999 - protein, 310 aa, Homo sapiens
MNSSGCLSEEVGSLRPLTVVILSASIVVGVLGNGLVLWMTVFRMARTVSTVCFFHLALADFMLSLSLPIAMYYIVSRQWLLGEWACKLYITFVFLSYFASNCLLVFISVDRCISVLYPVWALNHRTVQRASWLAFGVWLLAAALCSAHLKFRTTRKWNGCTHCYLAFNSDNETAQIWIEGVVEGHIIGTIGHFLLGFLGPLAIIGTCAHLIRAKLLREGWVHANRPKRLLLVLVSAFFIFWSPFNVVLLVHLWRRVMLKEIYHPRMLLILQASFALGCVNSSLNPFLYVFVGRDFQEKFFQSLTSALARA

SEQ ID NO: 11000 - DNA, 1269 bp, Homo sapiens
tcttgagcctaggaggtggaggctgcagtgatctgtgattgtacctttgcactccagcctgggtgacagagcatgacgctgtctctaaaagaataataataataagcattccataaaaattatggaatggagaaatcatgaatggggtctcggaggggaccagaggctgcagtgacaggcaacctggggtcctgacacgtgatcgctcttgttccaggaagatgaactcttccggatgcctgtctgaggaggtggggtccctccgcccactgactgtggttatcctgtctgcgtccattgtcgtcggagtgctgggcaatgggctggtgctgtggatgactgtcttccgtatggcacgcacggtctccaccgtctgcttcttccacctggcccttgccgatttcatgctctcactgtctctgcccattgccatgtactatattgtctccaggcagtggctcctcggagagtgggcctgcaaactctacatcacctttgtgttcctcagctactttgccagtaactgcctccttgtcttcatctctgtggaccgttgcatctctgtcctctaccccgtctgggccctgaaccaccgcactgtgcagcgggcgagctggctggcctttggggtgtggctcctggccgccgccttgtgctctgcgcacctgaaattccggacaaccagaaaatggaatggctgtacgcactgctacttggcgttcaactctgacaatgagactgcccagatttggattgaaggggtcgtggagggacacattatagggaccattggccacttcctgctgggcttcctggggcccttagcaatcataggcacctgcgcccacctcatccgggccaagctcttgcgggagggctgggtccatgccaaccggcccaagaggctgctgctggtgctggtgagcgctttctttatcttctggtccccgtttaacgtggtgctgttggtccatctgtggcgacgggtgatgctcaaggaaatctaccacccccggatgctgctcatcctccaggctagctttgccttgggctgtgtcaacagcagcctcaaccccttcctctacgtcttcgttggcagagatttccaagaaaagtttttccagtctttgacttctgccctggcgagggcgtttggagaggaggagtttctgtcatcctgtccccgtggcaacgccccccgggaatgatggaagacttcagctggaagctggaagccgtccttcttagtttgcttgtggcctcttacct

SEQ ID NO: 11001 - protein, 356 aa, Homo sapiens; identical to SEQ ID NO: 1825

SEQ ID NO: 11002 - DNA, 618 bp, Homo sapiens
atgccctttccccgttgccatggccaccattctggtctctccgacaaccccctctcggagttccagtggcttctcccccctctggctcagaggcccaggaaagagagagaagaccaaccaaggggtggctggagtcccaaggccatgaactttcaggaaaatgtgaccctggccatggccttgttcaccatcctgacctccatctatttcttcaacaaggctcagcagtgagaagacacaggacctccccgcacaagagccctgcctctccctctgccatcgctctgaggccagataaatgagaggcagagaatatcattgcaggatcctgctttttaaaaaatgctccatgccaagggcagcggctcacacatgtaatctcaacacttcgggaggctgaagcagaaagattgcttgaggccaggaattcaagaccagcctgggcaacatagcaagattctgtctctacaaaaaaaaatttaatgagggcatgatggcacatgcctgtcgtcccagctacttgggaggctgaggcaggaggattgctcgaggctgcagggagctatgaccatgccactctactcccgcctggtcaacaaagcaagaacctgactcaaa

SEQ ID NO: 11003 - protein, 76 aa, Homo sapiens
MPFPRCHGHHSGLSDNPLSEFQWLLPPLAQRPRKEREDQPRGGWSPKAMNFQENVTLAMALFTILTSIYFFNKAQQ

SEQ ID NO: 11004 - DNA, 3023 bp, Homo sapiens
aaatctggaagcggatcgcgtggagtgacggtcacaccgcggcgaattaatttccaaagactcatgttacatgagaaagccaccaagaagaccaaagaaaaggagacaaggatggctcttcctcagggatgcttgactttcagggatgtggctatagaattctctttggaggagtggaaatgcctgaaccctgcacagagggctttatacagggccgtgatgttggagaactacaggaacctggagtctgtgggtattttttctaaatgtgagatcaaggaattaccaccaaaaaaggagagtaatacaggagaaatattccagacagtaatgttggaaagacatgaaagccacgacatacaagatttttgcttcagagaaacccagaaaaatgtacatgactctcagtgtctgtggaaacatgattgaagacattataagcgagtgcgtgtgacctataaggaaagtctcattggtagaagagacatgcatgggagaaaggatgatgcacaaaagcagcctgttaaaaatcagcttggattaaacccgcagtcacatctaccagaactgcagctatttcaagctgaagggaaaatatataaatatgatcacatggaaaaatctgtcaacagtagttccttagtttccccaccccaacgtatttcttctactgtcaaaacccacatttctcatacatatgaatgtaattttgtggattcattattcacacaaaaagagaaagcaaatattgggacagaacactacaaatgtagtgagcgtggcaaggcctttcatcaaggcttacattttactatacatcaaataatccatactaaagagacgcaatttaaatgtgatatatgtggcaagatcttcaataaaaaatcaaaccttgcaagtcatcaaagaattcatactggagagaagccatataaatgtaatgaatgtggcaaggtcttccataatatgtcacaccttgcacagcatcgcaggattcatactggagagaaaccatataaatgtaatgaatgtggcaaggtctttaatcaaatttcacaccttgcacaacatcaaagaattcataccggagagaaaccttataaatgtaatgaatgtggaaaggtcttccatcaaatttcacaccttgcacaacatcggacaattcatactggagaaaaaccttacgaatgtaacaaatgtggcaaggtgttcagtcgcaattcctaccttgtacaacatctgatcattcatactggagagaaaccttacagatgtaatgtatgtggaaaggtcttccatcatatttcacaccttgcacaacatcagagaatccacactggagagaaaccttacaaatgtaatgagtgtggcaaggtcttcagtcacaagtcatccctagtaaatcactggagaattcatactggagagaaaccttacaaatgtaatgagtgtggcaaggtcttcagtcacaagtcatccctagtaaatcactggagaatccacactggagagaaaccttacaaatgtaatgaatgtggcaaggtcttcagtcgcaattcataccttgcccaacatctgataattcatgccggtgagaaaccttataagtgtgatgaatgtgacaaagcattcagtcaaaattcacatcttgtacaacatcacagaatccatactggagagaaaccttacaaatgtgatgaatgtggcaaagtcttcagtcaaaattcataccttgcatatcattggagaattcatactggagaaaaagcttataaatgtaatgaatgtgggaaggtcttcggtctaaactcatccctagcacatcatcggaaaattcacactggagagaaacctttcaaatgtaatgaatgtggcaaagcttttagtatgcgttcaagcctcactaatcatcatgcgatccacactggagagaaacatttcaaatgtaatgaatgtggcaaactcttccgcgacaattcatatcttgtacgtcatcagagatttcatgccggaaagaaatctaacacatgtaattaatgtggcagagtgttcagttagcattaaagccttgtaagacatacaataatttatactggagaaaaactttgcaagtataatgaatgtagcagagcctttagtttttgttcaaggcttaataaccgttagctagaccatagaggacagaaactttactaatgtactgaatgtggcaaggtcttaaggtaaaatctgagaccaggattcttcaaagaattcttgctggtgagaaacctaacaaatgtaatgaatgtggcaaggtcttctggcacaattctcacattgtacaatattgcaaaaattcatgcttgagagaaacaaaaacactgagagtgggaaaccattatgacttcaaacattcatcaacatcagagaatccatactaaagagcatttataataattatatgtgatagagattttccgcaggccaaagtctcactaggcatcaaaaacttttttgatgaaaccatacaaatgtaacgtgcatgcttaagcttttacccaggcatcaaaaccggaacatcacagggtttatactggagagtaactacacaaagataatgtaataagcctttcagtgtaatattcatgattttgtcgtgagagatccactcaataaaaaccaggcaaatgtagtgaatctggaaaggttactaatctaagatgcatcctcagggttcattaaaaattcatagtggagggccggacccagtgactcatgcctgtaatcccagaactttgggagaccgaggcaggtggatcatgaagtcaagagattgagaccatcctagccaaccaacatggtgaaatcccgtctctactaaaaattcaaaaattagctgggggtggtggcacacgcctgtagtccacactgcttgggagaccgaggcaggagagtcacttgaacccggcaggcagaggttgcagtgagccgagatcacaccactgcactccagcctggtcgacagagcgagattctgtctc

SEQ ID NO: 11005 - protein, 121 aa, Homo sapiens
MLHEKATKKTKEKETRMALPQGCLTFRDVAIEFSLEEWKCLNPAQRALYRAVMLENYRNLESVGIFSKCEIKELPPKKESNTGEIFQTVMLERHESHDIQDFCFRETQKNVHDSQCLWKHD

SEQ ID NO: 11006 - DNA, 2684 bp, Homo sapiens
aaatctggaagcggatcgcgtggagtgacggtcacaccgcggcgaattaatttccaaagactcatgttacatgagaaagccaccaagaagaccaaagaaaaggagacaaggatggctcttcctcagggatgcttgactttcagggatgtggctatagaattctctttggaggagtggaaatgcctgaaccctgcacagagggctttatacagggccgtgatgttggagaactacaggaacctggagtctgtgggtattttttctaaatgtgagatcaaggaattaccaccaaaaaaggagagtaatacaggagaaatattccagacagtaatgttggaaagacatgaaagccacgacatacaagatttttgcttcagagaaacccagaaaaatgtacatgactctcagtgtctgtggaaacatgattgaagacattataagcgagtgcgtgtgacctataaggaaagtctcattggtagaagagacatgcatgggagaaaggatgatgcacaaaagcagcctgttaaaaatcagcttggattaaacccgcagtcacatctaccagaactgcagctatttcaagctgaagggaaaatatataaatatgatcacatggaaaaatctgtcaacagtagttccttagtttccccaccccaacgtatttcttctactgtcaaaacccacatttctcatacatatgaatgtaattttgtggattcattattcacacaaaaagagaaagcaaatattgggacagaacactacaaatgtagtgagcgtggcaaggcctttcatcaaggcttacattttactatacatcaaataatccatactaaagagacgcaatttaaatgtgatatatgtggcaagatcttcaataaaaaatcaaaccttgcaagtcatcaaagaattcatactggagagaagccatataaatgtaatgaatgtggcaaggtcttccataatatgtcacaccttgcacagcatcgcaggattcatactggagagaaaccatataaatgtaatgaatgtggcaaggtctttaatcaaatttcacaccttgcacaacatcaaagaattcataccggagagaaaccttataaatgtaatgaatgtggaaaggtcttccatcaaatttcacaccttgcacaacatcggacaattcatactggagaaaaaccttacgaatgtaacaaatgtggcaaggtgttcagtcgcaattcctaccttgtacaacatctgatcattcatactggagagaaaccttacagatgtaatgtatgtggaaaggtcttccatcatatttcacaccttgcacaacatcagagaatccacactggagagaaaccttacaaatgtaatgagtgtggcaaggtcttcagtcacaagtcatccctagtaaatcactggagaattcatactggagagaaaccttacaaatgtaatgagtgtggcaaggtcttcagtcacaagtcatccctagtaaatcactggagaatccacactggagagaaaccttacaaatgtaatgaatgtggcaaggtcttcagtcgcaattcataccttgcccaacatctgataattcatgccggtgagaaaccttataagtgtgatgaatgtgacaaagcattcagtcaaaattcacatcttgtacaacatcacagaatccatactggagagaaaccttacaaatgtgatgaatgtggcaaagtcttcagtcaaaattcataccttgcatatcattggagaattcatactggagaaaaagcttataaatgtaatgaatgtgggaaggtcttcggtctaaactcatccctagcacatcatcggaaaattcacactggagagaaacctttcaaatgtaatgaatgtggcaaagcttttagtatgcgttcaagcctcactaatcatcatgcgatccacactggagagaaacatttcaaatgtaatgaatgtggcaaactcttccgcgacaattcatatcttgtacgtcatcagagatttcatgccggaaagaaatctaacacatgtaattaatgtggcagagtgttcagttagcattaaagccttgtaagacatacaataatttatactggagaaaaactttgcaagtataatgaatgtagcagagcctttagtttttgttcaaggcttaataaccgttagctagaccatagaggacagaaactttactaatgtactgaatgtggcaaggtcttaaggtaaaatctgagaccaggattcttcaaagaattcttgctggtgagaaacctaacaaatgtaatgaatgtggcaaggtcttctggcacaattctcacattgtacaatattgcaaaaattcatgcttgagagaaacaaaaacactgagagtgggaaaccattatgacttcaaacattcatcaacatcagagaatccatactaaagagcatttataataattatatgtgatagagattttccgcaggccaaagtctcactaggcatcaaaaacttttttgatgaaaccatacaaatgtaacgtgcatgcttaagcttttacccaggcatcaaaaccggaacatcacagggtttatactggagagtaactacacaaagataatgtaataagcctttcagtgtaatattcatgattttgtcgtgagagatccactcaataaaaaccaggcaaatgtagtgaatctgg

SEQ ID NO: 11007 - protein, 121 aa, Homo sapiens; identical to SEQ ID NO: 11005

SEQ ID NO: 11008 - DNA, 955 bp, Homo sapiens
acctcgcggggcccgccgaggcctggcttctgtcctgcgcgcgcagattctcgcaaatctggaagcggatcgcgtggagtgacggtcacaccgcggcgaattaatttccaaagactcatgttacatgagaaagccaccaagaagaccaaagaaaaggagacaaggatggctcttcctcagggatgcttgactttcagggatgtggccactgctcccggcctactgtcacttcttaacatattaatctttgtatttctgaccacctcaatatccacagtactcagtccccatgctactctcaccatgtaaggaaagacacttgcttatctgtaggacggctttctcagaacacagcctaaaccgatgtctgctctgtacgatggtggacataccgctgtctaggaaggattaccaagtgacatggtcagcaacacaaccccgttcttgtagctcccttgaaatgattcctttctatgcatctatttgccatgtcgtgtcgtgttgtgcaggtttgtcgtgtgggtatatgtgtgccgtggtggtttgctgcacccatcaacccatcatctaggttttaagccctgcatgcattaggtatctttcccaatgttctccctccccttgccccctaccccctgataggccctgctctatgttgcttccctccctgtgaccatgtgttctaatcgttcaactcccacttatgagtgagaacatgcggtgtttggttttctgttcctgtgttagtttgctgagaacgatggcttccagctccatccatgtccctacaaaggacatgatctcattcttttttttctttttccgagatggagtttttgctcttgttgcccaggctggagtgcagtggcacaatctcggctcaccaccacctccgcctcccgggttcaagcgattctcccgcctcagcctcagaagttgctggaattacaggtat

SEQ ID NO: 11009 - protein, 63 aa, Homo sapiens
MLHEKATKKTKEKETRMALPQGCLTFRDVATAPGLLSLLNILIFVFLTTSISTVLSPHATLTM

SEQ ID NO: 11010 - DNA, 1007 bp, Homo sapiens
agattctcgcaaatctggaagcggatcgcgtggagtgacggtcacaccgcggcgaattaatttccaaagactcatgttacatgagaaagccaccaagaagaccaaagaaaaggagacaaggatggctcttcctcaggattgacttctaaggactcttggtacatgaggaagaaacccggaaggggaagaggaaagcaaaggcgtcaggaatggttcttcctcagggtctattgacattcagggatgtggccatagaattctctcaggaggagtggaaatgcctggaccctgctcagaggactctatacagagatgtgatgttggagaattataggaacctggtctccctgggtgaggataacttccctccagaagtggggatgttcccttgtgtatctttgcattttctcttgtttctcttgggagttgcatccttgcttgactaaaatggaagccgtattgattttgaaatgaaaagcttcatgatgtagcatctggactttcactgtccccttttttagatgttctgcgttcttcatgatagctcagtgggggttccagaagtaaagaaggcttaaaaccttatggctggcaaggcgtggtgactcatgcctgtaatcccagcactttgggaggccaaagcttgtggatcacttcaggtcaggagttcgatactagcctcaccaacatggcgaaacgtcatctctactaaaaatacaaaaattggccaggcgcggtggctcacgcctgtaatcccagcactctgggaggctgatgagggcggatcacaaggtcaggagatcgagaccatcctggtgaacacagtgaaaccctgtctctactaaaaatacaaaaaaaaattagccgggtgtggtggtgggcacctgtagtcccagctacttgggaggctgaggcaggagaatggcatgaacccaggggacggagcttgcagtgagctgagatcgtgccactgcactctagcctgggagacagccaggctccatctc

SEQ ID NO: 11011 - protein, 78 aa, Homo sapiens
MVLPQGLLTFRDVAIEFSQEEWKCLDPAQRTLYRDVMLENYRNLVSLGEDNFPPEVGMFPCVSLHFLLFLLGVASLLD

SEQ ID NO: 11012 - DNA, 1219 bp, Homo sapiens
gcttcgcgccccgccgccacccggcccaggccccgcccaccacctcgcggggcccgccgaggcctggcttctgtcctgcgcgcgcagattctcgcaaatctggaagcggatcgcgtggagtgacggtcacaccgcggcgaattaatttccaaagactcatgttacatgagaaagccaccaagaagaccaaagaaaaggagacaaggatggctcttcctcagggatgcttgactttcagggatgtggctatagaattctctttggaggagtggaaatgcctgaaccctgcacagagggctttatacagggccgtgatgttggagaactacaggaacctggagtctgtgggattgacttctaaggactcttggtacatgaggaagaaacccggaaggggaagaggaaagcaaaggcgtcaggaatggttcttcctcagggtctattgacattcagggatgtggccatagaattctctcaggaggagtggaaatgcctggaccctgctcagaggactctatacagagatgtgatgttggagaattataggaacctggtctccctgggtgaggataacttccctccagaagtggggatgttcccttgtgtatctttgcattttctcttgtttctcttgggagttgcatccttgcttgactaaaatggaagccgtattgattttgaaatgaaaagcttcatgatgtagcatctggactttcactgtccccttttttagatgttctgcgttcttcatgatagctcagtgggggttccagaagtaaagaaggcttaaaaccttatggctggcaaggcgtggtgactcatgcctgtaatcccagcactttgggaggccaaagcttgtggatcacttcaggtcaggagttcgatactagcctcaccaacatggcgaaacgtcatctctactaaaaatacaaaaattggccaggcgcggtggctcacgcctgtaatcccagcactctgggaggctgatgagggcggatcacaaggtcaggagatcgagaccatcctggtgaacacagtgaaaccctgtctctactaaaaatacaaaaaaaaattagccgggtgtggtggtgggcacctgtagtcccagctacttgggaggctgaggcaggagaatggcatgaacccaggggacggagcttgcagtgagctgagatcgtgccactgcactctagcctgggagacagccaggctccatctc

SEQ ID NO: 11013 - protein, 95 aa, Homo sapiens
MLHEKATKKTKEKETRMALPQGCLTFRDVAIEFSLEEWKCLNPAQRALYRAVMLENYRNLESVGLTSKDSWYMRKKPGRGRGKQRRQEWFFLRVY

SEQ ID NO: 11014 - DNA, 669 bp, Homo sapiens
gcttctgtcctgcgcgcgcagattctcgcaaatctggaagcggatcgcgtggagtgacggtcacaccgcggcgaattaatttccaaagactcatgttacatgagaaagccaccaagaagaccaaagaaaaggagacaaggatggctcttcctcagggatgcttgactttcagggatgtggctatagaattctctttggaggagtggaaatgcctgaaccctgcacagagggctttatacagggccgtgatgttggagaactacaggaacctggagtctgtggatagctctttaaaatccatgacggagttctcatcaacagggcacggtaatacaggagaagtgatccacacagggacattgcaaagacataaaagtcatcacattggagatttttgcttcccagaaatcaagaaagatattcatgactttgagtttcagtggcaagaaattaaaagaaatggccatgaagcacccatgacaaaaatcaaaaagttgactggtagtacagaccgacgtgatcaaaggcatgctggaaacaagcctattaaagatcagcttggatcaagcttttattcacatctgcctgaactgcacgaatttcagactgaagggaaaattgataatcaagtggagaagtctatcaacaatgcttccttggtttcaacat

SEQ ID NO: 11015 - protein, 191 aa, Homo sapiens
MLHEKATKKTKEKETRMALPQGCLTFRDVAIEFSLEEWKCLNPAQRALYRAVMLENYRNLESVDSSLKSMTEFSSTGHGNTGEVIHTGTLQRHKSHHIGDFCFPEIKKDIHDFEFQWQEIKRNGHEAPMTKIKKLTGSTDRRDQRHAGNKPIKDQLGSSFYSHLPELHEFQTEGKIDNQVEKSINNASLVS

SEQ ID NO: 11016 - DNA, 1113 bp, Homo sapiens
ggaagcggatcgcgtggagtgacggtcacaccgcggcgaattaatttccaaagactcatgttacatgagaaagccaccaagaagaccaaagaaaaggagacaaggatggctcttcctcagggatgcttgactttcagggatgtggctatagaattctctttggaggagtggaaatgcctgaaccctgcacagagggctttatacagggccgtgatgttggagaactacaggaacctggagtctgtgggtgaggaaaatgtccctcctgatgtgaggaatctgcccttgtctatcttggctcttcctggttttgtattctcttttgtgattttgccgcatacatgcttttgatgtacatgtcattgttttctgcagtgatgatcctcctgtctgtcatagacagcttcttagagactatcctatggagtggttttacataaaaacagaacattcatgaacactttgactaatagaattgaacgtcatcctgctctaagcagagatgcccctggtagccctgagcagaattgtcagggtggcccaggagatgagctagaaagcatgacagtgactgacaagtgtttccagctgtgattctgcttttgttttgttttgttttttgagacagagtctccctctcttgctcaggctggagtgcactgttgtgatctcagctcattgcaacctccgcctcctgcattcaagcaattctcatacctcagcctcccaacctaactggaattacagatgcaagtcaccatgccttgctaatttttgtatttttattagagatggggaatcaccatgttggccaggctggtctcaaactccttgtctcaagcaatctgcccacctcagcctctagccaagtgttgggattacaaacctgagccaccacccttggccttttgttctggtttttaaggagcatcacagaagcatctctcactggtactgtgacagtgatcatcacataaactaatgatcatgttctctaaacagcagtcactgctgtagaaattcctcttagggaggacatcattcaggcttactgcatcatatatatgaggctcttgactgaactctgtttgacatggaattttgctcttgttg

SEQ ID NO: 11017 - protein, 97 aa, Homo sapiens
MLHEKATKKTKEKETRMALPQGCLTFRDVAIEFSLEEWKCLNPAQRALYRAVMLENYRNLESVGEENVPPDVRNLPLSILALPGFVFSFVILPHTCF

SEQ ID NO: 11018 - DNA, 3762 bp, Homo sapiens
aatgctgtgtatttacttgaactcatacatcagaagatagtgatcttaacacattatgtttgggaagtttaaaatatctcttccaaatgcttgatgaaaaaggtgggaggatcacttgagccagggagttgaaggctgcagtgagccctgtttttgccaccacactccagcttggagaggtgaggggctgtcctctggatggcaattgatgaaggatgagtctgtgccctgaaggggagatcagtccagcccagctccccactgctgcctcgtgtgtggtggcttctccaggagagaggattgattcctaaagactcatgttacgtgaggaagcagctcagaagaggaaaggaaaggagccaggcatggctcttcctcagggacgcttgactttccgggatgtggctatagaattctcattggcagagtggaaatgcctgaacccttcacagagggctttgtacagggaagtgatgttggagaactacaggaacctggaggctgtggatatctcttccaaatgcatgatgaaggaggtcttgtcaacagggcaaggcaatacagaagtgatccacacagggacattgcaaagacatgaaagtcatcacattggagatttttgcttccaggaaattgagaaagaaattcatgacattgagtttcagtgtcaagaagatgaaagaaatggccttgaagcacccatgacaaaaataaaaaagttgactggtagcacagaccaacatgatcacaggcatgctggaaacaagcctattaaagatcagcttggatcaagcttttattcacatctgcctgaactccacatatttcagatcaaaggtgaaattggtaatcaacttgagaagtctactaatgatgctccctcagtttcaacattccaaagaatttcctgtaggccccaaacccagatttctaataactatgggaataatcccctgaattcttcattactcccacaaaaacaggaagtacacatgagagaaaaatctttccaatgtaataagagtggcaaagcctttaattgtagctcactcttaaggaaacaccagataccccatttaggagacaaacaatataaatgtgatgtatgtggcaagctctttaatcacgagcaataccttgcatgccatgatagatgtcacactgttgagaaaccttacaagtgtaaagagtgtggcaagaccttcagtcaggagtcatcccttacctgccatcgtagacttcatactggagtaaaacgttacaattgtaatgagtgtggcaagatctttggtcaaaattcagcccttctaattgataaggcaattgatactggagaaaatccttacaagtgtaatgaatgtgacaaggcttttaatcaacaatcacaactttcacatcatagaattcatactggagagaaaccttacaaatgtgaagaatgtgacaaagttttcagtcggaaatcaaccattgagacacataagagaattcatactggagagaaaccatacagatgtaaggtttgtgacacagctttcacgtggcattcacagctggctcgacatagaagaattcatactgcaaagaaaacttataaatgtaatgagtgtggcaagaccttcagtcacaagtcatcccttgtatgccatcatagacttcatggtggagagaaatcttacaaatgtaaggtttgtgacaaggcttttgtgtggagttcacaactggcaaaacatactagaattgactgtggagaaaaaccttacaagtgtaatgaatgtgggaagacctttggtcaaaattcagatcttttaattcataagtcaattcatactggggagcaaccttacaaatgtgatgaatgtgaaaaggttttcagtcgtaaatcaagccttgagacacataagataggtcatactggagagaaaccatacaaatgtaaggtttgtgacaaggcttttgcgtgtcattcctatctggcaaaacatactagaattcatagtggagagaaaccttacaagtgtaatgagtgcagcaagaccttcagtcacaggtcataccttgtatgccatcatagagttcatagtggtgagaaaccttacaagtgtaatgagtgcagcaagaccttcagtcgcaggtcatcccttcattgccatcgtagacttcatagtggtgagaaaccttacaagtgtaatgagtgtggcaataccttccgtcactgctcatcccttatataccatcgtagacttcatactggagagaaatcttacaaatgtacaatttgtgacaaggctttcgtgcgtaattcactcctgtcaagacataccagaattcacactgcagagaaaccttacaagtgtaatgaatgtgggaaggcttttaatcaacaatcacacctttcacgtcatcatagaattcatactggagagaaaccttagaaatgtgaagcatgtgacaaagtttccatttggaaatcacaccttaaagacataggagaatttatactggagagaaagcttacaaatgtaaggtttctgacaagacttgggagtgattcacacctggaacaacatactggacttcacactggagagaaaccttacaagtgtaatgagtgtggcaaagcctttggcaagcagtcaacacttattcaccatcaggcaattcatggtgtagggaaacttgactaatgtaatgattgtcacaaagtcttcagtaatgctacaacgattacaaatcattggagaatccataatgaagagagatcttacaagtgtaataaatgtggcaaatttttcagagatcgttcacatattgcaggtcatcggtgaactcatactggagagaaaccttacaaatgtcatgactgtgccaaggtcttcagtcaagcttcatcctatgcaaaacataggagaatttatacaggagagaaacctcacaagtgtgatgattgtggcaaagcctttgcttcacgttcacacgtcattagacatcagagaatctatactggacagaaatcttacaaatgtcatcagtgtggcaaggtcttcagtccaagatcactccatgcagaacatcagaaaattcatttttgagataaccgttcccaatgaaatgagtatagcaaaccatcaagcattaattgacattggagtcaattcagcattgacttgagtttgtgttgacttaacattgagttcaagcctttattgacattcaagtgtttatgttaagaggatggggccaggtgtggtggctccgacctgtaatcccagcacgtcgggaggccaaggcacataggtcacttgaggtcaggagtttgaaaccagcatggccaacagatgtgagccacttttctcagcctgttttttgtttcttattttctattatttttttgagccagtactttttaaagagatagtacttttttcagttagtactttttgaaagggatatatcatagtaatttttaaaagggatatgaggccaggcacggaggctcatgcctataatcccagcactttgggaggccgaggcaggcagatcacggggtcaggagatcgagactttcctggctaacagggtgaatccctgtctctactaaaaatacaaaaaattagctgggcatggtggctggcgcctgtagtcccagctactccagatgctgaggcaggagaatggcatgaacctgtgaggcggagcttgcagggagtcgagatcgcaccactgggctccagcctgggcgacagagtgagagtctatctc

SEQ ID NO: 11019 - protein, 705 aa, Homo sapiens
MLREEAAQKRKGKEPGMALPQGRLTFRDVAIEFSLAEWKCLNPSQRALYREVMLENYRNLEAVDISSKCMMKEVLSTGQGNTEVIHTGTLQRHESHHIGDFCFQEIEKEIHDIEFQCQEDERNGLEAPMTKIKKLTGSTDQHDHRHAGNKPIKDQLGSSFYSHLPELHIFQIKGEIGNQLEKSTNDAPSVSTFQRISCRPQTQISNNYGNNPLNSSLLPQKQEVHMREKSFQCNKSGKAFNCSSLLRKHQIPHLGDKQYKCDVCGKLFNHEQYLACHDRCHTVEKPYKCKECGKTFSQESSLTCHRRLHTGVKRYNCNECGKIFGQNSALLIDKAIDTGENPYKCNECDKAFNQQSQLSHHRIHTGEKPYKCEECDKVFSRKSTIETHKRIHTGEKPYRCKVCDTAFTWHSQLARHRRIHTAKKTYKCNECGKTFSHKSSLVCHHRLHGGEKSYKCKVCDKAFVWSSQLAKHTRIDCGEKPYKCNECGKTFGQNSDLLIHKSIHTGEQPYKCDECEKVFSRKSSLETHKIGHTGEKPYKCKVCDKAFACHSYLAKHTRIHSGEKPYKCNECSKTFSHRSYLVCHHRVHSGEKPYKCNECSKTFSRRSSLHCHRRLHSGEKPYKCNECGNTFRHCSSLIYHRRLHTGEKSYKCTICDKAFVRNSLLSRHTRIHTAEKPYKCNECGKAFNQQSHLSRHHRIHTGEKP

SEQ ID NO: 11020 - DNA, 3838 bp, Homo sapiens
aacgcaaacccggaagcggatcgggtggagtgtaggtcatatcgccgcgttgactagataacgaaggacaatgcatatatacaaaattgctgtattgcctggtgatatgcagctgtacctgtgacatcataattgcaccctccgacatgatatctcttccaaatgcttgatgaaaaaggtgggaggatcacttgagccagggagttgaaggctgcagtgagccctgtttttgccaccacactccagcttggagaggtgaggggctgtcctctggatggcaattgatgaaggatgagtctgtgccctgaaggggagatcagtccagcccagctccccactgctgcctcgtgtgtggtggcttctccaggagagaggattgattcctaaagactcatgttacgtgaggaagcagctcagaagaggaaaggaaaggagccaggcatggctcttcctcagggacgcttgactttccgggatgtggctatagaattctcattggcagagtggaaatgcctgaacccttcacagagggctttgtacagggaagtgatgttggagaactacaggaacctggaggctgtggatatctcttccaaatgcatgatgaaggaggtcttgtcaacagggcaaggcaatacagaagtgatccacacagggacattgcaaagacatgaaagtcatcacattggagatttttgcttccaggaaattgagaaagaaattcatgacattgagtttcagtgtcaagaagatgaaagaaatggccttgaagcacccatgacaaaaataaaaaagttgactggtagcacagaccaacatgatcacaggcatgctggaaacaagcctattaaagatcagcttggatcaagcttttattcacatctgcctgaactccacatatttcagatcaaaggtgaaattggtaatcaacttgagaagtctactaatgatgctccctcagtttcaacattccaaagaatttcctgtaggccccaaacccagatttctaataactatgggaataatcccctgaattcttcattactcccacaaaaacaggaagtacacatgagagaaaaatctttccaatgtaataagagtggcaaagcctttaattgtagctcactcttaaggaaacaccagataccccatttaggagacaaacaatataaatgtgatgtatgtggcaagctctttaatcacgagcaataccttgcatgccatgatagatgtcacactgttgagaaaccttacaagtgtaaagagtgtggcaagaccttcagtcaggagtcatcccttacctgccatcgtagacttcatactggagtaaaacgttacaattgtaatgagtgtggcaagatctttggtcaaaattcagcccttctaattgataaggcaattgatactggagaaaatccttacaagtgtaatgaatgtgacaaggcttttaatcaacaatcacaactttcacatcatagaattcatactggagagaaaccttacaaatgtgaagaatgtgacaaagttttcagtcggaaatcaaccattgagacacataagagaattcatactggagagaaaccatacagatgtaaggtttgtgacacagctttcacgtggcattcacagctggctcgacatagaagaattcatactgcaaagaaaacttataaatgtaatgagtgtggcaagaccttcagtcacaagtcatcccttgtatgccatcatagacttcatggtggagagaaatcttacaaatgtaaggtttgtgacaaggcttttgtgtggagttcacaactggcaaaacatactagaattgactgtggagaaaaaccttacaagtgtaatgaatgtgggaagacctttggtcaaaattcagatcttttaattcataagtcaattcatactggggagcaaccttacaaatgtgatgaatgtgaaaaggttttcagtcgtaaatcaagccttgagacacataagataggtcatactggagagaaaccatacaaatgtaaggtttgtgacaaggcttttgcgtgtcattcctatctggcaaaacatactagaattcatagtggagagaaaccttacaagtgtaatgagtgcagcaagaccttcagtcacaggtcataccttgtatgccatcatagagttcatagtggtgagaaaccttacaagtgtaatgagtgcagcaagaccttcagtcgcaggtcatcccttcattgccatcgtagacttcatagtggtgagaaaccttacaagtgtaatgagtgtggcaataccttccgtcactgctcatcccttatataccatcgtagacttcatactggagagaaatcttacaaatgtacaatttgtgacaaggctttcgtgcgtaattcactcctgtcaagacataccagaattcacactgcagagaaaccttacaagtgtaatgaatgtgggaaggcttttaatcaacaatcacacctttcacgtcatcatagaattcatactggagagaaaccttagaaatgtgaagcatgtgacaaagtttccatttggaaatcacaccttaaagacataggagaatttatactggagagaaagcttacaaatgtaaggtttctgacaagacttgggagtgattcacacctggaacaacatactggacttcacactggagagaaaccttacaagtgtaatgagtgtggcaaagcctttggcaagcagtcaacacttattcaccatcaggcaattcatggtgtagggaaacttgactaatgtaatgattgtcacaaagtcttcagtaatgctacaacgattacaaatcattggagaatccataatgaagagagatcttacaagtgtaataaatgtggcaaatttttcagagatcgttcacatattgcaggtcatcggtgaactcatactggagagaaaccttacaaatgtcatgactgtgccaaggtcttcagtcaagcttcatcctatgcaaaacataggagaatttatacaggagagaaacctcacaagtgtgatgattgtggcaaagcctttgcttcacgttcacacgtcattagacatcagagaatctatactggacagaaatcttacaaatgtcatcagtgtggcaaggtcttcagtccaagatcactccatgcagaacatcagaaaattcatttttgagataaccgttcccaatgaaatgagtatagcaaaccatcaagcattaattgacattggagtcaattcagcattgacttgagtttgtgttgacttaacattgagttcaagcctttattgacattcaagtgtttatgttaagaggatggggccaggtgtggtggctccgacctgtaatcccagcacgtcgggaggccaaggcacataggtcacttgaggtcaggagtttgaaaccagcatggccaacagatgtgagccacttttctcagcctgttttttgtttcttattttctattatttttttgagccagtactttttaaagagatagtacttttttcagttagtactttttgaaagggatatatcatagtaatttttaaaagggatatgaggccaggcacggaggctcatgcctataatcccagcactttgggaggccgaggcaggcagatcacggggtcaggagatcgagactttcctggctaacagggtgaatccctgtctctactaaaaatacaaaaaattagctgggcatggtggctggcgcctgtagtcccagctactccagatgctgaggcaggagaatggcatgaacctgtgaggcggagcttgcagggagtcgagatcgcaccactgggctccagcctgggcgacagagtgagagtctatctc

SEQ ID NO: 11021 - protein, 705 aa, Homo sapiens; identical to SEQ ID NO: 11019

SEQ ID NO: 11022 - DNA, 571 bp, Homo sapiens
aaacccggaagcggatcgggtggagtgtaggtcatatcgccgcgatatctcttccaaatgcatgatgaaggaggtcttgtcaacagggcaaggcaatacagaagtgatccacacagggacattgcaaagacatgaaagtcatcacattggagatttttgcttccaggaaattgagaaagaaattcatgacattgagtttcagtgtcaagaagatgaaagaaatggccttgaagcacccatgacaaaaataaaaaagttgactggtagcacagaccaacatgatcacaggcatgctggaaacaagcctattaaagatcagcttggatcaagcttttattcacatctgcctgaactccacatatttcagatcaaaggtgaaattggtaatcaacttgagaagtctactaatgatgctccctcagtttcaacattccaaagaatttcctgtaggccccaaacccagatttctaataactatgggaataatcccctgaattcttcattactcccacaaaaacaggaagtacacatgagagaaaaatctttccaatgtaataagagtggcaaagcc

SEQ ID NO: 11023 - protein, 169 aa, Homo sapiens
MMKEVLSTGQGNTEVIHTGTLQRHESHHIGDFCFQEIEKEIHDIEFQCQEDERNGLEAPMTKIKKLTGSTDQHDHRHAGNKPIKDQLGSSFYSHLPELHIFQIKGEIGNQLEKSTNDAPSVSTFQRISCRPQTQISNNYGNNPLNSSLLPQKQEVHMREKSFQCNKSGK

SEQ ID NO: 11024 - DNA, 531 bp, Homo sapiens
aaacccggaagcggatcgggtggagtgtaggtcatatcgccgcggattgattcctaaagactcatgttacgtgaggaagcagctcagaagaggaaaggaaaggagccaggcatggctcttcctcagatatctcttccaaatgcatgatgaaggaggtcttgtcaacagggcaaggcaatacagaagtgatccacacagggacattgcaaagacatgaaagtcatcacattggagatttttgcttccaggaaattgagaaagaaattcatgacattgagtttcagtgtcaagaagatgaaagaaatggccttgaagcacccatgacaaaaataaaaaagttgactggtagcacagaccaacatgatcacaggcatgctggaaacaagcctattaaagatcagcttggatcaagcttttattcacatctgcctgaactccacatatttcagatcaaaggtgaaattggtaatcaacttgagaagtctactaatgatgctccctcagtttcaacattccaaagaatttcctgta

SEQ ID NO: 11025 - protein, 128 aa, Homo sapiens
MMKEVLSTGQGNTEVIHTGTLQRHESHHIGDFCFQEIEKEIHDIEFQCQEDERNGLEAPMTKIKKLTGSTDQHDHRHAGNKPIKDQLGSSFYSHLPELHIFQIKGEIGNQLEKSTNDAPSVSTFQRIS

SEQ ID NO: 11026 - DNA, 606 bp, Homo sapiens
aaacccggaagcggatcgggtggagtgtaggtcatatcgccgcgatatctcttccaaatgcttgatgaaaaaggtgggaggatcacttgagccagggagttgaaggctgcagtgagccctgtttttgccaccacactccagcttgggattgattcctaaagactcatgttacgtgaggaagcagctcagaagaggaaaggaaaggagccaggcatggctcttcctcagatatctcttccaaatgcatgatgaaggaggtcttgtcaacagggcaaggcaatacagaagtgatccacacagggacattgcaaagacatgaaagtcatcacattggagatttttgcttccaggaaattgagaaagaaattcatgacattgagtttcagtgtcaagaagatgaaagaaatggccttgaagcacccatgacaaaaataaaaaagttgactggtagcacagaccaacatgatcacaggcatgctggaaacaagcctattaaagatcagcttggatcaagcttttattcacatctgcctgaactccacatatttcagatcaaaggtgaaattggtaatcaacttgagaagtctactaatgatgctccctcag

SEQ ID NO: 11027 - protein, 119 aa, Homo sapiens
MMKEVLSTGQGNTEVIHTGTLQRHESHHIGDFCFQEIEKEIHDIEFQCQEDERNGLEAPMTKIKKLTGSTDQHDHRHAGNKPIKDQLGSSFYSHLPELHIFQIKGEIGNQLEKSTNDAP

SEQ ID NO: 11028 - DNA, 711 bp, Homo sapiens
aacgcaaacccggaagcggatcgggtggagtgtaggtcatatcgccgcgttgactagataacgaaggacaatgcatatatacaaaattgctgtattgcctggtgatatgcagctgtacctgtgacatcataattgcaccctccgacatgatatctcttccaaatgcttgatgaaaaaggtgggaggatcacttgagccagggagttgaaggctgcagtgagccctgtttttgccaccacactccagcttgggattgattcctaaagactcatgttacgtgaggaagcagctcagaagaggaaaggaaaggagccaggcatggctcttcctcagatatctcttccaaatgcatgatgaaggaggtcttgtcaacagggcaaggcaatacagaagtgatccacacagggacattgcaaagacatgaaagtcatcacattggagatttttgcttccaggaaattgagaaagaaattcatgacattgagtttcagtgtcaagaagatgaaagaaatggccttgaagcacccatgacaaaaataaaaaagttgactggtagcacagaccaacatgatcacaggcatgctggaaacaagcctattaaagatcagcttggatcaagcttttattcacatctgcctgaactccacatatttcagatcaaaggtgaaattggtaatcaacttgagaagtctactaatgatgctccctcag

SEQ ID NO: 11029 - protein, 119 aa, Homo sapiens; identical to SEQ ID NO: 11027

SEQ ID NO: 11030 - DNA, 790 bp, Homo sapiens
aacgcaaacccggaagcggatcgggtggagtgtaggtcatatcgccgcgatatctcttccaaatgcttgatgaaaaaggtgggaggatcacttgagccagggagttgaaggctgcagtgagccctgtttttgccaccacactccagcttgggattgattcctaaagactcatgttacgtgaggaagcagctcagaagaggaaaggaaaggagccaggcatggctcttcctcagggacgcttgactttccgggatgtggctatagaattctcattggcagagtggaaatgcctgaacccttcacagagggctttgtacagggaagtgatgttggagaactacaggaacctggaggctgtgggtagagtctcactttgtcacccaggctggagtgcagtggtgtgatcctggctcactgcaacctctacctcccagatatctcttccaaatgcatgatgaaggaggtcttgtcaacagggcaaggcaatacagaagtgatccacacagggacattgcaaagacatgaaagtcatcacattggagatttttgcttccaggaaattgagaaagaaattcatgacattgagtttcagtgtcaagaagatgaaagaaatggccttgaagcacccatgacaaaaataaaaaagttgactggtagcacagaccaacatgatcacaggcatgctggaaacaagcctattaaagatcagcttggatcaagcttttattcacatctgcctgaactccacatatttcagatcaaaggtgaaattggtaatcaacttgagaag

SEQ ID NO: 11031 - protein, 77 aa, Homo sapiens
MLREEAAQKRKGKEPGMALPQGRLTFRDVAIEFSLAEWKCLNPSQRALYREVMLENYRNLEAVGRVSLCHPGWSAVV

SEQ ID NO: 11032 - DNA, 560 bp, Homo sapiens
acgcaaacccggaagcggatcgggtggagtgtaggtcatatcgccgcgatatctcttccaaatgcttgatgaaaaaggtgggaggatcacttgagccagggagttgaaggctgcagtgagccctgtttttgccaccacactccagcttgggattgattcctaaagactcatgttacgtgaggaagcagctcagaagaggaaaggaaaggagccaggcatggctcttcctcaggtagagtctcactttgtcacccaggctggagtgcagtggtgtgatcctggctcactgcaacctctacctcccagatatctcttccaaatgcatgatgaaggaggtcttgtcaacagggcaaggcaatacagaagtgatccacacagggacattgcaaagacatgaaagtcatcacattggagatttttgcttccaggaaattgagaaagaaattcatgacattgagtttcagtgtcaagaagatgaaagaaatggccttgaagcacccatgacaaaaataaaaaagttgactggtagcacagaccaacatgatcacaggcatgctgga

SEQ ID NO: 11033 - protein, 75 aa, Homo sapiens
MLREEAAQKRKGKEPGMALPQVESHFVTQAGVQWCDPGSLQPLPPRYLFQMHDEGGLVNRARQYRSDPHRDIAKT

SEQ ID NO: 11034 - DNA, 490 bp, Homo sapiens
agattaacgcaaacccggaagcggatcgggtggagtgtaggtcatatcgccgcggattgattcctaaagactcatgttacgtgaggaagcagctcagaagaggaaaggaaaggagccaggcatggctcttcctcagggacgcttgactttccgggatgtggctatagaattctcattggcagagtggaaatgcctgaacccttcacagagggctttgtacagggaagtgatgttggagaactacaggaacctggaggctgtggatatctcttccaaatgcatgatgaaggaggtcttgtcaacagggcaaggcaatacagaagtgatccacacagggacattgcaaagacatgaaagtcatcacattggagatttttgcttccaggaaattgagaaagaaattcatgacattgagtttcagtgtcaagaagatgaaagaaatggccttgaagcacccatgacaaaaataaaaaagttgactggtagcaca

SEQ ID NO: 11035 - protein, 138 aa, Homo sapiens
MLREEAAQKRKGKEPGMALPQGRLTFRDVAIEFSLAEWKCLNPSQRALYREVMLENYRNLEAVDISSKCMMKEVLSTGQGNTEVIHTGTLQRHESHHIGDFCFQEIEKEIHDIEFQCQEDERNGLEAPMTKIKKLTGS

SEQ ID NO: 11036 - DNA, 601 bp, Homo sapiens
aaacccggaagcggatcgggtggagtgtaggtcatatcgccgcgttgactagataacgaaggacaatgcatatatacaaaattgctgtattgcctggtgatatgcagctgtacctgtgacatcataattgcaccctccgacatgatatctcttccaaatgcttgatgaaaaaggtgggaggatcacttgagccagggagttgaaggctgcagtgagccctgtttttgccaccacactccagcttgggattgattcctaaagactcatgttacgtgaggaagcagctcagaagaggaaaggaaaggagccaggcatggctcttcctcaggtagagtctcactttgtcacccaggctggagtgcagtggtgtgatcctggctcactgcaacctctacctcccagatatctcttccaaatgcatgatgaaggaggtcttgtcaacagggcaaggcaatacagaagtgatccacacagggacattgcaaagacatgaaagtcatcacattggagatttttgcttccaggaaattgagaaagaaattcatgacattgagtttcagtgtcaagaagatgaaagaaatggccttgaagcacccatgac

SEQ ID NO: 11037 - protein, 75 aa, Homo sapiens; identical to SEQ ID NO: 11033

SEQ ID NO: 11038 - DNA, 610 bp, Homo sapiens
aaacccggaagcggatcgggtggagtgtaggtcatatcgccgcgttgactagataacgaaggacaatgcatatatacaaaattgctgtattgcctggtgatatgcagctgtacctgtgacatcataattgcaccctccgacatgatatctcttccaaatgcttgatgaaaaaggtgggaggatcacttgagccagggagttgaaggctgcagtgagccctgtttttgccaccacactccagcttgggattgattcctaaagactcatgttacgtgaggaagcagctcagaagaggaaaggaaaggagccaggcatggctcttcctcagggacgcttgactttccgggatgtggctatagaattctcattggcagagtggaaatgcctgaacccttcacagagggctttgtacagggaagtgatgttggagaactacaggaacctggaggctgtggatatctcttccaaatgcatgatgaaggaggtcttgtcaacagggcaaggcaatacagaagtgatccacacagggacattgcaaagacatgaaagtcatcacattggagatttttgcttccaggaaattgagaaagaaattcatgacattgagttt

SEQ ID NO: 11039 - protein, 114 aa, Homo sapiens
MLREEAAQKRKGKEPGMALPQGRLTFRDVAIEFSLAEWKCLNPSQRALYREVMLENYRNLEAVDISSKCMMKEVLSTGQGNTEVIHTGTLQRHESHHIGDFCFQEIEKEIHDIE

SEQ ID NO: 11040 - DNA, 486 bp, Homo sapiens
agattaacgcaaacccggaagcggatcgggtggagtgtaggtcatatcgccgcgatatctcttccaaatgcttgatgaaaaaggtgggaggatcacttgagccagggagttgaaggctgcagtgagccctgtttttgccaccacactccagcttgggattgattcctaaagactcatgttacgtgaggaagcagctcagaagaggaaaggaaaggagccaggcatggctcttcctcagggacgcttgactttccgggatgtggctatagaattctcattggcagagtggaaatgcctgaacccttcacagagggctttgtacagggaagtgatgttggagaactacaggaacctggaggctgtggatatctcttccaaatgcatgatgaaggaggtcttgtcaacagggcaaggcaatacagaagtgatccacacagggacattgcaaagacatgaaagtcatcacattggagatttttgcttcca

SEQ ID NO: 11041 - protein, 102 aa, Homo sapiens
MLREEAAQKRKGKEPGMALPQGRLTFRDVAIEFSLAEWKCLNPSQRALYREVMLENYRNLEAVDISSKCMMKEVLSTGQGNTEVIHTGTLQRHESHHIGDFC

SEQ ID NO: 11042 - DNA, 3828 bp, Homo sapiens
gcgcacaaacccggaagcggatcgcgtggagtgaaggtcctaccacggcgcgtgagttttgctctgccttggattaagtctgcacttcccaggtccccggcgcttctgcccctgggacgtgggatccccacggacctggaaattctcgcctgtcttcccttcacccagagcaaattgagacgtcccggattgattcctaaagactcatgttatgtgaagaagcagctcagaagaggaaaggaaaggagccaggcatggctcttcctcagatatctcttccaaacgcatgatgaaggaggtcttgtcaacagggcaaggcaatacagaagtgatccacacagggacattgcaaagatatcaaagttatcacattggagatttttgcttccaggaaattgagaaagaaattcatgatattgagtttcagtgtcaagaagatgaaagaaatggccatgaagcacccatgacaaaaataaaaaagttgactggtagcacagaccaacatgatcacaggcatgctggaaacaagcctattaaagatcagcttggatcaagcttttattcacatctgcctgaactccacataattcagatcaaaggtaaaattggtaatcaatttgagaagtctaccagtgatgctccctcggtttcaacatcccaaagaatttctcctaggccccaaatccatatttctaataactatgggaataattccccgaattcttcactactcccacaaaaacaggaagtatacatgagagaaaaatctttccaatgtaatgagagtggcaaagcctttaattgtagctcactcttaaggaaacaccagataccccatttaggagacaaacaatataaatgtgatgtatgtggcaagctctttaatcacaagcaataccttacatgccattgtagatgtcacactggagagaaaccttacaagtgtaatgagtgtggaaagtccttcagtcaggtatcatcccttacatgccatcgtagacttcacactgcagtaaaatctcacaagtgtaatgagtgtggcaagatctttggtcaaaattcagcccttgtaattcataaggcaattcatactggagaaaaaccttacaagtgtaatgaatgtgacaaagcttttaatcagcaatcaaaccttgcacgtcatcgtagaattcatactggagagaaaccttacaaatgtgaagaatgtgacaaagttttcagtcggaaatcaacccttgagtcacataagagaattcatactggagagaaaccatacaaatgtaaggtttgtgacacagctttcacatggaattctcagctggcaagacataaaagaattcacactggagagaaaacttacaagtgtaatgagtgtggcaagaccttcagtcacaagtcatcccttgtatgccatcatagacttcatggtggagagaaatcttacaaatgtaaggtctgtgacaaggcttttgcgtggaattcacacctggtaagacatactagaattcatagtggaggaaaaccttacaagtgtaatgaatgtgggaagacctttggtcaaaattcagatcttctaattcataagtcaattcatactggagagcaaccttacaaatatgaagaatgtgaaaaggttttcagttgtggatcaacccttgagacacataagataattcacaccggagagaaaccatacaaatgtaaggtttgtgacaaggcttttgcgtgtcattcctatctggcaaaacatactagaattcatagtggagagaaaccttacaagtgtaatgagtgcagcaagaccttccgtctgaggtcataccttgcaagccatcgcagagttcatagtggtgagaaaccttacaagtgtaatgagtgcagcaagaccttcagtcagaggtcataccttcattgccatcgtagacttcatagtggtgagaaaccttacaagtgtaatgagtgtggcaagaccttcagtcacaagccatcccttgttcaccatcgtagacttcatactggagagaaatcttacaaatgtacggtttgtgacaaggctttcgtgcgtaattcatacctggcaagacataccagaattcacactgcagagaaaccttacaagtgtaatgaatgtgggaaggcttttaatcaacaatcacaactttcacttcatcatagaattcatgctggggagaaactttacaaatgtgaaacatgtgacaaagttttcagtcgcaaatcacaccttaaaagacataggagaattcatcctggaaagaaaccatacaaatgtaaggtttgtgacaagacttttgggagtgattcacacctgaaacaacatactggacttcacactggagagaaaccttacaagtgtaatgagtgtggcaaagcctttagcaagcagtcaacacttattcaccatcaggcagttcatggtgtagggaaacttgactaatgtaatgattgtcacaaagtcttcagtaacgctacaaccattgcaaatcattggagaatctataatgaataaagatctaacaagtgtaataaatgtggcaaatttttcagacatcattcatacattgcagttcattgacacactcatactggagagaaaccttacaaatgtcatgactgtggcaaggtcttcagtcaagcttcatcctatgcaaaacataggagaattcatacaggagagaaacctcacatgtgtgatgattgtggcaaagcctttacttcatgttcacacctcattagacatcagagaatccctactggacagaaatcttacaaatgtcagaagtgtggcaaggtcttgagtccgaggtcactccttgcagaacatcagaaaattcatttttgagataactgttcccaatgcagtgagtatagcaaaccatcaagcattaattgacactagagtcagtccagcattgacttgagtttgtgttgacttaacattgagttcaacccttaattgacattcaagtgtttatgttaagaggattgggccaggtgtggtttctcacacctgtaattccagcacggttggaggccaaggcacataggtcacttgaggtcagaagtttgaaaccagcatggccaacagatgtcagccacttttcccagcctgttttttgattcttattttctatttttcttttttgagatagtactttttaaagagatagtacttttttgatatagtactttataaaagggagatcaggccaggcacggaggctcatgtaagtaatcccagcactttgggaggccgagacgggcccatgacaaggtcaggagatcgagaccgtcctggctaacacggtgaaaccccatctctactaaaaatataaaatattagccaggcgtggtggcaggtgcctgtagtcctagctgcttgggaggctgaggcaggagaatggtgtgaatcctggagacggagcttgcagggagccaacatcgtgccactgcactccggcctgggcgacagtgagaatctgtctcaaaaaaaaaaaaaaaaaaaggatatcaaagctggatggtggctcatccctgcaatcacaacactttggtagactgatgtgagtggatcacctaaggtcagaagttcaagagcaccctggctaacatggtgaaaccccatctctactaaaaatacaaaagttagccggggggtggtggtgtgcacctttagttccagctacttgagaggctgaggcacaagagtcgcttaaacctgggaggtagaggttgccgtgaggcaaaatcgtgccactgccctcagcctgggcagtagagtcagtctccatctcaaagaaaccagcaaac

SEQ ID NO: 11043 - protein, 722 aa, Homo sapiens
MMKEVLSTGQGNTEVIHTGTLQRYQSYHIGDFCFQEIEKEIHDIEFQCQEDERNGHEAPMTKIKKLTGSTDQHDHRHAGNKPIKDQLGSSFYSHLPELHIIQIKGKIGNQFEKSTSDAPSVSTSQRISPRPQIHISNNYGNNSPNSSLLPQKQEVYMREKSFQCNESGKAFNCSSLLRKHQIPHLGDKQYKCDVCGKLFNHKQYLTCHCRCHTGEKPYKCNECGKSFSQVSSLTCHRRLHTAVKSHKCNECGKIFGQNSALVIHKAIHTGEKPYKCNECDKAFNQQSNLARHRRIHTGEKPYKCEECDKVFSRKSTLESHKRIHTGEKPYKCKVCDTAFTWNSQLARHKRIHTGEKTYKCNECGKTFSHKSSLVCHHRLHGGEKSYKCKVCDKAFAWNSHLVRHTRIHSGGKPYKCNECGKTFGQNSDLLIHKSIHTGEQPYKYEECEKVFSCGSTLETHKIIHTGEKPYKCKVCDKAFACHSYLAKHTRIHSGEKPYKCNECSKTFRLRSYLASHRRVHSGEKPYKCNECSKTFSQRSYLHCHRRLHSGEKPYKCNECGKTFSHKPSLVHHRRLHTGEKSYKCTVCDKAFVRNSYLARHTRIHTAEKPYKCNECGKAFNQQSQLSLHHRIHAGEKLYKCETCDKVFSRKSHLKRHRRIHPGKKPYKCKVCDKTFGSDSHLKQHTGLHTGEKPYKCNECGKAFSKQSTLIHHQAVHGVGKLD

SEQ ID NO: 11044 - DNA, 1423 bp, Homo sapiens
actttcaaaattctttaaggattgattcctaaagactcatgttatgtgaagaagcagctcagaagaggaaaggaaaggagccaggcatggctcttcctcagggacgcttgactttcagggatgtggctatagaattctcattggcagagtggaaatgcctgaacccttcgcagagggctttgtacagggaagtgatgttggagaactacaggaacctggaagctgtggatatctcttccaaacgcatgatgaaggaggtcttgtcaacagggcaaggcaatacagaagtgatccacacagggacattgcaaagatatcaaagttatcacattggagatttttgcttccaggaaattgagaaagaaattcatgatattgagtttcagtgtcaagaagatgaaagaaatggccatgaagcacccatgacaaaaataaaaaagttgactggtagcacagaccaacatgatcacaggcatgctggaaacaagcctattaaagatcagcttggatcaagcttttattcacatctgcctgaactccacataattcagatcaaaggtaaaattggtaatcaatttgagaagtctaccagtgatgctccctcggtttcaacatcccaaagaatttctcctaggccccaaatccatatttctaataactatgggaataattccccgaattcttcactactcccacaaaaacaggaagtatacatgagagaaaaatctttccaatgtaatgagagtggcaaagcctttaattgtagctcactcttaaggaaacaccagataccccatttaggagacaaacaatataaatgtgatgtatgtggcaagctctttaatcacaagcaataccttacatgccattgtagatgtcacactggagagaaaccttacaagtgtaatgagtgtggaaagtccttcagtcaggtatcatcccttacatgccatcgtagacttcacactgcagtaaaatctcacaagtgtaatgagtgtggcaagatctttggtcaaaattcagcccttgtaattcataaggcaattcatactggagaaaaaccttacaagtgtaatgaatgtgacaaagcttttaatcagcaatcaaaccttgcacgtcatcgtagaattcatactggagagaaaccttacaaatgtgaagaatgtgacaaagttttcagtcggaaatcaacccttgagtcacataagagaattcatactggagagaaaccatacaaatgtaaggtttgtgacacagctttcacatggaattctcagctggcaagacataaaagaattcacactggagagaaaacttacaagtgtaatgagtgtggcaagaccttcagtcacaagtcatcccttgtatgccatcatagacttcatggtggagagaaatcttacaaatgtaaggtctgtgacaa

SEQ ID NO: 11045 - protein, 460 aa, Homo sapiens
MLCEEAAQKRKGKEPGMALPQGRLTFRDVAIEFSLAEWKCLNPSQRALYREVMLENYRNLEAVDISSKRMMKEVLSTGQGNTEVIHTGTLQRYQSYHIGDFCFQEIEKEIHDIEFQCQEDERNGHEAPMTKIKKLTGSTDQHDHRHAGNKPIKDQLGSSFYSHLPELHIIQIKGKIGNQFEKSTSDAPSVSTSQRISPRPQIHISNNYGNNSPNSSLLPQKQEVYMREKSFQCNESGKAFNCSSLLRKHQIPHLGDKQYKCDVCGKLFNHKQYLTCHCRCHTGEKPYKCNECGKSFSQVSSLTCHRRLHTAVKSHKCNECGKIFGQNSALVIHKAIHTGEKPYKCNECDKAFNQQSNLARHRRIHTGEKPYKCEECDKVFSRKSTLESHKRIHTGEKPYKCKVCDTAFTWNSQLARHKRIHTGEKTYKCNECGKTFSHKSSLVCHHRLHGGEKSYKCKVC

SEQ ID NO: 11046 - DNA, 600 bp, Homo sapiens
agtcctgggcgcgcacaaacccggaagcggatcgcgtggagtgaaggtcctaccacggcgcgtgagttttgctctgccttggattaagtctgcacttcccaggtccccggcgcttctgcccctgggacgtgggatccccacggacctggaaattctcgcctgtcttcccttcacccagagcaaattgagacgtcccggcctcgcccctgagctctacaatcctgtgtccagttgtctcctcagctgtctcctgggtcatcaaacaggcatccccaccttcaggtgtccacgagtggctttctaaacccccaaacacatttccttgcagtctgcacatctcagatgagggtgactacgtacttccggaaacggccgaacttgacagcatgtattttaaatttgtgaaataaattactttatttgtaagtgttgtaatttataatataaagagaaacttagatgtatacgtgaaaagagtgagaagatacatcacttccaatttttgtttgtttgtttgtttttttgagaggaattttcactcttgtggctgaggctggagtgcaatgccatgatatcagctcactgcaacctctgactcct

SEQ ID NO: 11047 - protein, 100 aa, Homo sapiens
VLGAHKPGSGSRGVKVLPRRVSFALPWIKSALPRSPALLPLGRGIPTDLEILACLPFTQSKLRRPGLAPELYNPVSSCLLSCLLGHQTGIPTFRCPRVAF

SEQ ID NO: 11048 - DNA, 506 bp, Homo sapiens
tttgctctgccttggattaagtctgcacttcccaggtccccggcgcttctgcccctgggacgtgggatccccacggacctggaaattctcgcctgtcttcccttcacccagagcaaattgagacgtcccggaggaagaccaaggcagcctattgggccttccaggcaatcacatgggaatcagccacacgtccttcctcctcacctcagaacatctcagaataacttggtgaaatgtctcccactgtgagcctcagtgagcccacctgtaacatagaggcctcgcccctgagctctacaatcctgtgtccagttgtctcctcagctgtctcctgggtcatcaaacaggcatccccaccttcaggtgtccacgagtggctttctaaacccccaaacacatttccttgcagtctgcacatctcagatgagggtgactacgtacttccggaaacggccgaacttgacagcatgtattttaaatttgtgaaataaattactttatttgta

SEQ ID NO: 11049 - protein, 85 aa, Homo sapiens
MSPTVSLSEPTCNIEASPLSSTILCPVVSSAVSWVIKQASPPSGVHEWLSKPPNTFPCSLHISDEGDYVLPETAELDSMYFKFVK

SEQ ID NO: 11050 - DNA, 642 bp, Homo sapiens
ggatcgcgtggagtgaaggtcctaccacggcgcgtgagttttgctctgccttggattaagtctgcacttcccaggtccccggcgcttctgcccctgggacgtgggatccccacggacctggaaattctcgcctgtcttcccttcacccagagcaaattgagacgtcccggaggaagaccaaggcagcctattgggccttccaggcaatcacatgggaatcagccacacgtccttcctcctcacctcagaacatctcagaataacttggtgaaatgtctcccactgtgagcctcagtgagcccacctgtaacatagaggtgaggaataagaccggaaaagctcagtcagtgacactgacccctgaaatgactgacaaaatacagtgtgtgacttttcttctgggagagggtagtgctcagttttaactcgaattttaaatgaattccagttctccaaatattaaaaaaaaaaaaaaagaagcacaagatgaacaaaaacggggtaattagactcaagtcaccttgaaccttatcatctcacagctttaacccacctacatgactccatgtcccctgcaggcctcgcccctgagctctacaatcctgtgtccagttgtctcctcagctgtctcctgggtcatca

SEQ ID NO: 11051 - protein, 50 aa, Homo sapiens [sequence omitted]

SEQ ID NO: 11052 - DNA, 1015 bp, Homo sapiens
gtgagaaggaaactgcaagagtggggcagagaaccagagtgtcagagcaaaacctcctctatctgcacatcctggggacgaaccgggcagccggagagctgcggccggcccagtcccgctccgcctttgaagggtaaaacccaaggcggggccttggttctggcagaagggacgctatgaccgcagaattcctctccctgctttgcctcgggctgtgtctgggctacgaagatgagaaaaagaatgagaaaccgcccaagccctccctccacgcctggcccagctcggtggttgaagccgagagcaatgtgaccctgaagtgtcaggctcattcccagaatgtgacatttgtgctgcgcaaggtgaacgactctgggtacaagcaggaacagagctcggcagaaaacgaagctgaattccccttcacggacctgaagcctaaggatgctgggaggtacttttgtgcctacaagacaacagcctcccatgagtggtcagaaagcagtgaacacttgcagctggtggtcacagataaacacgatgaacttgaagctccctcaatgaaaacagacaccagaaccatctttgtcgccatcttcagctgcatctccatccttctcctcttcctctcagtcttcatcatctacagatgcagccagcacagttcatcatctgaggaatccaccaagagaaccagccattccaaacttccggagcaggaggctgccgaggcagatttatccaatatggaaagggtatctctctcgacggcagacccccaaggagtgacctatgctgagctaagcaccagcgccctgtctgaggcagcttcagacaccacccaggagcccccaggatctcatgaatatgcggcactgaaagtgtagcaagaagacagccctggccactaaaggaggggggatcgtgctggccaaggttatcggaaatctggagatgcagatactgtgtttccttgctcttcgtccatatcaataaaattaagtttctcgtctta

SEQ ID NO: 11053 - protein, 236 aa, Homo sapiens; identical to SEQ ID NO: 1833

SEQ ID NO: 11054 - DNA, 898 bp, Homo sapiens
gggcagagaaccagagtgtcagagcaaaacctcctctatctgcacatcctggggacgaaccgggcagccggagagctgcggccggcccagtcccgctccgcctttgaagggtaaaacccaaggcggggccttggttctggcagaagggacgctatgaccgcagaattcctctccctgctttgcctcgggctgtgtctgggctacgaagatgagaaaaagaatgagaaaccgcccaagccctccctccacgcctggcccagctcggtggttgaagccgagagcaatgtgaccctgaagtgtcaggctcattcccagaatgtgacatttgtgctgcgcaaggtgaacgactctgggtacaagcaggaacagagctcggcagaaaacgaagctgaattccccttcacggacctgaagcctaaggatgctgggaggtacttttgtgcctacaagacaacagcctcccatgagtggtcagaaagcagtgaacacttgcagctggtggtcacagataaacacgatgaacttgaagctccctcaatgaaaacaggttcatcatctgaggaatccaccaagagaaccagccattccaaacttccggagcaggaggctgccgaggcagatttatccaatatggaaagggtatctctctcgacggcagacccccaaggagtgacctatgctgagctaagcaccagcgccctgtctgaggcagcttcagacaccacccaggagcccccaggatctcatgaatatgcggcactgaaagtgtagcaagaagacagccctggccactaaaggaggggggatcgtgctggccaaggttatcggaaatctggagatgcagatactgtgtttccttgctcttcgtccatatcaataaaattaagtttctcgtctt

SEQ ID NO: 11055 - protein, 205 aa, Homo sapiens
MTAEFLSLLCLGLCLGYEDEKKNEKPPKPSLHAWPSSVVEAESNVTLKCQAHSQNVTFVLRKVNDSGYKQEQSSAENEAEFPFTDLKPKDAGRYFCAYKTTASHEWSESSEHLQLVVTDKHDELEAPSMKTGSSSEESTKRTSHSKLPEQEAAEADLSNMERVSLSTADPQGVTYAELSTSALSEAASDTTQEPPGSHEYAALKV

SEQ ID NO: 11056 - DNA, 1286 bp, Homo sapiens
gggcagagaaccagagtgtcagagcaaaacctcctctatctgcacatcctggggacgaaccgggcagccggagagctgcggccggcccagtcccgctccgcctttgaagggtaaaacccaaggcggggccttggttctggcagaagggacgctatgaccgcagaattcctctccctgctttgcctcgggctgtgtctgggctacgaagatgagaaaaagaatgagaaaccgcccaagccctccctccacgcctggcccagctcggtggttgaagccgagagcaatgtgaccctgaagtgtcaggctcattcccagaatgtgacatttgtgctgcgcaaggtgaacgactctgggtacaagcaggaacagagctcggcagaaaacgaagctgaattccccttcacggacctgaagcctaaggatgctgggaggtacttttgtgcctacaagacaacagcctcccatgagtggtcagaaagcagtgaacacttgcagctggtggtcacagataaacacgatgaacttgaagctccctcaatgaaaacagacaccagaaccatctttgtcgccatcttcagctgcatctccatccttctcctcttcctctcagtcttcatcatctacagatgcagccagcacagtgagctcagagaacgcaaagggagagagggggagtgaaggattttctcggtaggtaaattcctcctgcattttttgtaggttcatcatctgaggaatccaccaagaggtagatgcttggcatagctcatgctccacttattcccatgtcattctcaagggaacccattggcacatccgggattggcaccctgagcccccaccccagcccattctgtgaccttcctcctctcccttcttctcccttcctctcccctccattgccctcaccctctccccgaaatcttcacatcccatcctttcacgtgtgtctctctctttcagaaccagccattccaaacttccggagcaggaggctgccgaggcagatttatccaatatggaaagggtatctctctcgacggcagacccccaaggagtgacctatgctgagctaagcaccagcgccctgtctgaggcagcttcagacaccacccaggagcccccaggatctcatgaatatgcggcactgaaagtgtagcaagaagacagccctggccactaaaggaggggggatcgtgctggccaaggttatcggaaatctggagatgcagatactgtgtttccttgctcttcgtccatatcaataaaattaagtttctcgtctt

SEQ ID NO: 11057 - protein, 174 aa, Homo sapiens
MTAEFLSLLCLGLCLGYEDEKKNEKPPKPSLHAWPSSVVEAESNVTLKCQAHSQNVTFVLRKVNDSGYKQEQSSAENEAEFPFTDLKPKDAGRYFCAYKTTASHEWSESSEHLQLVVTDKHDELEAPSMKTDTRTIFVAIFSCISILLLFLSVFIIYRCSQHSELRERKGREGE

SEQ ID NO: 11058 - DNA, 348 bp, Homo sapiens; identical to SEQ ID NO: 1834

SEQ ID NO: 11059 - protein, 115 aa, Homo sapiens; identical to SEQ ID NO: 1835

SEQ ID NO: 11060 - DNA, 1197 bp, Homo sapiens
aaaccagctgctgaaagctggcggggtgggtctcagacttcaggtggcataataaaataagaaggaatgactcatgctgggacaccgatggcccgtgaaaacatcatgctaggtgaagggagccggagatgaaaggccacattcggatgtctgcctgagccccaccccgaatgccagcccttcttccctgagctcacccagccccagctccaggactgagagccccaggaagcttggagaggtgtgagagagacaggtgtccagcctcagccccgatccttcacctgcagagcccggcatgtggggctacctgtcgctgatgcctgtcttcctagctgtctgggctatctctggcgtctggatcgtttttgccattgcagtgaccaacaggactgtggacctcagtaaaggctttccctacatcagcatctgcggatccttcccccctcagagctgcatcttcagccaggtgctcaatatgggagctgctctggccgcgtggatctgcattgtccgttaccaccagctccgggactggggcgtcagaaggtggcctaaccagctgatcctatggacgggtcttctgtgtgccctgggcacctccgtggtaggcaatttccaggtgagacccagtcggcgcccagggtctgtcccggccggcgtctggaactacaactcccagcatgccccgtggccataggcttattgtctcgggggctggttcccgcccggccctcctgggacttgtatttttctctggccagtggccttggaccggctggattcctttgctctctgagtggggcactacgagcgaggctgtttgtatgtaggacttcgttgacttccaggacgttgggataattttctgccagcccctctccccagcttatttaatgatgaaattactggtccaggcgcagtggctcatgcctgtaattccagcactttgggaggcggaggcaggcggatcgcctgaggtgaggagtttgagaccagcctggccaaccaacatggtgaaaccccgtctctcctaaaatatacaaaaattagccgggcatggtggcaggcgacttaatcccagctacgtgggaggcagaggcaggagaatcatttgaacctgggaggtggaggttgcagtgagccgagatcgagccattgcactcaaacctgggggataagagtgagacttctctc

SEQ ID NO: 11061 - protein, 133 aa, Homo sapiens
MWGYLSLMPVFLAVWAISGVWIVFAIAVTNRTVDLSKGFPYISICGSFPPQSCIFSQVLNMGAALAAWICIVRYHQLRDWGVRRWPNQLILWTGLLCALGTSVVGNFQVRPSRRPGSVPAGVWNYNSQHAPWP

SEQ ID NO: 11062 - DNA, 2309 bp, Homo sapiens
gagcagatgggaggtgcggcgacagtgtttgacgagagccgaaggaggctgtgggaggtgttggcggcggcggcgcgggcgcctgaggaggaggaggagaagcggatgagatcgtggggctcaccagcgtcccccatggcttctgagtagcgtgggagtggagtcagcaccaagccaggctccccgcgcctgccttgccctcacctgctcctgctctctgccagaggcagcatggtccgcagggcaccatggggcccgacagagtgacagcacgagaactgtgcgagaacgacgacctggccaccagcctcgtcctggacccctacctcggtttccgcacccataagatgaacgtcagccctgtgccccccctgcggcgacagcagcacctgcgctcagcgctggaaactttcctgaggcagcgggacctggaggctgcgtaccgggccctgacgctgggaggctggacggcccgctacttccagagccggggcccgcggcaggaggctgccctcaagacccacgtctatcgctacctccgtgccttcctgccggaaagtggctttaccatcctgccctgcacgcgctactccatggagaccaacggggccaagatcgtgtccactcgtgcttggaaaaagaatgagaagctggagctgctggtgggctgcattgcagagctgcgggaggcagatgaggggctgctgagggccggtgagaatgacttcagcatcatgtactcaacccgcaagcggagtgctcagctgtggctgggcccagccgccttcatcaaccatgactgcaaacccaactgcaagtttgtgcctgcagatgggaacgcagcctgcgtgaaggtgctccgggacattgagcctggggacgaggtgacatgcttctacggcgagggcttcttcggcgagaagaatgagcactgtgaatgccacacctgtgagaggaaaggtgaaggagctttccgaaccaggcctagggagcccgcgttgccaccacggcccctggacaagtaccagctgcgtgagaccaagcggcggctgcagcaaggcctggacagtggcagccgacagggcctgctgggccctcgggcctgcgtgcacccatccccgctgcgccgggacccattctgcgccgcctgccagcccctgcgcctgccagcctgcagcgcccgcccagacacctcacccctctggctccagtggctgcctcagccccagccccgagtgcggccccggaagcgccgacgcccccggccccggagggccccagtgctctccacccaccacgctgcccgcgtctccctgcaccgatggggaggctgtggcccccactgccgcctgcgaggagaggccctggtggccctgggccagcccccccacgcccgctgggcccctcagcaggactggcactgggcccggcgctatgggctgccttacgtggtgcgtgtggaccttcgtcgcctggccccagccccaccagctaccccagcccctgctgggaccccaggccccatcctgatcccgaagcaggccctcgccttcgcccccttctccccacccaagcgcctacggctggtggtcagccacggctccatcgacctggatgtcggcggtgaagagctgtgacaggccggacggggaggcccagcagggagagagggtctctctcctagctgctacccaggacctccagaaggagcccttggacctctgggagggagctgacccttgactccagcatagctctgaccctggaatggggttggtttggacacccccagggatctgagccctgaccctttgtgactgctgacccctgagccacccccactcccacagggagccccggccatttgctgccctccccacccctgccccagcctcaggactgcaggagccatccgcccccctcagccccttcctccccagggagcaaagccataaggggcaggggccaccccacggcatctccccagaagtacaggcctcaggaggaggtggaactgatgtagggggtggcactccccagagactgccctcacgaggggactgggttcgctctcagctctgcagctgtctgcggtggggggaaggttggggggtgtctggaggcatgttcccctcaccaccccccgtgggtctcagggaggccgggtgtgacctcatctttctcatggtgctatcctggtgctattggggtggggagctccctcccctcccccacaccagaaaggggtatgttgggggcttggaagcacttgaactttttattttattaaaaccttgttataagcagca

SEQ ID NO: 11063 - protein, 462 aa, Homo sapiens; identical to SEQ ID NO: 1837

SEQ ID NO: 11064 - DNA, 2217 bp, Homo sapiens
gtgcatgtgggggttgtgtgtttaggggggatctgtgtctgcgctgcggagcaagagcaagagctaaggcgatggctgacatggctctgggctttccctactctcagaagtacttgttgcattccatcttcgccagcggcctggtgaagtcagcactgcttttctccccattttgcagatgagatcgtggggctcaccagcgtcccccatggcttctgagtagcgtgggagtggagtcagcaccaagccaggctccccgcgcctgccttgccctcacctgctcctgctctctgccagaggcagcatggtccgcagggcaccatggggcccgacagagtgacagcacgagaactgtgcgagaacgacgacctggccaccagcctcgtcctggacccctacctcggtttccgcacccataagatgaacgtcagccctgtgccccccctgcggcgacagcagcacctgcgctcagcgctggaaactttcctgaggcagcgggacctggaggctgcgtaccgggccctgacgctgggaggctggacggcccgctacttccagagccggggcccgcggcaggaggctgccctcaagacccacgtctatcgctacctccgtgccttcctgccggaaagtggctttaccatcctgccctgcacgcgctactccatggagaccaacggggccaagatcgtgtccactcgtgcttggtaagagggcaggactccctgcaggtatccttggaggagacagagctcagaggggacaagagagaccctctgttcatggactggccaaccggggaaaagcgaggggcctggtcctccgggcatcctaggaaggtggtggggctaatcccggaagacctttgtggctaccgtggtgccgctggagcaggagaccccggatgtgaccccagggttcctggggcttccaggaaagaactaggcttctggtcagggccgtgctgtccttacctccttgtgacctgagcccccaccacatgttaaacacccctgagtgcaatgaggagcccctgcccctgcccctgcggggttcacagtctggtgaggaggtggggggcagacaagtcaacatgcagtcactggtcccagctggtacatgctgcaggggagctgtgaggaatgagcaagtgctcccagggcgaggctcacactgacaggggaagcacccgcctgagggtctggtggggcgagtagggggtagtccaggcaggagggatttgggggcaggaggtgctatgagagcgaggggagagaatgggggctgtatctgctgtgtgcgtgctgccctgaaggctttcagtagaagggtcctgtggggctgtgggctggagcagggaagcccacccaggcaggaggggaagagggagatctggaagatggatcgccaatagccagcaccagcgcccaggagtccctccttcctgggtgcctctgtgccggaggcccgagtcccctgaacacctgcaggaggccaggcatcgcccacagccctgccccctggcctcttggcaggaaaaagaatgagaagctggagctgctggtgggctgcattgcagagctgcgggaggcagatgaggggctgctgagggccggtgagaatgacttcagcatcatgtactcaacccgcaagcggagtgctcagctgtggctgggcccagccgccttcatcaaccatggtgagggtcaggcaggtggatgggcaggacgggatagagccaggcagggctggaggggtgtagtgggagggttctgcgactgagctgccgagctcatctacctctcttctctctcctgccccaactggctccagactgcaaacccaactgcaaggtaaggccttgggactcgggaggagagggcacgcaggaagaaagggtgcctgtggcctggggaaagggtttttggtcagtaaagagccaaacaccggccgggcgcggtggctcatgcctgtaatcccagcactttgggaggccgaggtgggcagatcacgaggtcaggagatggagaccacggtgaaaccccatctctactaaaaacacaaaaaattagtcgggcgtggtggcgggcgcctgtagtctcagctacttgggaggctgaggcaggagaatggtgtgaacccgggaggcggagcttgcggtgagccgagatcgcgccactgcactccagcctgggccacagagcgagactctgtctc

SEQ ID NO: 11065 - protein, 129 aa, Homo sapiens
MGPDRVTARELCENDDLATSLVLDPYLGFRTHKMNVSPVPPLRRQQHLRSALETFLRQRDLEAAYRALTLGGWTARYFQSRGPRQEAALKTHVYRYLRAFLPESGFTILPCTRYSMETNGAKIVSTRAW

SEQ ID NO: 11066 - DNA, 1627 bp, Homo sapiens
tgccacttttaggggctcagctgttgccccattccaggagaggacgctccgggccagggtgcccggccaggtgtggggagtgggtgagccctcccctgtgccctgggccagggcgctgagtgggcttggccctcagtttgtgcctgcagatgggaacgcagcctgcgtgaaggtgctccgggacattgagcctggggacgaggtgacatgcttctacggcgagggcttcttcggcgagaagaatgagcactgtgaatgccacacctgtgagaggaaaggtgaaggagctttccgaaccaggcctagggagcccgcgttgccaccacggcccctggacaagtaccagctgcgtgagaccaagcggcggctgcagcaaggcctggacagtggcagccgacagggcctgctgggccctcgggcctgcgtgcacccatccccgctgcgccgggacccattctgcgccgcctgccagcccctgcgcctgccagcctgcagcgcccgcccagacacctcacccctctggctccagtggctgcctcagccccagccccgagtgcggccccggaagcgccgacgcccccggccccggagggccccagtgctctccacccaccacgctgcccgcgtctccctgcaccgatggggaggctgtggcccccactgccgcctgcgaggagaggccctggtggccctgggccagcccccccacgcccgctgggcccctcagcaggactggcactgggcccggcgctatgggctgccttacgtggtgcgtgtggaccttcgtcgcctggccccagccccaccagctaccccagcccctgctgggaccccaggccccatcctgatcccgaagcaggccctcgccttcgcccccttctccccacccaagcgcctacggctggtggtcagccacggctccatcgacctggatgtcggcggtgaagagctgtgacaggccggacggggaggcccagcagggagagagggtctctctcctagctgctacccaggacctccagaaggagcccttggacctctgggagggagctgacccttgactccagcatagctctgaccctggaatggggttggtttggacacccccagggatctgagccctgaccctttgtgactgctgacccctgagccacccccactcccacagggagccccggccatttgctgccctccccacccctgccccagcctcaggactgcaggagccatccgcccccctcagccccttcctccccagggagcaaagccataaggggcaggggccaccccacggcatctccccagaagtacaggcctcaggaggaggtggaactgatgtagggggtggcactccccagagactgccctcacgaggggactgggttcgctctcagctctgcagctgtctgcggtggggggaaggttggggggtgtctggaggcatgttcccctcaccaccccccgtgggtctcagggaggccgggtgtgacctcatctttctcatggtgctatcctggtgctattggggtggggagctccctcccctcccccacaccagaaaggggtatgttgggggcttggaagcacttgaactttttattttattaaaaccttgttataagcagca

SEQ ID NO: 11067 - protein, 201 aa, Homo sapiens
MSTVNATPVRGKVKELSEPGLGSPRCHHGPWTSTSCVRPSGGCSKAWTVAADRACWALGPACTHPRCAGTHSAPPASPCACQPAAPAQTPHPSGSSGCLSPSPECGPGSADAPGPGGPQCSPPTTLPASPCTDGEAVAPTAACEERPWWPWASPPTPAGPLSRTGTGPGAMGCLTWCVWTFVAWPQPHQLPQPLLGPQAPS

SEQ ID NO: 11068 - DNA, 1097 bp, Homo sapiens
agtttgtgcctgcagatgggaacgcagcctgcgtgaaggtgctccgggacattgagcctggggacgaggtgacatgcttctacggcgagggcttcttcggcgagaagaatgagcactgctgtggcccccactgccgcctgcgaggagaggccctggtggccctgggccagcccccccacgcccgctgggcccctcagcaggactggcactgggcccggcgctatgggctgccttacgtggtgcgtgtggaccttcgtcgcctggccccagccccaccagctaccccagcccctgctgggaccccaggccccatcctgatcccgaagcaggccctcgccttcgcccccttctccccacccaagcgcctacggctggtggtcagccacggctccatcgacctggatgtcggcggtgaagagctgtgacaggccggacggggaggcccagcagggagagagggtctctctcctagctgctacccaggacctccagaaggagcccttggacctctgggagggagctgacccttgactccagcatagctctgaccctggaatggggttggtttggacacccccagggatctgagccctgaccctttgtgactgctgacccctgagccacccccactcccacagggagccccggccatttgctgccctccccacccctgccccagcctcaggactgcaggagccatccgcccccctcagccccttcctccccagggagcaaagccataaggggcaggggccaccccacggcatctccccagaagtacaggcctcaggaggaggtggaactgatgtagggggtggcactccccagagactgccctcacgaggggactgggttcgctctcagctctgcagctgtctgcggtggggggaaggttggggggtgtctggaggcatgttcccctcaccaccccccgtgggtctcagggaggccgggtgtgacctcatctttctcatggtgctatcctggtgctattggggtggggagctccctcccctcccccacaccagaaaggggtatgttgggggcttggaagcacttgaactttttattttattaaaaccttgttataagcagca

SEQ ID NO: 11069 - protein, 69 aa, Homo sapiens
MSTAVAPTAACEERPWWPWASPPTPAGPLSRTGTGPGAMGCLTWCVWTFVAWPQPHQLPQPLLGPQAPS

SEQ ID NO: 11070 - DNA, 2065 bp, Homo sapiens
agccccgcggtgcacgacggctcccattggctggggctcgggcgtcctagccaatccggccgcggggtgcgtttctcctgacccgggtgggaccgcaccccgcggactcagaagcgagcggcaccccgggaccatcccacagcagatccagtggccgccaacgtcaggctggagttgcctccttcgtggatgttggatgtggaagcccaggagccccccaaggggaaatggtcgacgccgcccttcgacccgcgcttccccagccagaaccagatccgtaactgctaccagaacttcctggactaccaccgctgcctcaagaccaggacccgccgcgggaagagcacgcagccctgcgagtactatttccgcgtgtaccactcgctgtgccccatcagctgggtggagagctggaacgagcagatcaagaacgggattttcgccggcaaaatctgactgccccagcgcggcttcctctgaagatgcagtgatcctgcatctttttgtctcgcggagccccgggtctcggttatccacccctacctcccagtgtctaagccacgaataatgccaccagccttcgagttccttgtttcccttgctctggtctccacgtgtatgatggggttctcaggcccaggcttcgaccagaggaccctctgccaccaccgtttcttcctgtccttgagctaccttggtgaactcatgaccccaggcccctgctccaccaggatgtcccccaggtcctgccagctgggaagtgccagcatgaacgcctccaacttcgtggaagccagggtcccctgcagctgagggacgccaagcagacacacctgccctccccagccagctcctgtctgtatgggcgagatgactgagagcgcccacgtccctaaggctgtcctgaccctccatgctgcgacaaggacagggaatggtcggtcactatgggcctggtgtctcccctcccccaccacccggtgctgcccagctcaagccagaagctgactttggccgccatggggacatcaggcaaggtctggagacatttttggttggggcagaggcatgctcctggcatcgagtgggtggagaccagagaagccgctcaacatcctgcaatgcatgggacaggccctgcctagaaacaccagctcagcatggcagcagtgcggaggccaggaaaccctgatcgccagtttctaacgccctcaccatttttatttttatttttattttttttgagacagagtttcgctcctgtcacccaggctggagtacaatgatgcgatctcagctcactgcaacctctgcctcccgggttcaagtgattctcctgcctcagcctcccgagtagctgggattacaggcatgcaccaccacgcccagcttattttgtatttttagtagagacggggtttctccgtgttggtcaggctggtctcaaactcctgacctcaggcaatctgcccacctcagcctcccaaagtgctgggattacaggcgtgagccactgcacccggctcaccactagtttttagccctttttgttgggggtggggtgggggcagaggagaggcggatacagaaacttgtgagaatgtgatgaacgctctgaaccccctataaaaaatgtgcatgtaaatatatactctcaacatttaaaagatttcagaaggttcctggaaattccaatgtccacccatgagtcctcagctgagactccctgctccgctgccctctttgtctaagagctgtggcaacagcacctgaatttcagaaacaaaaggccgggcgcggtggctcacacctgtcatcctagcactttgggaggcagaggcaggaggatcgcttgagctcaggagttcgagactagccttagcaacacagtgagacacaattgctacaaaaagattttaaaattagtttgacggggtggcgtgtgcctatggtcccagctactcaggaggctgaggcaggagaattgcttcaatccaggaggtggaggttgcagtgagccgagatggcgccactgcactccagcctgggccacagaccctgtctc

SEQ ID NO: 11071 - protein, 123 aa, Homo sapiens
MWKPRSPPRGNGRRRPSTRASPARTRSVTATRTSWTTTAASRPGPAAGRARSPASTISACTTRCAPSAGWRAGTSRSRTGFSPAKSDCPSAASSEDAVILHLFVSRSPGSRLSTPTSQCLSHE

SEQ ID NO: 11072 - DNA, 2098 bp, Homo sapiens
ggactcagaagcgagcggcaccccgggaccatcccacagcagatccagtggccgccaacgtcaggctggagttgcctccttcgtggatgttggatgtggaagcccaggagccccccaaggggaaatggtcgacgccgcccttcgacccgcgcttccccagccagaaccagatccgtaactgctaccagaacttcctggactaccaccgctgcctcaagaccaggacccgccgcgggaagagcacgcagccctgcgagtactatttccgcgtgtaccactcgctgtgccccatcagctgggtggagagctggaacgagcagatcaagaacgggattttcgccggcaaaatctgactgccccagcgcggcttcctctgaagatgcagtgatcctgcatctttttgtctcgcggagccccgggtctcggttatccacccctacctcccagtgtctaagccacgaataatgcaggtagatgcctcgcgttgacagctacgagccagcccagggtccccagttctcaacactgtcccacccagatggctccaaggccaaggagtgccgcttgacaaagccctagggttccagcctggtcctgctgagggagccgtgagaccagtcagcctggggtgctggttttcccaacgggtactccctgagctatcagccttccagaggggctcctaggagggggaagccccatcctctgactgaagcggtcctatgaggccctgttcaaccccagggttcaaaggacacaccctagatgagccatcccccaggatgacgccacctctgagatcttggtctcctggctccgtctctgaccacaacccaagaatggggtgagggcacagggtgtggactcaactacaggagggcttcctgttcatgcaacgtccccagagccttgacgaatgcacagaggcgctggcagaaccacgggggcaggacccctctctgagtcacagaatggagctaagttggtgaggtcacccagccaccagccttcgagttccttgtttcccttgctctggtctccacgtgtatgatggggttctcaggcccaggcttcgaccagaggaccctctgccaccaccgtttcttcctgtccttgagctaccttggtgaactcatgaccccaggcccctgctccaccaggatgtcccccaggtcctgccagctgggaagtgccagcatgaacgcctccaacttcgtggaagccagggtcccctgcagctgagggacgccaagcagacacacctgccctccccagccagctcctgtctgtatgggcgagatgactgagagcgcccacgtccctaaggctgtcctgaccctccatgctgcgacaaggacagggaatggtcggtcactatgggcctggtgtctcccctcccccaccacccggtgctgcccagctcaagccagaagctgactttggccgccatggggacatcaggcaaggtctggagacatttttggttggggcagaggcatgctcctggcatcgagtgggtggagaccagagaagccgctcaacatcctgcaatgcatgggacaggccctgcctagaaacaccagctcagcatggcagcagtgcggaggccaggaaaccctgatcgccagtttctaacgccctcaccatttttatttttatttttattttttttgagacagagtttcgctcctgtcacccaggctggagtacaatgatgcgatctcagctcactgcaacctctgcctcccgggttcaagtgattctcctgcctcagcctcccgagtagctgggattacaggcatgcaccaccacgcccagcttattttgtatttttagtagagacggggtttctccgtgttggtcaggctggtctcaaactcctgacctcaggcaatctgcccacctcagcctcccaaagtgctgggattacaggcgtgagccactgcacccggctcaccactagtttttagccctttttgttgggggtggggtgggggcagaggagaggcggatacagaaacttgtgagaatgtgatgaacgctctgaaccccctataaaaaatgtgcatgtaaatatatactctcaacatttaaaaga

SEQ ID NO: 11073 - protein, 123 aa, Homo sapiens; identical to SEQ ID NO: 11071

SEQ ID NO: 11074 - DNA, 1663 bp, Homo sapiens
agccccgcggtgcacgacggctcccattggctggggctcgggcgtcctagccaatccggccgcggggtgcgtttctcctgacccgggtgggaccgcaccccgcggactcagaagcgagcggcaccccgggaccatcccacagcagatccagtggccgccaacgtcaggctggagttgcctccttcgtggatgttggatgtggaagcccaggagccccccaaggggaaatggtcgacgccgcccttcgacccgcgcttccccagccagaaccagatccgtaactgctaccagaacttcctggactaccaccgctgcctcaagaccaggacccgccgcgggaagagcacgcagccctgcgagtactatttccgcgtgtaccactcgctgtgccccatcagctgggtggagagctggaacgagcagatcaagaacgggattttcgccggcaaaatctgactgccccagcgcggcttcctctgaagatgcagtgatcctgcatctttttgtctcgcggagccccgggtctcggttatccacccctacctcccagtgtctaagccacgaataatgccaccagccttcgagttccttgtttcccttgctctggtctccacgtgtatgatggggttctcaggcccaggcttcgaccagaggaccctctgccaccaccgtttcttcctgtccttgagctaccttggtgaactcatgaccccaggcccctgctccaccaggatgtcccccaggtcctgccagctgggaagtgccagcatgaacgcctccaacttcgtggaagccagggtcccctgcagctgagggacgccaagcagacacacctgccctccccagccagctcctgtctgtatgggcgagatgactgagagcgcccacgtccctaaggctgtcctgaccctccatgctgcgacaaggacagggaatggtcggtcactatgggcctggtgtctcccctcccccaccacccggtgctgcccagctcaagccagaagctgactttggccgccatggggacatcaggcaaggtctggagacatttttggttggggcagaggcatgctcctggcatcgagtgggtggagaccagagaagccgctcaacatcctgcaatgcatgggacaggccctgcctagaaacaccagctcagcatggcagcagtgcggaggccaggaaaccctgatcgccagtttctaacgccctcaccatttttatttttatttttattttttttgagacagagtttcgctcctgtcacccaggctggagtacaatgatgcgatctcagctcactgcaacctctgcctcccgggttcaagtgattctcctgcctcagcctcccgagtagctgggattacaggcatgcaccaccacgcccagcttattttgtatttttagtagagacggggtttctccgtgttggtcaggctggtctcaaactcctgacctcaggcaatctgcccacctcagcctcccaaagtgctgggattacaggcgtgagccactgcacccggctcaccactagtttttagccctttttgttgggggtggggtgggggcagaggagaggcggatacagaaacttgtgagaatgtgatgaacgctctgaaccccctataaaaaatgtgcatgtaaatatatactctcaacattt

SEQ ID NO: 11075 - protein, 123 aa, Homo sapiens; identical to SEQ ID NO: 11071

SEQ ID NO: 11076 - DNA, 4386 bp, Homo sapiens
agacccctgctgtccaccctggcagggccatggcggaggcccgagtctcccagcctggggcatctccacgctctgtaacgctgagctccaggcacccgtgaagccccacgggtcaaggctggtgggccggggctgggaggcctgcacgcctgggttctgggtccctaaaccagtacccatccaccacagccaccatgatctggcttcgaaacaggaggtgccttgagccgctccagggcaccccgaagtgggtccctgttctgggggagctgcaaaagaccctccagaagggcgagtacctgcccctccgtccgctgcccatgttcgagagtaactttgttcaggtgacccatcaagggggcccagtgttcgtgaatcacagaaccaaccggctggccatgggcgtggccgcctccctgccaggcctggtgttgcctgacatcttgctgatcggccagcccgccgaggacagggactgctccggcctcgtgctgaccaggatgatccccctggacctcgtccacctctgcgtccatgacctctctgcctggcgcctgaagctgcgcctggtctcgggccgccagtactacctggccctggacgcccctgacaacgaggtgggcttcctgttccactgctgggtccgcctcatcaacctgcttcaggagccggctcccacctggacccccaggaccacgcgcacggcccccctggatatgccgctggccgaagcgcctgcctccacctggcacctgcaggaccagcccatcagcagacatgcagtcagggttgctgagcgcaactttccgcataagacggtggctgctcagagacagaggaaggccaaggcgctcaagcgcagtttcaagtctcaggccgtgggcgactctgtgcccctcatctggtcgcagctggagcatgctgacgtcaggaagaaacctgcagaaaagaactccctggacccgtgcctgtggcatcaggacacggaagacctcatggactctgggggcagcactttgtcgtctgctgcctccggtctggctccctatcccccggctgcctgcctctccacaccctactcttccatccccaggggcagggaaaaggccgggcctatgggctcccaccaggggccggggccaccaccctgccagaaggccccatctggccttgtcacatcttgtaaggcaccgttccttgttgaccagtcccagaagctcccagctgtacctgcttcatcgtggaaacccccacctggattggctcctccccagaaggccccagctgcgtcagctcctccccggaaggccccagctgtacctgctccatcccagaaggccccagccgtacctgctccatcccagaaggccccagccatacctgctccatcccggaaggcctcagctgcgtcagcttctccccgaaaggcctcagccgtacctgccccaccccagaagaccccacccccatctcagaaggccccatctgtacctaccattccccagaaggctgtgtcccccactgctccaaagaagaaatctctactcctccctgccccatcccagaaggctctgccaacctcacctaccgaataccagatggcgctgagcccgcctgcctcacgggggaagctccctggcgattttgacgtgttgccaacaggaattcctggaagagccgtgctggagagaagccagtctggagggaaaccggagccggtggtgacggtgcgcacccaggagacagacgtggtggagatgacgactcaggccaagtccccggagtcgcccttcaccgtgaccaagaaggagtccaaggacatcctgattagccaaaccaaggaggtgaccctggaggccttcaggggccaggggaagttggaggactgggcccactgggcgaagcttgaagagaggtccccggacctgcctggcgtgagatccaaggagttggagcagcggaagagatgggtcaaggccaaggaactggccgtcgagggcccctcccaggagcacagcaggcccttctctgtggaagcgctcaccctcaccaagctcatgatcacggccaactccaaagagcagccctcgaaatccgctttggtctcacttccctcctggctcttggcgactccgcaggcgtcggccacgtcaatgatggcttcagtgccctcccgccccggccagctgtccttactggaggggaagccagtggtggtcagagagcagccagagtcgcacacctgggtgaaggagggcaagcggccatggggcgagatgaaggagcagccatggggcgagatgaaggagccaccctgggaccccaaggggccacccaaggtgccctttcgctccaagcccacctctgccagtctgaagagggaaggaatctcccaggcgcctatccccctgaccgcctcaccgtgggaggacttacggccatcgcccctctcggagaccctcatctcaaagatggaggccacagccagggcgtcccagcagcccaagagggtgtcgcaggagcccatgaggatgccagcccagcaccccctggccactgtggggtcgtcttcagaaattcttttgcccatgctcttagaacttgaaactgtgaggaacacggccaccaaggcagaggagatacaggaggaatcgggcgtcttgaaccttctgcccagcctgcagcactcccagcactccgagtggccggatgcgggggcttaacctcagttggaaactgtccagaggagcccagcgctgccaggccccgagggttctgtgcgcaccgactgtaggaagcggaatgttgaaagccgcttggggggatttgccccctctggtagataccagaactatggatatgcctttatatattggggggcgggggggggcgggggcgagcccgtggagccgcccaacttcgcagagattaaagcttgagcctgagactcagcgagtcgcacctcggtgcctgtgtgcacgcgcaggcccccgagggggcgtcgggggagcaaggggtggggtgggggcgcccctaccagccccgcggtgcacgacggctcccattggctggggctcgggcgtcctagccaatccggccgcggggtgcgtttctcctgacccgggtgggaccgcaccccgcggactcagaagcgagcggcaccccgggaccatcccacagcagatccagtggccgccaacgtcaggctggagttgcctccttcgtggatgttggatgtggaagcccaggagccccccaaggggaaatggtcgacgccgcccttcgacccgcgcttccccagccagaaccagatccgtaactgctaccagaacttcctgggtgagacctgctcagccaggttatgggaggagcagggtgtgacaagggacggcagggaggggcactcccaccctaagtcccgcggagaccgttagggtgggaggccgggcggggccgggttggtgggggcggggcctggtcgagaaaaggcggggctgagcctggaggggcggggcgaggttggtaggggcgaggcctgatctggaaggtgcggggccgagtcgtgaaggtgcggggcgaggtaggtaggggcagggtctgggtaggaggagcagtgtgagggaggtaggggtcggggcctggctgggaggggcgggacggaggcctccaggggagagggaggcgggacgaagcagcgaagaactgggagggcccgagcagtggaggggcgggtcctgtcctggaatgggcgtggcttgccgcgtgacccccgcccgccacagactaccaccgctgcctcaagaccaggacccgccgcgggaagagcacgcagccctgcgagtactatttccgcgtgtaccactcgctgtgccccatcagctgggtggagagctggaacgagcagatcaagaacgggattttcgccggcaaaatctgactgccccagcgcggcttcctctgaagatgcagtgatcctgcatctttttgtctcgcggagccccgggtctcggttatccacccctacctcccagtgtctaagccacgaataatgcaggtagatgcctcgcgttgacagctacgagccagcccagggtccccagttctcaacactgtcccacccagatggctccaaggccaaggagtgccgcttgacaaagccctagggttccagcctggtcctgctgagggagccgtgagaccagtcagcctggggtgctggttttcccaacgggtactccctgagctatcagccttccagaggggctcctaggagggggaagccccatcctctgactgaagcggtcctatgaggccctgttcaaccccagggttcaaaggacacaccctagatgaacgctctgaaccccctataaaaaatgtgcatgt

SEQ ID NO: 11077 - protein, 842 aa, Homo sapiens
MIWLRNRRCLEPLQGTPKWVPVLGELQKTLQKGEYLPLRPLPMFESNFVQVTHQGGPVFVNHRTNRLAMGVAASLPGLVLPDILLIGQPAEDRDCSGLVLTRMIPLDLVHLCVHDLSAWRLKLRLVSGRQYYLALDAPDNEVGFLFHCWVRLINLLQEPAPTWTPRTTRTAPLDMPLAEAPASTWHLQDQPISRHAVRVAERNFPHKTVAAQRQRKAKALKRSFKSQAVGDSVPLIWSQLEHADVRKKPAEKNSLDPCLWHQDTEDLMDSGGSTLSSAASGLAPYPPAACLSTPYSSIPRGREKAGPMGSHQGPGPPPCQKAPSGLVTSCKAPFLVDQSQKLPAVPASSWKPPPGLAPPQKAPAASAPPRKAPAVPAPSQKAPAVPAPSQKAPAIPAPSRKASAASASPRKASAVPAPPQKTPPPSQKAPSVPTIPQKAVSPTAPKKKSLLLPAPSQKALPTSPTEYQMALSPPASRGKLPGDFDVLPTGIPGRAVLERSQSGGKPEPVVTVRTQETDVVEMTTQAKSPESPFTVTKKESKDILISQTKEVTLEAFRGQGKLEDWAHWAKLEERSPDLPGVRSKELEQRKRWVKAKELAVEGPSQEHSRPFSVEALTLTKLMITANSKEQPSKSALVSLPSWLLATPQASATSMMASVPSRPGQLSLLEGKPVVVREQPESHTWVKEGKRPWGEMKEQPWGEMKEPPWDPKGPPKVPFRSKPTSASLKREGISQAPIPLTASPWEDLRPSPLSETLISKMEATARASQQPKRVSQEPMRMPAQHPLATVGSSSEILLPMLLELETVRNTATKAEEIQEESGVLNLLPSLQHSQHSEWPDAGA

SEQ ID NO: 11078 - DNA, 574 bp, Homo sapiens
ggactcagaagcgagcggcaccccgggaccatcccacagcagatccagtggccgccaacgtcaggctggagttgcctccttcgtggatgttggatgtggaagcccaggagccccccaaggggaaatggtcgacgccgcccttcgacccgcgcttccccagccagaaccagatccgtaactgctaccagaacttcctggactaccaccgctgcctcaagaccaggacccgccgcgggaagagcacgcagccctgcgagtactatttccgcgtgtaccactcgctgtgccccatcagctgggtggagagctggaacgagcagatcaagaacgggattttcgccggcaaaatctgactgccccagcgcggcttcctctgaagatgcagtgatcctgcatctttttgtctcgcggagccccgggtctcggttatccacccctacctcccagtgtctaagccacgaataatgcaggtagatgcctcgcgttgacagctacgagccagcccagggtccccagttctcaacactgtcccacccagatggctccaagccaccagccttcgagttccttgttt

SEQ ID NO: 11079 - protein, 123 aa, Homo sapiens; identical to SEQ ID NO: 11071

SEQ ID NO: 11080 - DNA, 700 bp, Homo sapiens
ctttccctggtgtccagtagccgcctcctgagacccctaatgccagcctcacagtctcagcaacctcccaggtcagagaaaaccaaggccactctacttattccgcggttcttccctcagaacctgctccgtcctcccggcctccagaccacggatcctgaaggccacctgcgctgcctcccctgctcactgtcccctggctcctaggggccgcagcttcgcctcctctctctgggtttccccctttcccatcctgaaggtggcagagcccgaatggttctgagaatgagttcaatctaggccctgaagctactaaccatgtggcctgggacaagttccctagcccctctgcgctgtggccttttcatctgaaatatggtaacaatgacataataatgacacctcacttcctagggttgtggggaggacggcgatgtgaaaacatataaagcagttagaacagtgtctggcccccctcttcacagtgtgtggggtctctagccatagagacaatctgagtcactcgaatcagcatgtcggcccagttctggtgccccatattgtgctggacagtgagactgattgaccggacagacagcccagggatgaccccataaaccagtcctggagctcttggaggcatctggttactagcttgcagcataaagggccagagtgcccccacagggagacacggggt

SEQ ID NO: 11081 - protein, 55 aa, Homo sapiens
MPASQSQQPPRSEKTKATLLIPRFFPQNLLRPPGLQTTDPEGHLRCLPCSLSPGS

SEQ ID NO: 11082 - DNA, 692 bp, Homo sapiens
gcaggtagatgcctcgcgttgacagctacgagccagcccagggtccccagttctcaacactgtcccacccagatggctccaaggtgctcctgcctccaatcaccacacctacctctcacctcagtcctttccctactcccctcctgcctggaccatctccccaggctccttccccatcccacccctgatccatcccatctcgggtcctgaggggtcttctttgtaccacccagcgctgactccatcccttcctcccccactctctgggctctccaccactctccatcacgaccccgctcccacctggctcatttcccctcccagaacatcgagatccccatcatgtgagccagcttatttccaacagaatcccctggtgtccacgctttcggcacccgcacccacagccaggccctcctgacctccccagagccgtgtctagaacccatttttgccctgttggccagccttcctccttcctcctcctcccatcatcctatcttcactgcctccagacctcatctcagcacattctcacactcccgaccccctctgcagccgccactgccccactgatgcctgagccaggggcaggggcagacctgcccggcctggcctccagcctggtggaccatcacctgtgcaaactccgaacacctcctccaggtgctctggctggctttccctggtgt

SEQ ID NO: 11083 - protein, 59 aa, Homo sapiens
MPRVDSYEPAQGPQFSTLSHPDGSKVLLPPITTPTSHLSPFPTPLLPGPSPQAPSPSHP

SEQ ID NO: 11084 - DNA, 547 bp, Homo sapiens
ggactcagaagcgagcggcaccccgggaccatcccacagcagatccagtggccgccaacgtcaggctggagttgcctccttcgtggatgttggatgtggaagcccaggagccccccaaggggaaatggtcgacgccgcccttcgacccgcgcttccccagccagaaccagatccgtaactgctaccagaacttcctggactaccaccgctgcctcaagaccaggacccgccgcgggaagagcacgcagccctgcgagtactatttccgcgtgtaccactcgctgtgccccatcagctgggtggagagctggaacgagcagatcaagaacgggattttcgccggcaaaatctgactgccccagcgcggcttcctctgaagatgcagtgatcctgcatctttttgtctcgcggagccccgggtctcggttatccacccctacctcccagtgtctaagccacgaataatggccaaggagtgccgcttgacaaagccctagggttccagcctggtcctgctgagggagccgtgagaccagtcagcctgggg

SEQ ID NO: 11085 - protein, 123 aa, Homo sapiens; identical to SEQ ID NO: 11071

SEQ ID NO: 11086 - DNA, 2950 bp, Homo sapiens
agacccctgctgtccaccctggcagggccatggcggaggcccgagtctcccagcctggggcatctccacgctctgtaacgctgagctccaggcacccgtgaagccccacgggtcaaggctggtgggccggggctgggaggcctgcacgcctgggttctgggtccctaaaccagtacccatccaccacagccaccatgatctggcttcgaaacaggaggtgccttgagccgctccagggcaccccgaagtgggtccctgttctgggggagctgcaaaagaccctccagaagggcgagtacctgcccctccgtccgctgcccatgttcgagagtaactttgttcaggtgacccatcaagggggcccagtgttcgtgaatcacagaaccaaccggctggccatgggcgtggccgcctccctgccaggcctggtgttgcctgacatcttgctgatcggccagcccgccgaggacagggactgctccggcctcgtgctgaccaggatgatccccctggacctcgtccacctctgcgtccatgacctctctgcctggcgcctgaagctgcgcctggtctcgggccgccagtactacctggccctggacgcccctgacaacgaggtgggcttcctgttccactgctgggtccgcctcatcaacctgcttcaggagccggctcccacctggacccccaggaccacgcgcacggcccccctggatatgccgctggccgaagcgcctgcctccacctggcacctgcaggaccagcccatcagcagacatgcagtcagggttgctgagcgcaactttccgcataagacggtggctgctcagagacagaggaaggccaaggcgctcaagcgcagtttcaagtctcaggccgtgggcgactctgtgcccctcatctggtcgcagctggagcatgctgacgtcaggaagaaacctgcagaaaagaactccctggacccgtgcctgtggcatcaggacacggaagacctcatggactctgggggcagcactttgtcgtctgctgcctccggtctggctccctatcccccggctgcctgcctctccacaccctactcttccatccccaggggcagggaaaaggccgggcctatgggctcccaccaggggccggggccaccaccctgccagaaggccccatctggccttgtcacatcttgtaaggcaccgttccttgttgaccagtcccagaagctcccagctgtacctgcttcatcgtggaaacccccacctggattggctcctccccagaaggccccagctgcgtcagctcctccccggaaggccccagctgtacctgctccatcccagaaggccccagccgtacctgctccatcccagaaggccccagccatacctgctccatcccggaaggcctcagctgcgtcagcttctccccgaaaggcctcagccgtacctgccccaccccagaagaccccacccccatctcagaaggccccatctgtacctaccattccccagaaggctgtgtcccccactgctccaaagaagaaatctctactcctccctgccccatcccagaaggctctgccaacctcacctaccgaataccagatggcgctgagcccgcctgcctcacgggggaagctccctggcgattttgacgtgttgccaacaggaattcctggaagagccgtgctggagagaagccagtctggagggaaaccggagccggtggtgacggtgcgcacccaggagacagacgtggtggagatgacgactcaggccaagtccccggagtcgcccttcaccgtgaccaagaaggagtccaaggacatcctgattagccaaaccaaggaggtgaccctggaggccttcaggggccaggggaagttggaggactgggcccactgggcgaagcttgaagagaggtccccggacctgcctggcgtgagatccaaggagttggagcagcggaagagatgggtcaaggccaaggaactggccgtcgagggcccctcccaggagcacagcaggcccttctctgtggaagcgctcaccctcaccaagctcatgatcacggccaactccaaagagcagccctcgaaatccgctttggtctcacttccctcctggctcttggcgactccgcaggcgtcggccacgtcaatgatggcttcagtgccctcccgccccggccagctgtccttactggaggggaagccagtggtggtcagagagcagccagagtcgcacacctgggtgaaggagggcaagcggccatggggcgagatgaaggagcagccatggggcgagatgaaggagccaccctgggaccccaaggggccacccaaggtgccctttcgctccaagcccacctctgccagtctgaagagggaaggaatctcccaggcgcctatccccctgaccgcctcaccgtgggaggacttacggccatcgcccctctcggagaccctcatctcaaagatggaggccacagccagggcgtcccagcagcccaagagggtgtcgcaggagcccatgaggatgccagcccagcaccccctggccactgtggggtcgtcttcagaaattcttttgcccatgctcttagaacttgaaactgtgaggaacacggccaccaaggcagaggagatacaggaggaatcgggcgtcttgaaccttctgcccagcctgcagcactcccagcactccgagtggccggatgcgggggcttaacctcagttggaaactgtccagaggagcccagcgctgccaggccccgagggttctgtgcgcaccgactgtaggaagcggaatgttgaaagccgcttggggggatttgccccctctggtagataccagaactatggatatgcctttatatattggggggcgggggggggcgggggcgagcccgtggagccgcccaacttcgcagagattaaagcttgagcctgagactc

SEQ ID NO: 11087 - protein, 842 aa, Homo sapiens; identical to SEQ ID NO: 11077

SEQ ID NO: 11088 - DNA, 3184 bp, Homo sapiens
gctgtccaccctggcagggccatggcggaggcccgagtctcccagcctggggcatctccacgctctgtaacgctgagctccaggcacccgtgaagccccacgggtcaaggctggtgggccggggctgggaggcctgcacgcctgggttctgggtccctaaaccagtacccatccaccacagccaccatgatctggcttcgaaacaggaggtgccttgagccgctccagggcaccccgaagtgggtccctgttctgggggagctgcaaaagaccctccagaagggtgacccatcaagggggcccagtgttcgtgaatcacagaaccaaccggctggccatgggcgtggccgcctccctgccaggcctggtgttgcctgacatcttgctgatcggccagcccgccgaggacagggactgctccggcctcgtgctgaccaggatgatccccctggacctcgtccacctctgcgtccatgacctctctgcctggcgcctgaagctgcgcctggtctcgggccgccagtactacctggccctggacgcccctgacaacgaggtgggcttcctgttccactgctgggtccgcctcatcaacctgcttcaggagccggctcccacctggacccccaggaccacgcgcacggcccccctggatatgccgctggccgaagcgcctgcctccacctggcacctgcagtcagggttgctgagcgcaactttccgcataagacggtggctgctcagagacagaggaaggccaaggcgctcaagcgcagtttcaagtctcaggccgtgggcgactctgtgcccctcatctggtcgcagctggagcatgctgacgtcaggaagaaacctgcagaaaagaagtcccactcagacccccgccccgacagaactcacacccaaatccgcttgcctggtaagatcaacccaccccaccccttgccacagtgtgtggctctggttcctgccccaaagggctcagacggctcccccatccagagaagaccagcatcaccacctggaccatcttcagcatcatttccagcaccgccaaccagacacagtcctctccaaaggcctgcacatctgcatctgatgaagccacaggccagggacatgtggttgagagcccttcacactgtgtctcagctgacagccctgatggcttctttctgggctcctgcagctccctggacccgtgcctgtggcatcaggacacggaagacctcatggactctgggggcagcactttgtcgtctgctgcctccggtctggctccctatcccccggctgcctgcctctccacaccctactcttccatccccaggggcagggaaaaggccgggcctatgggctcccaccaggggccggggccaccaccctgccagaaggccccatctggccttgtcacatcttgtaaggcaccgttccttgttgaccagtcccagaagctcccagctgtacctgcttcatcgtggaaacccccacctggattggctcctccccagaaggccccagctgcgtcagctcctccccggaaggccccagctgtacctgctccatcccagaaggccccagccgtacctgctccatcccagaaggccccagccatacctgctccatcccggaaggcctcagctgcgtcagcttctccccgaaaggcctcagccgtacctgccccaccccagaagaccccacccccatctcagaaggccccatctgtacctaccattccccagaaggctgtgtcccccactgctccaaagaagaaatctctactcctccctgccccatcccagaaggctctgccaacctcacctaccgaataccagatggcgctgagcccgcctgcctcacgggggaagctccctggcgattttgacgtgttgccaacaggaattcctggaagagccgtgctggagagaagccagtctggagggaaaccggagccggtggtgacggtgcgcacccaggagacagacgtggtggagatgacgactcaggccaagtccccggagtcgcccttcaccgtgaccaagaaggagtccaaggacatcctgattagccaaaccaaggaggtgaccctggaggccttcaggggccaggggaagttggaggactgggcccactgggcgaagcttgaagagaggtccccggacctgcctggcgtgagatccaaggagttggagcagcggaagagatgggtcaaggccaaggaactggccgtcgagggcccctcccaggagcacagcaggcccttctctgtggaagcgctcaccctcaccaagctcatgatcacggccaactccaaagagcagccctcgaaatccgctttggtctcacttccctcctggctcttggcgactccgcaggcgtcggccacgtcaatgatggcttcagtgccctcccgccccggccagctgtccttactggaggggaagccagtggtggtcagagagcagccagagtcgcacacctgggtgaaggagggcaagcggccatggggcgagatgaaggagcagccatggggcgagatgaaggagccaccctgggaccccaaggggccacccaaggtgccctttcgctccaagcccacctctgccagtctgaagagggaaggaatctcccaggcgcctatccccctgaccgcctcaccgtgggaggacttacggccatcgcccctctcggagaccctcatctcaaagatggaggccacagccagggcgtcccagcagcccaagagggtgtcgcaggagcccatgaggatgccagcccagcaccccctggccactgtggggtcgtcttcagaaattcttttgcccatgctcttagaacttgaaactgtgaggaacacggccaccaaggcagaggagatacaggaggaatcgggcgtcttgaaccttctgcccagcctgcagcactcccagcactccgagtggccggatgcgggggcttaacctcagttggaaactgtccagaggagcccagcgctgccaggccccgagggttctgtgcgcaccgactgtaggaagcggaatgttgaaagccgcttggggggatttgccccctctggtagataccagaactatggatatgcctttatatattggggggcgggggggggcgggggcgagcccgtggagccgcccaacttcgcagagattaaagcttgagcctgaga

SEQ ID NO: 11089 - protein, 575 aa, Homo sapiens
MDSGGSTLSSAASGLAPYPPAACLSTPYSSIPRGREKAGPMGSHQGPGPPPCQKAPSGLVTSCKAPFLVDQSQKLPAVPASSWKPPPGLAPPQKAPAASAPPRKAPAVPAPSQKAPAVPAPSQKAPAIPAPSRKASAASASPRKASAVPAPPQKTPPPSQKAPSVPTIPQKAVSPTAPKKKSLLLPAPSQKALPTSPTEYQMALSPPASRGKLPGDFDVLPTGIPGRAVLERSQSGGKPEPVVTVRTQETDVVEMTTQAKSPESPFTVTKKESKDILISQTKEVTLEAFRGQGKLEDWAHWAKLEERSPDLPGVRSKELEQRKRWVKAKELAVEGPSQEHSRPFSVEALTLTKLMITANSKEQPSKSALVSLPSWLLATPQASATSMMASVPSRPGQLSLLEGKPVVVREQPESHTWVKEGKRPWGEMKEQPWGEMKEPPWDPKGPPKVPFRSKPTSASLKREGISQAPIPLTASPWEDLRPSPLSETLISKMEATARASQQPKRVSQEPMRMPAQHPLATVGSSSEILLPMLLELETVRNTATKAEEIQEESGVLNLLPSLQHSQHSEWPDAGA

SEQ ID NO: 11090 - DNA, 2282 bp, Homo sapiens; identical to SEQ ID NO: 1840

SEQ ID NO: 11091 - protein, 695 aa, Homo sapiens; identical to SEQ ID NO: 1841

SEQ ID NO: 11092 - DNA, 939 bp, Homo sapiens
agacccctgctgtccaccctggcagggccatggcggaggcccgagtctcccagcctggggcatctccacgctctgtaacgctgagctccaggcacccgtgaagccccacgggtcaaggctggtgggccggggctgggaggcctgcacgcctgggttctgggtccctaaaccagtacccatccaccacagccaccatgatctggcttcgaaacaggaggtgccttgagccgctccagggcaccccgaagtgggtccctgttctgggggagctgcaaaagaccctccagaagggcgagtacctgcccctccgtccgctgcccatgttcgagagtaactttgttcaggtgacccatcaagggggcccagtgttcgtgaatcacagaaccaaccggctggccatgggcgtggccgcctccctgccaggcctggtgttgcctgacatcttgctgatcggccagcccgccgaggacagggactgctccggcctcgtgctgaccaggatgatccccctggacctcgtccacctctgcgtccatgacctctctgcctggcgcctgaagctgcgcctggtctcgggccgccagtactacctggccctggacgcccctgacaacgaggtgggcttcctgttccactgctgggtccgcctcatcaacctgcttcaggagccggctcccacctggacccccaggaccacgcgcacggcccccctggatatgccgctggccgaagcgcctgcctccacctggcacctgcaggaccagcccatcagcagacatgcagtcagggttgctgagcgcaactttccgcataagacggtggctgctcagagacagaggaaggccaaggcgctcaagcgcagtttcaagtctcaggccgtgggcgactctgtgcccctcatctggtcgcagctggagcatgctgacgtcaggaagaaac

SEQ ID NO: 11093 - protein, 247 aa, Homo sapiens
MIWLRNRRCLEPLQGTPKWVPVLGELQKTLQKGEYLPLRPLPMFESNFVQVTHQGGPVFVNHRTNRLAMGVAASLPGLVLPDILLIGQPAEDRDCSGLVLTRMIPLDLVHLCVHDLSAWRLKLRLVSGRQYYLALDAPDNEVGFLFHCWVRLINLLQEPAPTWTPRTTRTAPLDMPLAEAPASTWHLQDQPISRHAVRVAERNFPHKTVAAQRQRKAKALKRSFKSQAVGDSVPLIWSQLEHADVRK

SEQ ID NO: 11094 - DNA, 2357 bp, Homo sapiens
gctgctcagggcacatgcctcccctccccaggccgcggcccagctgaccctcggggctcccccggcagcggacagggaagggttaaaggcccccggctccctgccccctgccctggggaacccctggccctgtggggacatgaactgtgtttgccgcctggtcctggtcgtgctgagcctgtggccagatacagctgtcgcccctgggccaccacctggcccccctcgagtttccccagaccctcgggccgagctggacagcaccgtgctcctgacccgctctctcctggcggacacgcggcagctggctgcacagctgagggacaaattcccagctgacggggaccacaacctggattccctgcccaccctggccatgagtgcgggggcactgggagctctacagctcccaggtgtgctgacaaggctgcgagcggacctactgtcctacctgcggcacgtgcagtggctgcgccgggcaggtggctcttccctgaagaccctggagcccgagctgggcaccctgcaggcccgactggaccggctgctgcgccggctgcagctcctgatgtcccgcctggccctgccccagccacccccggacccgccggcgcccccgctggcgcccccctcctcagcctgggggggcatcagggccgcccacgccatcctgggggggctgcacctgacacttgactgggccgtgaggggactgctgctgctgaagactcggctgtgacccggggcccaaagccaccaccgtccttccaaagccagatcttatttatttatttatttcagtactgggggcgaaacagccaggtgatccccccgccattatctccccctagttagagacagtccttccgtgaggcctggggggcatctgtgccttatttatacttatttatttcaggagcaggggtgggaggcaggtggactcctgggtccccgaggaggaggggactggggtcccggattcttgggtctccaagaagtctgtccacagacttctgccctggctcttccccatctaggcctgggcaggaacatatattatttatttaagcaattacttttcatgttggggtggggacggaggggaaagggaagcctgggtttttgtacaaaaatgtgagaaacctttgtgagacagagaacagggaattaaatgtgtcatacatatccacttgagggcgatttgtctgagagctggggctggatgcttgggtaactggggcagggcaggtggaggggagacctccattcaggtggaggtcccgagtgggcggggcagcgactgggagatgggtcggtcacccagacagctctgtggaggcagggtctgagccttgcctggggccccgcactgcatagggccttttgtttgttttttgagatggagtctcgctctgttgcctaggctggagtgcagtgaggcaatctgaggtcactgcaacctccacctcccgggttcaagcaattctcctgcctcagcctcccgattagctgggatcacaggtgtgcaccaccatgcccagctaattatttatttcttttgtatttttagtagagacagggtttcaccatgttggccaggctggtttcgaactcctgacctcaggtgatcctcctgcctcggcctcccaaagtgctgggattacaggtgtgagccaccacacctgacccataggtcttcaataaatatttaatggaaggttccacaagtcaccctgtgatcaacagtacccgtatgggacaaagctgcaaggtcaagatggttcattatggctgtgttcaccatagcaaactggaaacaatctagatatccaacagtgagggttaagcaacatggtgcatctgtggatagaacgccacccagccgcccggagcagggactgtcattcagggaggctaaggagagaggcttgcttgggatatagaaagatatcctgacattggccaggcatggtggctcacgcctgtaatcctggcactttgggaggacgaagcgagtggatcactgaagtccaagagttcgagaccggcctgcgagacatggcaaaaccctgtctcaaaaaagaaagaatgatgtcctgacatgaaacagcaggctacaaaaccactgcatgctgtgatcccaattttgtgtttttctttctatatatggattaaaacaaaaatcctaaagggaaatacgccaaaatgttgacaatgactgtctccaggtcaaaggagagaggtgggattgtgggtgacttttaatgtgtatgattgtctgtattttacagaatttctgccatgactgtgtattttgcatgacacattttaaaaataataaacactatttttagaat

SEQ ID NO: 11095 - protein, 199 aa, Homo sapiens; identical to SEQ ID NO: 1843

SEQ ID NO: 11096 - DNA, 1188 bp, Homo sapiens
gctgctcagggcacatgcctcccctccccaggccgcggcccagctgaccctcggggctcccccggcagcggacagggaagggttaaaggcccccggctccctgccccctgccctggggaacccctggccctgtggggacatgaactgtgtttgccgcctggtcctggtcgtgctgagcctgtggccagatacagctgtcgcccctgggccaccacctggcccccctcgagtttccccagaccctcgggccgagctggacagcaccgtgctcctgacccgctctctcctggcggacacgcggcagctggctgcacagctgagggacaaattcccagctgacggggaccacaacctggattccctgcccaccctggccatgagtgcgggggcactgggagctctacagctcccaggtgtgctgacaaggctgcgagcggacctactgtcctacctgcggcacgtgcagtggctgcgccgggcaggtggctcttccctgaagaccctggagcccgagctgggcaccctgcaggcccgactggaccggctgctgcgccggctgcagctcctgatgtcccgcctggccctgccccagccacccccggacccgccggcgcccccgctggcgcccccctcctcagcctgggggggcatcagggccgcccacgccatcctgggggggctgcacctgacacttgactgggccgtgaggggactgctgctgctgaagactcggctgtgacccggggcccaaagccaccaccgtccttccaaagccagatcttatttatttatttatttcagtactgggggcgaaacagccaggtgatccccccgccattatctccccctagttagagacagtccttccgtgaggcctggggggcatctgtgccttatttatacttatttatttcaggagcaggggtgggaggcaggtggactcctgggtccccgaggaggaggggactggggtcccggattcttgggtctccaagaagtctgtccacagacttctgccctggctcttccccatctaggcctgggcaggaacatatattatttatttaagcaattacttttcatgttggggtggggacggaggggaaagggaagcctgggtttttgtacaaaaatgtgagaaacctttgtgagacagagaacagggaattaaatgtgtcatacatatcc

SEQ ID NO: 11097 - protein, 199 aa, Homo sapiens; identical to SEQ ID NO: 1843

SEQ ID NO: 11098 - DNA, 650 bp, Homo sapiens
gcccgcctggccctgcgacctgcccgcgggcgttccaccctgggacttaagacctccagctccatcctccctaaggccgggagtccaggccccagaccctcctccccgagacccaggagtccagaccccaggccttcctccctcagacctaggagtccaggcccccagcctctcctccctcagacccaggaggagtccagaccccagttcctcctccctcagacccgggagtccaggcccaggccctcctctctcagacccggagtccagcctgagctctctgccttatcctgcccccaggtgtttgccgcctggtcctggtcgtgctgagcctgtggccagatacagctgtcgcccctgggccaccacctggcccccctcgagtttccccagaccctcgggccgagctggacagcaccgtgctcctgacccgctctctcctggcggacacgcggcagctggctgcacagctgagggacaaattcccagctgacggggaccacaacctggattccctgcccaccctggccatgagtgcgggggcactgggagctctacagctcccaggtgtgctgacaaggctgcgagcggacctactgtcctacctgcggcacgtgcagtggctgcgccgggcaggtggctcttccctg

SEQ ID NO: 11099 - protein, 39 aa, Homo sapiens
MSAGALGALQLPGVLTRLRADLLSYLRHVQWLRRAGGSS

SEQ ID NO: 11100 - DNA, 593 bp, Homo sapiens; identical to SEQ ID NO: 1844

SEQ ID NO: 11101 - protein, 177 aa, Homo sapiens; identical to SEQ ID NO: 1845

SEQ ID NO: 11102 - DNA, 2277 bp, Homo sapiens; identical to SEQ ID NO: 1846

SEQ ID NO: 11103 - protein, 176 aa, Homo sapiens; identical to SEQ ID NO: 1847

SEQ ID NO: 11104 - DNA, 522 bp, Homo sapiens
agggccatggcggcggcgccagcggtgtgcgcctcgcaggggagcccgccgggtgcaccgtccgcgccggcggccgcgccagcacccgcggccggcctgggccgctgccggatggcgctgctgctggccgtggcgctggatgtggcgggcatggcggcgctgctgaccggcgtgttcgcgcagctgcaggtgcgcggccgcgacttcggggacctgctcatctactcgggcgcgctgctggtgttcctgagcctgctgggctggatcctctggtacaccggcaacatcgagatctcgcgccaggagctggagcgcgactacggcctgcggccctcggcgctcgcccgcctggcgcgcaagctctcccgccgctgggcgcgggcagcgagtgaggcccagacaaccccttggctccagctgtcaggaccagactgagatgtgcagctgcccctacatccgtggccagacggacgctccctgtaccccctccctcctcacttggataaaaagcagatttgcctt

SEQ ID NO: 11105 - protein, 142 aa, Homo sapiens
MAAAPAVCASQGSPPGAPSAPAAAPAPAAGLGRCRMALLLAVALDVAGMAALLTGVFAQLQVRGRDFGDLLIYSGALLVFLSLLGWILWYTGNIEISRQELERDYGLRPSALARLARKLSRRWARAASEAQTTPWLQLSGPD

SEQ ID NO: 11106 - DNA, 265 bp, Homo sapiens
tgggcctcactcgctgcccgcgcccgccgccccgggcccggcctcgagcgtggcgagctgcaggcgcacgcggcgggcgccgaccagcggcgggagagcttgcgcgccaggcgggcgagcgccgagggccgcaggccgtagtcgcgctccagctcctggcgcgagatctcgatgttgccggtgtaccagaggatccagcccagcaggctcaggaacaccagcagcgcgcccgagtagatgagcaggtccccgaagtcgcggccgc

SEQ ID NO: 11107 - protein, 86 aa, Homo sapiens
GLTRCPRPPPRARPRAWRAAGARGGRRPAAGELARQAGERRGPQAVVALQLLARDLDVAGVPEDPAQQAQEHQQRARVDEQVPEVA

SEQ ID NO: 11108 - DNA, 1999 bp, Homo sapiens
attgctcagaggcctgagctggtggtagccaggcgcacagccacgggtgcctagggcccgtgccacccagggaggtcacatatggccaaaaatcagggcattttagtggtggcagcatgggacactcggagccgggcgtggcgttgtttctgctcagtgtccgcctcccgaagcctgtgcagatcagacagtgcagatcagacaaggcctttagacaccaaggagctctgggacgcgagaaccagtagtcggggtgatctaagaggggaagctccgggttccgcggaagctgagtttccttcactcagcgcgtgtcttctggggtctcctgtgttcagcgaatgaagccacgggcacaaggacggacgagacccatcaggtccagagcgcacccgtggaggaagctgggcgaaccccgactgtcctatggaggatagtcctatggaccagacgaagcccctgccccaaggagtgcccgggtgtaaccgcaagttaaggagccctggggaggtgacacaggcaccctcattccttttgttcagtaggagtctctgaggcctccccagcaccatgccgcgtgggtgaggccgaggacacagagaaatatcaggcaaggctcctgcccccttagggtggccctgacaacggatcataacctcccagggagctgatggggtgtgacaggcacaccataggctggaggcacaggtggagggcagggaagaggaccggcaaatctatagaatcctaaagggagccaagagaagccacatgcaaatctccctccctccaaacaattctcccttagagggcatccgcgctcccctggggtggcagtcagcgagaagtttccgtgtaggttctccccaggcttaaacagtttaagagttttatttcaagaaaaccctggggagggcgaactgcaagagggctgccaggattagccgagggattccgaatgaagacggagtatttccgaacatacacacctctcccaagagcgtttccggagggttccgaaaatacccgagcgggcctcggcgccctcattggccatcaccgcgagggcttacgaagaccggaaatatccaaaggtgccggggctaggcttatatagttcacgcattcaccagttcattcataaaacaaatgtttgttgagcgcccatcatatgccaatcacagtgacaagtgctgggtgagcaatactggagagataacgctgaggtatgggtcccaggacctctcgaattggagccactcggaaatccagcggtagagtttcgaaaacttccgaacggttcccggaatacgctctcggccctctaaccgaagagttccgaatattcccgagcgttgagcgaattttcggcggaagcagccgaacatcatcgagccgcctcggaggtggggaccgacaactcctgtcgtgcccgcccggagaggaagcggaaatgcgtgtacggtattaaaggcgtcgcctcgcccctcgccttcctctttccgtctcaggtcgccgctgcgaagggagccgccgccatgtctgcgcatctgcaatggatggtcgtgcggaactgctccagtttcctgatcaagaggaataagcagacctacagcactgagcccaataacttgaaggcccgcaattccttccgctacaacggactgattcaccgcaagactgtgggcgtggagccggcagccgacggcaaaggtgtcgtggtggtcattaagcggagatccggccagcggaagcctgccacctcctatgtgcggaccaccatcaacaagaatgctcgcgccacgctcagcagcatcagacacatgatccgcaagaacaagtaccgccccgacctgcgcatggcagccatccgcagggccagcgccatcctgcgcagccagaagcctgtgatggtgaagaggaagcggacccgccccaccaagagctcctgagccccctgcccccagagcaataaagtcagctggctttctcacctgcc

SEQ ID NO: 11109 - protein, 137 aa, Homo sapiens [sequence omitted]

SEQ ID NO: 11110 - DNA, 5424 bp, Homo sapiens
attgctcagaggcctgagctggtggtagccaggcgcacagccacgggtgcctagggcccgtgccacccagggaggtcacatatggccaaaaatcagggcattttagtggtggcagcatgggacactcggagccgggcgtggcgttgtttctgctcagtgtccgcctcccgaagcctgtgcagatcagacagtgcagatcagacaaggcctttagacaccaaggagctctgggacgcgagaaccagtagtcggggtgatctaagaggggaagctccgggttccgcggaagctgagtttccttcactcagcgcgtgtcttctggggtctcctgtgttcagcgaatgaagccacgggcacaaggacggacgagacccatcaggtccagagcgcacccgtggaggaagctgggcgaaccccgactgtcctatggaggatagtcctatggaccagacgaagcccctgccccaaggagtgcccgggtgtaaccgcaagttaaggagccctggggaggtgacacaggcaccctcattccttttgttcagtaggagtctctgaggcctccccagcaccatgccgcgtgggtgaggccgaggacacagagaaatatcaggcaaggctcctgcccccttagggtggccctgacaacggatcataacctcccagggagctgatggggtgtgacaggcacaccataggctggaggcacaggtggagggcagggaagaggaccggcaaatctatagaatcctaaagggagccaagagaagccacatgcaaatctccctccctccaaacaattctcccttagagggcatccgcgctcccctggggtggcagtcagcgagaagtttccgtgtaggttctccccaggcttaaacagtttaagagttttatttcaagaaaaccctggggagggcgaactgcaagagggctgccaggattagccgagggattccgaatgaagacggagtatttccgaacatacacacctctcccaagagcgtttccggagggttccgaaaatacccgagcgggcctcggcgccctcattggccatcaccgcgagggcttacgaagaccggaaatatccaaaggtgccggggctaggcttatatagttcacgcattcaccagttcattcataaaacaaatgtttgttgagcgcccatcatatgccaatcacagtgacaagtgctgggtgagcaatactggagagataacgctgaggtatgggtcccaggacctctcgaattggagccactcggaaatccagcggtagagtttcgaaaacttccgaacggttcccggaatacgctctcggccctctaaccgaagagttccgaatattcccgagcgttgagcgaattttcggcggaagcagccgaacatcatcgagccgcctcggaggtggggaccgacaactcctgtcgtgcccgcccggagaggaagcggaaatgcgtgtacggtattaaaggcgtcgcctcgcccctcgccttcctctttccgtctcaggtcgccgctgcgaagggagccgccgccatgtctgcgcatctgcaatggatggtcgtgcggaactgctccagtttcctgatcaagaggaataagcagacctacagcactgagcccaataacttgaaggcccgcaattccttccgctacaacggactgattcaccgcaagactgtgggcgtggagccggcagccgacggcaaaggtgtcgtggtggtcattaagcggagatccggccagcggaagcctgccacctcctatgtgcggaccaccatcaacaagaatgctcgcgccacgctcagcagcatcagacacatgatccgcaagaacaagtaccgccccgacctgcgcatggcagccatccgcagggccagcgccatcctgcgcagccagaagcctgtgatggtgaagaggaagcggacccgccccaccaagagctcctgagccccctgcccccagagcaataaagtcagctggctttctcacctgcctcgactgggcctccctttttgaaacgctctggggagctctggccctgtgtgttgtcattcaggccatgtcatcaaaactctgcatgtcaccttgtccatctggaggtgatgtcaatggctggccatgcaggaggggtggggtagctgccttgtccctggtgagggcaagggtcactgtcttcacagaaaaagtttgctgacttgtgattgagacctactgtcccattgtgaggtggcctgaagaatcccagctggggcagtggcttccattcagaagaagaaaggccttttctagcccagaagggtgcaggctgagggctgggccctgggccctggtgctgtagcacggtttggggacttggggtgttcccaagacctgggggacgacagacatcacgggaggaagatgagatgacttttgcatccagggagtgggtgcagccacatttggaggggatgggctttacttgatgcaacctcatctctgagatgggcaacttggtgggtggtggcttataactgtaagggagatggcagccccagggtacagccagcaggcattgagcagccttagcattgtccccctactcccgtcctccaggtgtccccatccctcccctgtctctttgagctggctcttgtcacttaggtctcatctcagtggccgctcctgggccaccctgtcacccaagctttcctgattgcccagccctcttgtttcctttggcctgtttgctccctagtgtttattacagcttgtgaggccaggagtttgagaccatcctaggcaacataatgagacaccgtctctaaaataaaattagctgggtgtggtggtgcaccgcctgtggtcccagctcctcagaggttgagtagaggctgaggtgagcggagcacttgagccaagagtatgaggctgcagtgagcccatgagccccaccactacactccagcctggaagacaccatgacacacagtgaggcctggatggggaaagagtcctgctgttgatcctcacatgtttcctgggcacctaactctgtcagccactgccagggaccaaggatccagcatccatggcacccctggttcctgccatcctggggtacccgattcaaagaaggactctgctccctgtctgagaccacccccggctctgactgagagtaaggggactgtcagggcctcgacttgccattggttggggtcgtacggggctgggagccctgcgttttgaggcagaccactgcccttccgacctcagtcctgtctgctccagtcttgcccagctcgaaggagagcagatctgaccacttgccagcccctgtctgctgtgaattaccatttcctttgtccttcccttagttgggtctattagctcagattgagaggtgttgccttaaaactgagttgggtgacttggtacctgctcaggaccccccgcactgtcccaatcccactcaggcccacctccagctggcctcactccgctggtgacttcgtacctgctcaggagcccccactgtcccagtcccactcaggcccatctctggctggcctcactgcgctgggactccgccttcataaggagagctcactgctcacgttagtagatggccccttctcgtgaggcctctcccctggcacctgcttcagttgtcctccacagcactgatttgcagcccacaagctggcaggtttatctgtctcatgtttgtcttgtgctggtgggcaaggggtttgtctagcacaccagcatataatgagatgcttgatgaatggtgcatattgaatgtataaagcccaccggtcctgagagtttgctcactggagactttctggagatggagtctcgctctgttgcccaggctggcgagtgcaatggcgcgatcttggctcactgcagcctccacctcctgggttcaagcgattctcctgcctcagcctcccgagtagctgggattacaggtgggtgtcaccacacccagctcagtattgtatttttagcagagatggggtttcaccattttgcccaggctggtttggaactcctgacttcaaattacccacctgcctcagcctcccaaagtgctggcattacaggcgctcgaggctttctgatgtggctgctgctgctcagaaggccttgtccttaaccacctccttgcctgccctggaggcttgtgcctctaggccccaccccctgtggagtcctgctggctttctccatccctatctgaatcctccctgctgtgtggcctcccctggtctcatccgtaacacagcccagcttagtgggcctctgttcctgcgggtggccagcctgtctgtgtggctgggctggggaggccacgtctggtatctgaatgctatcggtgggttggggtggaggaaccaggagagggctggagggagggagatggtctcagccccacagagtttggagtcctcagtgtgctgagcaaacgtggagacaccatttccctcctctagacctcatcttggagagagagatgttggatggggccatctattccagctttattcacacaaatcatgtctgttggcctggaaattggaaaaccagttaaaccaaaaacatgatattaagaaaacaggcaggctcaccatagtaaaaatgctgaaagccaaagacaaaattgggagaacaaaagaaaagcgtcttgtcacatacagaaggtccctgataaagttagtagctgccctcatcagaaaccaggcccaggcagtggggacacatccagagtgctgaaagaacctcccccaggtcatcctatccccaagagtgatgcccggcagcattcccagctcagggctaatggttcacggaagccaggaatcaaactgcctgggttccagtcccagctctgccagttatgcccagctgtggggacttgggcagctcgtttagtagcaccgtgcctcagtttcccatatgtaaaaggccattttgagtgcctttcacagccctgcataaggcaggtgtctcagtgttcactgctgtctctccagctcttagtccagtagctgcatggtgagtgagcgtagggcgcaccctggaaggctgccaagcccaaagttgtgcagagcgctggggactccagactccccacagcagcagagactcgggactgaggcatcctctgttcacaggacatgctggcatctactgggtcagggctctgctgctcggtggctgtgcaaccttgggcaagttcctcaacctctctgtgtcttcgtaccctcatctgtaacatgcgtgtcgatagaccctactactcagggttgatgagaagattaaatgtgcaaaacctgcttgactgtgcccacaaatcctgattgtaggaataaattaatgactttttataaatattttgatcagatggactcatgatcacagatgt

SEQ ID NO: 11111 - protein, 137 aa, Homo sapiens [sequence omitted]

SEQ ID NO: 11112 - DNA, 5717 bp, Homo sapiens
attgctcagaggcctgagctggtggtagccaggcgcacagccacgggtgcctagggcccgtgccacccagggaggtcacatatggccaaaaatcagggcattttagtggtggcagcatgggacactcggagccgggcgtggcgttgtttctgctcagtgtccgcctcccgaagcctgtgcagatcagacagtgcagatcagacaaggcctttagacaccaaggagctctgggacgcgagaaccagtagtcggggtgatctaagaggggaagctccgggttccgcggaagctgagtttccttcactcagcgcgtgtcttctggggtctcctgtgttcagcgaatgaagccacgggcacaaggacggacgagacccatcaggtccagagcgcacccgtggaggaagctgggcgaaccccgactgtcctatggaggatagtcctatggaccagacgaagcccctgccccaaggagtgcccgggtgtaaccgcaagttaaggagccctggggaggtgacacaggcaccctcattccttttgttcagtaggagtctctgaggcctccccagcaccatgccgcgtgggtgaggccgaggacacagagaaatatcaggcaaggctcctgcccccttagggtggccctgacaacggatcataacctcccagggagctgatggggtgtgacaggcacaccataggctggaggcacaggtggagggcagggaagaggaccggcaaatctatagaatcctaaagggagccaagagaagccacatgcaaatctccctccctccaaacaattctcccttagagggcatccgcgctcccctggggtggcagtcagcgagaagtttccgtgtaggttctccccaggcttaaacagtttaagagttttatttcaagaaaaccctggggagggcgaactgcaagagggctgccaggattagccgagggattccgaatgaagacggagtatttccgaacatacacacctctcccaagagcgtttccggagggttccgaaaatacccgagcgggcctcggcgccctcattggccatcaccgcgagggcttacgaagaccggaaatatccaaaggtgccggggctaggcttatatagttcacgcattcaccagttcattcataaaacaaatgtttgttgagcgcccatcatatgccaatcacagtgacaagtgctgggtgagcaatactggagagataacgctgaggtatgggtcccaggacctctcgaattggagccactcggaaatccagcggtagagtttcgaaaacttccgaacggttcccggaatacgctctcggccctctaaccgaagagttccgaatattcccgagcgttgagcgaattttcggcggaagcagccgaacatcatcgagccgcctcggaggtggggaccgacaactcctgtcgtgcccgcccggagaggaagcggaaatgcgtgtacggtattaaaggcgtcgcctcgcccctcgccttcctctttccgtctcaggtcgccgctgcgaagggagccgccgccatgtctgcgcatctgcaatggatggtcgtgcggaactgctccagtttcctgatcaagaggaataagcagacctacagcactgagcccaataacttgaaggcccgcaattccttccgctacaacggactgattcaccgcaagactgtgggcgtggagccggcagccgacggcaaaggtgtcgtggtggtcattaagcggagatccggccagcggaagcctgccacctcctatgtgcggaccaccatcaacaagaatgctcgcgccacgctcagcagcatcagacacatgatccgcaagaacaagtaccgccccgacctgcgcatggcagccatccgcagggccagcgccatcctgcgcagccagaagcctgtgatggtgaagaggaagcggacccgccccaccaagagctcctgagccccctgcccccagagcaataaagtcagctggctttctcacctgcctcgactgggcctccctttttgaaacgctctggggagctctggccctgtgtgttgtcattcaggccatgtcatcaaaactctgcatgtcaccttgtccatctggaggtgatgtcaatggctggccatgcaggaggggtggggtagctgccttgtccctggtgagggcaagggtcactgtcttcacagaaaaagtttgctgacttgtgattgagacctactgtcccattgtgaggtggcctgaagaatcccagctggggcagtggcttccattcagaagaagaaaggccttttctagcccagaagggtgcaggctgagggctgggccctgggccctggtgctgtagcacggtttggggacttggggtgttcccaagacctgggggacgacagacatcacgggaggaagatgagatgacttttgcatccagggagtgggtgcagccacatttggaggggatgggctttacttgatgcaacctcatctctgagatgggcaacttggtgggtggtggcttataactgtaagggagatggcagccccagggtacagccagcaggcattgagcagccttagcattgtccccctactcccgtcctccaggtgtccccatccctcccctgtctctttgagctggctcttgtcacttaggtctcatctcagtggccgctcctgggccaccctgtcacccaagctttcctgattgcccagccctcttgtttcctttggcctgtttgctccctagtgtttattacagcttgtgaggccaggagtttgagaccatcctaggcaacataatgagacaccgtctctaaaataaaattagctgggtgtggtggtgcaccgcctgtggtcccagctcctcagaggttgagtagaggctgaggtgagcggagcacttgagccaagagtatgaggctgcagtgagcccatgagccccaccactacactccagcctggaagacaccatgacacacagtgaggcctggatggggaaagagtcctgctgttgatcctcacatgtttcctgggcacctaactctgtcagccactgccagggaccaaggatccagcatccatggcacccctggttcctgccatcctggggtacccgattcaaagaaggactctgctccctgtctgagaccacccccggctctgactgagagtaaggggactgtcagggcctcgacttgccattggttggggtcgtacggggctgggagccctgcgttttgaggcagaccactgcccttccgacctcagtcctgtctgctccagtcttgcccagctcgaaggagagcagatctgaccacttgccagcccctgtctgctgtgaattaccatttcctttgtccttcccttagttgggtctattagctcagattgagaggtgttgccttaaaactgagttgggtgacttggtacctgctcaggaccccccgcactgtcccaatcccactcaggcccacctccagctggcctcactccgctggtgacttcgtacctgctcaggagcccccactgtcccagtcccactcaggcccatctctggctggcctcactgcgctgggactccgccttcataaggagagctcactgctcacgttagtagatggccccttctcgtgaggcctctcccctggcacctgcttcagttgtcctccacagcactgatttgcagcccacaagctggcaggtttatctgtctcatgtttgtcttgtgctggtgggcaaggggtttgtctagcacaccagcatataatgagatgcttgatgaatggtgcatattgaatgtataaagcccaccggtcctgagagtttgctcactggagactttctggagatggagtctcgctctgttgcccaggctggcgagtgcaatggcgcgatcttggctcactgcagcctccacctcctgggttcaagcgattctcctgcctcagcctcccgagtagctgggattacaggtgggtgtcaccacacccagctcagtattgtatttttagcagagatggggtttcaccattttgcccaggctggtttggaactcctgacttcaaattacccacctgcctcagcctcccaaagtgctggcattacaggcgctcgaggctttctgatgtggctgctgctgctcagaaggccttgtccttaaccacctccttgcctgccctggaggcttgtgcctctaggccccaccccctgtggagtcctgctggctttctccatccctatctgaatcctccctgctgtgtggcctcccctggtctcatccgtaacacagcccagcttagtgggcctctgttcctgcgggtggccagcctgtctgtgtggctgggctggggaggccacgtctggtatctgaatgctatcggtgggttggggtggaggaaccaggagagggctggagggagggagatggtctcagccccacagagtttggagtcctcagtgtgctgagcaaacgtggagacaccatttccctcctctagacctcatcttggagagagagatgttggatggggccatctattccagctttattcacacaaatcatgtctgttggcctggaaattggaaaaccagttaaaccaaaaacatgatattaagaaaacaggcaggctcaccatagtaaaaatgctgaaagccaaagacaaaattgggagaacaaaagaaaagcgtcttgtcacatacagaaggtccctgataaagttagtagctgccctcatcagaaaccaggcccaggcagtggggacacatccagagtgctgaaagaacctcccccaggtcatcctatccccaagagtgatgcccggcagcattcccagctcagggctaatggttcacggaagccaggaatcaaactgcctgggttccagtcccagctctgccagttatgcccagctgtggggacttgggcagctcgtttagtagcaccgtgcctcagtttcccatatgtaaaaggccattttgagtgcctttcacagccctgcataaggcaggtgtctcagtgttcactgctgtctctccagctcttagtccagtagctgcatggtgagtgagcgtagggcgcaccctggaaggctgccaagcccaaagttgtgcagagcgctggggactccagactccccacagcagcagagactcgggactgaggcatcctctgttcacaggacatgctggcatctactgggtcagggctctgctgctcggtggctgtgcaaccttgggcaagttcctcaacctctctgtgtcttcgtaccctcatctgtaacatgcgtgtcgatagaccctactactcagggttgatgagaagattaaatgtgcaaaacctgcttgactgtgcccacaaatcctgattgtaggaataaattaatgactttttataaatattttgatcagatggactcatgatcacagatgtcttcacatgcctatgactaatttgtacacaaactaatgctcgtgtttcccaagcacctggaagacatgccagatccatgtgcagtaatgcctggtggctccaggtctgccccgccgtcctgtggggctgtgagctttcccagcctcctgcccgtgtttgtgaatatcattctgtcctcagctgcatttccagcccaggctgtttggcgctgcccaggaatggtatcaattcccctgtttctcttgtagccagttactagaataaaatcatctactttaaaatctttcattatg

SEQ ID NO: 11113 - protein, 137 aa, Homo sapiens [sequence omitted]

SEQ ID NO: 11114 - DNA, 2747 bp, Homo sapiens
aaatcagggcattttagtggtggcagcatgggacactcggagccgggcgtggcgttgtttctgctcagtgtccgcctcccgaagcctgtgcagatcagacagtgcagatcagacaaggcctttagacaccaaggagctctgggacgcgagaaccagtagtcggggtgatctaagaggggaagctccgggttccgcggaagctgagtttccttcactcagcgcgtgtcttctggggtctcctgtgttcagcgaatgaagccacgggcacaaggacggacgagacccatcaggtccagagcgcacccgtggaggaagctgggcgaaccccgactgtcctatggaggatagtcctatggaccagacgaagcccctgccccaaggagtgcccgggtgtaaccgcaagttaaggagccctggggaggtgacacaggcaccctcattccttttgttcagtaggagtctctgaggcctccccagcaccatgccgcgtgggtgaggccgaggacacagagaaatatcaggcaaggctcctgcccccttagggtggccctgacaacggatcataacctcccagggagctgatggggtgtgacaggcacaccataggctggaggcacaggtggagggcagggaagaggaccggcaaatctatagaatcctaaagggagccaagagaagccacatgcaaatctccctccctccaaacaattctcccttagagggcatccgcgctcccctggggtggcagtcagcgagaagtttccgtgtaggttctccccaggcttaaacagtttaagagttttatttcaagaaaaccctggggagggcgaactgcaagagggctgccaggattagccgagggattccgaatgaagacggagtatttccgaacatacacacctctcccaagagcgtttccggagggttccgaaaatacccgagcgggcctcggcgccctcattggccatcaccgcgagggcttacgaagaccggaaatatccaaaggtgccggggctaggcttatatagttcacgcattcaccagttcattcataaaacaaatgtttgttgagcgcccatcatatgccaatcacagtgacaagtgctgggtgagcaatactggagagataacgctgaggtatgggtcccaggacctctcgaattggagccactcggaaatccagcggtagagtttcgaaaacttccgaacggttcccggaatacgctctcggccctctaaccgaagagttccgaatattcccgagcgttgagcgaattttcggcggaagcagccgaacatcatcgagccgcctcggaggtggggaccgacaactcctgtcgtgcccgcccggagaggaagcggaaatgcgtgtacggtattaaaggcgtcgcctcgcccctcgccttcctctttccgtctcaggtcgccgctgcgaagggagccgccgccatgtctgcgcatctgcaatggatggtcgtgcggaactgctccagtttcctgatcaagaggaataagcagacctacagcactgagcccaataacttgaaggcccgcaattccttccgctacaacggactgattcaccgcaagactgtgggcgtggagccggcagccgacggcaaaggtgtcgtggtggtcattaagcggagatccgagtgagtttttctcaggtccttgattggaactgcctcagagccaagggtccttttactcagtggcagcaacaaacgcagtctgttggctagtgatcctcctgtctcagggacacgtagtccagggagcagccaattgcttggcacttggggaccccgttctggggagtcctgaaagctttcacctcttggattgccgaatacatgggtggcccttcctagactaagggactggcctgagtgaggctgggcctctcagccaagctgatgttgaaccactgctgtggggatgggcctggggttcctgggaagctgttcatacccattgccaggagcgtgggctctggctggacctggatcagatcctaactgaagcggcagctttctggcatgagaaaggagtgttttcatggtggacagaattgggctatgagtgtggcagaagctgtgtcctcagtactccgtgatgacgagtgagcctctgtgaaatggacaggtgggaaaacagctacctgctggcctgcccaggcacccgccacgggcccacgctgctcagcttctcaatgtgagactgtccacacctgcgaggtgtgctaaaggtgcaggttaggtggactgaccccaggacctccctgacccccaaccaggccagcggaagcctgccacctcctatgtgcggaccaccatcaacaagaatgctcgcgccacgctcagcagcatcagacacatgatccgcaagaacaagtaccgccccgacctgcgcatggtgagctggggtttggggatcaggcttggggagactggccagtgctgtggggaagggcctcccactactggttgcaatatgggctggagagggatggattcttgctttcagcctactccccacacccagcattggcctagggggcggcttgtggagtgtatgggctgagccttgctctgctcccccgcccccaggcagccatccgcagggccagcgccatcctgcgcagccagaagcctgtgatggtgaagaggaagcggacccgccccaccaagagctcctgagccccctgcccccagagcaataaagtcagctggctttctcacctg

SEQ ID NO: 11115 - protein, 69 aa, Homo sapiens
MSAHLQWMVVRNCSSFLIKRNKQTYSTEPNNLKARNSFRYNGLIHRKTVGVEPAADGKGVVVVIKRRSE

SEQ ID NO: 11116 - DNA, 2104 bp, Homo sapiens
aaatcagggcattttagtggtggcagcatgggacactcggagccgggcgtggcgttgtttctgctcagtgtccgcctcccgaagcctgtgcagatcagacagtgcagatcagacaaggcctttagacaccaaggagctctgggacgcgagaaccagtagtcggggtgatctaagaggggaagctccgggttccgcggaagctgagtttccttcactcagcgcgtgtcttctggggtctcctgtgttcagcgaatgaagccacgggcacaaggacggacgagacccatcaggtccagagcgcacccgtggaggaagctgggcgaaccccgactgtcctatggaggatagtcctatggaccagacgaagcccctgccccaaggagtgcccgggtgtaaccgcaagttaaggagccctggggaggtgacacaggcaccctcattccttttgttcagtaggagtctctgaggcctccccagcaccatgccgcgtgggtgaggccgaggacacagagaaatatcaggcaaggctcctgcccccttagggtggccctgacaacggatcataacctcccagggagctgatggggtgtgacaggcacaccataggctggaggcacaggtggagggcagggaagaggaccggcaaatctatagaatcctaaagggagccaagagaagccacatgcaaatctccctccctccaaacaattctcccttagagggcatccgcgctcccctggggtggcagtcagcgagaagtttccgtgtaggttctccccaggcttaaacagtttaagagttttatttcaagaaaaccctggggagggcgaactgcaagagggctgccaggattagccgagggattccgaatgaagacggagtatttccgaacatacacacctctcccaagagcgtttccggagggttccgaaaatacccgagcgggcctcggcgccctcattggccatcaccgcgagggcttacgaagaccggaaatatccaaaggtgccggggctaggcttatatagttcacgcattcaccagttcattcataaaacaaatgtttgttgagcgcccatcatatgccaatcacagtgacaagtgctgggtgagcaatactggagagataacgctgaggtatgggtcccaggacctctcgaattggagccactcggaaatccagcggtagagtttcgaaaacttccgaacggttcccggaatacgctctcggccctctaaccgaagagttccgaatattcccgagcgttgagcgaattttcggcggaagcagccgaacatcatcgagccgcctcggaggtggggaccgacaactcctgtcgtgcccgcccggagaggaagcggaaatgcgtgtacggtattaaaggcgtcgcctcgcccctcgccttcctctttccgtctcaggtcgccgctgcgaagggagccgccgccatgtctgcgcatctgcaatggatggtcgtgcggaactgctccagtttcctgatcaagaggaataagcagacctacagcactgagcccaataacttgaaggcccgcaattccttccgctacaacggactgattcaccgcaagactgtgggcgtggagccggcagccgacggcaaaggtgtcgtggtggtcattaagcggagatccggccagcggaagcctgccacctcctatgtgcggaccaccatcaacaagaatgctcgcgccacgctcagcagcatcagacacatgatccgcaagaacaagtaccgccccgacctgcgcatggtgagctggggtttggggatcaggcttggggagactggccagtgctgtggggaagggcctcccactactggttgcaatatgggctggagagggatggattcttgctttcagcctactccccacacccagcattggcctagggggcggcttgtggagtgtatgggctgagccttgctctgctcccccgcccccaggcagccatccgcagggccagcgccatcctgcgcagccagaagcctgtgatggtgaagaggaagcggacccgccccaccaagagctcctgagccccctgcccccagagcaataaagtcagctggctttctcacctgcc

SEQ ID NO: 11117 - protein, 163 aa, Homo sapiens
MSAHLQWMVVRNCSSFLIKRNKQTYSTEPNNLKARNSFRYNGLIHRKTVGVEPAADGKGVVVVIKRRSGQRKPATSYVRTTINKNARATLSSIRHMIRKNKYRPDLRMVSWGLGIRLGETGQCCGEGPPTTGCNMGWRGMDSCFQPTPHTQHWPRGRLVECMG

SEQ ID NO: 11118 - DNA, 5529 bp, Homo sapiens
aaatcagggcattttagtggtggcagcatgggacactcggagccgggcgtggcgttgtttctgctcagtgtccgcctcccgaagcctgtgcagatcagacagtgcagatcagacaaggcctttagacaccaaggagctctgggacgcgagaaccagtagtcggggtgatctaagaggggaagctccgggttccgcggaagctgagtttccttcactcagcgcgtgtcttctggggtctcctgtgttcagcgaatgaagccacgggcacaaggacggacgagacccatcaggtccagagcgcacccgtggaggaagctgggcgaaccccgactgtcctatggaggatagtcctatggaccagacgaagcccctgccccaaggagtgcccgggtgtaaccgcaagttaaggagccctggggaggtgacacaggcaccctcattccttttgttcagtaggagtctctgaggcctccccagcaccatgccgcgtgggtgaggccgaggacacagagaaatatcaggcaaggctcctgcccccttagggtggccctgacaacggatcataacctcccagggagctgatggggtgtgacaggcacaccataggctggaggcacaggtggagggcagggaagaggaccggcaaatctatagaatcctaaagggagccaagagaagccacatgcaaatctccctccctccaaacaattctcccttagagggcatccgcgctcccctggggtggcagtcagcgagaagtttccgtgtaggttctccccaggcttaaacagtttaagagttttatttcaagaaaaccctggggagggcgaactgcaagagggctgccaggattagccgagggattccgaatgaagacggagtatttccgaacatacacacctctcccaagagcgtttccggagggttccgaaaatacccgagcgggcctcggcgccctcattggccatcaccgcgagggcttacgaagaccggaaatatccaaaggtgccggggctaggcttatatagttcacgcattcaccagttcattcataaaacaaatgtttgttgagcgcccatcatatgccaatcacagtgacaagtgctgggtgagcaatactggagagataacgctgaggtatgggtcccaggacctctcgaattggagccactcggaaatccagcggtagagtttcgaaaacttccgaacggttcccggaatacgctctcggccctctaaccgaagagttccgaatattcccgagcgttgagcgaattttcggcggaagcagccgaacatcatcgagccgcctcggaggtggggaccgacaactcctgtcgtgcccgcccggagaggaagcggaaatgcgtgtacggtattaaaggcgtcgcctcgcccctcgccttcctctttccgtctcaggtcgccgctgcgaagggagccgccgccatgtctgcgcatctgcaatggatggtcgtgcggaactgctccagtttcctgatcaagaggaataagcagacctacagcactgagcccaataacttgaaggcccgcaattccttccgctacaacggactgattcaccgcaagactgtgggcgtggagccggcagccgacggcaaaggtgtcgtggtggtcattaagcggagatccggccagcggaagcctgccacctcctatgtgcggaccaccatcaacaagaatgctcgcgccacgctcagcagcatcagacacatgatccgcaagaacaagtaccgccccgacctgcgcatggtgagctggggtttggggatcaggcttggggagactggccagtgctgtggggaagggcctcccactactggttgcaatatgggctggagagggatggattcttgctttcagcctactccccacacccagcattggcctagggggcggcttgtggagtgtatgggctgagccttgctctgctcccccgcccccaggcagccatccgcagggccagcgccatcctgcgcagccagaagcctgtgatggtgaagaggaagcggacccgccccaccaagagctcctgagccccctgcccccagagcaataaagtcagctggctttctcacctgcctcgactgggcctccctttttgaaacgctctggggagctctggccctgtgtgttgtcattcaggccatgtcatcaaaactctgcatgtcaccttgtccatctggaggtgatgtcaatggctggccatgcaggaggggtggggtagctgccttgtccctggtgagggcaagggtcactgtcttcacagaaaaagtttgctgacttgtgattgagacctactgtcccattgtgaggtggcctgaagaatcccagctggggcagtggcttccattcagaagaagaaaggccttttctagcccagaagggtgcaggctgagggctgggccctgggccctggtgctgtagcacggtttggggacttggggtgttcccaagacctgggggacgacagacatcacgggaggaagatgagatgacttttgcatccagggagtgggtgcagccacatttggaggggatgggctttacttgatgcaacctcatctctgagatgggcaacttggtgggtggtggcttataactgtaagggagatggcagccccagggtacagccagcaggcattgagcagccttagcattgtccccctactcccgtcctccaggtgtccccatccctcccctgtctctttgagctggctcttgtcacttaggtctcatctcagtggccgctcctgggccaccctgtcacccaagctttcctgattgcccagccctcttgtttcctttggcctgtttgctccctagtgtttattacagcttgtgaggccaggagtttgagaccatcctaggcaacataatgagacaccgtctctaaaataaaattagctgggtgtggtggtgcaccgcctgtggtcccagctcctcagaggttgagtagaggctgaggtgagcggagcacttgagccaagagtatgaggctgcagtgagcccatgagccccaccactacactccagcctggaagacaccatgacacacagtgaggcctggatggggaaagagtcctgctgttgatcctcacatgtttcctgggcacctaactctgtcagccactgccagggaccaaggatccagcatccatggcacccctggttcctgccatcctggggtacccgattcaaagaaggactctgctccctgtctgagaccacccccggctctgactgagagtaaggggactgtcagggcctcgacttgccattggttggggtcgtacggggctgggagccctgcgttttgaggcagaccactgcccttccgacctcagtcctgtctgctccagtcttgcccagctcgaaggagagcagatctgaccacttgccagcccctgtctgctgtgaattaccatttcctttgtccttcccttagttgggtctattagctcagattgagaggtgttgccttaaaactgagttgggtgacttggtacctgctcaggaccccccgcactgtcccaatcccactcaggcccacctccagctggcctcactccgctggtgacttcgtacctgctcaggagcccccactgtcccagtcccactcaggcccatctctggctggcctcactgcgctgggactccgccttcataaggagagctcactgctcacgttagtagatggccccttctcgtgaggcctctcccctggcacctgcttcagttgtcctccacagcactgatttgcagcccacaagctggcaggtttatctgtctcatgtttgtcttgtgctggtgggcaaggggtttgtctagcacaccagcatataatgagatgcttgatgaatggtgcatattgaatgtataaagcccaccggtcctgagagtttgctcactggagactttctggagatggagtctcgctctgttgcccaggctggcgagtgcaatggcgcgatcttggctcactgcagcctccacctcctgggttcaagcgattctcctgcctcagcctcccgagtagctgggattacaggtgggtgtcaccacacccagctcagtattgtatttttagcagagatggggtttcaccattttgcccaggctggtttggaactcctgacttcaaattacccacctgcctcagcctcccaaagtgctggcattacaggcgctcgaggctttctgatgtggctgctgctgctcagaaggccttgtccttaaccacctccttgcctgccctggaggcttgtgcctctaggccccaccccctgtggagtcctgctggctttctccatccctatctgaatcctccctgctgtgtggcctcccctggtctcatccgtaacacagcccagcttagtgggcctctgttcctgcgggtggccagcctgtctgtgtggctgggctggggaggccacgtctggtatctgaatgctatcggtgggttggggtggaggaaccaggagagggctggagggagggagatggtctcagccccacagagtttggagtcctcagtgtgctgagcaaacgtggagacaccatttccctcctctagacctcatcttggagagagagatgttggatggggccatctattccagctttattcacacaaatcatgtctgttggcctggaaattggaaaaccagttaaaccaaaaacatgatattaagaaaacaggcaggctcaccatagtaaaaatgctgaaagccaaagacaaaattgggagaacaaaagaaaagcgtcttgtcacatacagaaggtccctgataaagttagtagctgccctcatcagaaaccaggcccaggcagtggggacacatccagagtgctgaaagaacctcccccaggtcatcctatccccaagagtgatgcccggcagcattcccagctcagggctaatggttcacggaagccaggaatcaaactgcctgggttccagtcccagctctgccagttatgcccagctgtggggacttgggcagctcgtttagtagcaccgtgcctcagtttcccatatgtaaaaggccattttgagtgcctttcacagccctgcataaggcaggtgtctcagtgttcactgctgtctctccagctcttagtccagtagctgcatggtgagtgagcgtagggcgcaccctggaaggctgccaagcccaaagttgtgcagagcgctggggactccagactccccacagcagcagagactcgggactgaggcatcctctgttcacaggacatgctggcatctactgggtcagggctctgctgctcggtggctgtgcaaccttgggcaagttcctcaacctctctgtgtcttcgtaccctcatctgtaacatgcgtgtcgatagaccctactactcagggttgatgagaagattaaatgtgcaaaacctgcttgactgtgcccacaaatcctgattgtaggaataaattaatgactttttataaatattttgatcagatggactcatgatcacagatgt

SEQ ID NO: 11119 - protein, 163 aa, Homo sapiens; identical to SEQ ID NO: 11117

SEQ ID NO: 11120 - DNA, 2024 bp, Homo sapiens
aaatcagggcattttagtggtggcagcatgggacactcggagccgggcgtggcgttgtttctgctcagtgtccgcctcccgaagcctgtgcagatcagacagtgcagatcagacaaggcctttagacaccaaggagctctgggacgcgagaaccagtagtcggggtgatctaagaggggaagctccgggttccgcggaagctgagtttccttcactcagcgcgtgtcttctggggtctcctgtgttcagcgaatgaagccacgggcacaaggacggacgagacccatcaggtccagagcgcacccgtggaggaagctgggcgaaccccgactgtcctatggaggatagtcctatggaccagacgaagcccctgccccaaggagtgcccgggtgtaaccgcaagttaaggagccctggggaggtgacacaggcaccctcattccttttgttcagtaggagtctctgaggcctccccagcaccatgccgcgtgggtgaggccgaggacacagagaaatatcaggcaaggctcctgcccccttagggtggccctgacaacggatcataacctcccagggagctgatggggtgtgacaggcacaccataggctggaggcacaggtggagggcagggaagaggaccggcaaatctatagaatcctaaagggagccaagagaagccacatgcaaatctccctccctccaaacaattctcccttagagggcatccgcgctcccctggggtggcagtcagcgagaagtttccgtgtaggttctccccaggcttaaacagtttaagagttttatttcaagaaaaccctggggagggcgaactgcaagagggctgccaggattagccgagggattccgaatgaagacggagtatttccgaacatacacacctctcccaagagcgtttccggagggttccgaaaatacccgagcgggcctcggcgccctcattggccatcaccgcgagggcttacgaagaccggaaatatccaaaggtgccggggctaggcttatatagttcacgcattcaccagttcattcataaaacaaatgtttgttgagcgcccatcatatgccaatcacagtgacaagtgctgggtgagcaatactggagagataacgctgaggtatgggtcccaggacctctcgaattggagccactcggaaatccagcggtagagtttcgaaaacttccgaacggttcccggaatacgctctcggccctctaaccgaagagttccgaatattcccgagcgttgagcgaattttcggcggaagcagccgaacatcatcgagccgcctcggaggtggggaccgacaactcctgtcgtgcccgcccggagaggaagcggaaatgcgtgtacggtattaaaggcgtcgcctcgcccctcgccttcctctttccgtctcaggtcgccgctgcgaagggagccgccgccatgtctgcgcatctgcaatggatggtcgtgcggaactgctccagtttcctgatcaagaggaataagcagacctacagcactgagcccaataacttgaaggcccgcaattccttccgctacaacggactgattcaccgcaagactgtgggcgtggagccggcagccgacggcaaaggtgtcgtggtggtcattaagcggagatccggccagcggaagcctgccacctcctatgtgcggaccaccatcaacaagaatgctcgcgccacgctcagcagcatcagacacatgatccgcaagaacaagtaccgccccgacctgcgcatggacatgctggcatctactgggtcagggctctgctgctcggtggctgtgcaaccttgggcaagttcctcaacctctctgtgtcttcgtaccctcatctgtaacatgcgtgtcgatagaccctactactcagggttgatgagaagattaaatgtgcaaaacctgcttgactgtgcccacaaatcctgattgtaggaataaattaatgactttttataaatattttgatcagatggactcatgatcacagatgt

SEQ ID NO: 11121 - protein, 169 aa, Homo sapiens
MSAHLQWMVVRNCSSFLIKRNKQTYSTEPNNLKARNSFRYNGLIHRKTVGVEPAADGKGVVVVIKRRSGQRKPATSYVRTTINKNARATLSSIRHMIRKNKYRPDLRMDMLASTGSGLCCSVAVQPWASSSTSLCLRTLICNMRVDRPYYSGLMRRLNVQNLLDCAHKS

SEQ ID NO: 11122 - DNA, 6174 bp, Homo sapiens
aaatcagggcattttagtggtggcagcatgggacactcggagccgggcgtggcgttgtttctgctcagtgtccgcctcccgaagcctgtgcagatcagacagtgcagatcagacaaggcctttagacaccaaggagctctgggacgcgagaaccagtagtcggggtgatctaagaggggaagctccgggttccgcggaagctgagtttccttcactcagcgcgtgtcttctggggtctcctgtgttcagcgaatgaagccacgggcacaaggacggacgagacccatcaggtccagagcgcacccgtggaggaagctgggcgaaccccgactgtcctatggaggatagtcctatggaccagacgaagcccctgccccaaggagtgcccgggtgtaaccgcaagttaaggagccctggggaggtgacacaggcaccctcattccttttgttcagtaggagtctctgaggcctccccagcaccatgccgcgtgggtgaggccgaggacacagagaaatatcaggcaaggctcctgcccccttagggtggccctgacaacggatcataacctcccagggagctgatggggtgtgacaggcacaccataggctggaggcacaggtggagggcagggaagaggaccggcaaatctatagaatcctaaagggagccaagagaagccacatgcaaatctccctccctccaaacaattctcccttagagggcatccgcgctcccctggggtggcagtcagcgagaagtttccgtgtaggttctccccaggcttaaacagtttaagagttttatttcaagaaaaccctggggagggcgaactgcaagagggctgccaggattagccgagggattccgaatgaagacggagtatttccgaacatacacacctctcccaagagcgtttccggagggttccgaaaatacccgagcgggcctcggcgccctcattggccatcaccgcgagggcttacgaagaccggaaatatccaaaggtgccggggctaggcttatatagttcacgcattcaccagttcattcataaaacaaatgtttgttgagcgcccatcatatgccaatcacagtgacaagtgctgggtgagcaatactggagagataacgctgaggtatgggtcccaggacctctcgaattggagccactcggaaatccagcggtagagtttcgaaaacttccgaacggttcccggaatacgctctcggccctctaaccgaagagttccgaatattcccgagcgttgagcgaattttcggcggaagcagccgaacatcatcgagccgcctcggaggtggggaccgacaactcctgtcgtgcccgcccggagaggaagcggaaatgcgtgtacggtattaaaggcgtcgcctcgcccctcgccttcctctttccgtctcaggtcgccgctgcgaagggagccgccgccatgtctgcgcatctgcaatggatggtcgtgcggaactgctccagtttcctgatcaagaggaataagcagacctacagcactgagcccaataacttgaaggcccgcaattccttccgctacaacggactgattcaccgcaagactgtgggcgtggagccggcagccgacggcaaaggtgtcgtggtggtcattaagcggagatccgagtgagtttttctcaggtccttgattggaactgcctcagagccaagggtccttttactcagtggcagcaacaaacgcagtctgttggctagtgatcctcctgtctcagggacacgtagtccagggagcagccaattgcttggcacttggggaccccgttctggggagtcctgaaagctttcacctcttggattgccgaatacatgggtggcccttcctagactaagggactggcctgagtgaggctgggcctctcagccaagctgatgttgaaccactgctgtggggatgggcctggggttcctgggaagctgttcatacccattgccaggagcgtgggctctggctggacctggatcagatcctaactgaagcggcagctttctggcatgagaaaggagtgttttcatggtggacagaattgggctatgagtgtggcagaagctgtgtcctcagtactccgtgatgacgagtgagcctctgtgaaatggacaggtgggaaaacagctacctgctggcctgcccaggcacccgccacgggcccacgctgctcagcttctcaatgtgagactgtccacacctgcgaggtgtgctaaaggtgcaggttaggtggactgaccccaggacctccctgacccccaaccaggccagcggaagcctgccacctcctatgtgcggaccaccatcaacaagaatgctcgcgccacgctcagcagcatcagacacatgatccgcaagaacaagtaccgccccgacctgcgcatggtgagctggggtttggggatcaggcttggggagactggccagtgctgtggggaagggcctcccactactggttgcaatatgggctggagagggatggattcttgctttcagcctactccccacacccagcattggcctagggggcggcttgtggagtgtatgggctgagccttgctctgctcccccgcccccaggcagccatccgcagggccagcgccatcctgcgcagccagaagcctgtgatggtgaagaggaagcggacccgccccaccaagagctcctgagccccctgcccccagagcaataaagtcagctggctttctcacctgcctcgactgggcctccctttttgaaacgctctggggagctctggccctgtgtgttgtcattcaggccatgtcatcaaaactctgcatgtcaccttgtccatctggaggtgatgtcaatggctggccatgcaggaggggtggggtagctgccttgtccctggtgagggcaagggtcactgtcttcacagaaaaagtttgctgacttgtgattgagacctactgtcccattgtgaggtggcctgaagaatcccagctggggcagtggcttccattcagaagaagaaaggccttttctagcccagaagggtgcaggctgagggctgggccctgggccctggtgctgtagcacggtttggggacttggggtgttcccaagacctgggggacgacagacatcacgggaggaagatgagatgacttttgcatccagggagtgggtgcagccacatttggaggggatgggctttacttgatgcaacctcatctctgagatgggcaacttggtgggtggtggcttataactgtaagggagatggcagccccagggtacagccagcaggcattgagcagccttagcattgtccccctactcccgtcctccaggtgtccccatccctcccctgtctctttgagctggctcttgtcacttaggtctcatctcagtggccgctcctgggccaccctgtcacccaagctttcctgattgcccagccctcttgtttcctttggcctgtttgctccctagtgtttattacagcttgtgaggccaggagtttgagaccatcctaggcaacataatgagacaccgtctctaaaataaaattagctgggtgtggtggtgcaccgcctgtggtcccagctcctcagaggttgagtagaggctgaggtgagcggagcacttgagccaagagtatgaggctgcagtgagcccatgagccccaccactacactccagcctggaagacaccatgacacacagtgaggcctggatggggaaagagtcctgctgttgatcctcacatgtttcctgggcacctaactctgtcagccactgccagggaccaaggatccagcatccatggcacccctggttcctgccatcctggggtacccgattcaaagaaggactctgctccctgtctgagaccacccccggctctgactgagagtaaggggactgtcagggcctcgacttgccattggttggggtcgtacggggctgggagccctgcgttttgaggcagaccactgcccttccgacctcagtcctgtctgctccagtcttgcccagctcgaaggagagcagatctgaccacttgccagcccctgtctgctgtgaattaccatttcctttgtccttcccttagttgggtctattagctcagattgagaggtgttgccttaaaactgagttgggtgacttggtacctgctcaggaccccccgcactgtcccaatcccactcaggcccacctccagctggcctcactccgctggtgacttcgtacctgctcaggagcccccactgtcccagtcccactcaggcccatctctggctggcctcactgcgctgggactccgccttcataaggagagctcactgctcacgttagtagatggccccttctcgtgaggcctctcccctggcacctgcttcagttgtcctccacagcactgatttgcagcccacaagctggcaggtttatctgtctcatgtttgtcttgtgctggtgggcaaggggtttgtctagcacaccagcatataatgagatgcttgatgaatggtgcatattgaatgtataaagcccaccggtcctgagagtttgctcactggagactttctggagatggagtctcgctctgttgcccaggctggcgagtgcaatggcgcgatcttggctcactgcagcctccacctcctgggttcaagcgattctcctgcctcagcctcccgagtagctgggattacaggtgggtgtcaccacacccagctcagtattgtatttttagcagagatggggtttcaccattttgcccaggctggtttggaactcctgacttcaaattacccacctgcctcagcctcccaaagtgctggcattacaggcgctcgaggctttctgatgtggctgctgctgctcagaaggccttgtccttaaccacctccttgcctgccctggaggcttgtgcctctaggccccaccccctgtggagtcctgctggctttctccatccctatctgaatcctccctgctgtgtggcctcccctggtctcatccgtaacacagcccagcttagtgggcctctgttcctgcgggtggccagcctgtctgtgtggctgggctggggaggccacgtctggtatctgaatgctatcggtgggttggggtggaggaaccaggagagggctggagggagggagatggtctcagccccacagagtttggagtcctcagtgtgctgagcaaacgtggagacaccatttccctcctctagacctcatcttggagagagagatgttggatggggccatctattccagctttattcacacaaatcatgtctgttggcctggaaattggaaaaccagttaaaccaaaaacatgatattaagaaaacaggcaggctcaccatagtaaaaatgctgaaagccaaagacaaaattgggagaacaaaagaaaagcgtcttgtcacatacagaaggtccctgataaagttagtagctgccctcatcagaaaccaggcccaggcagtggggacacatccagagtgctgaaagaacctcccccaggtcatcctatccccaagagtgatgcccggcagcattcccagctcagggctaatggttcacggaagccaggaatcaaactgcctgggttccagtcccagctctgccagttatgcccagctgtggggacttgggcagctcgtttagtagcaccgtgcctcagtttcccatatgtaaaaggccattttgagtgcctttcacagccctgcataaggcaggtgtctcagtgttcactgctgtctctccagctcttagtccagtagctgcatggtgagtgagcgtagggcgcaccctggaaggctgccaagcccaaagttgtgcagagcgctggggactccagactccccacagcagcagagactcgggactgaggcatcctctgttcacaggacatgctggcatctactgggtcagggctctgctgctcggtggctgtgcaaccttgggcaagttcctcaacctctctgtgtcttcgtaccctcatctgtaacatgcgtgtcgatagaccctactactcagggttgatgagaagattaaatgtgcaaaacctgcttgactgtgcccacaaatcctgattgtaggaataaattaatgactttttataaatattttgatcagatggactcatgatcacagatgt

SEQ ID NO: 11123 - protein, 69 aa, Homo sapiens; identical to SEQ ID NO: 11115

SEQ ID NO: 11124 - DNA, 2317 bp, Homo sapiens
aaatcagggcattttagtggtggcagcatgggacactcggagccgggcgtggcgttgtttctgctcagtgtccgcctcccgaagcctgtgcagatcagacagtgcagatcagacaaggcctttagacaccaaggagctctgggacgcgagaaccagtagtcggggtgatctaagaggggaagctccgggttccgcggaagctgagtttccttcactcagcgcgtgtcttctggggtctcctgtgttcagcgaatgaagccacgggcacaaggacggacgagacccatcaggtccagagcgcacccgtggaggaagctgggcgaaccccgactgtcctatggaggatagtcctatggaccagacgaagcccctgccccaaggagtgcccgggtgtaaccgcaagttaaggagccctggggaggtgacacaggcaccctcattccttttgttcagtaggagtctctgaggcctccccagcaccatgccgcgtgggtgaggccgaggacacagagaaatatcaggcaaggctcctgcccccttagggtggccctgacaacggatcataacctcccagggagctgatggggtgtgacaggcacaccataggctggaggcacaggtggagggcagggaagaggaccggcaaatctatagaatcctaaagggagccaagagaagccacatgcaaatctccctccctccaaacaattctcccttagagggcatccgcgctcccctggggtggcagtcagcgagaagtttccgtgtaggttctccccaggcttaaacagtttaagagttttatttcaagaaaaccctggggagggcgaactgcaagagggctgccaggattagccgagggattccgaatgaagacggagtatttccgaacatacacacctctcccaagagcgtttccggagggttccgaaaatacccgagcgggcctcggcgccctcattggccatcaccgcgagggcttacgaagaccggaaatatccaaaggtgccggggctaggcttatatagttcacgcattcaccagttcattcataaaacaaatgtttgttgagcgcccatcatatgccaatcacagtgacaagtgctgggtgagcaatactggagagataacgctgaggtatgggtcccaggacctctcgaattggagccactcggaaatccagcggtagagtttcgaaaacttccgaacggttcccggaatacgctctcggccctctaaccgaagagttccgaatattcccgagcgttgagcgaattttcggcggaagcagccgaacatcatcgagccgcctcggaggtggggaccgacaactcctgtcgtgcccgcccggagaggaagcggaaatgcgtgtacggtattaaaggcgtcgcctcgcccctcgccttcctctttccgtctcaggtcgccgctgcgaagggagccgccgccatgtctgcgcatctgcaatggatggtcgtgcggaactgctccagtttcctgatcaagaggaataagcagacctacagcactgagcccaataacttgaaggcccgcaattccttccgctacaacggactgattcaccgcaagactgtgggcgtggagccggcagccgacggcaaaggtgtcgtggtggtcattaagcggagatccggccagcggaagcctgccacctcctatgtgcggaccaccatcaacaagaatgctcgcgccacgctcagcagcatcagacacatgatccgcaagaacaagtaccgccccgacctgcgcatggacatgctggcatctactgggtcagggctctgctgctcggtggctgtgcaaccttgggcaagttcctcaacctctctgtgtcttcgtaccctcatctgtaacatgcgtgtcgatagaccctactactcagggttgatgagaagattaaatgtgcaaaacctgcttgactgtgcccacaaatcctgattgtaggaataaattaatgactttttataaatattttgatcagatggactcatgatcacagatgtcttcacatgcctatgactaatttgtacacaaactaatgctcgtgtttcccaagcacctggaagacatgccagatccatgtgcagtaatgcctggtggctccaggtctgccccgccgtcctgtggggctgtgagctttcccagcctcctgcccgtgtttgtgaatatcattctgtcctcagctgcatttccagcccaggctgtttggcgctgcccaggaatggtatcaattcccctgtttctcttgtagccagttactagaataaaatcatctactttaaaatctttcattatg

SEQ ID NO: 11125 - protein, 169 aa, Homo sapiens; identical to SEQ ID NO: 11121

SEQ ID NO: 11126 - DNA, 5822 bp, Homo sapiens
aaatcagggcattttagtggtggcagcatgggacactcggagccgggcgtggcgttgtttctgctcagtgtccgcctcccgaagcctgtgcagatcagacagtgcagatcagacaaggcctttagacaccaaggagctctgggacgcgagaaccagtagtcggggtgatctaagaggggaagctccgggttccgcggaagctgagtttccttcactcagcgcgtgtcttctggggtctcctgtgttcagcgaatgaagccacgggcacaaggacggacgagacccatcaggtccagagcgcacccgtggaggaagctgggcgaaccccgactgtcctatggaggatagtcctatggaccagacgaagcccctgccccaaggagtgcccgggtgtaaccgcaagttaaggagccctggggaggtgacacaggcaccctcattccttttgttcagtaggagtctctgaggcctccccagcaccatgccgcgtgggtgaggccgaggacacagagaaatatcaggcaaggctcctgcccccttagggtggccctgacaacggatcataacctcccagggagctgatggggtgtgacaggcacaccataggctggaggcacaggtggagggcagggaagaggaccggcaaatctatagaatcctaaagggagccaagagaagccacatgcaaatctccctccctccaaacaattctcccttagagggcatccgcgctcccctggggtggcagtcagcgagaagtttccgtgtaggttctccccaggcttaaacagtttaagagttttatttcaagaaaaccctggggagggcgaactgcaagagggctgccaggattagccgagggattccgaatgaagacggagtatttccgaacatacacacctctcccaagagcgtttccggagggttccgaaaatacccgagcgggcctcggcgccctcattggccatcaccgcgagggcttacgaagaccggaaatatccaaaggtgccggggctaggcttatatagttcacgcattcaccagttcattcataaaacaaatgtttgttgagcgcccatcatatgccaatcacagtgacaagtgctgggtgagcaatactggagagataacgctgaggtatgggtcccaggacctctcgaattggagccactcggaaatccagcggtagagtttcgaaaacttccgaacggttcccggaatacgctctcggccctctaaccgaagagttccgaatattcccgagcgttgagcgaattttcggcggaagcagccgaacatcatcgagccgcctcggaggtggggaccgacaactcctgtcgtgcccgcccggagaggaagcggaaatgcgtgtacggtattaaaggcgtcgcctcgcccctcgccttcctctttccgtctcaggtcgccgctgcgaagggagccgccgccatgtctgcgcatctgcaatggatggtcgtgcggaactgctccagtttcctgatcaagaggaataagcagacctacagcactgagcccaataacttgaaggcccgcaattccttccgctacaacggactgattcaccgcaagactgtgggcgtggagccggcagccgacggcaaaggtgtcgtggtggtcattaagcggagatccggccagcggaagcctgccacctcctatgtgcggaccaccatcaacaagaatgctcgcgccacgctcagcagcatcagacacatgatccgcaagaacaagtaccgccccgacctgcgcatggtgagctggggtttggggatcaggcttggggagactggccagtgctgtggggaagggcctcccactactggttgcaatatgggctggagagggatggattcttgctttcagcctactccccacacccagcattggcctagggggcggcttgtggagtgtatgggctgagccttgctctgctcccccgcccccaggcagccatccgcagggccagcgccatcctgcgcagccagaagcctgtgatggtgaagaggaagcggacccgccccaccaagagctcctgagccccctgcccccagagcaataaagtcagctggctttctcacctgcctcgactgggcctccctttttgaaacgctctggggagctctggccctgtgtgttgtcattcaggccatgtcatcaaaactctgcatgtcaccttgtccatctggaggtgatgtcaatggctggccatgcaggaggggtggggtagctgccttgtccctggtgagggcaagggtcactgtcttcacagaaaaagtttgctgacttgtgattgagacctactgtcccattgtgaggtggcctgaagaatcccagctggggcagtggcttccattcagaagaagaaaggccttttctagcccagaagggtgcaggctgagggctgggccctgggccctggtgctgtagcacggtttggggacttggggtgttcccaagacctgggggacgacagacatcacgggaggaagatgagatgacttttgcatccagggagtgggtgcagccacatttggaggggatgggctttacttgatgcaacctcatctctgagatgggcaacttggtgggtggtggcttataactgtaagggagatggcagccccagggtacagccagcaggcattgagcagccttagcattgtccccctactcccgtcctccaggtgtccccatccctcccctgtctctttgagctggctcttgtcacttaggtctcatctcagtggccgctcctgggccaccctgtcacccaagctttcctgattgcccagccctcttgtttcctttggcctgtttgctccctagtgtttattacagcttgtgaggccaggagtttgagaccatcctaggcaacataatgagacaccgtctctaaaataaaattagctgggtgtggtggtgcaccgcctgtggtcccagctcctcagaggttgagtagaggctgaggtgagcggagcacttgagccaagagtatgaggctgcagtgagcccatgagccccaccactacactccagcctggaagacaccatgacacacagtgaggcctggatggggaaagagtcctgctgttgatcctcacatgtttcctgggcacctaactctgtcagccactgccagggaccaaggatccagcatccatggcacccctggttcctgccatcctggggtacccgattcaaagaaggactctgctccctgtctgagaccacccccggctctgactgagagtaaggggactgtcagggcctcgacttgccattggttggggtcgtacggggctgggagccctgcgttttgaggcagaccactgcccttccgacctcagtcctgtctgctccagtcttgcccagctcgaaggagagcagatctgaccacttgccagcccctgtctgctgtgaattaccatttcctttgtccttcccttagttgggtctattagctcagattgagaggtgttgccttaaaactgagttgggtgacttggtacctgctcaggaccccccgcactgtcccaatcccactcaggcccacctccagctggcctcactccgctggtgacttcgtacctgctcaggagcccccactgtcccagtcccactcaggcccatctctggctggcctcactgcgctgggactccgccttcataaggagagctcactgctcacgttagtagatggccccttctcgtgaggcctctcccctggcacctgcttcagttgtcctccacagcactgatttgcagcccacaagctggcaggtttatctgtctcatgtttgtcttgtgctggtgggcaaggggtttgtctagcacaccagcatataatgagatgcttgatgaatggtgcatattgaatgtataaagcccaccggtcctgagagtttgctcactggagactttctggagatggagtctcgctctgttgcccaggctggcgagtgcaatggcgcgatcttggctcactgcagcctccacctcctgggttcaagcgattctcctgcctcagcctcccgagtagctgggattacaggtgggtgtcaccacacccagctcagtattgtatttttagcagagatggggtttcaccattttgcccaggctggtttggaactcctgacttcaaattacccacctgcctcagcctcccaaagtgctggcattacaggcgctcgaggctttctgatgtggctgctgctgctcagaaggccttgtccttaaccacctccttgcctgccctggaggcttgtgcctctaggccccaccccctgtggagtcctgctggctttctccatccctatctgaatcctccctgctgtgtggcctcccctggtctcatccgtaacacagcccagcttagtgggcctctgttcctgcgggtggccagcctgtctgtgtggctgggctggggaggccacgtctggtatctgaatgctatcggtgggttggggtggaggaaccaggagagggctggagggagggagatggtctcagccccacagagtttggagtcctcagtgtgctgagcaaacgtggagacaccatttccctcctctagacctcatcttggagagagagatgttggatggggccatctattccagctttattcacacaaatcatgtctgttggcctggaaattggaaaaccagttaaaccaaaaacatgatattaagaaaacaggcaggctcaccatagtaaaaatgctgaaagccaaagacaaaattgggagaacaaaagaaaagcgtcttgtcacatacagaaggtccctgataaagttagtagctgccctcatcagaaaccaggcccaggcagtggggacacatccagagtgctgaaagaacctcccccaggtcatcctatccccaagagtgatgcccggcagcattcccagctcagggctaatggttcacggaagccaggaatcaaactgcctgggttccagtcccagctctgccagttatgcccagctgtggggacttgggcagctcgtttagtagcaccgtgcctcagtttcccatatgtaaaaggccattttgagtgcctttcacagccctgcataaggcaggtgtctcagtgttcactgctgtctctccagctcttagtccagtagctgcatggtgagtgagcgtagggcgcaccctggaaggctgccaagcccaaagttgtgcagagcgctggggactccagactccccacagcagcagagactcgggactgaggcatcctctgttcacaggacatgctggcatctactgggtcagggctctgctgctcggtggctgtgcaaccttgggcaagttcctcaacctctctgtgtcttcgtaccctcatctgtaacatgcgtgtcgatagaccctactactcagggttgatgagaagattaaatgtgcaaaacctgcttgactgtgcccacaaatcctgattgtaggaataaattaatgactttttataaatattttgatcagatggactcatgatcacagatgtcttcacatgcctatgactaatttgtacacaaactaatgctcgtgtttcccaagcacctggaagacatgccagatccatgtgcagtaatgcctggtggctccaggtctgccccgccgtcctgtggggctgtgagctttcccagcctcctgcccgtgtttgtgaatatcattctgtcctcagctgcatttccagcccaggctgtttggcgctgcccaggaatggtatcaattcccctgtttctcttgtagccagttactagaataaaatcatctactttaaaatctttcattatg

SEQ ID NO: 11127 - protein, 163 aa, Homo sapiens; identical to SEQ ID NO: 11117

SEQ ID NO: 11128 - DNA, 6467 bp, Homo sapiens
aaatcagggcattttagtggtggcagcatgggacactcggagccgggcgtggcgttgtttctgctcagtgtccgcctcccgaagcctgtgcagatcagacagtgcagatcagacaaggcctttagacaccaaggagctctgggacgcgagaaccagtagtcggggtgatctaagaggggaagctccgggttccgcggaagctgagtttccttcactcagcgcgtgtcttctggggtctcctgtgttcagcgaatgaagccacgggcacaaggacggacgagacccatcaggtccagagcgcacccgtggaggaagctgggcgaaccccgactgtcctatggaggatagtcctatggaccagacgaagcccctgccccaaggagtgcccgggtgtaaccgcaagttaaggagccctggggaggtgacacaggcaccctcattccttttgttcagtaggagtctctgaggcctccccagcaccatgccgcgtgggtgaggccgaggacacagagaaatatcaggcaaggctcctgcccccttagggtggccctgacaacggatcataacctcccagggagctgatggggtgtgacaggcacaccataggctggaggcacaggtggagggcagggaagaggaccggcaaatctatagaatcctaaagggagccaagagaagccacatgcaaatctccctccctccaaacaattctcccttagagggcatccgcgctcccctggggtggcagtcagcgagaagtttccgtgtaggttctccccaggcttaaacagtttaagagttttatttcaagaaaaccctggggagggcgaactgcaagagggctgccaggattagccgagggattccgaatgaagacggagtatttccgaacatacacacctctcccaagagcgtttccggagggttccgaaaatacccgagcgggcctcggcgccctcattggccatcaccgcgagggcttacgaagaccggaaatatccaaaggtgccggggctaggcttatatagttcacgcattcaccagttcattcataaaacaaatgtttgttgagcgcccatcatatgccaatcacagtgacaagtgctgggtgagcaatactggagagataacgctgaggtatgggtcccaggacctctcgaattggagccactcggaaatccagcggtagagtttcgaaaacttccgaacggttcccggaatacgctctcggccctctaaccgaagagttccgaatattcccgagcgttgagcgaattttcggcggaagcagccgaacatcatcgagccgcctcggaggtggggaccgacaactcctgtcgtgcccgcccggagaggaagcggaaatgcgtgtacggtattaaaggcgtcgcctcgcccctcgccttcctctttccgtctcaggtcgccgctgcgaagggagccgccgccatgtctgcgcatctgcaatggatggtcgtgcggaactgctccagtttcctgatcaagaggaataagcagacctacagcactgagcccaataacttgaaggcccgcaattccttccgctacaacggactgattcaccgcaagactgtgggcgtggagccggcagccgacggcaaaggtgtcgtggtggtcattaagcggagatccgagtgagtttttctcaggtccttgattggaactgcctcagagccaagggtccttttactcagtggcagcaacaaacgcagtctgttggctagtgatcctcctgtctcagggacacgtagtccagggagcagccaattgcttggcacttggggaccccgttctggggagtcctgaaagctttcacctcttggattgccgaatacatgggtggcccttcctagactaagggactggcctgagtgaggctgggcctctcagccaagctgatgttgaaccactgctgtggggatgggcctggggttcctgggaagctgttcatacccattgccaggagcgtgggctctggctggacctggatcagatcctaactgaagcggcagctttctggcatgagaaaggagtgttttcatggtggacagaattgggctatgagtgtggcagaagctgtgtcctcagtactccgtgatgacgagtgagcctctgtgaaatggacaggtgggaaaacagctacctgctggcctgcccaggcacccgccacgggcccacgctgctcagcttctcaatgtgagactgtccacacctgcgaggtgtgctaaaggtgcaggttaggtggactgaccccaggacctccctgacccccaaccaggccagcggaagcctgccacctcctatgtgcggaccaccatcaacaagaatgctcgcgccacgctcagcagcatcagacacatgatccgcaagaacaagtaccgccccgacctgcgcatggtgagctggggtttggggatcaggcttggggagactggccagtgctgtggggaagggcctcccactactggttgcaatatgggctggagagggatggattcttgctttcagcctactccccacacccagcattggcctagggggcggcttgtggagtgtatgggctgagccttgctctgctcccccgcccccaggcagccatccgcagggccagcgccatcctgcgcagccagaagcctgtgatggtgaagaggaagcggacccgccccaccaagagctcctgagccccctgcccccagagcaataaagtcagctggctttctcacctgcctcgactgggcctccctttttgaaacgctctggggagctctggccctgtgtgttgtcattcaggccatgtcatcaaaactctgcatgtcaccttgtccatctggaggtgatgtcaatggctggccatgcaggaggggtggggtagctgccttgtccctggtgagggcaagggtcactgtcttcacagaaaaagtttgctgacttgtgattgagacctactgtcccattgtgaggtggcctgaagaatcccagctggggcagtggcttccattcagaagaagaaaggccttttctagcccagaagggtgcaggctgagggctgggccctgggccctggtgctgtagcacggtttggggacttggggtgttcccaagacctgggggacgacagacatcacgggaggaagatgagatgacttttgcatccagggagtgggtgcagccacatttggaggggatgggctttacttgatgcaacctcatctctgagatgggcaacttggtgggtggtggcttataactgtaagggagatggcagccccagggtacagccagcaggcattgagcagccttagcattgtccccctactcccgtcctccaggtgtccccatccctcccctgtctctttgagctggctcttgtcacttaggtctcatctcagtggccgctcctgggccaccctgtcacccaagctttcctgattgcccagccctcttgtttcctttggcctgtttgctccctagtgtttattacagcttgtgaggccaggagtttgagaccatcctaggcaacataatgagacaccgtctctaaaataaaattagctgggtgtggtggtgcaccgcctgtggtcccagctcctcagaggttgagtagaggctgaggtgagcggagcacttgagccaagagtatgaggctgcagtgagcccatgagccccaccactacactccagcctggaagacaccatgacacacagtgaggcctggatggggaaagagtcctgctgttgatcctcacatgtttcctgggcacctaactctgtcagccactgccagggaccaaggatccagcatccatggcacccctggttcctgccatcctggggtacccgattcaaagaaggactctgctccctgtctgagaccacccccggctctgactgagagtaaggggactgtcagggcctcgacttgccattggttggggtcgtacggggctgggagccctgcgttttgaggcagaccactgcccttccgacctcagtcctgtctgctccagtcttgcccagctcgaaggagagcagatctgaccacttgccagcccctgtctgctgtgaattaccatttcctttgtccttcccttagttgggtctattagctcagattgagaggtgttgccttaaaactgagttgggtgacttggtacctgctcaggaccccccgcactgtcccaatcccactcaggcccacctccagctggcctcactccgctggtgacttcgtacctgctcaggagcccccactgtcccagtcccactcaggcccatctctggctggcctcactgcgctgggactccgccttcataaggagagctcactgctcacgttagtagatggccccttctcgtgaggcctctcccctggcacctgcttcagttgtcctccacagcactgatttgcagcccacaagctggcaggtttatctgtctcatgtttgtcttgtgctggtgggcaaggggtttgtctagcacaccagcatataatgagatgcttgatgaatggtgcatattgaatgtataaagcccaccggtcctgagagtttgctcactggagactttctggagatggagtctcgctctgttgcccaggctggcgagtgcaatggcgcgatcttggctcactgcagcctccacctcctgggttcaagcgattctcctgcctcagcctcccgagtagctgggattacaggtgggtgtcaccacacccagctcagtattgtatttttagcagagatggggtttcaccattttgcccaggctggtttggaactcctgacttcaaattacccacctgcctcagcctcccaaagtgctggcattacaggcgctcgaggctttctgatgtggctgctgctgctcagaaggccttgtccttaaccacctccttgcctgccctggaggcttgtgcctctaggccccaccccctgtggagtcctgctggctttctccatccctatctgaatcctccctgctgtgtggcctcccctggtctcatccgtaacacagcccagcttagtgggcctctgttcctgcgggtggccagcctgtctgtgtggctgggctggggaggccacgtctggtatctgaatgctatcggtgggttggggtggaggaaccaggagagggctggagggagggagatggtctcagccccacagagtttggagtcctcagtgtgctgagcaaacgtggagacaccatttccctcctctagacctcatcttggagagagagatgttggatggggccatctattccagctttattcacacaaatcatgtctgttggcctggaaattggaaaaccagttaaaccaaaaacatgatattaagaaaacaggcaggctcaccatagtaaaaatgctgaaagccaaagacaaaattgggagaacaaaagaaaagcgtcttgtcacatacagaaggtccctgataaagttagtagctgccctcatcagaaaccaggcccaggcagtggggacacatccagagtgctgaaagaacctcccccaggtcatcctatccccaagagtgatgcccggcagcattcccagctcagggctaatggttcacggaagccaggaatcaaactgcctgggttccagtcccagctctgccagttatgcccagctgtggggacttgggcagctcgtttagtagcaccgtgcctcagtttcccatatgtaaaaggccattttgagtgcctttcacagccctgcataaggcaggtgtctcagtgttcactgctgtctctccagctcttagtccagtagctgcatggtgagtgagcgtagggcgcaccctggaaggctgccaagcccaaagttgtgcagagcgctggggactccagactccccacagcagcagagactcgggactgaggcatcctctgttcacaggacatgctggcatctactgggtcagggctctgctgctcggtggctgtgcaaccttgggcaagttcctcaacctctctgtgtcttcgtaccctcatctgtaacatgcgtgtcgatagaccctactactcagggttgatgagaagattaaatgtgcaaaacctgcttgactgtgcccacaaatcctgattgtaggaataaattaatgactttttataaatattttgatcagatggactcatgatcacagatgtcttcacatgcctatgactaatttgtacacaaactaatgctcgtgtttcccaagcacctggaagacatgccagatccatgtgcagtaatgcctggtggctccaggtctgccccgccgtcctgtggggctgtgagctttcccagcctcctgcccgtgtttgtgaatatcattctgtcctcagctgcatttccagcccaggctgtttggcgctgcccaggaatggtatcaattcccctgtttctcttgtagccagttactagaataaaatcatctactttaaaatctttcattatg

SEQ ID NO: 11129 - protein, 69 aa, Homo sapiens; identical to SEQ ID NO: 11115

SEQ ID NO: 11130 - DNA, 2076 bp, Homo sapiens
aaatcagggcattttagtggtggcagcatgggacactcggagccgggcgtggcgttgtttctgctcagtgtccgcctcccgaagcctgtgcagatcagacagtgcagatcagacaaggcctttagacaccaaggagctctgggacgcgagaaccagtagtcggggtgatctaagaggggaagctccgggttccgcggaagctgagtttccttcactcagcgcgtgtcttctggggtctcctgtgttcagcgaatgaagccacgggcacaaggacggacgagacccatcaggtccagagcgcacccgtggaggaagctgggcgaaccccgactgtcctatggaggatagtcctatggaccagacgaagcccctgccccaaggagtgcccgggtgtaaccgcaagttaaggagccctggggaggtgacacaggcaccctcattccttttgttcagtaggagtctctgaggcctccccagcaccatgccgcgtgggtgaggccgaggacacagagaaatatcaggcaaggctcctgcccccttagggtggccctgacaacggatcataacctcccagggagctgatggggtgtgacaggcacaccataggctggaggcacaggtggagggcagggaagaggaccggcaaatctatagaatcctaaagggagccaagagaagccacatgcaaatctccctccctccaaacaattctcccttagagggcatccgcgctcccctggggtggcagtcagcgagaagtttccgtgtaggttctccccaggcttaaacagtttaagagttttatttcaagaaaaccctggggagggcgaactgcaagagggctgccaggattagccgagggattccgaatgaagacggagtatttccgaacatacacacctctcccaagagcgtttccggagggttccgaaaatacccgagcgggcctcggcgccctcattggccatcaccgcgagggcttacgaagaccggaaatatccaaaggtgccggggctaggcttatatagttcacgcattcaccagttcattcataaaacaaatgtttgttgagcgcccatcatatgccaatcacagtgacaagtgctgggtgagcaatactggagagataacgctgaggtatgggtcccaggacctctcgaattggagccactcggaaatccagcggtagagtttcgaaaacttccgaacggttcccggaatacgctctcggccctctaaccgaagagttccgaatattcccgagcgttgagcgaattttcggcggaagcagccgaacatcatcgagccgcctcggaggtggggaccgacaactcctgtcgtgcccgcccggagaggaagcggaaatgcgtgtacggtattaaaggcgtcgcctcgcccctcgccttcctctttccgtctcaggtcgccgctgcgaagggagccgccgccatgtctgcgcatctgcaatggatggtcgtgcggaactgctccagtttcctgatcaagaggaataagcagacctacagcactgagcccaataacttgaaggcccgcaattccttccgctacaacggactgattcaccgcaagactgtgggcgtggagccggcagccgacggcaaaggtgtcgtggtggtcattaagcggagatccggccagcggaagcctgccacctcctatgtgcggaccaccatcaacaagaatgctcgcgccacgctcagcagcatcagacacatgatccgcaagaacaagtaccgccccgacctgcgcatgcttgcgggaagggttgggaggcagcaggctgtaagcagcctggagcaccagcctagaccaggacgcctccacctcagcaacaccgcagccaggtcattctgtgtcatggagccatctcgtacgctgcaggatttgggcagcacccttggcctccacccactagatgctagtggcacccccgagttgtgacaaccctttctggtctcctgacaatgcataataccccttggggggcaaaatcacctctggctgagaaacactggtttatgaaccctatcgctattaaaaaaccactgaactgta

SEQ ID NO: 11131 - protein, 170 aa, Homo sapiens
MSAHLQWMVVRNCSSFLIKRNKQTYSTEPNNLKARNSFRYNGLIHRKTVGVEPAADGKGVVVVIKRRSGQRKPATSYVRTTINKNARATLSSIRHMIRKNKYRPDLRMLAGRVGRQQAVSSLEHQPRPGRLHLSNTAARSFCVMEPSRTLQDLGSTLGLHPLDASGTPEL

SEQ ID NO: 11132 - DNA, 1738 bp, Homo sapiens
ctctttccgtctcaggtcgccgctgcgaagggagccgccgccatgtctgcgcatctgcaatggatggtcgtgcggaactgctccagtttcctgatcaagaggaataagcagacctacagcactgagcccaataacttgaaggcccgcaattccttccgctacaacggactgattcaccgcaagactgtgggcgtggagccggcagccgacggcaaaggtgtcgtggtggtcattaagcggagatccggtgagttttgtctggtttgggccagagagcggcccctttcccgggtctgggagctgtgattttttactgtcaggcaggaagagcggtaactgccatcgcggcgggcatccctggcgccagggtgttggtctgggtaccggcttccctctcggccgacttgtcagctctgtgagccgcgcgcgtctgagcccgtgtcctcacctgtaaagtggagaaatgaaaaaggacctgaacttcctcggtggttgttgagagttaaggcacggggttgatgttttcagatgaaattctcaaagcaagtcagggtggggatggatggtttcatcccacaggtgggaagattgaggcacaacaggggaggggccctcgctaccacacttaggaggggacaggctgggttggttgcagccatttgattcccattttgcctgtgtaggttagagaagaggtcttggggaccccactccatacattgtgctgtcaggtgcaggcctttttggggattccctgaatgttcgtgtgagtcgggggtctctaatggaggagtccagcttcacatgtgttcttgacagggctgtattttctttttagagtgagtttttctcaggtccttgattggaactgcctcagagccaagggtccttttactcagtggcagcaacaaacgcagtctgttggctagtgatcctcctgtctcagggacacgtagtccagggagcagccaattgcttggcacttggggaccccgttctggggagtcctgaaagctttcacctcttggattgccgaatacatgggtggcccttcctagactaagggactggcctgagtgaggctgggcctctcagccaagctgatgttgaaccactgctgtggggatgggcctggggttcctgggaagctgttcatacccattgccaggagcgtgggctctggctggacctggatcagatcctaactgaagcggcagctttctggcatgagaaaggagtgttttcatggtggacagaattgggctatgagtgtggcagaagctgtgtcctcagtactccgtgatgacgagtgagcctctgtgaaatggacaggtgggaaaacagctacctgctggcctgcccaggcacccgccacgggcccacgctgctcagcttctcaatgtgagactgtccacacctgcgaggtgtgctaaaggtgcaggttaggtggactgaccccaggacctccctgacccccaaccaggccagcggaagcctgccacctcctatgtgcggaccaccatcaacaagaatgctcgcgccacgctcagcagcatcagacacatgatccgcaagaacaagtaccgccccgacctgcgcatggcagccatccgcagggccagcgccatcctgcgcagccagaagcctgtgatggtgaagaggaagcggacccgccccaccaagagctcctgagccccctgcccccagagcaataaagtcagctggctttctcacctgc

SEQ ID NO: 11133 - protein, 87 aa, Homo sapiens
MSAHLQWMVVRNCSSFLIKRNKQTYSTEPNNLKARNSFRYNGLIHRKTVGVEPAADGKGVVVVIKRRSGEFCLVWARERPLSRVWEL

SEQ ID NO: 11134 - DNA, 5164 bp, Homo sapiens
ctctttccgtctcaggtcgccgctgcgaagggagccgccgccatgtctgcgcatctgcaatggatggtcgtgcggaactgctccagtttcctgatcaagaggaataagcagacctacagcactgagcccaataacttgaaggcccgcaattccttccgctacaacggactgattcaccgcaagactgtgggcgtggagccggcagccgacggcaaaggtgtcgtggtggtcattaagcggagatccggtgagttttgtctggtttgggccagagagcggcccctttcccgggtctgggagctgtgattttttactgtcaggcaggaagagcggtaactgccatcgcggcgggcatccctggcgccagggtgttggtctgggtaccggcttccctctcggccgacttgtcagctctgtgagccgcgcgcgtctgagcccgtgtcctcacctgtaaagtggagaaatgaaaaaggacctgaacttcctcggtggttgttgagagttaaggcacggggttgatgttttcagatgaaattctcaaagcaagtcagggtggggatggatggtttcatcccacaggtgggaagattgaggcacaacaggggaggggccctcgctaccacacttaggaggggacaggctgggttggttgcagccatttgattcccattttgcctgtgtaggttagagaagaggtcttggggaccccactccatacattgtgctgtcaggtgcaggcctttttggggattccctgaatgttcgtgtgagtcgggggtctctaatggaggagtccagcttcacatgtgttcttgacagggctgtattttctttttagagtgagtttttctcaggtccttgattggaactgcctcagagccaagggtccttttactcagtggcagcaacaaacgcagtctgttggctagtgatcctcctgtctcagggacacgtagtccagggagcagccaattgcttggcacttggggaccccgttctggggagtcctgaaagctttcacctcttggattgccgaatacatgggtggcccttcctagactaagggactggcctgagtgaggctgggcctctcagccaagctgatgttgaaccactgctgtggggatgggcctggggttcctgggaagctgttcatacccattgccaggagcgtgggctctggctggacctggatcagatcctaactgaagcggcagctttctggcatgagaaaggagtgttttcatggtggacagaattgggctatgagtgtggcagaagctgtgtcctcagtactccgtgatgacgagtgagcctctgtgaaatggacaggtgggaaaacagctacctgctggcctgcccaggcacccgccacgggcccacgctgctcagcttctcaatgtgagactgtccacacctgcgaggtgtgctaaaggtgcaggttaggtggactgaccccaggacctccctgacccccaaccaggccagcggaagcctgccacctcctatgtgcggaccaccatcaacaagaatgctcgcgccacgctcagcagcatcagacacatgatccgcaagaacaagtaccgccccgacctgcgcatggcagccatccgcagggccagcgccatcctgcgcagccagaagcctgtgatggtgaagaggaagcggacccgccccaccaagagctcctgagccccctgcccccagagcaataaagtcagctggctttctcacctgcctcgactgggcctccctttttgaaacgctctggggagctctggccctgtgtgttgtcattcaggccatgtcatcaaaactctgcatgtcaccttgtccatctggaggtgatgtcaatggctggccatgcaggaggggtggggtagctgccttgtccctggtgagggcaagggtcactgtcttcacagaaaaagtttgctgacttgtgattgagacctactgtcccattgtgaggtggcctgaagaatcccagctggggcagtggcttccattcagaagaagaaaggccttttctagcccagaagggtgcaggctgagggctgggccctgggccctggtgctgtagcacggtttggggacttggggtgttcccaagacctgggggacgacagacatcacgggaggaagatgagatgacttttgcatccagggagtgggtgcagccacatttggaggggatgggctttacttgatgcaacctcatctctgagatgggcaacttggtgggtggtggcttataactgtaagggagatggcagccccagggtacagccagcaggcattgagcagccttagcattgtccccctactcccgtcctccaggtgtccccatccctcccctgtctctttgagctggctcttgtcacttaggtctcatctcagtggccgctcctgggccaccctgtcacccaagctttcctgattgcccagccctcttgtttcctttggcctgtttgctccctagtgtttattacagcttgtgaggccaggagtttgagaccatcctaggcaacataatgagacaccgtctctaaaataaaattagctgggtgtggtggtgcaccgcctgtggtcccagctcctcagaggttgagtagaggctgaggtgagcggagcacttgagccaagagtatgaggctgcagtgagcccatgagccccaccactacactccagcctggaagacaccatgacacacagtgaggcctggatggggaaagagtcctgctgttgatcctcacatgtttcctgggcacctaactctgtcagccactgccagggaccaaggatccagcatccatggcacccctggttcctgccatcctggggtacccgattcaaagaaggactctgctccctgtctgagaccacccccggctctgactgagagtaaggggactgtcagggcctcgacttgccattggttggggtcgtacggggctgggagccctgcgttttgaggcagaccactgcccttccgacctcagtcctgtctgctccagtcttgcccagctcgaaggagagcagatctgaccacttgccagcccctgtctgctgtgaattaccatttcctttgtccttcccttagttgggtctattagctcagattgagaggtgttgccttaaaactgagttgggtgacttggtacctgctcaggaccccccgcactgtcccaatcccactcaggcccacctccagctggcctcactccgctggtgacttcgtacctgctcaggagcccccactgtcccagtcccactcaggcccatctctggctggcctcactgcgctgggactccgccttcataaggagagctcactgctcacgttagtagatggccccttctcgtgaggcctctcccctggcacctgcttcagttgtcctccacagcactgatttgcagcccacaagctggcaggtttatctgtctcatgtttgtcttgtgctggtgggcaaggggtttgtctagcacaccagcatataatgagatgcttgatgaatggtgcatattgaatgtataaagcccaccggtcctgagagtttgctcactggagactttctggagatggagtctcgctctgttgcccaggctggcgagtgcaatggcgcgatcttggctcactgcagcctccacctcctgggttcaagcgattctcctgcctcagcctcccgagtagctgggattacaggtgggtgtcaccacacccagctcagtattgtatttttagcagagatggggtttcaccattttgcccaggctggtttggaactcctgacttcaaattacccacctgcctcagcctcccaaagtgctggcattacaggcgctcgaggctttctgatgtggctgctgctgctcagaaggccttgtccttaaccacctccttgcctgccctggaggcttgtgcctctaggccccaccccctgtggagtcctgctggctttctccatccctatctgaatcctccctgctgtgtggcctcccctggtctcatccgtaacacagcccagcttagtgggcctctgttcctgcgggtggccagcctgtctgtgtggctgggctggggaggccacgtctggtatctgaatgctatcggtgggttggggtggaggaaccaggagagggctggagggagggagatggtctcagccccacagagtttggagtcctcagtgtgctgagcaaacgtggagacaccatttccctcctctagacctcatcttggagagagagatgttggatggggccatctattccagctttattcacacaaatcatgtctgttggcctggaaattggaaaaccagttaaaccaaaaacatgatattaagaaaacaggcaggctcaccatagtaaaaatgctgaaagccaaagacaaaattgggagaacaaaagaaaagcgtcttgtcacatacagaaggtccctgataaagttagtagctgccctcatcagaaaccaggcccaggcagtggggacacatccagagtgctgaaagaacctcccccaggtcatcctatccccaagagtgatgcccggcagcattcccagctcagggctaatggttcacggaagccaggaatcaaactgcctgggttccagtcccagctctgccagttatgcccagctgtggggacttgggcagctcgtttagtagcaccgtgcctcagtttcccatatgtaaaaggccattttgagtgcctttcacagccctgcataaggcaggtgtctcagtgttcactgctgtctctccagctcttagtccagtagctgcatggtgagtgagcgtagggcgcaccctggaaggctgccaagcccaaagttgtgcagagcgctggggactccagactccccacagcagcagagactcgggactgaggcatcctctgttcacaggacatgctggcatctactgggtcagggctctgctgctcggtggctgtgcaaccttgggcaagttcctcaacctctctgtgtcttcgtaccctcatctgtaacatgcgtgtcgatagaccctactactcagggttgatgagaagattaaatgtgcaaaacctgcttgactgtgcccacaaatcctgattgtaggaataaattaatgactttttataaatattttgatcagatggactcatgatcacagatgt

SEQ ID NO: 11135 - protein, 87 aa, Homo sapiens; identical to SEQ ID NO: 11133

SEQ ID NO: 11136 - DNA, 3618 bp, Homo sapiens
ctctttccgtctcaggtcgccgctgcgaagggagccgccgccatgtctgcgcatctgcagccatccgcagggccagcgccatcctgcgcagccagaagcctgtgatggtgaagaggaagcggacccgccccaccaagagctcctgagccccctgcccccagagcaataaagtcagctggctttctcacctgcctcgactgggcctccctttttgaaacgctctggggagctctggccctgtgtgttgtcattcaggccatgtcatcaaaactctgcatgtcaccttgtccatctggaggtgatgtcaatggctggccatgcaggaggggtggggtagctgccttgtccctggtgagggcaagggtcactgtcttcacagaaaaagtttgctgacttgtgattgagacctactgtcccattgtgaggtggcctgaagaatcccagctggggcagtggcttccattcagaagaagaaaggccttttctagcccagaagggtgcaggctgagggctgggccctgggccctggtgctgtagcacggtttggggacttggggtgttcccaagacctgggggacgacagacatcacgggaggaagatgagatgacttttgcatccagggagtgggtgcagccacatttggaggggatgggctttacttgatgcaacctcatctctgagatgggcaacttggtgggtggtggcttataactgtaagggagatggcagccccagggtacagccagcaggcattgagcagccttagcattgtccccctactcccgtcctccaggtgtccccatccctcccctgtctctttgagctggctcttgtcacttaggtctcatctcagtggccgctcctgggccaccctgtcacccaagctttcctgattgcccagccctcttgtttcctttggcctgtttgctccctagtgtttattacagcttgtgaggccaggagtttgagaccatcctaggcaacataatgagacaccgtctctaaaataaaattagctgggtgtggtggtgcaccgcctgtggtcccagctcctcagaggttgagtagaggctgaggtgagcggagcacttgagccaagagtatgaggctgcagtgagcccatgagccccaccactacactccagcctggaagacaccatgacacacagtgaggcctggatggggaaagagtcctgctgttgatcctcacatgtttcctgggcacctaactctgtcagccactgccagggaccaaggatccagcatccatggcacccctggttcctgccatcctggggtacccgattcaaagaaggactctgctccctgtctgagaccacccccggctctgactgagagtaaggggactgtcagggcctcgacttgccattggttggggtcgtacggggctgggagccctgcgttttgaggcagaccactgcccttccgacctcagtcctgtctgctccagtcttgcccagctcgaaggagagcagatctgaccacttgccagcccctgtctgctgtgaattaccatttcctttgtccttcccttagttgggtctattagctcagattgagaggtgttgccttaaaactgagttgggtgacttggtacctgctcaggaccccccgcactgtcccaatcccactcaggcccacctccagctggcctcactccgctggtgacttcgtacctgctcaggagcccccactgtcccagtcccactcaggcccatctctggctggcctcactgcgctgggactccgccttcataaggagagctcactgctcacgttagtagatggccccttctcgtgaggcctctcccctggcacctgcttcagttgtcctccacagcactgatttgcagcccacaagctggcaggtttatctgtctcatgtttgtcttgtgctggtgggcaaggggtttgtctagcacaccagcatataatgagatgcttgatgaatggtgcatattgaatgtataaagcccaccggtcctgagagtttgctcactggagactttctggagatggagtctcgctctgttgcccaggctggcgagtgcaatggcgcgatcttggctcactgcagcctccacctcctgggttcaagcgattctcctgcctcagcctcccgagtagctgggattacaggtgggtgtcaccacacccagctcagtattgtatttttagcagagatggggtttcaccattttgcccaggctggtttggaactcctgacttcaaattacccacctgcctcagcctcccaaagtgctggcattacaggcgctcgaggctttctgatgtggctgctgctgctcagaaggccttgtccttaaccacctccttgcctgccctggaggcttgtgcctctaggccccaccccctgtggagtcctgctggctttctccatccctatctgaatcctccctgctgtgtggcctcccctggtctcatccgtaacacagcccagcttagtgggcctctgttcctgcgggtggccagcctgtctgtgtggctgggctggggaggccacgtctggtatctgaatgctatcggtgggttggggtggaggaaccaggagagggctggagggagggagatggtctcagccccacagagtttggagtcctcagtgtgctgagcaaacgtggagacaccatttccctcctctagacctcatcttggagagagagatgttggatggggccatctattccagctttattcacacaaatcatgtctgttggcctggaaattggaaaaccagttaaaccaaaaacatgatattaagaaaacaggcaggctcaccatagtaaaaatgctgaaagccaaagacaaaattgggagaacaaaagaaaagcgtcttgtcacatacagaaggtccctgataaagttagtagctgccctcatcagaaaccaggcccaggcagtggggacacatccagagtgctgaaagaacctcccccaggtcatcctatccccaagagtgatgcccggcagcattcccagctcagggctaatggttcacggaagccaggaatcaaactgcctgggttccagtcccagctctgccagttatgcccagctgtggggacttgggcagctcgtttagtagcaccgtgcctcagtttcccatatgtaaaaggccattttgagtgcctttcacagccctgcataaggcaggtgtctcagtgttcactgctgtctctccagctcttagtccagtagctgcatggtgagtgagcgtagggcgcaccctggaaggctgccaagcccaaagttgtgcagagcgctggggactccagactccccacagcagcagagactcgggactgaggcatcctctgttcacaggacatgctggcatctactgggtcagggctctgctgctcggtggctgtgcaaccttgggcaagttcctcaacctctctgtgtcttcgtaccctcatctgtaacatgcgtgtcgatagaccctactactcagggttgatgagaagattaaatgtgcaaaacctgcttgactgtgcccacaaatcctgattgtaggaataaattaatgactttttataaatattttgatcagatggactcatgatcacagatgt

SEQ ID NO: 11137 - protein, 125 aa, Homo sapiens
MVHIECIKPTGPESLLTGDFLEMESRSVAQAGECNGAILAHCSLHLLGSSDSPASASRVAGITGGCHHTQLSIVFLAEMGFHHFAQAGLELLTSNYPPASASQSAGITGARGFLMWLLLLRRPCP

SEQ ID NO: 11138 - DNA, 5457 bp, Homo sapiens
ctctttccgtctcaggtcgccgctgcgaagggagccgccgccatgtctgcgcatctgcaatggatggtcgtgcggaactgctccagtttcctgatcaagaggaataagcagacctacagcactgagcccaataacttgaaggcccgcaattccttccgctacaacggactgattcaccgcaagactgtgggcgtggagccggcagccgacggcaaaggtgtcgtggtggtcattaagcggagatccggtgagttttgtctggtttgggccagagagcggcccctttcccgggtctgggagctgtgattttttactgtcaggcaggaagagcggtaactgccatcgcggcgggcatccctggcgccagggtgttggtctgggtaccggcttccctctcggccgacttgtcagctctgtgagccgcgcgcgtctgagcccgtgtcctcacctgtaaagtggagaaatgaaaaaggacctgaacttcctcggtggttgttgagagttaaggcacggggttgatgttttcagatgaaattctcaaagcaagtcagggtggggatggatggtttcatcccacaggtgggaagattgaggcacaacaggggaggggccctcgctaccacacttaggaggggacaggctgggttggttgcagccatttgattcccattttgcctgtgtaggttagagaagaggtcttggggaccccactccatacattgtgctgtcaggtgcaggcctttttggggattccctgaatgttcgtgtgagtcgggggtctctaatggaggagtccagcttcacatgtgttcttgacagggctgtattttctttttagagtgagtttttctcaggtccttgattggaactgcctcagagccaagggtccttttactcagtggcagcaacaaacgcagtctgttggctagtgatcctcctgtctcagggacacgtagtccagggagcagccaattgcttggcacttggggaccccgttctggggagtcctgaaagctttcacctcttggattgccgaatacatgggtggcccttcctagactaagggactggcctgagtgaggctgggcctctcagccaagctgatgttgaaccactgctgtggggatgggcctggggttcctgggaagctgttcatacccattgccaggagcgtgggctctggctggacctggatcagatcctaactgaagcggcagctttctggcatgagaaaggagtgttttcatggtggacagaattgggctatgagtgtggcagaagctgtgtcctcagtactccgtgatgacgagtgagcctctgtgaaatggacaggtgggaaaacagctacctgctggcctgcccaggcacccgccacgggcccacgctgctcagcttctcaatgtgagactgtccacacctgcgaggtgtgctaaaggtgcaggttaggtggactgaccccaggacctccctgacccccaaccaggccagcggaagcctgccacctcctatgtgcggaccaccatcaacaagaatgctcgcgccacgctcagcagcatcagacacatgatccgcaagaacaagtaccgccccgacctgcgcatggcagccatccgcagggccagcgccatcctgcgcagccagaagcctgtgatggtgaagaggaagcggacccgccccaccaagagctcctgagccccctgcccccagagcaataaagtcagctggctttctcacctgcctcgactgggcctccctttttgaaacgctctggggagctctggccctgtgtgttgtcattcaggccatgtcatcaaaactctgcatgtcaccttgtccatctggaggtgatgtcaatggctggccatgcaggaggggtggggtagctgccttgtccctggtgagggcaagggtcactgtcttcacagaaaaagtttgctgacttgtgattgagacctactgtcccattgtgaggtggcctgaagaatcccagctggggcagtggcttccattcagaagaagaaaggccttttctagcccagaagggtgcaggctgagggctgggccctgggccctggtgctgtagcacggtttggggacttggggtgttcccaagacctgggggacgacagacatcacgggaggaagatgagatgacttttgcatccagggagtgggtgcagccacatttggaggggatgggctttacttgatgcaacctcatctctgagatgggcaacttggtgggtggtggcttataactgtaagggagatggcagccccagggtacagccagcaggcattgagcagccttagcattgtccccctactcccgtcctccaggtgtccccatccctcccctgtctctttgagctggctcttgtcacttaggtctcatctcagtggccgctcctgggccaccctgtcacccaagctttcctgattgcccagccctcttgtttcctttggcctgtttgctccctagtgtttattacagcttgtgaggccaggagtttgagaccatcctaggcaacataatgagacaccgtctctaaaataaaattagctgggtgtggtggtgcaccgcctgtggtcccagctcctcagaggttgagtagaggctgaggtgagcggagcacttgagccaagagtatgaggctgcagtgagcccatgagccccaccactacactccagcctggaagacaccatgacacacagtgaggcctggatggggaaagagtcctgctgttgatcctcacatgtttcctgggcacctaactctgtcagccactgccagggaccaaggatccagcatccatggcacccctggttcctgccatcctggggtacccgattcaaagaaggactctgctccctgtctgagaccacccccggctctgactgagagtaaggggactgtcagggcctcgacttgccattggttggggtcgtacggggctgggagccctgcgttttgaggcagaccactgcccttccgacctcagtcctgtctgctccagtcttgcccagctcgaaggagagcagatctgaccacttgccagcccctgtctgctgtgaattaccatttcctttgtccttcccttagttgggtctattagctcagattgagaggtgttgccttaaaactgagttgggtgacttggtacctgctcaggaccccccgcactgtcccaatcccactcaggcccacctccagctggcctcactccgctggtgacttcgtacctgctcaggagcccccactgtcccagtcccactcaggcccatctctggctggcctcactgcgctgggactccgccttcataaggagagctcactgctcacgttagtagatggccccttctcgtgaggcctctcccctggcacctgcttcagttgtcctccacagcactgatttgcagcccacaagctggcaggtttatctgtctcatgtttgtcttgtgctggtgggcaaggggtttgtctagcacaccagcatataatgagatgcttgatgaatggtgcatattgaatgtataaagcccaccggtcctgagagtttgctcactggagactttctggagatggagtctcgctctgttgcccaggctggcgagtgcaatggcgcgatcttggctcactgcagcctccacctcctgggttcaagcgattctcctgcctcagcctcccgagtagctgggattacaggtgggtgtcaccacacccagctcagtattgtatttttagcagagatggggtttcaccattttgcccaggctggtttggaactcctgacttcaaattacccacctgcctcagcctcccaaagtgctggcattacaggcgctcgaggctttctgatgtggctgctgctgctcagaaggccttgtccttaaccacctccttgcctgccctggaggcttgtgcctctaggccccaccccctgtggagtcctgctggctttctccatccctatctgaatcctccctgctgtgtggcctcccctggtctcatccgtaacacagcccagcttagtgggcctctgttcctgcgggtggccagcctgtctgtgtggctgggctggggaggccacgtctggtatctgaatgctatcggtgggttggggtggaggaaccaggagagggctggagggagggagatggtctcagccccacagagtttggagtcctcagtgtgctgagcaaacgtggagacaccatttccctcctctagacctcatcttggagagagagatgttggatggggccatctattccagctttattcacacaaatcatgtctgttggcctggaaattggaaaaccagttaaaccaaaaacatgatattaagaaaacaggcaggctcaccatagtaaaaatgctgaaagccaaagacaaaattgggagaacaaaagaaaagcgtcttgtcacatacagaaggtccctgataaagttagtagctgccctcatcagaaaccaggcccaggcagtggggacacatccagagtgctgaaagaacctcccccaggtcatcctatccccaagagtgatgcccggcagcattcccagctcagggctaatggttcacggaagccaggaatcaaactgcctgggttccagtcccagctctgccagttatgcccagctgtggggacttgggcagctcgtttagtagcaccgtgcctcagtttcccatatgtaaaaggccattttgagtgcctttcacagccctgcataaggcaggtgtctcagtgttcactgctgtctctccagctcttagtccagtagctgcatggtgagtgagcgtagggcgcaccctggaaggctgccaagcccaaagttgtgcagagcgctggggactccagactccccacagcagcagagactcgggactgaggcatcctctgttcacaggacatgctggcatctactgggtcagggctctgctgctcggtggctgtgcaaccttgggcaagttcctcaacctctctgtgtcttcgtaccctcatctgtaacatgcgtgtcgatagaccctactactcagggttgatgagaagattaaatgtgcaaaacctgcttgactgtgcccacaaatcctgattgtaggaataaattaatgactttttataaatattttgatcagatggactcatgatcacagatgtcttcacatgcctatgactaatttgtacacaaactaatgctcgtgtttcccaagcacctggaagacatgccagatccatgtgcagtaatgcctggtggctccaggtctgccccgccgtcctgtggggctgtgagctttcccagcctcctgcccgtgtttgtgaatatcattctgtcctcagctgcatttccagcccaggctgtttggcgctgcccaggaatggtatcaattcccctgtttctcttgtagccagttactagaataaaatcatctactttaaaatctttcattatg

SEQ ID NO: 11139 - protein, 87 aa, Homo sapiens; identical to SEQ ID NO: 11133

SEQ ID NO: 11140 - DNA, 3911 bp, Homo sapiens
ctctttccgtctcaggtcgccgctgcgaagggagccgccgccatgtctgcgcatctgcagccatccgcagggccagcgccatcctgcgcagccagaagcctgtgatggtgaagaggaagcggacccgccccaccaagagctcctgagccccctgcccccagagcaataaagtcagctggctttctcacctgcctcgactgggcctccctttttgaaacgctctggggagctctggccctgtgtgttgtcattcaggccatgtcatcaaaactctgcatgtcaccttgtccatctggaggtgatgtcaatggctggccatgcaggaggggtggggtagctgccttgtccctggtgagggcaagggtcactgtcttcacagaaaaagtttgctgacttgtgattgagacctactgtcccattgtgaggtggcctgaagaatcccagctggggcagtggcttccattcagaagaagaaaggccttttctagcccagaagggtgcaggctgagggctgggccctgggccctggtgctgtagcacggtttggggacttggggtgttcccaagacctgggggacgacagacatcacgggaggaagatgagatgacttttgcatccagggagtgggtgcagccacatttggaggggatgggctttacttgatgcaacctcatctctgagatgggcaacttggtgggtggtggcttataactgtaagggagatggcagccccagggtacagccagcaggcattgagcagccttagcattgtccccctactcccgtcctccaggtgtccccatccctcccctgtctctttgagctggctcttgtcacttaggtctcatctcagtggccgctcctgggccaccctgtcacccaagctttcctgattgcccagccctcttgtttcctttggcctgtttgctccctagtgtttattacagcttgtgaggccaggagtttgagaccatcctaggcaacataatgagacaccgtctctaaaataaaattagctgggtgtggtggtgcaccgcctgtggtcccagctcctcagaggttgagtagaggctgaggtgagcggagcacttgagccaagagtatgaggctgcagtgagcccatgagccccaccactacactccagcctggaagacaccatgacacacagtgaggcctggatggggaaagagtcctgctgttgatcctcacatgtttcctgggcacctaactctgtcagccactgccagggaccaaggatccagcatccatggcacccctggttcctgccatcctggggtacccgattcaaagaaggactctgctccctgtctgagaccacccccggctctgactgagagtaaggggactgtcagggcctcgacttgccattggttggggtcgtacggggctgggagccctgcgttttgaggcagaccactgcccttccgacctcagtcctgtctgctccagtcttgcccagctcgaaggagagcagatctgaccacttgccagcccctgtctgctgtgaattaccatttcctttgtccttcccttagttgggtctattagctcagattgagaggtgttgccttaaaactgagttgggtgacttggtacctgctcaggaccccccgcactgtcccaatcccactcaggcccacctccagctggcctcactccgctggtgacttcgtacctgctcaggagcccccactgtcccagtcccactcaggcccatctctggctggcctcactgcgctgggactccgccttcataaggagagctcactgctcacgttagtagatggccccttctcgtgaggcctctcccctggcacctgcttcagttgtcctccacagcactgatttgcagcccacaagctggcaggtttatctgtctcatgtttgtcttgtgctggtgggcaaggggtttgtctagcacaccagcatataatgagatgcttgatgaatggtgcatattgaatgtataaagcccaccggtcctgagagtttgctcactggagactttctggagatggagtctcgctctgttgcccaggctggcgagtgcaatggcgcgatcttggctcactgcagcctccacctcctgggttcaagcgattctcctgcctcagcctcccgagtagctgggattacaggtgggtgtcaccacacccagctcagtattgtatttttagcagagatggggtttcaccattttgcccaggctggtttggaactcctgacttcaaattacccacctgcctcagcctcccaaagtgctggcattacaggcgctcgaggctttctgatgtggctgctgctgctcagaaggccttgtccttaaccacctccttgcctgccctggaggcttgtgcctctaggccccaccccctgtggagtcctgctggctttctccatccctatctgaatcctccctgctgtgtggcctcccctggtctcatccgtaacacagcccagcttagtgggcctctgttcctgcgggtggccagcctgtctgtgtggctgggctggggaggccacgtctggtatctgaatgctatcggtgggttggggtggaggaaccaggagagggctggagggagggagatggtctcagccccacagagtttggagtcctcagtgtgctgagcaaacgtggagacaccatttccctcctctagacctcatcttggagagagagatgttggatggggccatctattccagctttattcacacaaatcatgtctgttggcctggaaattggaaaaccagttaaaccaaaaacatgatattaagaaaacaggcaggctcaccatagtaaaaatgctgaaagccaaagacaaaattgggagaacaaaagaaaagcgtcttgtcacatacagaaggtccctgataaagttagtagctgccctcatcagaaaccaggcccaggcagtggggacacatccagagtgctgaaagaacctcccccaggtcatcctatccccaagagtgatgcccggcagcattcccagctcagggctaatggttcacggaagccaggaatcaaactgcctgggttccagtcccagctctgccagttatgcccagctgtggggacttgggcagctcgtttagtagcaccgtgcctcagtttcccatatgtaaaaggccattttgagtgcctttcacagccctgcataaggcaggtgtctcagtgttcactgctgtctctccagctcttagtccagtagctgcatggtgagtgagcgtagggcgcaccctggaaggctgccaagcccaaagttgtgcagagcgctggggactccagactccccacagcagcagagactcgggactgaggcatcctctgttcacaggacatgctggcatctactgggtcagggctctgctgctcggtggctgtgcaaccttgggcaagttcctcaacctctctgtgtcttcgtaccctcatctgtaacatgcgtgtcgatagaccctactactcagggttgatgagaagattaaatgtgcaaaacctgcttgactgtgcccacaaatcctgattgtaggaataaattaatgactttttataaatattttgatcagatggactcatgatcacagatgtcttcacatgcctatgactaatttgtacacaaactaatgctcgtgtttcccaagcacctggaagacatgccagatccatgtgcagtaatgcctggtggctccaggtctgccccgccgtcctgtggggctgtgagctttcccagcctcctgcccgtgtttgtgaatatcattctgtcctcagctgcatttccagcccaggctgtttggcgctgcccaggaatggtatcaattcccctgtttctcttgtagccagttactagaataaaatcatctactttaaaatctttcattatg

SEQ ID NO: 11141 - protein, 125 aa, Homo sapiens; identical to SEQ ID NO: 11137

SEQ ID NO: 11142 - DNA, 3603 bp, Homo sapiens
ctttccgtctcaggtcgccgctgcgaagggagccgccgccatgtctgcgcatctgcaatggatggtcgtgcggaactgctccagtttcctgatcaagaaggaagcggacccgccccaccaagagctcctgagccccctgcccccagagcaataaagtcagctggctttctcacctgcctcgactgggcctccctttttgaaacgctctggggagctctggccctgtgtgttgtcattcaggccatgtcatcaaaactctgcatgtcaccttgtccatctggaggtgatgtcaatggctggccatgcaggaggggtggggtagctgccttgtccctggtgagggcaagggtcactgtcttcacagaaaaagtttgctgacttgtgattgagacctactgtcccattgtgaggtggcctgaagaatcccagctggggcagtggcttccattcagaagaagaaaggccttttctagcccagaagggtgcaggctgagggctgggccctgggccctggtgctgtagcacggtttggggacttggggtgttcccaagacctgggggacgacagacatcacgggaggaagatgagatgacttttgcatccagggagtgggtgcagccacatttggaggggatgggctttacttgatgcaacctcatctctgagatgggcaacttggtgggtggtggcttataactgtaagggagatggcagccccagggtacagccagcaggcattgagcagccttagcattgtccccctactcccgtcctccaggtgtccccatccctcccctgtctctttgagctggctcttgtcacttaggtctcatctcagtggccgctcctgggccaccctgtcacccaagctttcctgattgcccagccctcttgtttcctttggcctgtttgctccctagtgtttattacagcttgtgaggccaggagtttgagaccatcctaggcaacataatgagacaccgtctctaaaataaaattagctgggtgtggtggtgcaccgcctgtggtcccagctcctcagaggttgagtagaggctgaggtgagcggagcacttgagccaagagtatgaggctgcagtgagcccatgagccccaccactacactccagcctggaagacaccatgacacacagtgaggcctggatggggaaagagtcctgctgttgatcctcacatgtttcctgggcacctaactctgtcagccactgccagggaccaaggatccagcatccatggcacccctggttcctgccatcctggggtacccgattcaaagaaggactctgctccctgtctgagaccacccccggctctgactgagagtaaggggactgtcagggcctcgacttgccattggttggggtcgtacggggctgggagccctgcgttttgaggcagaccactgcccttccgacctcagtcctgtctgctccagtcttgcccagctcgaaggagagcagatctgaccacttgccagcccctgtctgctgtgaattaccatttcctttgtccttcccttagttgggtctattagctcagattgagaggtgttgccttaaaactgagttgggtgacttggtacctgctcaggaccccccgcactgtcccaatcccactcaggcccacctccagctggcctcactccgctggtgacttcgtacctgctcaggagcccccactgtcccagtcccactcaggcccatctctggctggcctcactgcgctgggactccgccttcataaggagagctcactgctcacgttagtagatggccccttctcgtgaggcctctcccctggcacctgcttcagttgtcctccacagcactgatttgcagcccacaagctggcaggtttatctgtctcatgtttgtcttgtgctggtgggcaaggggtttgtctagcacaccagcatataatgagatgcttgatgaatggtgcatattgaatgtataaagcccaccggtcctgagagtttgctcactggagactttctggagatggagtctcgctctgttgcccaggctggcgagtgcaatggcgcgatcttggctcactgcagcctccacctcctgggttcaagcgattctcctgcctcagcctcccgagtagctgggattacaggtgggtgtcaccacacccagctcagtattgtatttttagcagagatggggtttcaccattttgcccaggctggtttggaactcctgacttcaaattacccacctgcctcagcctcccaaagtgctggcattacaggcgctcgaggctttctgatgtggctgctgctgctcagaaggccttgtccttaaccacctccttgcctgccctggaggcttgtgcctctaggccccaccccctgtggagtcctgctggctttctccatccctatctgaatcctccctgctgtgtggcctcccctggtctcatccgtaacacagcccagcttagtgggcctctgttcctgcgggtggccagcctgtctgtgtggctgggctggggaggccacgtctggtatctgaatgctatcggtgggttggggtggaggaaccaggagagggctggagggagggagatggtctcagccccacagagtttggagtcctcagtgtgctgagcaaacgtggagacaccatttccctcctctagacctcatcttggagagagagatgttggatggggccatctattccagctttattcacacaaatcatgtctgttggcctggaaattggaaaaccagttaaaccaaaaacatgatattaagaaaacaggcaggctcaccatagtaaaaatgctgaaagccaaagacaaaattgggagaacaaaagaaaagcgtcttgtcacatacagaaggtccctgataaagttagtagctgccctcatcagaaaccaggcccaggcagtggggacacatccagagtgctgaaagaacctcccccaggtcatcctatccccaagagtgatgcccggcagcattcccagctcagggctaatggttcacggaagccaggaatcaaactgcctgggttccagtcccagctctgccagttatgcccagctgtggggacttgggcagctcgtttagtagcaccgtgcctcagtttcccatatgtaaaaggccattttgagtgcctttcacagccctgcataaggcaggtgtctcagtgttcactgctgtctctccagctcttagtccagtagctgcatggtgagtgagcgtagggcgcaccctggaaggctgccaagcccaaagttgtgcagagcgctggggactccagactccccacagcagcagagactcgggactgaggcatcctctgttcacaggacatgctggcatctactgggtcagggctctgctgctcggtggctgtgcaaccttgggcaagttcctcaacctctctgtgtcttcgtaccctcatctgtaacatgcgtgtcgatagaccctactactcagggttgatgagaagattaaatgtgcaaaacctgcttgactgtgcccacaaatcctgattgtaggaataaattaatgactttttataaatattttgatcagatggactcatgatcacagatgt

SEQ ID NO: 11143 - protein, 106 aa, Homo sapiens
MDGRAELLQFPDQEGSGPAPPRAPEPPAPRAIKSAGFLTCLDWASLFETLWGALALCVVIQAMSSKLCMSPCPSGGDVNGWPCRRGGVAALSLVRARVTVFTEKVC

SEQ ID NO: 11144 - DNA, 3896 bp, Homo sapiens
ctttccgtctcaggtcgccgctgcgaagggagccgccgccatgtctgcgcatctgcaatggatggtcgtgcggaactgctccagtttcctgatcaagaaggaagcggacccgccccaccaagagctcctgagccccctgcccccagagcaataaagtcagctggctttctcacctgcctcgactgggcctccctttttgaaacgctctggggagctctggccctgtgtgttgtcattcaggccatgtcatcaaaactctgcatgtcaccttgtccatctggaggtgatgtcaatggctggccatgcaggaggggtggggtagctgccttgtccctggtgagggcaagggtcactgtcttcacagaaaaagtttgctgacttgtgattgagacctactgtcccattgtgaggtggcctgaagaatcccagctggggcagtggcttccattcagaagaagaaaggccttttctagcccagaagggtgcaggctgagggctgggccctgggccctggtgctgtagcacggtttggggacttggggtgttcccaagacctgggggacgacagacatcacgggaggaagatgagatgacttttgcatccagggagtgggtgcagccacatttggaggggatgggctttacttgatgcaacctcatctctgagatgggcaacttggtgggtggtggcttataactgtaagggagatggcagccccagggtacagccagcaggcattgagcagccttagcattgtccccctactcccgtcctccaggtgtccccatccctcccctgtctctttgagctggctcttgtcacttaggtctcatctcagtggccgctcctgggccaccctgtcacccaagctttcctgattgcccagccctcttgtttcctttggcctgtttgctccctagtgtttattacagcttgtgaggccaggagtttgagaccatcctaggcaacataatgagacaccgtctctaaaataaaattagctgggtgtggtggtgcaccgcctgtggtcccagctcctcagaggttgagtagaggctgaggtgagcggagcacttgagccaagagtatgaggctgcagtgagcccatgagccccaccactacactccagcctggaagacaccatgacacacagtgaggcctggatggggaaagagtcctgctgttgatcctcacatgtttcctgggcacctaactctgtcagccactgccagggaccaaggatccagcatccatggcacccctggttcctgccatcctggggtacccgattcaaagaaggactctgctccctgtctgagaccacccccggctctgactgagagtaaggggactgtcagggcctcgacttgccattggttggggtcgtacggggctgggagccctgcgttttgaggcagaccactgcccttccgacctcagtcctgtctgctccagtcttgcccagctcgaaggagagcagatctgaccacttgccagcccctgtctgctgtgaattaccatttcctttgtccttcccttagttgggtctattagctcagattgagaggtgttgccttaaaactgagttgggtgacttggtacctgctcaggaccccccgcactgtcccaatcccactcaggcccacctccagctggcctcactccgctggtgacttcgtacctgctcaggagcccccactgtcccagtcccactcaggcccatctctggctggcctcactgcgctgggactccgccttcataaggagagctcactgctcacgttagtagatggccccttctcgtgaggcctctcccctggcacctgcttcagttgtcctccacagcactgatttgcagcccacaagctggcaggtttatctgtctcatgtttgtcttgtgctggtgggcaaggggtttgtctagcacaccagcatataatgagatgcttgatgaatggtgcatattgaatgtataaagcccaccggtcctgagagtttgctcactggagactttctggagatggagtctcgctctgttgcccaggctggcgagtgcaatggcgcgatcttggctcactgcagcctccacctcctgggttcaagcgattctcctgcctcagcctcccgagtagctgggattacaggtgggtgtcaccacacccagctcagtattgtatttttagcagagatggggtttcaccattttgcccaggctggtttggaactcctgacttcaaattacccacctgcctcagcctcccaaagtgctggcattacaggcgctcgaggctttctgatgtggctgctgctgctcagaaggccttgtccttaaccacctccttgcctgccctggaggcttgtgcctctaggccccaccccctgtggagtcctgctggctttctccatccctatctgaatcctccctgctgtgtggcctcccctggtctcatccgtaacacagcccagcttagtgggcctctgttcctgcgggtggccagcctgtctgtgtggctgggctggggaggccacgtctggtatctgaatgctatcggtgggttggggtggaggaaccaggagagggctggagggagggagatggtctcagccccacagagtttggagtcctcagtgtgctgagcaaacgtggagacaccatttccctcctctagacctcatcttggagagagagatgttggatggggccatctattccagctttattcacacaaatcatgtctgttggcctggaaattggaaaaccagttaaaccaaaaacatgatattaagaaaacaggcaggctcaccatagtaaaaatgctgaaagccaaagacaaaattgggagaacaaaagaaaagcgtcttgtcacatacagaaggtccctgataaagttagtagctgccctcatcagaaaccaggcccaggcagtggggacacatccagagtgctgaaagaacctcccccaggtcatcctatccccaagagtgatgcccggcagcattcccagctcagggctaatggttcacggaagccaggaatcaaactgcctgggttccagtcccagctctgccagttatgcccagctgtggggacttgggcagctcgtttagtagcaccgtgcctcagtttcccatatgtaaaaggccattttgagtgcctttcacagccctgcataaggcaggtgtctcagtgttcactgctgtctctccagctcttagtccagtagctgcatggtgagtgagcgtagggcgcaccctggaaggctgccaagcccaaagttgtgcagagcgctggggactccagactccccacagcagcagagactcgggactgaggcatcctctgttcacaggacatgctggcatctactgggtcagggctctgctgctcggtggctgtgcaaccttgggcaagttcctcaacctctctgtgtcttcgtaccctcatctgtaacatgcgtgtcgatagaccctactactcagggttgatgagaagattaaatgtgcaaaacctgcttgactgtgcccacaaatcctgattgtaggaataaattaatgactttttataaatattttgatcagatggactcatgatcacagatgtcttcacatgcctatgactaatttgtacacaaactaatgctcgtgtttcccaagcacctggaagacatgccagatccatgtgcagtaatgcctggtggctccaggtctgccccgccgtcctgtggggctgtgagctttcccagcctcctgcccgtgtttgtgaatatcattctgtcctcagctgcatttccagcccaggctgtttggcgctgcccaggaatggtatcaattcccctgtttctcttgtagccagttactagaataaaatcatctactttaaaatctttcattatg

SEQ ID NO: 11145 - protein, 106 aa, Homo sapiens; identical to SEQ ID NO: 11143

SEQ ID NO: 11146 - DNA, 856 bp, Homo sapiens
gggaggtgagcgttcgtcttcctcgcgtggtcgccatctccggcccgccgcgcactccctctcagtcctctgcctgccttctccccttgcgcctcaagggtcattggcggaccccaacccctccccgtgaagtcgttgtgaattttcaagttattttcccctcactctcattcgccgcagctagtctcggctgcctgaattcggtcccgccgccttaggtcactcagtcccgcctgacaagagttctaggtcgctgtctgccctcaggggtctcccattcacccaagttcccagtcgctctcttcctctgctgtccgagcgtggcccgtggcctaacgctgctttagttctctgtgtctgacgctttccctgtgcccgtttccccgcagccgccgccatgtctgcgcatctgcaatggatggtcgtgcggaactgctccagtttcctgatcaagaggaataagcagacctacagcactgagcccaataacttgaaggcccgcaattccttccgctacaacggactgattcaccgcaagactgtgggcgtggagccggcagccgacggcaaaggtgtcgtggtggtcattaagcggagatccggccagcggaagcctgccacctcctatgtgcggaccaccatcaacaagaatgctcgcgccacgctcagcagcatcagacacatgatccgcaagaacaagtaccgccccgacctgcgcatggcagccatccgcagggccagcgccatcctgcgcagccagaagcctgtgatggtgaagaggaagcggacccgccccaccaagagctcctgagccccctgcccccagagcaataaagtcagctggctttctcacctg

SEQ ID NO: 11147 - protein, 137 aa, Homo sapiens [sequence omitted]

SEQ ID NO: 11148 - DNA, 4283 bp, Homo sapiens
gggaggtgagcgttcgtcttcctcgcgtggtcgccatctccggcccgccgcgcactccctctcagtcctctgcctgccttctccccttgcgcctcaagggtcattggcggaccccaacccctccccgtgaagtcgttgtgaattttcaagttattttcccctcactctcattcgccgcagctagtctcggctgcctgaattcggtcccgccgccttaggtcactcagtcccgcctgacaagagttctaggtcgctgtctgccctcaggggtctcccattcacccaagttcccagtcgctctcttcctctgctgtccgagcgtggcccgtggcctaacgctgctttagttctctgtgtctgacgctttccctgtgcccgtttccccgcagccgccgccatgtctgcgcatctgcaatggatggtcgtgcggaactgctccagtttcctgatcaagaggaataagcagacctacagcactgagcccaataacttgaaggcccgcaattccttccgctacaacggactgattcaccgcaagactgtgggcgtggagccggcagccgacggcaaaggtgtcgtggtggtcattaagcggagatccggccagcggaagcctgccacctcctatgtgcggaccaccatcaacaagaatgctcgcgccacgctcagcagcatcagacacatgatccgcaagaacaagtaccgccccgacctgcgcatggcagccatccgcagggccagcgccatcctgcgcagccagaagcctgtgatggtgaagaggaagcggacccgccccaccaagagctcctgagccccctgcccccagagcaataaagtcagctggctttctcacctgcctcgactgggcctccctttttgaaacgctctggggagctctggccctgtgtgttgtcattcaggccatgtcatcaaaactctgcatgtcaccttgtccatctggaggtgatgtcaatggctggccatgcaggaggggtggggtagctgccttgtccctggtgagggcaagggtcactgtcttcacagaaaaagtttgctgacttgtgattgagacctactgtcccattgtgaggtggcctgaagaatcccagctggggcagtggcttccattcagaagaagaaaggccttttctagcccagaagggtgcaggctgagggctgggccctgggccctggtgctgtagcacggtttggggacttggggtgttcccaagacctgggggacgacagacatcacgggaggaagatgagatgacttttgcatccagggagtgggtgcagccacatttggaggggatgggctttacttgatgcaacctcatctctgagatgggcaacttggtgggtggtggcttataactgtaagggagatggcagccccagggtacagccagcaggcattgagcagccttagcattgtccccctactcccgtcctccaggtgtccccatccctcccctgtctctttgagctggctcttgtcacttaggtctcatctcagtggccgctcctgggccaccctgtcacccaagctttcctgattgcccagccctcttgtttcctttggcctgtttgctccctagtgtttattacagcttgtgaggccaggagtttgagaccatcctaggcaacataatgagacaccgtctctaaaataaaattagctgggtgtggtggtgcaccgcctgtggtcccagctcctcagaggttgagtagaggctgaggtgagcggagcacttgagccaagagtatgaggctgcagtgagcccatgagccccaccactacactccagcctggaagacaccatgacacacagtgaggcctggatggggaaagagtcctgctgttgatcctcacatgtttcctgggcacctaactctgtcagccactgccagggaccaaggatccagcatccatggcacccctggttcctgccatcctggggtacccgattcaaagaaggactctgctccctgtctgagaccacccccggctctgactgagagtaaggggactgtcagggcctcgacttgccattggttggggtcgtacggggctgggagccctgcgttttgaggcagaccactgcccttccgacctcagtcctgtctgctccagtcttgcccagctcgaaggagagcagatctgaccacttgccagcccctgtctgctgtgaattaccatttcctttgtccttcccttagttgggtctattagctcagattgagaggtgttgccttaaaactgagttgggtgacttggtacctgctcaggaccccccgcactgtcccaatcccactcaggcccacctccagctggcctcactccgctggtgacttcgtacctgctcaggagcccccactgtcccagtcccactcaggcccatctctggctggcctcactgcgctgggactccgccttcataaggagagctcactgctcacgttagtagatggccccttctcgtgaggcctctcccctggcacctgcttcagttgtcctccacagcactgatttgcagcccacaagctggcaggtttatctgtctcatgtttgtcttgtgctggtgggcaaggggtttgtctagcacaccagcatataatgagatgcttgatgaatggtgcatattgaatgtataaagcccaccggtcctgagagtttgctcactggagactttctggagatggagtctcgctctgttgcccaggctggcgagtgcaatggcgcgatcttggctcactgcagcctccacctcctgggttcaagcgattctcctgcctcagcctcccgagtagctgggattacaggtgggtgtcaccacacccagctcagtattgtatttttagcagagatggggtttcaccattttgcccaggctggtttggaactcctgacttcaaattacccacctgcctcagcctcccaaagtgctggcattacaggcgctcgaggctttctgatgtggctgctgctgctcagaaggccttgtccttaaccacctccttgcctgccctggaggcttgtgcctctaggccccaccccctgtggagtcctgctggctttctccatccctatctgaatcctccctgctgtgtggcctcccctggtctcatccgtaacacagcccagcttagtgggcctctgttcctgcgggtggccagcctgtctgtgtggctgggctggggaggccacgtctggtatctgaatgctatcggtgggttggggtggaggaaccaggagagggctggagggagggagatggtctcagccccacagagtttggagtcctcagtgtgctgagcaaacgtggagacaccatttccctcctctagacctcatcttggagagagagatgttggatggggccatctattccagctttattcacacaaatcatgtctgttggcctggaaattggaaaaccagttaaaccaaaaacatgatattaagaaaacaggcaggctcaccatagtaaaaatgctgaaagccaaagacaaaattgggagaacaaaagaaaagcgtcttgtcacatacagaaggtccctgataaagttagtagctgccctcatcagaaaccaggcccaggcagtggggacacatccagagtgctgaaagaacctcccccaggtcatcctatccccaagagtgatgcccggcagcattcccagctcagggctaatggttcacggaagccaggaatcaaactgcctgggttccagtcccagctctgccagttatgcccagctgtggggacttgggcagctcgtttagtagcaccgtgcctcagtttcccatatgtaaaaggccattttgagtgcctttcacagccctgcataaggcaggtgtctcagtgttcactgctgtctctccagctcttagtccagtagctgcatggtgagtgagcgtagggcgcaccctggaaggctgccaagcccaaagttgtgcagagcgctggggactccagactccccacagcagcagagactcgggactgaggcatcctctgttcacaggacatgctggcatctactgggtcagggctctgctgctcggtggctgtgcaaccttgggcaagttcctcaacctctctgtgtcttcgtaccctcatctgtaacatgcgtgtcgatagaccctactactcagggttgatgagaagattaaatgtgcaaaacctgcttgactgtgcccacaaatcctgattgtaggaataaattaatgactttttataaatattttgatcagatggactcatgatcacagatgt

SEQ ID NO: 11149 - protein, 137 aa, Homo sapiens [sequence omitted]

SEQ ID NO: 11150 - DNA, 4576 bp, Homo sapiens
gggaggtgagcgttcgtcttcctcgcgtggtcgccatctccggcccgccgcgcactccctctcagtcctctgcctgccttctccccttgcgcctcaagggtcattggcggaccccaacccctccccgtgaagtcgttgtgaattttcaagttattttcccctcactctcattcgccgcagctagtctcggctgcctgaattcggtcccgccgccttaggtcactcagtcccgcctgacaagagttctaggtcgctgtctgccctcaggggtctcccattcacccaagttcccagtcgctctcttcctctgctgtccgagcgtggcccgtggcctaacgctgctttagttctctgtgtctgacgctttccctgtgcccgtttccccgcagccgccgccatgtctgcgcatctgcaatggatggtcgtgcggaactgctccagtttcctgatcaagaggaataagcagacctacagcactgagcccaataacttgaaggcccgcaattccttccgctacaacggactgattcaccgcaagactgtgggcgtggagccggcagccgacggcaaaggtgtcgtggtggtcattaagcggagatccggccagcggaagcctgccacctcctatgtgcggaccaccatcaacaagaatgctcgcgccacgctcagcagcatcagacacatgatccgcaagaacaagtaccgccccgacctgcgcatggcagccatccgcagggccagcgccatcctgcgcagccagaagcctgtgatggtgaagaggaagcggacccgccccaccaagagctcctgagccccctgcccccagagcaataaagtcagctggctttctcacctgcctcgactgggcctccctttttgaaacgctctggggagctctggccctgtgtgttgtcattcaggccatgtcatcaaaactctgcatgtcaccttgtccatctggaggtgatgtcaatggctggccatgcaggaggggtggggtagctgccttgtccctggtgagggcaagggtcactgtcttcacagaaaaagtttgctgacttgtgattgagacctactgtcccattgtgaggtggcctgaagaatcccagctggggcagtggcttccattcagaagaagaaaggccttttctagcccagaagggtgcaggctgagggctgggccctgggccctggtgctgtagcacggtttggggacttggggtgttcccaagacctgggggacgacagacatcacgggaggaagatgagatgacttttgcatccagggagtgggtgcagccacatttggaggggatgggctttacttgatgcaacctcatctctgagatgggcaacttggtgggtggtggcttataactgtaagggagatggcagccccagggtacagccagcaggcattgagcagccttagcattgtccccctactcccgtcctccaggtgtccccatccctcccctgtctctttgagctggctcttgtcacttaggtctcatctcagtggccgctcctgggccaccctgtcacccaagctttcctgattgcccagccctcttgtttcctttggcctgtttgctccctagtgtttattacagcttgtgaggccaggagtttgagaccatcctaggcaacataatgagacaccgtctctaaaataaaattagctgggtgtggtggtgcaccgcctgtggtcccagctcctcagaggttgagtagaggctgaggtgagcggagcacttgagccaagagtatgaggctgcagtgagcccatgagccccaccactacactccagcctggaagacaccatgacacacagtgaggcctggatggggaaagagtcctgctgttgatcctcacatgtttcctgggcacctaactctgtcagccactgccagggaccaaggatccagcatccatggcacccctggttcctgccatcctggggtacccgattcaaagaaggactctgctccctgtctgagaccacccccggctctgactgagagtaaggggactgtcagggcctcgacttgccattggttggggtcgtacggggctgggagccctgcgttttgaggcagaccactgcccttccgacctcagtcctgtctgctccagtcttgcccagctcgaaggagagcagatctgaccacttgccagcccctgtctgctgtgaattaccatttcctttgtccttcccttagttgggtctattagctcagattgagaggtgttgccttaaaactgagttgggtgacttggtacctgctcaggaccccccgcactgtcccaatcccactcaggcccacctccagctggcctcactccgctggtgacttcgtacctgctcaggagcccccactgtcccagtcccactcaggcccatctctggctggcctcactgcgctgggactccgccttcataaggagagctcactgctcacgttagtagatggccccttctcgtgaggcctctcccctggcacctgcttcagttgtcctccacagcactgatttgcagcccacaagctggcaggtttatctgtctcatgtttgtcttgtgctggtgggcaaggggtttgtctagcacaccagcatataatgagatgcttgatgaatggtgcatattgaatgtataaagcccaccggtcctgagagtttgctcactggagactttctggagatggagtctcgctctgttgcccaggctggcgagtgcaatggcgcgatcttggctcactgcagcctccacctcctgggttcaagcgattctcctgcctcagcctcccgagtagctgggattacaggtgggtgtcaccacacccagctcagtattgtatttttagcagagatggggtttcaccattttgcccaggctggtttggaactcctgacttcaaattacccacctgcctcagcctcccaaagtgctggcattacaggcgctcgaggctttctgatgtggctgctgctgctcagaaggccttgtccttaaccacctccttgcctgccctggaggcttgtgcctctaggccccaccccctgtggagtcctgctggctttctccatccctatctgaatcctccctgctgtgtggcctcccctggtctcatccgtaacacagcccagcttagtgggcctctgttcctgcgggtggccagcctgtctgtgtggctgggctggggaggccacgtctggtatctgaatgctatcggtgggttggggtggaggaaccaggagagggctggagggagggagatggtctcagccccacagagtttggagtcctcagtgtgctgagcaaacgtggagacaccatttccctcctctagacctcatcttggagagagagatgttggatggggccatctattccagctttattcacacaaatcatgtctgttggcctggaaattggaaaaccagttaaaccaaaaacatgatattaagaaaacaggcaggctcaccatagtaaaaatgctgaaagccaaagacaaaattgggagaacaaaagaaaagcgtcttgtcacatacagaaggtccctgataaagttagtagctgccctcatcagaaaccaggcccaggcagtggggacacatccagagtgctgaaagaacctcccccaggtcatcctatccccaagagtgatgcccggcagcattcccagctcagggctaatggttcacggaagccaggaatcaaactgcctgggttccagtcccagctctgccagttatgcccagctgtggggacttgggcagctcgtttagtagcaccgtgcctcagtttcccatatgtaaaaggccattttgagtgcctttcacagccctgcataaggcaggtgtctcagtgttcactgctgtctctccagctcttagtccagtagctgcatggtgagtgagcgtagggcgcaccctggaaggctgccaagcccaaagttgtgcagagcgctggggactccagactccccacagcagcagagactcgggactgaggcatcctctgttcacaggacatgctggcatctactgggtcagggctctgctgctcggtggctgtgcaaccttgggcaagttcctcaacctctctgtgtcttcgtaccctcatctgtaacatgcgtgtcgatagaccctactactcagggttgatgagaagattaaatgtgcaaaacctgcttgactgtgcccacaaatcctgattgtaggaataaattaatgactttttataaatattttgatcagatggactcatgatcacagatgtcttcacatgcctatgactaatttgtacacaaactaatgctcgtgtttcccaagcacctggaagacatgccagatccatgtgcagtaatgcctggtggctccaggtctgccccgccgtcctgtggggctgtgagctttcccagcctcctgcccgtgtttgtgaatatcattctgtcctcagctgcatttccagcccaggctgtttggcgctgcccaggaatggtatcaattcccctgtttctcttgtagccagttactagaataaaatcatctactttaaaatctttcattatg

SEQ ID NO: 11151 - protein, 137 aa, Homo sapiens [sequence omitted]

SEQ ID NO: 11152 - DNA, 5619 bp, Homo sapiens
agccgccgccatgtctgcgcatctgcaatggatggtcgtgcggaactgctccagtttcctgatcaagaggaataagcagacctacagcactgagcccaataacttgaaggcccgcaattccttccgctacaacggactgattcaccgcaagactgtgggcgtggagccggcagccgacggcaaaggtgtcgtggtggtcattaagcggagatccggtgagttttgtctggtttgggccagagagcggcccctttcccgggtctgggagctgtgattttttactgtcaggcaggaagagcggtaactgccatcgcggcgggcatccctggcgccagggtgttggtctgggtaccggcttccctctcggccgacttgtcagctctgtgagccgcgcgcgtctgagcccgtgtcctcacctgtaaagtggagaaatgaaaaaggacctgaacttcctcggtggttgttgagagttaaggcacggggttgatgttttcagatgaaattctcaaagcaagtcagggtggggatggatggtttcatcccacaggtgggaagattgaggcacaacaggggaggggccctcgctaccacacttaggaggggacaggctgggttggttgcagccatttgattcccattttgcctgtgtaggttagagaagaggtcttggggaccccactccatacattgtgctgtcaggtgcaggcctttttggggattccctgaatgttcgtgtgagtcgggggtctctaatggaggagtccagcttcacatgtgttcttgacagggctgtattttctttttagagtgagtttttctcaggtccttgattggaactgcctcagagccaagggtccttttactcagtggcagcaacaaacgcagtctgttggctagtgatcctcctgtctcagggacacgtagtccagggagcagccaattgcttggcacttggggaccccgttctggggagtcctgaaagctttcacctcttggattgccgaatacatgggtggcccttcctagactaagggactggcctgagtgaggctgggcctctcagccaagctgatgttgaaccactgctgtggggatgggcctggggttcctgggaagctgttcatacccattgccaggagcgtgggctctggctggacctggatcagatcctaactgaagcggcagctttctggcatgagaaaggagtgttttcatggtggacagaattgggctatgagtgtggcagaagctgtgtcctcagtactccgtgatgacgagtgagcctctgtgaaatggacaggtgggaaaacagctacctgctggcctgcccaggcacccgccacgggcccacgctgctcagcttctcaatgtgagactgtccacacctgcgaggtgtgctaaaggtgcaggttaggtggactgaccccaggacctccctgacccccaaccaggccagcggaagcctgccacctcctatgtgcggaccaccatcaacaagaatgctcgcgccacgctcagcagcatcagacacatgatccgcaagaacaagtaccgccccgacctgcgcatggtgagctggggtttggggatcaggcttggggagactggccagtgctgtggggaagggcctcccactactggttgcaatatgggctggagagggatggattcttgctttcagcctactccccacacccagcattggcctagggggcggcttgtggagtgtatgggctgagccttgctctgctcccccgcccccaggcagccatccgcagggccagcgccatcctgcgcagccagaagcctgtgatggtgaagaggaagcggacccgccccaccaagagctcctgagccccctgcccccagagcaataaagtcagctggctttctcacctgcctcgactgggcctccctttttgaaacgctctggggagctctggccctgtgtgttgtcattcaggccatgtcatcaaaactctgcatgtcaccttgtccatctggaggtgatgtcaatggctggccatgcaggaggggtggggtagctgccttgtccctggtgagggcaagggtcactgtcttcacagaaaaagtttgctgacttgtgattgagacctactgtcccattgtgaggtggcctgaagaatcccagctggggcagtggcttccattcagaagaagaaaggccttttctagcccagaagggtgcaggctgagggctgggccctgggccctggtgctgtagcacggtttggggacttggggtgttcccaagacctgggggacgacagacatcacgggaggaagatgagatgacttttgcatccagggagtgggtgcagccacatttggaggggatgggctttacttgatgcaacctcatctctgagatgggcaacttggtgggtggtggcttataactgtaagggagatggcagccccagggtacagccagcaggcattgagcagccttagcattgtccccctactcccgtcctccaggtgtccccatccctcccctgtctctttgagctggctcttgtcacttaggtctcatctcagtggccgctcctgggccaccctgtcacccaagctttcctgattgcccagccctcttgtttcctttggcctgtttgctccctagtgtttattacagcttgtgaggccaggagtttgagaccatcctaggcaacataatgagacaccgtctctaaaataaaattagctgggtgtggtggtgcaccgcctgtggtcccagctcctcagaggttgagtagaggctgaggtgagcggagcacttgagccaagagtatgaggctgcagtgagcccatgagccccaccactacactccagcctggaagacaccatgacacacagtgaggcctggatggggaaagagtcctgctgttgatcctcacatgtttcctgggcacctaactctgtcagccactgccagggaccaaggatccagcatccatggcacccctggttcctgccatcctggggtacccgattcaaagaaggactctgctccctgtctgagaccacccccggctctgactgagagtaaggggactgtcagggcctcgacttgccattggttggggtcgtacggggctgggagccctgcgttttgaggcagaccactgcccttccgacctcagtcctgtctgctccagtcttgcccagctcgaaggagagcagatctgaccacttgccagcccctgtctgctgtgaattaccatttcctttgtccttcccttagttgggtctattagctcagattgagaggtgttgccttaaaactgagttgggtgacttggtacctgctcaggaccccccgcactgtcccaatcccactcaggcccacctccagctggcctcactccgctggtgacttcgtacctgctcaggagcccccactgtcccagtcccactcaggcccatctctggctggcctcactgcgctgggactccgccttcataaggagagctcactgctcacgttagtagatggccccttctcgtgaggcctctcccctggcacctgcttcagttgtcctccacagcactgatttgcagcccacaagctggcaggtttatctgtctcatgtttgtcttgtgctggtgggcaaggggtttgtctagcacaccagcatataatgagatgcttgatgaatggtgcatattgaatgtataaagcccaccggtcctgagagtttgctcactggagactttctggagatggagtctcgctctgttgcccaggctggcgagtgcaatggcgcgatcttggctcactgcagcctccacctcctgggttcaagcgattctcctgcctcagcctcccgagtagctgggattacaggtgggtgtcaccacacccagctcagtattgtatttttagcagagatggggtttcaccattttgcccaggctggtttggaactcctgacttcaaattacccacctgcctcagcctcccaaagtgctggcattacaggcgctcgaggctttctgatgtggctgctgctgctcagaaggccttgtccttaaccacctccttgcctgccctggaggcttgtgcctctaggccccaccccctgtggagtcctgctggctttctccatccctatctgaatcctccctgctgtgtggcctcccctggtctcatccgtaacacagcccagcttagtgggcctctgttcctgcgggtggccagcctgtctgtgtggctgggctggggaggccacgtctggtatctgaatgctatcggtgggttggggtggaggaaccaggagagggctggagggagggagatggtctcagccccacagagtttggagtcctcagtgtgctgagcaaacgtggagacaccatttccctcctctagacctcatcttggagagagagatgttggatggggccatctattccagctttattcacacaaatcatgtctgttggcctggaaattggaaaaccagttaaaccaaaaacatgatattaagaaaacaggcaggctcaccatagtaaaaatgctgaaagccaaagacaaaattgggagaacaaaagaaaagcgtcttgtcacatacagaaggtccctgataaagttagtagctgccctcatcagaaaccaggcccaggcagtggggacacatccagagtgctgaaagaacctcccccaggtcatcctatccccaagagtgatgcccggcagcattcccagctcagggctaatggttcacggaagccaggaatcaaactgcctgggttccagtcccagctctgccagttatgcccagctgtggggacttgggcagctcgtttagtagcaccgtgcctcagtttcccatatgtaaaaggccattttgagtgcctttcacagccctgcataaggcaggtgtctcagtgttcactgctgtctctccagctcttagtccagtagctgcatggtgagtgagcgtagggcgcaccctggaaggctgccaagcccaaagttgtgcagagcgctggggactccagactccccacagcagcagagactcgggactgaggcatcctctgttcacaggacatgctggcatctactgggtcagggctctgctgctcggtggctgtgcaaccttgggcaagttcctcaacctctctgtgtcttcgtaccctcatctgtaacatgcgtgtcgatagaccctactactcagggttgatgagaagattaaatgtgcaaaacctgcttgactgtgcccacaaatcctgattgtaggaataaattaatgactttttataaatattttgatcagatggactcatgatcacagatgtcttcacatgcctatgactaatttgtacacaaactaatgctcgtgtttcccaagcacctggaagacatgccagatccatgtgcagtaatgcctggtggctccaggtctgccccgccgtcctgtggggctgtgagctttcccagcctcctgcccgtgtttgtgaatatcattctgtcctcagctgcatttccagcccaggctgtttggcgctgcccaggaatggtatcaattcccctgtttctcttgtagccagttactagaataaaatcatctactttaaaatctttcattatg

SEQ ID NO: 11153 - protein, 87 aa, Homo sapiens; identical to SEQ ID NO: 11133

SEQ ID NO: 11154 - DNA, 1550 bp, Homo sapiens
ggcctcactccgctggtgacttcgtacctgctcaggagcccccactgtcccagtcccactcaggcccatctctggctggcctcactgcgctgggactccgccttcataaggagagctcactgctcacgttagtagatggccccttctcgtgaggcctctcccctggcacctgcttcagttgtcctccacagcactgatttgcagcccacaagctggcaggtttatctgtctcatgtttgtcttgtgctggtgggcaaggggtttgtctagcacaccagcatataatgagatgcttgatgaatggtgcatattgaatgtataaagcccaccggtcctgagagtttgctcactggagactttctggagatggagtctcgctctgttgcccaggctggcgagtgcaatggcgcgatcttggctcactgcagcctccacctcctgggttcaagcgattctcctgcctcagcctcccgagtagctgggattacaggtgggtgtcaccacacccagctcagtattgtatttttagcagagatggggtttcaccattttgcccaggctggtttggaactcctgacttcaaattacccacctgcctcagcctcccaaagtgctggcattacaggcgctcgaggctttctgatgtggctgctgctgctcagaaggccttgtccttaaccacctccttgcctgccctggaggcttgtgcctctaggccccaccccctgtggagtcctgctggctttctccatccctatctgaatcctccctgctgtgtggcctcccctggtctcatccgtaacacagcccagcttagtgggcctctgttcctgcgggtggccagcctgtctgtgtggctgggctggggaggccacgtctggtatctgaatgctatcggtgggttggggtggaggaaccaggagagggctggagggagggagatggtctcagctccagactccccacagcagcagagactcgggactgaggcatcctctgttcacaggacatgctggcatctactgggtcagggctctgctgctcggtggctgtgcaaccttgggcaagttcctcaacctctctgtgtcttcgtaccctcatctgtaacatgcgtgtcgatagaccctactactcagggttgatgagaagattaaatgtgcaaaacctgcttgactgtgcccacaaatcctgattgtaggaataaattaatgactttttataaatattttgatcagatggactcatgatcacagatgtcttcacatgcctatgactaatttgtacacaaactaatgctcgtgtttcccaagcacctggaagacatgccagatccatgtgcagtaatgcctggtggctccaggtctgccccgccgtcctgtggggctgtgagctttcccagcctcctgcccgtgtttgtgaatatcattctgtcctcagctgcatttccagcccaggctgtttggcgctgcccaggaatggtatcaattcccctgtttctcttgtagccagttactagaataaaatcatctactttaaaatctttcattatg

SEQ ID NO: 11155 - protein, 72 aa, Homo sapiens
MLSVGWGGGTRRGLEGGRWSQLQTPHSSRDSGLRHPLFTGHAGIYWVRALLLGGCATLGKFLNLSVSSYPHL

SEQ ID NO: 11156 - DNA, 2707 bp, Homo sapiens
cacagcagcccccgcgcccgccgtgccgccgccgggacgtggggcccttgggccgtcgggccgcctggggagcgccagcccggatccggctgcccagatgcgggcgccactctgcctgctcctgctcgtcgcccacgccgtggacatgctcgccctgaaccgaaggaagaagcaagtgggcactggcctggggggcaactgcacaggctgtatcatctgctcagaggagaacggctgttccacctgccagcagaggctcttcctgttcatccgccgggaaggcatccgccagtacggcaagtgcctgcacgactgtccccctgggtacttcggcatccgcggccaggaggtcaacaggtgcaaaaaatgtggggccacttgtgagagctgcttcagccaggacttctgcatccggtgcaagaggcagttttacttgtacaaggggaagtgtctgcccacctgcccgccgggcactttggcccaccagaacacacgggagtgccagggggagtgtgaactgggtccctggggcggctggagcccctgcacacacaatggaaagacctgcggctcggcttggggcctggagagccgggtacgagaggctggccgggctgggcatgaggaggcagccacctgccaggtgctttctgagtcaaggaaatgtcccatccagaggccctgcccaggagagaggagccccggccagaagaagggcaggaaggaccggcgcccacgcaaggacaggaagctggaccgcaggctggacgtgaggccgcgccagcccggcctgcagccctgaccgccggctctcccgactctctggtcctagtcctcggcccctgcacacctcctcctgctccttctcctcctctcctcttactctttctcctctgtcttctccatttgtcctctctttctttccacccttctatcatttttctgtcagtctaccttccctttctttttcttttttatttcctttatttcttccacctccattctcctctcctttctccctccctccttcccttccttcctcttctttctcacttatcttttatctttccttttctttcttcctgtgtttcttcctgtccttcaccgcatccttctctctctccctcctcttgtctccctctcacacacactttaagagggaccatgagcctgtgccctcccctgcagctttctctatctacaacttaaagaaagcaaacatcttttcccaggcctttccctgaccccatctttgcagagaaagggtttccagagggcaaagctgggacacagcacaggtgaatcctgaaggccctgcttctgctctgggggaggctccaggaccctgagctgtgagcacctggttctctggacagtccccagaggccatttccacagccttcagccaccagccaccccgaggagctggctggacaaggctccagggcttccagaggcctggcttggacacctcccccagctggccgtggagggtcacaacctggcctctgggtgggcagccagccctggagggcatcctctgcaagctgcctgccaccctcatcggcactcccccacaggcctccctctcatgggttccatgcccctttttcccaagccggatcaggtgagctgtcactgctgggggatccacctgcccagcccagaagaggccactgaaacggaaaggaaagctgagattatccagcagctctgttccccacctcagcgcttcctgcccatgtggggaaacaggtctgagaaggaaggggcttgcccagggtcacacaggaagccttcaggctctgcttctgcctgatggctctgctcagcacattcacggtggagaggagaatttgggggtcacttgaggggggaaatgtagggaattgtgggtggggagcaagggaagatccgtgcactcgtccacacccaccaccacactcgctgacacccacccccacacgctgacacccacccccacacttgcccacacccatcaccgcactcgcccacacccaccaccacactgccccacacccaccaccacactcccccacacccaccaccacactcgcccacacccaccaccagtgacttgagcatctgtgcttcgctgtgacgcccctcgccctaggcaggaacgacgctgggaggagtctccaggtcagacccagcttggaagcaagtctgtcctcactgcctatccttctgccatcataacacccccttcctgctctgctccccggaatcctcagaaacgggatttgtatttgccgtgactggttggcctgaacacgtagggctccgtgactgggacaggaatgggcaggagaagcaagagtcggagctccaaggggcccaggggtggcctggggaaggaagatggtcagcaggctgggggagaggctctaggtgatgaaatattacattcccgaccccaagagagcacccaccctcagacctgccctccacctggcagctggggagccctggcctgaacccccccctcccagcaggcccaccctctctctgacttccctgctctcacctccccgagaacagctagagccccctcctccgcctggccaggccaccagcttctcttctgcaaacgtttgtgcctctgaaatgctccgttgttattgtttcaagaccctaacttttttttaaaactttcttaataaagggaaaagaaacttgtaaa

SEQ ID NO: 11157 - protein, 234 aa, Homo sapiens; identical to SEQ ID NO: 1851

SEQ ID NO: 11158 - DNA, 722 bp, Homo sapiens
gcccacagcagcccccgcgcccgccgtgccgccgccgggacgtggggcccttgggccgtcgggccgcctggggagcgccagcccggatccggctgcccagatgcgggcgccactctgcctgctcctgctcgtcgcccacgccgtggacatgctcgccctgaaccgaaggaagaagcaagtgggcactggcctggggggcaactgcacaggctgtatcatctgctcagaggagaacggctgttccacctgccagcagaggctcttcctgttcatccgccgggaaggcatccgccagtacggcaagtgcctgcacgactgtccccctgggtacttcggcatccgcggccaggaggtcaacaggtgcaaaaaatgtggggccacttgtgagagctgcttcagccaggacttctgcatccggtgcaagaggcagttttacttgtacaaggggaagtgtctgcccacctgcccgccgggcactttggcccaccagaacacacgggagtgccaggagaggagccccggccagaagaagggcaggaaggaccggcgcccacgcaaggacaggaagctggaccgcaggctggacgtgaggccgcgccagcccggcctgcagccctgaccgccggctctcccgactctctggtcctagtcctcggcccctgcacacctcctcctgctccttctcctcctctcctcttactctttctcctctgtcttctcca

SEQ ID NO: 11159 - protein, 172 aa, Homo sapiens; identical to SEQ ID NO: 1853

SEQ ID NO: 11160 - DNA, 1289 bp, Homo sapiens
atgcccttcagtgtggcccctgccaccttctctggcaccccataccctctgtgctccaaccgaaccaaagagagctccatctacccctccctcgggcctgatgacctggagcagcctcctactgtcccgatgtggaggagggtgctaaccgcggtgatgtcagcggagcctcagcttccacagaggacaaaatctctacaccactgcttcagagctaggggtaaagacagcagcctcttcctcttgcagcaatatccagactttacaagtagtgtgcttgtggtggtggttgtctctggtctgctcagtttgcctctctcagtgcagaacttctcccttatgagcaacatgaaacgagggcaatcagggtcccagtattctcagactgacaagtctcgggtagagctcctaccctaccaagagcttctggagagcaggggccacatggaagatgctcattcctgcatccccaatgctcagcccaattcctggcacaaagacctgtgttcccagtgcctggtaaagggcatggcgcacacagcaagcctgccggttgaagcagatcatttttactttgctgcgtatccagcctggggcaggagagtggcgacggcgaggagcaactgcacgcgacttgggaccttgccctgccccgcggcccgcgtcaccatggcaactgcaggcagccagcaccgacggcgggaaaacgaggaccggagccgcgttacagccttggccttcgagcagcccagggagagtctctgcgtcctccagcccccgcttcccttcatgtcggaggtcctaagcccgcagcgaagtccgcaaagagctttccccgacgcctacgagaccggaagtgcctgggcccaggtggaggaaggacccgcgtggccgcctccgcgctctccctggggtccgtgccccttccggcgtttctcccgcgtccttcaccatggcaactcgggcgtcgggagcgtgggctgcgagccgagtgggtgggggagccgccgggctctatccgccagcccacgagaagtgacgcaggagcaccattgaaggagaattagacaaactggagtctactgagatgaggctgttgggaatggccctggtaccacatcctgagcagggatggccgatggaatggggagaagactcaggtggggcttgagtgtgtcctctgatgactgaagagccttgggagcaagcatccttcctgctactgtgtgtttgctggttccaatgatacataatttgtgcttttcgtaattaaagtattatcctgtaga

SEQ ID NO: 11161 - protein, 351 aa, Homo sapiens [sequence omitted]

SEQ ID NO: 11162 - DNA, 414 bp, Homo sapiens
gagcagcccagggagagtctctgcgtcctccagcccccgcttcccttcatgtcggaggtcctaagcccgcagcgaagtccgcaaagagctttccccgacgcctacgagaccggaagtgcctgggcccaggtggaggaaggacccgcgtggccgcctccgcgctctccctggggagcaccattgaaggagaattagacaaactggagtctactgagatgaggctgttgggaatggccctggtaccacatcctgagcagggatggccgatggaatggggagaagactcaggtggggcttgagtgtgtcctctgatgactgaagagccttgggagcaagcatccttcctgctactgtgtgtttgctggttccaatgatacataatttgtgcttttcgtaattaaagtattatcctgt

SEQ ID NO: 11163 - protein, 48 aa, Homo sapiens
MSEVLSPQRSPQRAFPDAYETGSAWAQVEEGPAWPPPRSPWGAPLKEN

SEQ ID NO: 11164 - DNA, 545 bp, Homo sapiens
agaggctcgctggcacggagctcccgggctggggcgtccagatctggagaagccgggggccttggtcacactcagagctgacgtccagtgcggcccttgctgaggactcgagcgaacagatctctacccagcccccgccccacgcgcacccagcctgggtcagctcgccctgcccgcagccacgcagctggtggctaagcgcgggctccgggttcaggctgccttgagctctgttggttccctctgaaagtgctgataatgatagcaggagcaccattgaaggagaattagacaaactggagtctactgagatgaggctgttgggaatggccctggtaccacatcctgagcagggatggccgatggaatggggagaagactcagatggggtttcaccatgtcgtccaggctggtcttgaactcctgacctcaggtgatccactcgcctcaacctctcaaagtgctgggattacaggcgtcagccattgcacccgaccatacctagttttgtgcacagtgtctccagtgcttatcccaatgactag

SEQ ID NO: 11165 - protein, 52 aa, Homo sapiens
MGFHHVVQAGLELLTSGDPLASTSQSAGITGVSHCTRPYLVLCTVSPVLIPM

SEQ ID NO: 11166 - DNA, 859 bp, Homo sapiens
agagaagtgtagcagctgtaggggaaggacagaccaaggaaggtctttttgcttcttctgatccactcactgtatttgagttttgggttagagaagcctttagaaacctctaatttagtactttttaaatactgttctgtgggggttttagaattcgtaggactccctcatcctgccaggagctgtttctggggagaataactacctaaacaggtagaacttggggcatcctacctctgattcaaccaaagtgagccctgtgacatctctggaatactgaagaacaaatttctttttattcctcagtagagactctgaaagccagtcagcaacattgttggactttgagcaagctatttatgcatttgcagtgtttattcattcattcagcacattctccgacactttactagggggctggggatagagcaagaaacaaaataaagatcctgccatcaaagagcttacattctagtaggaggagacagacagtaaaatatgtgccatgcagggcctctccaaggatgtagaatgaacagacggctgaaggaagtgagggctgataaatggtggaagaatgttctaagcagaagaaatagctgtgcagagtctctgaggagcaccattgaaggagaattagacaaactggagtctactgagatgaggctgttgggaatggccctggtaccacatcctgagcagggatggccgatggaatggggagaagactcaggtggggcttgagtgtgtcctctgatgactgaagagccttgggagcaagcatccttcctgctactgtgtgtttgctggttccaatgatacataatttgtgcttttcgtaattaaagtattatcctgt

SEQ ID NO: 11167 - protein, 81 aa, Homo sapiens
MCHAGPLQGCRMNRRLKEVRADKWWKNVLSRRNSCAESLRSTIEGELDKLESTEMRLLGMALVPHPEQGWPMEWGEDSGGA

SEQ ID NO: 11168 - DNA, 3040 bp, Homo sapiens
ctccctgccggccgctcgttctgtgccccggcccggccaccgacggccgcgcgttgagatgactttccgcgatctcctgagcgtcagtttcgagggaccccgcccggacagcagcgcagggggctccagcgcgggcggcggcgggggcagcgcgggcggcgcggccccctcggagggcccggcggtgggcggcgtgccggggggcgcgggcggcggcggcggcgtggtgggcgcaggcagcggcgaggacaaccggagctccgcgggggagccggggagcgcgggcgcgggcggcgacgtgaatggcacggcggccgtcgggggactggtggtgagcgcgcagggcgtgggcgtgggcgtcttcctggcagccttcatccttatggccgtggcaggtaacctgcttgtcatcctctcagtggcctgcaaccgccacctgcagaccgtcaccaactatttcatcgtgaacctggccgtggccgacctgctgctgagcgccaccgtactgcccttctcggccaccatggaggttctgggcttctgggcctttggccgcgccttctgcgacgtatgggccgccgtggacgtgctgtgctgcacggcctccatcctcagcctctgcaccatctccgtggaccggtacgtgggcgtgcgccactcactcaagtacccagccatcatgaccgagcgcaaggcggccgccatcctggccctgctctgggtcgtagccctggtggtgtccgtagggcccctgctgggctggaaggagcccgtgccccctgacgagcgcttctgcggtatcaccgaggaggcgggctacgctgtcttctcctccgtgtgctccttctacctgcccatggcggtcatcgtggtcatgtactgccgcgtgtacgtggtcgcgcgcagcaccacgcgcagcctcgaggcgggcgtcaagcgcgagcgaggcaaggcctccgaggtggtgctgcgcatccactgtcgcggcgcggccacgggcgccgacggggcgcacggcatgcgcagcgccaagggccacaccttccgcagctcgctctccgtgcgcctgctcaagttctcccgtgagaagaaagcggccaagactctggccatcgtcgtgggtgtcttcgtgctctgctggttccctttcttctttgtcctgccgctcggctccttgttcccgcagctgaagccatcggagggcgtcttcaaggtcatcttctggctcggctacttcaacagctgcgtgaacccgctcatctacccctgttccagccgcgagttcaagcgcgccttcctccgtctcctgcgctgccagtgccgtcgtcgccggcgccgccgccctctctggcgtgtctacggccaccactggcgggcctccaccagcggcctgcgccaggactgcgccccgagttcgggcgacgcgccccccggagcgccgctggccctcaccgcgctccccgaccccgaccccgaacccccaggcacgcccgagatgcaggctccggtcgccagccgtcgaaagccacccagcgccttccgcgagtggaggctgctggggccgttccggagacccacgacccagctgcgcgccaaagtctccagcctgtcgcacaagatccgcgccgggggcgcgcagcgcgcagaggcagcgtgcgcccagcgctcagaggtggaggctgtgtccctaggcgtcccacacgaggtggccgagggcgccacctgccaggcctacgaattggccgactacagcaacctacgggagaccgatatttaaggaccccagagctaggccgcggagtgtgctgggcttgggggtaagggggaccagagaggcgggctggtgttctaagagcccccgtgcaaatcggagacccggaaactgatcagggcagctgctctgtgacatccctgaggaactgggcagagcttgaggctggagcccttgaaaggtgaaaagtagtggggccccctgctggactcaggtgcccagaactcttttcttagaagggagaggctgcgggctccgtggggccttttgctcccaatccctatttgagaaacactgccccatcctccatgccctgaaccctgagtagacagccccaagcatggccaggaaggcctgcccctcctcttctgggaaataggcacagaagctttggccggctaccccagtgcctcccttagggaaaaagtcagtgggaccagggctcctcagtggacaaatttctccttcttactgccaactggaggaacccagtggacctaccaccacccacaagctttggtggcagattgtatagccgtcatacaagcctgctgtatttatccatgggcccgctgtccgccacccaggctcctccgtgcacaccccatcacctggcccctaccccttattacttcccctcaagggccttactgtttacactctgtacatagctcatcgtgcctgtgcccatcacttcttgctgggattccaagccaccaattggagagctttatttgtcattttgagacatatttattggtaagagtacttctattttgtccaagctgtgcaaactgtccctctttagcccataacccattaaaaaaaaaatactttttcccctaaagtctgtcaagaactaaaggcccgcaacagaatagattgggtctacatttgcctttctagtttcaacttaactgactctttaactgatggctgctgtctgttgggagttttagcatgaccaaaggacctgggggggggttgttaggttttaaaactcacatgatcggtcttgtgaaccaaatagtgatcctaagcacaaattgtccctttgtcagtctccccagatgcttatgtaatgctctgagggcctcagtgaggaaggcggccatcaggtaaatgggtgaaacataagtttacatgaaaagatatacaagcccgagtagatagctgtacatggctaggaaaagaacccatacctaggaaccatgcttgttagctttgagtaaaatgtcatattcctacttgtcatattcccatgagatt

SEQ ID NO: 11169 - protein, 572 aa, Homo sapiens; identical to SEQ ID NO: 1857

SEQ ID NO: 11170 - DNA, 441 bp, Homo sapiens
tcaacgcaccgcgcgcccaagggcaccagcgagtgaccgagagactcgggggagagggcgggaggaagagggacgccgctgagggccaagggggagggggtcttcctggcagccttcatccttatggccgtggcaggtaacctgcttgtcatcctctcagtggcctgcaaccgccacctgcagaccgtcaccaactatttcatcgtgaacctggccgtggccgacctgctgctgagcgccaccgtactgcccttctcggccaccatggaggttctgggcttctgggcctttggccgcgccttctgcgacgtatgggccgccgtggacgtgctgtgctgcacggcctccatcctcagcctctgcaccatctccgtggaccggtacgtgggcgtgcgccactcactcaagtacccagccatcatgaccgagcgcaaggcggcc

SEQ ID NO: 11171 - protein, 105 aa, Homo sapiens
MAVAGNLLVILSVACNRHLQTVTNYFIVNLAVADLLLSATVLPFSATMEVLGFWAFGRAFCDVWAAVDVLCCTASILSLCTISVDRYVGVRHSLKYPAIMTERKA

SEQ ID NO: 11172 - DNA, 566 bp, Homo sapiens
agacaggagccaaacctcaaatccatccctcctccctgactcaacttaaaggtttatacagccagaaaggaaaacagaagggcaaggaagaggagttggccaacagggagcaggagttttcattgttcaaatcatcctcatctgtgaaatgaacccattagatgagtcagttgatccttcaattctgcaaacactgtatagtcagagatcaattgcagaaaatgggagctacttgaactgcattaagtgaaaatggatctaatccaagaaactaagaaaacttttggaaaggttgaaagagccatgacaccaaaaacaagactcagcaacaacgcccaaaacaactccgcaagacagttgcttcctatgccacaaacacagggacgcatcaccttactggtgtcagggtcagaagtttcctgtgcaaccacctgtttagagcaaggtcacactctgtagacatcgaccaaaaaaaacatggaacgtggttgtcctgagccctgcctctcagcacctatgaaaccaatgaccacctactagaatgcactacaggaaactcagtgttt

SEQ ID NO: 11173 - protein, 68 aa, Homo sapiens [sequence omitted]

SEQ ID NO: 11174 - DNA, 2629 bp, Homo sapiens
gggaaagactggagtatctcagtccctctcagtggatgggggttgtgggagagaggcagctgggagacaggcctccctctggagttcatagctgagttgctgtccaaatcagtggtccctagaatctataaaacaaagctgagaacttcagaggtgcatccagagaagccacactcctcaacctctcctgcaccgcgctgggtcgcggagcccaggggggcatcgccgaggcggcgttcgctggagaggatggcgcgcccctggtcacgctcgaagtcctggatctcagcggcacgttccttgaacgggttgagtcagggtggatcagagacctgccgaagctcacatccctctacctgaggaagatgcctcggctgacgaccctggagggggacattttcaagatgacccccaacctgcagcagctggactgtcaggactccccagcacttgcttctgtcgccacacacatctttcaagatactccacatctacaggtccttctgttccagaactgcaacttgagttccttccctccttggaccctggattcctcccaggtcctatcgatcaacctctttggcaaccccctcacttgcagttgtgacttgtcttggctcctcacggatgcaaagagaactgtcctaagcagggcagcagacactatgtgcgcgccagctgcgggatccagcggccccttctcagcctccctgtcactctcccagctgcccggagtgtgccagtccgaccaaagcaccactctcggggcttcacacccaccttgcttcaaccgctccacctacgcacagggtaccaccgtcgcgcccagcgcagcccccgccacccggcctgcgggagaccagcagagtgtctccaaggcccctaacgtgggctctcgcacgatagctgcatggccgcacagcgatgcacgggaggggactgccccctccacgaccaactctgtagcaggtcacagcaactccagcgttttccccagggctgccagcaccaccaggacccagcaccgaggagaacatgcccccgagcttgtccttgagcctgatatctcagctgcctccaccccactggccagcaagctcctgggccccttccctacctcgtgggaccgcagcataagctcgcctcagcccggccagaggacacacgccacaccccaagcccccaacccgagtctttccgagggcgagattccagtcttgctgctggacgactacagtgaggaggaggaagggaggaaggaggaggtgggaacgcctcaccaggacgtcccctgtgattaccatccctgcaagcacctgcagaccccgtgcgcggagctgcagaggcggtggcggtgccggtgccccggcctcagcggggaagacaccatcccagacccgcccaggctgcagggggtgacggagaccacggacacgtcggcgctggtccactggtgtgcccccaactcggtagtgcatgggtaccagatccgctactctgcggagggctgggcggggaaccagtcggtggtgggggtcatctacgccacggcccggcagcaccctctgtacgggctgtcgccgggcaccacctaccgcgtgtgcgtgctggcggccaacagggcgggcttgagccagccacggtcttcgggctggaggagcccgtgcgccgccttcaccaccaagcccagcttcgcgctcctgctctctgggctgtgcgccgccagcggcctgttgctcgccagcaccgtggtgctgtccgcatgtctctgcaggcggggccagacgctgggcctgcagcgctgcgacacgcacctggtggcctacaaaaacccggcctttgatgattacccgctggggctccagaccgtcagttagcccagcttctgggataacgcgtctcatcgaactggatctgagcgcaaaaaggaagacacagacggtcaaaaacgaccccatccgctcctagggtttctaattcccgtgaagccagaatgccttgagcacacatggaacttgccacactgagtgtctgggtccaaggaactgctgccctcccttccttctacttaactctgttcccagaaacctgatggtcaatgccagatcgctccccactgccgccaggccttcttgtgtgttgttggttcatttgcggttttcagcagtcagtgcctctctatccagtagaatagtgtatggacgtaggaagggatgaaacagagaagttgcataacccagcctctttgatcatgttagaaatcacatcctcaggtctttccagcggaagctccttcatggtcaagctctaagacacaacgagctctgttattcaagaaatcaattccagtggatttccagttccaattcctgagaactagggtaagggggagagctaatggttgcttcctaaggccttctgggtttattagttccatttcaggacatgacaagaaaatgtactcccggctttacagttaaaaccagttttctgggaacatttgtcaaacacagggaaaggctgtccttttaagttagtgtttactgcatttcacctaagactaaatggacaaatgaattataaattcattttttaggaggcataataaactttggaaatattttttctt

SEQ ID NO: 11175 - protein, 503 aa, Homo sapiens
MPRLTTLEGDIFKMTPNLQQLDCQDSPALASVATHIFQDTPHLQVLLFQNCNLSSFPPWTLDSSQVLSINLFGNPLTCSCDLSWLLTDAKRTVLSRAADTMCAPAAGSSGPFSASLSLSQLPGVCQSDQSTTLGASHPPCFNRSTYAQGTTVAPSAAPATRPAGDQQSVSKAPNVGSRTIAAWPHSDAREGTAPSTTNSVAGHSNSSVFPRAASTTRTQHRGEHAPELVLEPDISAASTPLASKLLGPFPTSWDRSISSPQPGQRTHATPQAPNPSLSEGEIPVLLLDDYSEEEEGRKEEVGTPHQDVPCDYHPCKHLQTPCAELQRRWRCRCPGLSGEDTIPDPPRLQGVTETTDTSALVHWCAPNSVVHGYQIRYSAEGWAGNQSVVGVIYATARQHPLYGLSPGTTYRVCVLAANRAGLSQPRSSGWRSPCAAFTTKPSFALLLSGLCAASGLLLASTVVLSACLCRRGQTLGLQRCDTHLVAYKNPAFDDYPLGLQTVS

SEQ ID NO: 11176 - DNA, 2722 bp, Homo sapiens
gagcaatgagggtgttggctaaagacaacagcgtcttgatgggaaaggaggagcaatgggaaagactggagtatctcagtccctctcagtggatgggggttgtgggagagaggcagctgggagacaggcctccctctggagttcatagctgagttgctgtccaaatcagtggtccctagaatctataaaacaaagctgagaacttcagaggtgcatccagagaagccacactccaaaaggaccacttccagacgccatgcggcaaaccctaccgctgctgctgctgacggtgctgcgccccagctgggcagaccctccccaggagaaggtcccgctcttccgggtcactcagcagggcccctgggggagcagtggcagcaacgccaccgactcgccctgcgaggggctgcccgccgcggatgcgacggccttgaccctggcgaaccgcaacctggagcgcctgcccggctgcctaccgcgcacactgcgcagcctcgacgccagccacaacctgctgcgcgccctgagcacttccgagctcggccacctggagcagctgcaggtgctgaccctgcgccacaaccgcatcgccgcgctgcgctggggcccgggtgggccggcggggctgcacaccctggacctcagctacaaccagctggccgctctgccgccgtgcaccgggcccgcgctgagcagcctccgcgccctggcgctcgccgggaatccgctgcgggcgctgcagccccgggccttcgcctgcttccccgcgctgcagctcctcaacctctcctgcaccgcgctgggtcgcggagcccaggggggcatcgccgaggcggcgttcgctggagaggatggcgcgcccctggtcacgctcgaagtcctggatctcagcggcacgttccttgaacgggttgagtcagggtggatcagagacctgccgaagctcacatccctctacctgaggaagatgcctcggctgacgaccctggagggggacattttcaagatgacccccaacctgcagcagctggactgtcaggactccccagcacttgcttctgtcgccacacacatctttcaagatactccacatctacaggtccttctgttccagaactgcaacttgagttccttccctccttggaccctggattcctcccaggtcctatcgatcaacctctttggcaaccccctcacttgcagttgtgacttgtcttggctcctcacggatgcaaagagaactgtcctaagcagggcagcagacactatgtgcgcgccagctgcgggatccagcggccccttctcagcctccctgtcactctcccagctgcccggagtgtgccagtccgaccaaagcaccactctcggggcttcacacccaccttgcttcaaccgctccacctacgcacagggtaccaccgtcgcgcccagcgcagcccccgccacccggcctgcgggagaccagcagagtgtctccaaggcccctaacgtgggctctcgcacgatagctgcatggccgcacagcgatgcacgggaggggactgccccctccacgaccaactctgtagcaggtcacagcaactccagcgttttccccagggctgccagcaccaccaggacccagcaccgaggagaacatgcccccgagcttgtccttgagcctgatatctcagctgcctccaccccactggccagcaagctcctgggccccttccctacctcgtgggaccgcagcataagctcgcctcagcccggccagaggacacacgccacaccccaagcccccaacccgagtctttccgagggcgagattccagtcttgctgctggacgactacagtgaggaggaggaagggaggaaggaggaggtgggaacgcctcaccaggacgtcccctgtgattaccatccctgcaagcacctgcagaccccgtgcgcggagctgcagaggcggtggcggtgccggtgccccggcctcagcggggaagacaccatcccagacccgcccaggctgcagggggtgacggagaccacggacacgtcggcgctggtccactggtgtgcccccaactcggtagtgcatgggtaccagatccgctactctgcggagggctgggcggggaaccagtcggtggtgggggtcatctacgccacggcccggcagcaccctctgtacgggctgtcgccgggcaccacctaccgcgtgtgcgtgctggcggccaacagggcgggcttgagccagccacggtcttcgggctggaggagcccgtgcgccgccttcaccaccaagcccagcttcgcgctcctgctctctgggctgtgcgccgccagcggcctgttgctcgccagcaccgtggtgctgtccgcatgtctctgcaggcggggccagacgctgggcctgcagcgctgcgacacgcacctggtggcctacaaaaacccggcctttgatgattacccgctggggctccagaccgtcagttagcccagcttctgggataacgcgtctcatcgaactggatctgagcgcaaaaaggaagacacagacggtcaaaaacgaccccatccgctcctagggtttctaattcccgtgaagccagaatgccttgagcacacatggaacttgccacactgagtgtctgggtccaaggaactgctgccctcccttccttctacttaactctgttcccagaaacctgatggtcaatgccagatcgctccccactgc

SEQ ID NO: 11177 - protein, 740 aa, Homo sapiens
MRQTLPLLLLTVLRPSWADPPQEKVPLFRVTQQGPWGSSGSNATDSPCEGLPAADATALTLANRNLERLPGCLPRTLRSLDASHNLLRALSTSELGHLEQLQVLTLRHNRIAALRWGPGGPAGLHTLDLSYNQLAALPPCTGPALSSLRALALAGNPLRALQPRAFACFPALQLLNLSCTALGRGAQGGIAEAAFAGEDGAPLVTLEVLDLSGTFLERVESGWIRDLPKLTSLYLRKMPRLTTLEGDIFKMTPNLQQLDCQDSPALASVATHIFQDTPHLQVLLFQNCNLSSFPPWTLDSSQVLSINLFGNPLTCSCDLSWLLTDAKRTVLSRAADTMCAPAAGSSGPFSASLSLSQLPGVCQSDQSTTLGASHPPCFNRSTYAQGTTVAPSAAPATRPAGDQQSVSKAPNVGSRTIAAWPHSDAREGTAPSTTNSVAGHSNSSVFPRAASTTRTQHRGEHAPELVLEPDISAASTPLASKLLGPFPTSWDRSISSPQPGQRTHATPQAPNPSLSEGEIPVLLLDDYSEEEEGRKEEVGTPHQDVPCDYHPCKHLQTPCAELQRRWRCRCPGLSGEDTIPDPPRLQGVTETTDTSALVHWCAPNSVVHGYQIRYSAEGWAGNQSVVGVIYATARQHPLYGLSPGTTYRVCVLAANRAGLSQPRSSGWRSPCAAFTTKPSFALLLSGLCAASGLLLASTVVLSACLCRRGQTLGLQRCDTHLVAYKNPAFDDYPLGLQTVS

SEQ ID NO: 11178 - DNA, 1476 bp, Homo sapiens
tgtggatttgatgggcgtcctgctgttctctccccagacgccatgcggcaaaccctaccgctgctgctgctgacggtgctgcgccccagctgggcagaccctccccaggagaaggtcccgctcttccgggtcactcagcagggcccctgggggagcagtggcagcaacgccaccgactcgccctgcgaggggctgcccgccgcggatgcgacggccttgaccctggcgaaccgcaacctggagcgcctgcccggctgcctaccgcgcacactgcgcagcctcgacgccagccacaacctgctgcgcgccctgagcacttccgagctcggccacctggagcagctgcaggtgctgaccctgcgccacaaccgcatcgccgcgctgcgctggggcccgggtgggccggcggggctgcacaccctggacctcagctacaaccagctggccgctctgccgccgtgcaccgggcccgcgctgagcagcctccgcgccctggcgctcgccgggaatccgctgcgggcgctgcagccccgggccttcgcctgcttccccgcgctgcagctcctcaacctctcctgcaccgcgctgggtcgcggagcccaggggggcatcgccgaggcggcgttcgctggagaggatggcgcgcccctggtcacgctcgaagtcctggatctcagcggcacgttccttgaacgggttgagtcagggtggatcagagacctgccgaagctcacatccctctacctgaggaagatgcctcggctgacgaccctggagggggacattttcaagatgacccccaacctgcagcagctggactgtcaggactccccagcacttgcttctgtcgccacacacatctttcaagatactccacatctacaggtccttctgttccagaagtaagtgcttctgaggcacatcttcatcacatgactgatttttgcccattacgctatgttgaattttatagaacaaaccagaccttaatttttctcccactactcttccaaatcctctctggggctttgttttcccccaccctttgggtgatatcttgggtaggtcccagatagtccacccagccatctagccttgcaactcagtccagttcagagtagcattagaacgccaaactcctatgcctttaaagtttattttaagcccagtcttagaaatttacagtgggaagaggtgaggaggacctcaggtctcctctctgtctggatctgctttcttccccacatgtcatgcaagttcagtcccttccagaatttgagtgggtctagggatgaaagtattgatattgttagaaaatcccttggaagtctatgggcaggccctgttagtcctcttttacacaatgcagtcactaaagatggaattattcttctaaaaggatgaacaacttttcaaagcaaaggcagaaccattcactcattctgtcctttattcaataaatagctattgagcaca

SEQ ID NO: 11179 - protein, 287 aa, Homo sapiens
MRQTLPLLLLTVLRPSWADPPQEKVPLFRVTQQGPWGSSGSNATDSPCEGLPAADATALTLANRNLERLPGCLPRTLRSLDASHNLLRALSTSELGHLEQLQVLTLRHNRIAALRWGPGGPAGLHTLDLSYNQLAALPPCTGPALSSLRALALAGNPLRALQPRAFACFPALQLLNLSCTALGRGAQGGIAEAAFAGEDGAPLVTLEVLDLSGTFLERVESGWIRDLPKLTSLYLRKMPRLTTLEGDIFKMTPNLQQLDCQDSPALASVATHIFQDTPHLQVLLFQK

SEQ ID NO: 11180 - DNA, 1690 bp, Homo sapiens
gagcaatgagggtgttggctaaagacaacagcgtcttgatgggaaaggaggagcaatgggaaagactggagtatctcagtccctctcagtggatgggggttgtgggagagaggcagctgggagacaggcctccctctggagttcatagctgagttgctgtccaaatcagtggtccctagaatctataaaacaaagctgagaacttcagaggtgcatccagagaagccacactccaaaaggaccacttccagacgccatgcggcaaaccctaccgctgctgctgctgacggtgctgcgccccagctgggcagaccctccccaggagaaggtcccgctcttccgggtcactcagcagggcccctgggggagcagtggcagcaacgccaccgactcgccctgcgaggggctgcccgccgcggatgcgacggccttgaccctggcgaaccgcaacctggagcgcctgcccggctgcctaccgcgcacactgcgcagcctcgacgccagccacaacctgctgcgcgccctgagcacttccgagctcggccacctggagcagctgcaggtgctgaccctgcgccacaaccgcatcgccgcgctgcgctggggcccgggtgggccggcggggctgcacaccctggacctcagctacaaccagctggccgctctgccgccgtgcaccgggcccgcgctgagcagcctccgcgccctggcgctcgccgggaatccgctgcgggcgctgcagccccgggccttcgcctgcttccccgcgctgcagctcctcaacctctcctgcaccgcgctgggtcgcggagcccaggggggcatcgccgaggcggcgttcgctggagaggatggcgcgcccctggtcacgctcgaagtcctggatctcagcggcacgttccttgaacgggttgagtcagggtggatcagagacctgccgaagctcacatccctctacctgaggaagatgcctcggctgacgaccctggagggggacattttcaagatgacccccaacctgcagcagctggactgtcaggactccccagcacttgcttctgtcgccacacacatctttcaagatactccacatctacaggtccttctgttccagaagtaagtgcttctgaggcacatcttcatcacatgactgatttttgcccattacgctatgttgaattttatagaacaaaccagaccttaatttttctcccactactcttccaaatcctctctggggctttgttttcccccaccctttgggtgatatcttgggtaggtcccagatagtccacccagccatctagccttgcaactcagtccagttcagagtagcattagaacgccaaactcctatgcctttaaagtttattttaagcccagtcttagaaatttacagtgggaagaggtgaggaggacctcaggtctcctctctgtctggatctgctttcttccccacatgtcatgcaagttcagtcccttccagaatttgagtgggtctagggatgaaagtattgatattgttagaaaatcccttggaagtctatgggcaggccctgttagtcctcttttacacaatgcagtcactaaagatggaattattcttctaaaaggatgaacaacttttcaaagcaaaggcagaaccattcactcattctgtcctttattcaataaatagctattgagcaca

SEQ ID NO: 11181 - protein, 287 aa, Homo sapiens; identical to SEQ ID NO: 11179

SEQ ID NO: 11182 - DNA, 494 bp, Homo sapiens
cagagttttgctcttgttatccagctggagtgcaacggtgcaatctcagctcactgcaacctccacctcctgggttcaagcgattctcctgcctcagcctcctgagtagatgggattacaggctgggaactgcttgagggaagggtccaagccttgttcatctctgagcccccgtgttatctcctgagcacctgggtcgtacactagcatggtctcaagatacatgtgctgaactgctaagccaattcatttactttacagatgaaaaataagaaatagacagaagcttaagaacacagacactgtacccagaaagatggtagcggtgtcggaatgagaatccagcgtcttgtgtcccagttaaggtccttttcccctagtatgctgcctctggctgtggtaaattccagaatataatttgtaaattttcctatccactgtcccatcccacttcctaaagtcacatgcaaaataaagtggcaggttagagtctg

SEQ ID NO: 11183 - protein, 44 aa, Homo sapiens
EFCSCYPAGVQRCNLSSLQPPPPGFKRFSCLSLLSRWDYRLGTA

SEQ ID NO: 11184 - DNA, 3322 bp, Homo sapiens
aaaggaaacacaagttgcttttgataacacatgatgcaaagaaagaattagaaagaatgagcaatgaagccggtataaatgacaaacaagtgtccaaaggcccaagaagttactaccaaaagctttcaaacaatattggtttatctttaaagacacatccatagcatactttaaaaataaggaacttgaacaaggagaaccactagaaaaactaaatcttagaggctgcgaagttgtgcccgatgtaaatgtagcaggaagaaaatttggaatcaagttactaatccctgttgccgatggtatgaatgaaatgtatttgagatgtgaccatgagaatcaatacgcccaatggatggctgcctgcatgttggcatcgaagggcaaaaccatggcagacagctcctaccagccagaggtcctcaacatcctttcatttctgaggatgaaaaacaggaactctgcatctcaggtggcttccagtctcgaaaacatggatatgaacccagaatgttttgtgtcaccacggtgtgcaaaaagacacaaatccaaacagctggccgcccggatcctggaggcgcaccagaacgtggcccagatgcccctggtcgaagccaagctgcggttcatccaggcgtggcagtcactgcctgagtttggcctcacctactaccttgtcagatttaaaggaagcaaaaaagatgacattctgggagtttcatataacaggttgattaaaattgatgcagccaccgggattccagtgacaacatggagattcacaaatatcaaacagtggaatgtaaactgggaaacccggcaggtggtcatcgagtttgaccaaaacgtctttactgctttcacctgcctgagtgcagattgcaagattgtgcacgagtacattggcggctacattttcttgtccacccgctccaaggaccagaatgaaacactcgatgaggacttgttccacaaattgaccggcggtcaggattgaaacaagcacgcgtgctcggctcacaccaacaaggcaagccaaaggcgcccctccccagagggatccctaacgtgcccagcatgtagattctggactaacagacaacatacattcaccgctggtcacccagatcctcattcaaacccactgctggcacatccctttccttactttgccctgtgctaccagccacggaaggagcctctcttgttttttctataaaatgggtaggcaggagaaaagcaggtgccctaagattgctctaaggcccagcatgtggttacagttctctgacttgcagaacctgccaggtgtatggctacaagttatcctcgtgctgatctgtctcattactaagtcaatggagaagacagaaaggtaaaaatcacgtgtagcaagaacaactcttatttcacaaactcaggtatgaaacgaaacgcctgtccttcatggaactgcttttagctcctgtcttttcaaaatggcagagggagttcctacacacactttttccctggaggccaaggtctaggggtagaaaggggaggggtggggctaccaggtagcagttgacaacccaaggtcagaggagtggccctcagtgtcatctgtccacagtgatacctgccaagatgaccactgacccacatctggtcttagtcattggtctcctcagatttctggggccacctgcaagccccattccattcctacagatctctcagccacctgtaagtcctttgtgaagatgtgggtgacacagggggacaggaaaacccatttctcaacccagatccatgtctccactgcttctactctgggttgggattcaggaagacaggcacagtcctctctgttcatagaaacacctgccagtgtcaaggattccagtcaggtgtctatcccaactggtcagggagagaagggcagacccattctcaaagaccaccatgtccaaggtctgacagctccccactggctgcccccacaggggctttaggctggtctgggtcatggggaagcgtccctcttatcgctggtctgtgttctcctggatttggtatctatgttggtacgactcctggccttttatctaaaggactttggcttttgtaaatcacaagccaataatagacttttttctccccctctgttttttgctgtgtcatctctgccttgagactgccttgagacagtgcttgccttgagagagtgagccaattaacagctgcctgaattgtcattttccattttggtttgttagaggtgggaggggtgggttttgagaaggtcaaaagcaataccagaagtaaagggaaatatcagacaatattttattattttttcatagatgttctgccacacaaagaacttggggtgtaaggataaggcaaaagctccaatcccatttttcagttctcctaggatgcacccctcagggagcctggccagagttccgaggcccgtgagcgtcagctgttgctttattttccatcaaagccctctgagaagtgagacctcagcaattccgggagccacatagagacagacttggcaagggaccccctggttctgagccagtagctgccatctggaaattcctcttttagcctctccttagaggtgaatgtgaatgaagcctcccaggcacccgctgaatttctgaggccttgcttaaagctcagaagtggtttaggcatttggaaaatctggttcacatcataaagaacttgatttgaaatgttttctatagaaacaagtgctaagtgtaccgtatatacttgatgttggtcatttctcagtcctatttctcagttctattattttagaacctagtcagttctttaagattataactggtcctacattaaaataatgcttctcgatgtcagattttacctgtttgctgctgagaacatctctgcctaatttaccaaagccagaccttcagttcaacatgcttccttagcttttcatagttgtctgacatttccatgaaaacaaaggaaccaactttgttttaaccaaactttgtttggttacagttttcaggggagcgtttcttccatgacacacagcaacatcccaaagaaataaacaagtgtgacaaaaaaaaaaaaaaacaaacctaaatgctactgttccaaagagcaacttgatggttttttttaatactgagtgcaaaaggtcacccaaattcctatgatgaaattttaaattaatgggcacctttcaacatcatttgcttccttatctacagttgattcagaaatctgcattttttattcttttatatgacttttaagtaaaagatttatatggatttga

SEQ ID NO: 11185 - protein, 230 aa, Homo sapiens
MNEMYLRCDHENQYAQWMAACMLASKGKTMADSSYQPEVLNILSFLRMKNRNSASQVASSLENMDMNPECFVSPRCAKRHKSKQLAARILEAHQNVAQMPLVEAKLRFIQAWQSLPEFGLTYYLVRFKGSKKDDILGVSYNRLIKIDAATGIPVTTWRFTNIKQWNVNWETRQVVIEFDQNVFTAFTCLSADCKIVHEYIGGYIFLSTRSKDQNETLDEDLFHKLTGGQD

SEQ ID NO: 11186 - DNA, 5151 bp, Homo sapiens
ctggagtctcccctggtcgggagcctcagccttctggagactgacaccaccctcttactcagagacgaatcgttttgtcgttgccttcacctccctgaccacaagtgctccggggctctttctgagggaggcagctgttctaggcgggaggctggagtctcctgggcctggacgcaccccggggtgtgagtgatgggtatgcctgaaaggaggggaagtggcgcggctttaatcatctgggctagtccccggcgggcctgggggaacagggaaactggaggcggccttaaagcgtcaggatgagacatcgcaagaggagctgcagatactgagcgtgcgccccgggttctcgccgccttctctccgccgagcagcccttcggccaccctttgcccttaaaaatctgcagactgcgcctcctctccgcgggagcgagacctagcaggcccggggctgggcgtgccctcgcctgccacgctgcgcgctgccctcagccgggccgctggggccgtgcagtgcaccgggcacgccgcgccaggctgggggcaggcaccgagcctccgtgggaggtcccgaggcagcttcgcctgctcgccctggctccagccctcacctgccgcagccttagctgagcagccgccgccactgggcgccccccgctccccacttcgccagcgcccgctcctcggctcggcccggggtagtttgtagggacgcagctctccacgtgcgcgactgcgaggctggacgctacgggctcctggaaaggagacaccagcatttgccacaatgctgtcatccactgactttacatttgcttcctgggagcttgtggtccgcgttgaccatcccaatgaagagcagcagaaagacgtcacactgagagtatctggagaccttcatgttggaggagtgatgctcaagttagtagaacagatcaatatatcccaagactggtcagactttgctctttggtgggaacagaagcattgctggcttctgaaaacccactggaccctggacaaatatggggtccaggcagatgcaaagcttctcttcacccctcagcataaaatgctgcgccttcgtctgccgaatttgaagatggtgaggttgcgagtcagcttctcagctgtggtttttaaagctgtcagtgatatctgcaaaatcctgaatattagaagatcagaagagctttccttgttaaagccgtctggtgactattttaagaagaagaagaaaaaagacaaaaataataaggaacccataattgaagatattctaaacctggagagttctccaacagcttcaggttcatcagtaagtcctggtttatacagtaaaaccatgacccctatatatgaccccatcaatggaacaccagcatcatccaccatgacttggttcagtgacagccctttgacggaacaaaactgcagcatcctcgcattcagccaacccccccagtccccagaagcacttgcggatatgtaccagcctcggtctctggttgataaagccaagctcaatgcaggttggctagactcctcacgctcccttatggaacaaggcatccaagaggatgagcagctgctcttacgatttaaatattattctttcttcgacttgaatcctaaatatgatgctgtccgaataaaccaactctatgagcaagccaggtgggccattctcttagaagaaattgattgcacagaggaagaaatgttgatctttgcagctctacagtaccacattagcaaactgtcgttgtctgctgaaacacaggattttgcaggcgagtccgaggttgatgaaatagaagcggcgctttctaatttggaagtaaccctagaaggtggaaaagcggacagccttttggaggacattactgatatccctaaacttgcagataatctcaaattatttaggcccaagaagttactaccaaaagctttcaaacaatattggtttatctttaaagacacatccatagcatactttaaaaataaggaacttgaacaaggagaaccactagaaaaactaaatcttagaggctgcgaagttgtgcccgatgtaaatgtagcaggaagaaaatttggaatcaagttactaatccctgttgccgatggtatgaatgaaatgtatttgagatgtgaccatgagaatcaatacgcccaatggatggctgcctgcatgttggcatcgaagggcaaaaccatggcagacagctcctaccagccagaggtcctcaacatcctttcatttctgaggatgaaaaacaggaactctgcatctcaggtggcttccagtctcgaaaacatggatatgaacccagaatgttttgtgtcaccacggtgtgcaaaaagacacaaatccaaacagctggccgcccggatcctggaggcgcaccagaacgtggcccagatgcccctggtcgaagccaagctgcggttcatccaggcgtggcagtcactgcctgagtttggcctcacctactaccttgtcagatttaaaggaagcaaaaaagatgacattctgggagtttcatataacaggttgattaaaattgatgcagccaccgggattccagtgacaacatggagattcacaaatatcaaacagtggaatgtaaactgggaaacccggcaggtggtcatcgagtttgaccaaaacgtctttactgctttcacctgcctgagtgcagattgcaagattgtgcacgagtacattggcggctacattttcttgtccacccgctccaaggaccagaatgaaacactcgatgaggacttgttccacaaattgaccggcggtcaggattgaaacaagcacgcgtgctcggctcacaccaacaaggcaagccaaaggcgcccctccccagagggatccctaacgtgcccagcatgtagattctggactaacagacaacatacattcaccgctggtcacccagatcctcattcaaacccactgctggcacatccctttccttactttgccctgtgctaccagccacggaaggagcctctcttgttttttctataaaatgggtaggcaggagaaaagcaggtgccctaagattgctctaaggcccagcatgtggttacagttctctgacttgcagaacctgccaggtgtatggctacaagttatcctcgtgctgatctgtctcattactaagtcaatggagaagacagaaaggtaaaaatcacgtgtagcaagaacaactcttatttcacaaactcaggtatgaaacgaaacgcctgtccttcatggaactgcttttagctcctgtcttttcaaaatggcagagggagttcctacacacactttttccctggaggccaaggtctaggggtagaaaggggaggggtggggctaccaggtagcagttgacaacccaaggtcagaggagtggccctcagtgtcatctgtccacagtgatacctgccaagatgaccactgacccacatctggtcttagtcattggtctcctcagatttctggggccacctgcaagccccattccattcctacagatctctcagccacctgtaagtcctttgtgaagatgtgggtgacacagggggacaggaaaacccatttctcaacccagatccatgtctccactgcttctactctgggttgggattcaggaagacaggcacagtcctctctgttcatagaaacacctgccagtgtcaaggattccagtcaggtgtctatcccaactggtcagggagagaagggcagacccattctcaaagaccaccatgtccaaggtctgacagctccccactggctgcccccacaggggctttaggctggtctgggtcatggggaagcgtccctcttatcgctggtctgtgttctcctggatttggtatctatgttggtacgactcctggccttttatctaaaggactttggcttttgtaaatcacaagccaataatagacttttttctccccctctgttttttgctgtgtcatctctgccttgagactgccttgagacagtgcttgccttgagagagtgagccaattaacagctgcctgaattgtcattttccattttggtttgttagaggtgggaggggtgggttttgagaaggtcaaaagcaataccagaagtaaagggaaatatcagacaatattttattattttttcatagatgttctgccacacaaagaacttggggtgtaaggataaggcaaaagctccaatcccatttttcagttctcctaggatgcacccctcagggagcctggccagagttccgaggcccgtgagcgtcagctgttgctttattttccatcaaagccctctgagaagtgagacctcagcaattccgggagccacatagagacagacttggcaagggaccccctggttctgagccagtagctgccatctggaaattcctcttttagcctctccttagaggtgaatgtgaatgaagcctcccaggcacccgctgaatttctgaggccttgcttaaagctcagaagtggtttaggcatttggaaaatctggttcacatcataaagaacttgatttgaaatgttttctatagaaacaagtgctaagtgtaccgtatatacttgatgttggtcatttctcagtcctatttctcagttctattattttagaacctagtcagttctttaagattataactggtcctacattaaaataatgcttctcgatgtcagattttacctgtttgctgctgagaacatctctgcctaatttaccaaagccagaccttcagttcaacatgcttccttagcttttcatagttgtctgacatttccatgaaaacaaaggaaccaactttgttttaaccaaactttgtttggttacagttttcaggggagcgtttcttccatgacacacagcaacatcccaaagaaataaacaagtgtgacaaaaaaaaaaaaaaacaaacctaaatgctactgttccaaagagcaacttgatggttttttttaatactgagtgcaaaaggtcacccaaattcctatgatgaaattttaaattaatgggcacctttcaacatcatttgcttccttatctacagttgattcagaaatctgcattttttattcttttatatgacttttaagtaaaagatttatatggatttga

SEQ ID NO: 11187 - protein, 677 aa, Homo sapiens; identical to SEQ ID NO: 1861

SEQ ID NO: 11188 - DNA, 3760 bp, Homo sapiens
ctggagtctcccctggtcgggagcctcagccttctggagactgacaccaccctcttactcagagacgaatcgttttgtcgttgccttcacctccctgaccacaagtgctccggggctctttctgagggaggcagctgttctaggcgggaggctggagtctcctgggcctggacgcaccccggggtgtgagtgatgggtatgcctgaaaggaggggaagtggcgcggctttaatcatctgggctagtccccggcgggcctgggggaacagggaaactggaggcggccttaaagcgtcaggatgagacatcgcaagaggagctgcagatactgagcgtgcgccccgggttctcgccgccttctctccgccgagcagcccttcggccaccctttgcccttaaaaatctgcagactgcgcctcctctccgcgggagcgagacctagcaggcccggggctgggcgtgccctcgcctgccacgctgcgcgctgccctcagccgggccgctggggccgtgcagtgcaccgggcacgccgcgccaggctgggggcaggcaccgagcctccgtgggaggtcccgaggcagcttcgcctgctcgccctggctccagccctcacctgccgcagccttagctgagcagccgccgccactgggcgccccccgctccccacttcgccagcgcccgctcctcggctcggcccggggtagtttgtagggacgcagctctccacgtgcgcgactgcgaggctggacgctacgggctcctggaaaggagacaccagcatttgccacaatgctgtcatccactgactttacatttgcttcctgggagcttgtggtccgcgttgaccatcccaatgaagagcagcagaaagacgtcacactgagagtatctggagaccttcatgttggaggagtgatgctcaagttagtagaacagatcaatatatcccaagactggtcagactttgctctttggtgggaacagaagcattgctggcttctgaaaacccactggaccctggacaaatatggggtccaggcagatgcaaagcttctcttcacccctcagcataaaatgctgcgccttcgtctgccgaatttgaagatggtgaggttgcgagtcagcttctcagctgtggtttttaaagctgtcagtgatatctgcaaaatcctgaatattagaagatcagaagagctttccttgttaaagccgtctggtgactattttaagaagaagaagaaaaaagacaaaaataataaggaacccataattgaagatattctaaacctggagagttctccaacagcttcaggttcatcagttggctagactcctcacgctcccttatggaacaaggcatccaagaggatgagcagctgctcttacgatttaaatattattctttcttcgacttgaatcctaaatatgatgctgtccgaataaaccaactctatgagcaagccaggtgggccattctcttagaagaaattgattgcacagaggaagaaatgttgatctttgcagctctacagtaccacattagcaaactgtcgttgtctgctgaaacacaggattttgcaggcgagtccgaggttgatgaaatagaagcggcgctttctaatttggaagtaaccctagaaggtggaaaagcggacagccttttggaggacattactgatatccctaaacttgcagataatctcaaattatttaggcccaagaagttactaccaaaagctttcaaacaatattggtttatctttaaagacacatccatagcatactttaaaaataaggaacttgaacaaggagaaccactagaaaaactaaatcttagaggctgcgaagttgtgcccgatgtaaatgtagcaggaagaaaatttggaatcaagttactaatccctgttgccgatggtatgaatgaaatgtatttgagatgtgaccatgagaatcaatacgcccaatggatggctgcctgcatgttggcatcgaagggcaaaaccatggcagacagctcctaccagccagaggtcctcaacatcctttcatttctgaggatgaaaaacaggaactctgcatctcaggtggcttccagtctcgaaaacatggatatgaacccagaatgttttgtgtcaccacggtgtgcaaaaagacacaaatccaaacagctggccgcccggatcctggaggcgcaccagaacgtggcccagatgcccctggtcgaagccaagctgcggttcatccaggcgtggcagtcactgcctgagtttggcctcacctactaccttgtcagatttaaaggaagcaaaaaagatgacattctgggagtttcatataacaggttgattaaaattgatgcagccaccgggattccagtgacaacatggagattcacaaatatcaaacagtggaatgtaaactgggaaacccggcaggtggtcatcgagtttgaccaaaacgtctttactgctttcacctgcctgagtgcagattgcaagattgtgcacgagtacattggcggctacattttcttgtccacccgctccaaggaccagaatgaaacactcgatgaggacttgttccacaaattgaccggcggtcaggattgaaacaagcacgcgtgctcggctcacaccaacaaggcaagccaaaggcgcccctccccagagggatccctaacgtgcccagcatgtagattctggactaacagacaacatacattcaccgctggtcacccagatcctcattcaaacccactgctggcacatccctttccttactttgccctgtgctaccagccacggaaggagcctctcttgttttttctataaaatgggtaggcaggagaaaagcaggtgccctaagattgctctaaggcccagcatgtggttacagttctctgacttgcagaacctgccaggtgtatggctacaagttatcctcgtgctgatctgtctcattactaagtcaatggagaagacagaaaggtaaaaatcacgtgtagcaagaacaactcttatttcacaaactcaggtatgaaacgaaacgcctgtccttcatggaactgcttttagctcctgtcttttcaaaatggcagagggagttcctacacacactttttccctggaggccaaggtctaggggtagaaaggggaggggtggggctaccaggtagcagttgacaacccaaggtcagaggagtggccctcagtgtcatctgtccacagtgatacctgccaagatgaccactgacccacatctggtcttagtcattggtctcctcagatttctggggccacctgcaagccccattccattcctacagatctctcagccacctgtaagtcctttgtgaagatgtgggtgacacagggggacaggaaaacccatttctcaacccagatccatgtctccactgcttctactctgggttgggattcaggaagacaggcacagtcctctctgttcatagaaacacctgccagtgtcaaggattccagtcaggtgtctatcccaactggtcagggagagaagggcagacccattctcaaagaccaccatgtccaaggtctgacagctccccactggctgcccccacaggggctttaggctggtctgggtcatggggaagcgtccctcttatcgctggtctgtgttctcctggatttggtatctatgttggtacgactcctggccttttatctaaaggactttggcttttgtaaatcacaagccaataatagacttttttctccccctc

SEQ ID NO: 11189 - protein, 420 aa, Homo sapiens
MEQGIQEDEQLLLRFKYYSFFDLNPKYDAVRINQLYEQARWAILLEEIDCTEEEMLIFAALQYHISKLSLSAETQDFAGESEVDEIEAALSNLEVTLEGGKADSLLEDITDIPKLADNLKLFRPKKLLPKAFKQYWFIFKDTSIAYFKNKELEQGEPLEKLNLRGCEVVPDVNVAGRKFGIKLLIPVADGMNEMYLRCDHENQYAQWMAACMLASKGKTMADSSYQPEVLNILSFLRMKNRNSASQVASSLENMDMNPECFVSPRCAKRHKSKQLAARILEAHQNVAQMPLVEAKLRFIQAWQSLPEFGLTYYLVRFKGSKKDDILGVSYNRLIKIDAATGIPVTTWRFTNIKQWNVNWETRQVVIEFDQNVFTAFTCLSADCKIVHEYIGGYIFLSTRSKDQNETLDEDLFHKLTGGQD

SEQ ID NO: 11190 - DNA, 479 bp, Homo sapiens
ctacagctctgtctgctggcatgagagtgtacaggtcttcgaggttttgcaggcccgatagctctgggaaagcagaacttggccttttccaaaaattttctgcccttggttttggggatcatttgggcaagcccgaggtgctgtgcatgggggctcctggaatcctgggaagggcagaaagccttggccccagactcatcgtgcagcagctctgagcagtatttcggctgaggagtgacttcagtgaatattcagctgaggagtgacttggccacgtgtcacagccctacttcttgggggcctggtggaagagggtggcgtagaaggttccaaggtcccaaactggaattgtcctgtatgcttggttcacacagtgcgttattttaccttcctctgagctgctaatcgcctgcctctgagctgggtgagataaatatcacaaggcacaaagtgattgtacaataaaaaaatcaaatccc

SEQ ID NO: 11191 - protein, 64 aa, Homo sapiens
MRVYRSSRFCRPDSSGKAELGLFQKFSALGFGDHLGKPEVLCMGAPGILGRAESLGPRLIVQQL

SEQ ID NO: 11192 - DNA, 3274 bp, Homo sapiens
gccgcgccacggcgccgccgccgccgtcgccgccgccggagtcctcgccccgccgcgctgcgcccggctcgcgctgcgctagtcgctccgcttcccacaccccgccggggactggcagccgccgccgcacatctgccgccacagcctccgccggctacccgaacgttctcggggccagcgccgagtggatcaccggggaccgcgaggcacccgcgcgccgcagaccccgcgcgggctggagcacccggcagagcgcgccacagcgccgtggcctctgctgcccgggctgcgccagagccgcggacgggcgcgcagagcgccggggactccggagccgatccctagcgccgcgatgcggagcacctactgcaggagatcgggggcctgggacgcgctggccgaggtgtgatcggaccccaggctagccacaaagggcacttggccccagggctaggagagcgaggggagagcacagccacccgcctcggcggcccgggactcggctcgactcgccggagaatgcgcccgaggacgacggggcgccagagccgcggtgctttcaactggcgagcgcgaatgggggtgcactggagtaaggcagagtgatgcgggggggcaactcgcctggcaccgagatcgccgccgtgcccttccctggacccggcgtcgcccaggatggctgccccgagccatgggccgcggcggagctagcgcggagcgcccgaccctcgacccccgagtcccggagccggccccgcgcggggccacgcgtccctcgggcgctggttcctaaggaggacgacagcaccagcttctcctttctcccttcccttccctgccccgcactcctccccctgctcgctgttgttgtgtgtcagcacttggctggggacttcttgaacttgcagggagaataacttgcgcaccccactttgcgccggtgcctttgccccagcggagcctgcttcgccatctccgagccccaccgcccctccactcctcggccttgcccgacactgagacgctgttcccagcgtgaaaagagagactgcgcggccggcacccgggagaaggaggaggcaaagaaaaggaacggacattcggtccttgcgccaggtcctttgaccagagtttttccatgtggacgctctttcaatggacgtgtccccgcgtgcttcttagacggactgcggtctcctaaaggtcgaccatggtggccgggacccgctgtcttctagcgttgctgcttccccaggtcctcctgggcggcgcggctggcctcgttccggagctgggccgcaggaagttcgcggcggcgtcgtcgggccgcccctcatcccagccctctgacgaggtcctgagcgagttcgagttgcggctgctcagcatgttcggcctgaaacagagacccacccccagcagggacgccgtggtgcccccctacatgctagacctgtatcgcaggcactcaggtcagccgggctcacccgccccagaccaccggttggagagggcagccagccgagccaacactgtgcgcagcttccaccatgaagaatctttggaagaactaccagaaacgagtgggaaaacaacccggagattcttctttaatttaagttctatccccacggaggagtttatcacctcagcagagcttcaggttttccgagaacagatgcaagatgctttaggaaacaatagcagtttccatcaccgaattaatatttatgaaatcataaaacctgcaacagccaactcgaaattccccgtgaccagacttttggacaccaggttggtgaatcagaatgcaagcaggtgggaaagttttgatgtcacccccgctgtgatgcggtggactgcacagggacacgccaaccatggattcgtggtggaagtggcccacttggaggagaaacaaggtgtctccaagagacatgttaggataagcaggtctttgcaccaagatgaacacagctggtcacagataaggccattgctagtaacttttggccatgatggaaaagggcatcctctccacaaaagagaaaaacgtcaagccaaacacaaacagcggaaacgccttaagtccagctgtaagagacaccctttgtacgtggacttcagtgacgtggggtggaatgactggattgtggctcccccggggtatcacgccttttactgccacggagaatgcccttttcctctggctgatcatctgaactccactaatcatgccattgttcagacgttggtcaactctgttaactctaagattcctaaggcatgctgtgtcccgacagaactcagtgctatctcgatgctgtaccttgacgagaatgaaaaggttgtattaaagaactatcaggacatggttgtggagggttgtgggtgtcgctagtacagcaaaattaaatacataaatatatatatatatatatattttagaaaaaagaaaaaaacaaacaaacaaaaaaaccccaccccagttgacactttaatatttcccaatgaagactttatttatggaatggaatggaaaaaaaaacagctattttgaaaatatatttatatctacgaaaagaagttgggaaaacaaatattttaatcagagaattattccttaaagatttaaaatgtatttagttgtacattttatatgggttcaaccccagcacatgaagtataatggtcagatttattttgtatttatttactattataaccactttttaggaaaaaaatagctaatttgtatttatatgtaatcaaaagaagtatcgggtttgtacataattttccaaaaattgtagttgttttcagttgtgtgtatttaagatgaaaagtctacatggaaggttactctggcaaagtgcttagcacgtttgcttttttgcagtgctactgttgagttcacaagttcaagtccagaaaaaaaaagtggataatccactctgctgactttcaagattattatattattcaattctcaggaatgttgcagagtgattgtccaatccatgagaatttacatccttattaggtggaatatttggataagaaccagacattgctgatctattatagaaactctcctcctgccccttaatttacagaaagaataaagcaggatccatagaaataattaggaaaacgatgaacctgcaggaaagtgaatgatggtttgttgttcttctttcctaaattagtgatcccttcaaaggggctgatctggccaaagtattcaataaaacgtaagatttcttcattattg

SEQ ID NO: 11193 - protein, 396 aa, Homo sapiens; identical to SEQ ID NO: 1867

SEQ ID NO: 11194 - DNA, 3588 bp, Homo sapiens
gccgcgccacggcgccgccgccgccgtcgccgccgccggagtcctcgccccgccgcgctgcgcccggctcgcgctgcgctagtcgctccgcttcccacaccccgccggggactggcagccgccgccgcacatctgccgccacagcctccgccggctacccgaacgttctcggggccagcgccgagtggatcaccggggaccgcgaggcacccgcgcgccgcagaccccgcgcgggctggagcacccggcagagcgcgccacagcgccgtggcctctgctgcccgggctgcgccagagccgcggacgggcgcgcagagcgccggggactccggagccgatccctagcgccgcgatgcggagcacctactgcaggagatcgggggcctgggacgcgctggccgaggtgtgatcggaccccaggctagccacaaagggcacttggccccagggctaggagagcgaggggagagcacagccacccgcctcggcggcccgggactcggctcgactcgccggagaatgcgcccgaggacgacggggcgccagagccgcggtgctttcaactggcgagcgcgaatgggggtgcactggagtaaggcagagtgatgcgggggggcaactcgcctggcaccgagatcgccgccgtgcccttccctggacccggcgtcgcccaggatggctgccccgagccatgggccgcggcggagctagcgcggagcgcccgaccctcgacccccgagtcccggagccggccccgcgcggggccacgcgtccctcgggcgctggttcctaaggaggacgacagcaccagcttctcctttctcccttcccttccctgccccgcactcctccccctgctcgctgttgttgtgtgtcagcacttggctggggacttcttgaacttgcagggagaataacttgcgcaccccactttgcgccggtgcctttgccccagcggagcctgcttcgccatctccgagccccaccgcccctccactcctcggccttgcccgacactgagacgctgttcccagcgtgaaaagagagactgcgcggccggcacccgggagaaggaggaggcaaagaaaaggaacggacattcggtccttgcgccaggtcctttgaccagagtttttccatgtggacgctctttcaatggacgtgtccccgcgtgcttcttagacggactgcggtctcctaaaggtcgaccatggtggccgggacccgctgtcttctagcgttgctgcttccccaggtcctcctgggcggcgcggctggcctcgttccggagctgggccgcaggaagttcgcggcggcgtcgtcgggccgcccctcatcccagccctctgacgaggtcctgagcgagttcgagttgcggctgctcagcatgttcggcctgaaacagagacccacccccagcagggacgccgtggtgcccccctacatgctagacctgtatcgcaggcactcaggtcagccgggctcacccgccccagaccaccggttggagagggcagccagccgagccaacactgtgcgcagcttccaccatgaagaatctttggaagaactaccagaaacgagtgggaaaacaacccggagattcttctttaatttaagttctatccccacggaggagtttatcacctcagcagagcttcaggttttccgagaacagatgcaagatgctttaggaaacaatagcagtttccatcaccgaattaatatttatgaaatcataaaacctgcaacagccaactcgaaattccccgtgaccagacttttggacaccaggttggtgaatcagaatgcaagcaggtgggaaagttttgatgtcacccccgctgtgatgcggtggactgcacagggacacgccaaccatggattcgtggtggaagtggcccacttggaggagaaacaaggtgtctccaagagacatgttaggataagcaggtctttgcaccaagatgaacacagctggtcacagataaggccattgctagtaacttttggccatgatggaaaagggcatcctctccacaaaagagaaaaacgtcaagccaaacacaaacagcggaaacgccttaagtccagctgtaagagacaccctttgtacgtggacttcagtgacgtggggtggaatgactggattgtggctcccccggggtatcacgccttttactgccacggagaatgcccttttcctctggctgatcatctgaactccactaatcatgccattgttcagacgttggtcaactctgttaactctaagattcctaaggcatgctgtgtcccgacagaactcagtgctatctcgatgctgtaccttgacgagaatgaaaaggttgtattaaagaactatcaggacatggttgtggagggttgtgggtgtcgctagtacagcaaaattaaatacataaatatatatatatatatatattttagaaaaaagaaaaaaacaaacaaacaaaaaaaccccaccccagttgacactttaatatttcccaatgaagactttatttatggaatggaatggaaaaaaaaacagctattttgaaaatatatttatatctacgaaaagaagttgggaaaacaaatattttaatcagagaattattccttaaagatttaaaatgtatttagttgtacattttatatgggttcaaccccagcacatgaagtataatggtcagatttattttgtatttatttactattataaccactttttaggaaaaaaatagctaatttgtatttatatgtaatcaaaagaagtatcgggtttgtacataattttccaaaaattgtagttgttttcagttgtgtgtatttaagatgaaaagtctacatggaaggttactctggcaaagtgcttagcacgtttgcttttttgcagtgctactgttgagttcacaagttcaagtccagaaaaaaaaagtggataatccactctgctgactttcaagattattatattattcaattctcaggaatgttgcagagtgattgtccaatccatgagaatttacatccttattaggtggaatatttggataagaaccagacattgctgatctattatagaaactctcctcctgccccttaatttacagaaagaataaagcaggatccatagaaataattaggaaaacgatgaacctgcaggaaagtgaatgatggtttgttgttcttctttcctaaattagtgatcccttcaaaggggctgatctggccaaagtattcaataaaacgtaagatttcttcattattgatattgtggtcatatatatttaaaattgatatctcgtggccctcatcaagggttggaaatttatttgtgttttacctttacctcatctgagagctctttattctccaaagaacccagttttctaactttttgcccaacacgcagcaaaattatgcacatcgtgttttctgcccaccctctgttctctgacctatcagcttgcttttctttccaaggttgtgtgtttgaacacatttctccaaatgttaaacctatttcagataataaatatcaaatctctggcatttcattctataaagtccaacctgtaagag

SEQ ID NO: 11195 - protein, 396 aa, Homo sapiens; identical to SEQ ID NO: 1867

SEQ ID NO: 11196 - DNA, 853 bp, Homo sapiens
gcccaggatggctgccccgagccatgggccgcggcggagctagcgcggagcgcccgaccctcgacccccgagtcccggagccggccccgcgcggggccacgcgtccctcgggcgctggttcctaaggaggacgacagcaccagcttctcctttctcccttcccttccctgccccgcactcctccccctgctcgctgttgttgtgtgtcagcacttggctggggacttcttgaacttgcagggagaataacttgcgcaccccactttgcgccggtgcctttgccccagcggagcctgcttcgccatctccgagccccaccgcccctccactcctcggccttgcccgacactgagacgctgttcccagcgtgaaaagagagactgcgcggccggcacccgggagaaggaggaggcaaagaaaaggaacggacattcggtccttgcgccaggtcctttgaccagagtttttccatgtggacgctctttcaatggacgtgtccccgcgtgcttcttagacggactgcggtctcctaaagcgttgctgcttccccaggtcctcctgggcggcgcggctggcctcgttccggagctgggccgcaggaagttcgcggcggcgtcgtcgggccgcccctcatcccagccctctgacgaggtcctgagcgagttcgagttgcggctgctcagcatgttcggcctgaaacagagacccacccccagcagggacgccgtggtgcccccctacatgctagacctgtatcgcaggcactcaggtcagccgggctcacccgccccagaccaccggttggagagggcagccagccgagccaacactgtgcgcagcttccaccatgaag

SEQ ID NO: 11197 - protein, 55 aa, Homo sapiens
MFGLKQRPTPSRDAVVPPYMLDLYRRHSGQPGSPAPDHRLERAASRANTVRSFHH

SEQ ID NO: 11198 - DNA, 1438 bp, Homo sapiens
cacctcagcagagcttcaggttttccgagaacagatgcaagatgctttaggaaacaatagcagtttccatcaccgaattaatatttatgaaatcataaaacctgcaacagccaactcgaaattccccgtgaccagacttttggacaccaggttggtgaatcagaatgcaagcaggtgggaaagttttgatgtcacccccgctgtgatgcggtggactgcacagggacacgccaaccatggattcgtggtggaagtggcccacttggaggagaaacaaggtgtctccaagagacatgttaggataagcaggtctttgcaccaagatgaacacagctggtcacagataaggccattgctagtaacttttcctctggctgatcatctgaactccactaatcatgccattgttcagacgttggtcaactctgttaactctaagattcctaaggcatgctgtgtcccgacagaactcagtgctatctcgatgctgtaccttgacgagaatgaaaaggttgtattaaagaactatcaggacatggttgtggagggttgtgggtgtcgctagtacagcaaaattaaatacataaatatatatatatatatatattttagaaaaaagaaaaaaacaaacaaacaaaaaaaccccaccccagttgacactttaatatttcccaatgaagactttatttatggaatggaatggaaaaaaaaacagctattttgaaaatatatttatatctacgaaaagaagttgggaaaacaaatattttaatcagagaattattccttaaagatttaaaatgtatttagttgtacattttatatgggttcaaccccagcacatgaagtataatggtcagatttattttgtatttatttactattataaccactttttaggaaaaaaatagctaatttgtatttatatgtaatcaaaagaagtatcgggtttgtacataattttccaaaaattgtagttgttttcagttgtgtgtatttaagatgaaaagtctacatggaaggttactctggcaaagtgcttagcacgtttgcttttttgcagtgctactgttgagttcacaagttcaagtccagaaaaaaaaagtggataatccactctgctgactttcaagattattatattattcaattctcaggaatgttgcagagtgattgtccaatccatgagaatttacatccttattaggtggaatatttggataagaaccagacattgctgatctattatagaaactctcctcctgccccttaatttacagaaagaataaagcaggatccatagaaataattaggaaaacgatgaacctgcaggaaagtgaatgatggtttgttgttcttctttcctaaattagtgatcccttcaaaggggctgatctggccaaagtattcaataaaacgtaagatttcttcattattg

SEQ ID NO: 11199 - protein, 176 aa, Homo sapiens
MQDALGNNSSFHHRINIYEIIKPATANSKFPVTRLLDTRLVNQNASRWESFDVTPAVMRWTAQGHANHGFVVEVAHLEEKQGVSKRHVRISRSLHQDEHSWSQIRPLLVTFPLADHLNSTNHAIVQTLVNSVNSKIPKACCVPTELSAISMLYLDENEKVVLKNYQDMVVEGCGCR

SEQ ID NO: 11200 - DNA, 1752 bp, Homo sapiens
cacctcagcagagcttcaggttttccgagaacagatgcaagatgctttaggaaacaatagcagtttccatcaccgaattaatatttatgaaatcataaaacctgcaacagccaactcgaaattccccgtgaccagacttttggacaccaggttggtgaatcagaatgcaagcaggtgggaaagttttgatgtcacccccgctgtgatgcggtggactgcacagggacacgccaaccatggattcgtggtggaagtggcccacttggaggagaaacaaggtgtctccaagagacatgttaggataagcaggtctttgcaccaagatgaacacagctggtcacagataaggccattgctagtaacttttcctctggctgatcatctgaactccactaatcatgccattgttcagacgttggtcaactctgttaactctaagattcctaaggcatgctgtgtcccgacagaactcagtgctatctcgatgctgtaccttgacgagaatgaaaaggttgtattaaagaactatcaggacatggttgtggagggttgtgggtgtcgctagtacagcaaaattaaatacataaatatatatatatatatatattttagaaaaaagaaaaaaacaaacaaacaaaaaaaccccaccccagttgacactttaatatttcccaatgaagactttatttatggaatggaatggaaaaaaaaacagctattttgaaaatatatttatatctacgaaaagaagttgggaaaacaaatattttaatcagagaattattccttaaagatttaaaatgtatttagttgtacattttatatgggttcaaccccagcacatgaagtataatggtcagatttattttgtatttatttactattataaccactttttaggaaaaaaatagctaatttgtatttatatgtaatcaaaagaagtatcgggtttgtacataattttccaaaaattgtagttgttttcagttgtgtgtatttaagatgaaaagtctacatggaaggttactctggcaaagtgcttagcacgtttgcttttttgcagtgctactgttgagttcacaagttcaagtccagaaaaaaaaagtggataatccactctgctgactttcaagattattatattattcaattctcaggaatgttgcagagtgattgtccaatccatgagaatttacatccttattaggtggaatatttggataagaaccagacattgctgatctattatagaaactctcctcctgccccttaatttacagaaagaataaagcaggatccatagaaataattaggaaaacgatgaacctgcaggaaagtgaatgatggtttgttgttcttctttcctaaattagtgatcccttcaaaggggctgatctggccaaagtattcaataaaacgtaagatttcttcattattgatattgtggtcatatatatttaaaattgatatctcgtggccctcatcaagggttggaaatttatttgtgttttacctttacctcatctgagagctctttattctccaaagaacccagttttctaactttttgcccaacacgcagcaaaattatgcacatcgtgttttctgcccaccctctgttctctgacctatcagcttgcttttctttccaaggttgtgtgtttgaacacatttctccaaatgttaaacctatttcagataataaatatcaaatctctggcatttcattctataaagtccaacctgtaagag

SEQ ID NO: 11201 - protein, 176 aa, Homo sapiens; identical to SEQ ID NO: 11199

SEQ ID NO: 11202 - DNA, 4656 bp, Homo sapiens
cagtagtagttccccagcgtgcgcccggggagaccgggaacatggcgctgggagcgctgtagcagctgagaaggggctgaggcaccgccgcttcgctgacagccggccaccaggtttctgtctcccagtataatcatatccagccccatggctcttactggggcctctgaaatgtttatcaccaaatctgtgtctgcagttccaacctcttccctgagcatcaaagctgtatttccaactttcgctggatgcttctatctggaaatacactgtggtgaaatgcttccacctcttgctaaaatgaacactgaggaaaaatgaagaagactgacaagcaccagcgaaaagttgcagaatagaaatagccacactcctctggagtctttaattcatccacagccatcatataaaggttttggcatcatgtttgggaagaaaaagaaaaagattgaaatatctggcccgtccaactttgaacacagggttcatactgggtttgatccacaagagcagaagtttaccggccttccccagcagtggcacagcctgttagcagatacggccaacaggccaaagcctatggtggacccttcatgcatcacacccatccagctggctcctatgaagacaatcgttagaggaaacaaaccctgcaaggaaacctccatcaacggcctgctagaggattttgacaacatctcggtgactcgctccaactccctaaggaaagaaagcccacccaccccagatcagggagcctccagccacggtccaggccacgcggaagaaaatggcttcatcaccttctcccagtattccagcgaatccgatactactgctgactacacgaccgaaaagtacagggagaagagtctctatggagatgatctggatccgtattatagaggcagccacgcagccaagcaaaatgggcacgtaatgaaaatgaagcacggggaggcctactattctgaggtgaagcctttgaaatccgattttgccagattttctgccgattatcactcacatttggactcactgagcaaaccaagtgaatacagtgacctcaagtgggagtatcagagagcctcgagtagctcccctctggattattcattccaattcacaccttctagaactgcagggaccagcgggtgctccaaggagagcctggcgtacagtgaaagtgaatggggacccagcctggatgactatgacaggaggccaaagtcttcgtacctgaatcagacaagccctcagcccaccatgcggcagaggtccaggtcaggctcgggactccaggaaccgatgatgccatttggagcaagtgcatttaaaacccatccccaaggacactcctacaactcctacacctaccctcgcttgtccgagcccacaatgtgcattccaaaggtggattacgatcgagcacagatggtcctcagccctccactgtcagggtctgacacctaccccaggggccctgccaaactacctcaaagtcaaagcaaatcgggctattcctcaagcagtcaccagtacccgtctgggtaccacaaagccaccttgtaccatcacccctccctgcagagcagttcgcagtacatctccacggcttcctacctgagctccctcagcctctcatccagcacctacccgccgcccagctggggctcctcctccgaccagcagccctccagggtgtcccatgaacagtttcgggcggccctgcagctggtggtcagcccaggagaccccagggaatacttggccaactttatcaaaatcggggaaggctcaaccggcatcgtatgcatcgccaccgagaaacacacagggaaacaagttgcagtgaagaaaatggacctccggaagcaacagagacgagaactgcttttcaatgaggtcgtgatcatgcgggattaccaccatgacaatgtggttgacatgtacagcagctaccttgtcggcgatgagctctgggtggtcatggagtttctagaaggtggtgccttgacagacattgtgactcacaccagaatgaatgaagaacagatagctactgtctgcctgtcagttctgagagctctctcctaccttcataaccaaggagtgattcacagggacataaaaagtgactccatcctcctgacaagcgatggccggataaagttgtctgattttggtttctgtgctcaagtttccaaagaggtgccgaagaggaaatcattggttggcactccctactggatggcccctgaggtgatttctaggctaccttatgggacagaggtggacatctggtccctcgggatcatggtgatagaaatgattgatggcgagcccccctacttcaatgagcctcccctccaggcgatgcggaggatccgggacagtttacctccaagagtgaaggacctacacaaggtttcttcagtgctccggggattcctagacttgatgttggtgagggagccctctcagagagcaacagcccaggaactcctcggacatccattcttaaaactagcaggtccaccgtcttgcatcgtccccctcatgagacaatacaggcatcactgagcagaggattcgtgtaggtggcaaagctagatgaggacatgagaataattcaggagaacaaaaggaaacacagaacatgcaaaaggcctgtgcattctagaccagccaattggtgggacagcgtgatgaccggcagggttcaacagaccagggcatcttcttgtgtcttaaacaggcatctctccactgacagccggtgtggtcacttggagcacggctttaataagtcattattatatttttcagcccttcatccagcaaatcagaaggactcagtacaaactccgttatgatatatcctagccacatgcagggtaacatgtaggattttctatattgaaagaatacttttctggcaaaaaaaaaaaaaaaagaaagaaaggaaaacaaaaagcacttttttcttaatggtagcagtataatgtattttgcaacgaatttgtaatttttctgtacgatagttttgataatttatagtactttgatgtcatgtagccattgtatcagttgaagtaatacttgtttactagaggagtttgaacaaagcctttcctacttttttatccctttaagagaaccaatgattctttaggaactttgaatactgaatgactctcaatcaccgtcagctttagtaaaatctctttcttatcctaacaagtgtcttatttggtggaagaagaattaagagtgatggtgatggtgtgcacgtttcattaatccaaccaaaaataatgaaataaaatttgagccacagtataccactccttgggataaagttaaatatttttaaagatcacattttccatgaacgcctctagtagcaaaccattcttttgcacaccacaatgtttccctcagtgccctttctcaaatgggtacaatgttcccttgtggccaaatttccctcccagggagcaatttcagtgctaggatcattggattcagttcccaaaatagaatgtttcagtgagaccatgagaattccaggctcacaaagggagaggagagaacagggcaagacgtttggtttcatttgtcaccatttttaaaactctgtatgctagcacaccaaactcttgtctatatttacctttgtaccacagtattaatcgctattgttcatgtatcgtgctggaagtctgaactgactctagaggatgaattagcaagagggtattttaccaggtatgatctgacttcagttgtgcccatgttataatgtgtttccgacataggagagtcgtgctgctgtctagatcttcttgaatgttgataaaaatgaatgactactacaatacattttgtgttgcttgttggatgaatttgcatgttaactgtaggccaatatagatttgcctttaaaactctggaagagctacatagtcatcattagtttctattaattatgcatcagacaaaagccatttgttaccaaactgggaaaacagaggcttttcttaactatttcacatactgtaacaaatatgaatttaaatttgtgatagcgctctggttgctctaagcataattaagaatttttgtaattaataggttgctaattatttatcactgctaaaaaggaaaaaaggcataaaatgaccttctactgattagattttcagttttctttcaaactggaaatgcctccataaatatgatctatgattttgcttcataaaacagcaaatcaatgttttatgtaaaatattaaagcattaatataaatatgtgagaataaaaacaatctaaatccagaaaatggcagtcctaaatgttcatgagacagattgtattaatttaaccaggactatgtagaagtagaaagaaaagaaaaagaaaatcttttttaaaccagaataaacattaaaaactattgcagaaaatagtggattttggattccaaacattttcgacagtgtaatggaaatttttctgtaattttcttaccatcgggtattttttaaagtattcattgagtttaccaaaagttactgtagcttaaaaggttttgtgagcactaactattggcagaaactgcatttgcaaataaaaataaatgtttgccttttc

SEQ ID NO: 11203 - protein, 719 aa, Homo sapiens; identical to SEQ ID NO: 1869

SEQ ID NO: 11204 - DNA, 4527 bp, Homo sapiens
cccccttgcccctacccagccagtagtagttccccagcgtgcgcccggggagaccgggaacatggcgctgggagcgctgtagcagctgagaaggggctgaggcaccgccgcttcgctgacagccggccaccagaaatacactgtggtgaaatgcttccacctcttgctaaaatgaacactgaggaaaaatgaagaagactgacaagcaccagcgaaaagttgcagaatagaaatagccacactcctctggagtctttaattcatccacagccatcatataaaggttttggcatcatgtttgggaagaaaaagaaaaagattgaaatatctggcccgtccaactttgaacacagggttcatactgggtttgatccacaagagcagaagtttaccggccttccccagcagtggcacagcctgttagcagatacggccaacaggccaaagcctatggtggacccttcatgcatcacacccatccagctggctcctatgaagacaatcgttagaggaaacaaaccctgcaaggaaacctccatcaacggcctgctagaggattttgacaacatctcggtgactcgctccaactccctaaggaaagaaagcccacccaccccagatcagggagcctccagccacggtccaggccacgcggaagaaaatggcttcatcaccttctcccagtattccagcgaatccgatactactgctgactacacgaccgaaaagtacagggagaagagtctctatggagatgatctggatccgtattatagaggcagccacgcagccaagcaaaatgggcacgtaatgaaaatgaagcacggggaggcctactattctgaggtgaagcctttgaaatccgattttgccagattttctgccgattatcactcacatttggactcactgagcaaaccaagtgaatacagtgacctcaagtgggagtatcagagagcctcgagtagctcccctctggattattcattccaattcacaccttctagaactgcagggaccagcgggtgctccaaggagagcctggcgtacagtgaaagtgaatggggacccagcctggatgactatgacaggaggccaaagtcttcgtacctgaatcagacaagccctcagcccaccatgcggcagaggtccaggtcaggctcgggactccaggaaccgatgatgccatttggagcaagtgcatttaaaacccatccccaaggacactcctacaactcctacacctaccctcgcttgtccgagcccacaatgtgcattccaaaggtggattacgatcgagcacagatggtcctcagccctccactgtcagggtctgacacctaccccaggggccctgccaaactacctcaaagtcaaagcaaatcgggctattcctcaagcagtcaccagtacccgtctgggtaccacaaagccaccttgtaccatcacccctccctgcagagcagttcgcagtacatctccacggcttcctacctgagctccctcagcctctcatccagcacctacccgccgcccagctggggctcctcctccgaccagcagccctccagggtgtcccatgaacagtttcgggcggccctgcagctggtggtcagcccaggagaccccagggaatacttggccaactttatcaaaatcggggaaggctcaaccggcatcgtatgcatcgccaccgagaaacacacagggaaacaagttgcagtgaagaaaatggacctccggaagcaacagagacgagaactgcttttcaatgaggtcgtgatcatgcgggattaccaccatgacaatgtggttgacatgtacagcagctaccttgtcggcgatgagctctgggtggtcatggagtttctagaaggtggtgccttgacagacattgtgactcacaccagaatgaatgaagaacagatagctactgtctgcctgtcagttctgagagctctctcctaccttcataaccaaggagtgattcacagggacataaaaagtgactccatcctcctgacaagcgatggccggataaagttgtctgattttggtttctgtgctcaagtttccaaagaggtgccgaagaggaaatcattggttggcactccctactggatggcccctgaggtgatttctaggctaccttatgggacagaggtggacatctggtccctcgggatcatggtgatagaaatgattgatggcgagcccccctacttcaatgagcctcccctccaggcgatgcggaggatccgggacagtttacctccaagagtgaaggacctacacaaggtttcttcagtgctccggggattcctagacttgatgttggtgagggagccctctcagagagcaacagcccaggaactcctcggacatccattcttaaaactagcaggtccaccgtcttgcatcgtccccctcatgagacaatacaggcatcactgagcagaggattcgtgtaggtggcaaagctagatgaggacatgagaataattcaggagaacaaaaggaaacacagaacatgcaaaaggcctgtgcattctagaccagccaattggtgggacagcgtgatgaccggcagggttcaacagaccagggcatcttcttgtgtcttaaacaggcatctctccactgacagccggtgtggtcacttggagcacggctttaataagtcattattatatttttcagcccttcatccagcaaatcagaaggactcagtacaaactccgttatgatatatcctagccacatgcagggtaacatgtaggattttctatattgaaagaatacttttctggcaaaaaaaaaaaaaaaagaaagaaaggaaaacaaaaagcacttttttcttaatggtagcagtataatgtattttgcaacgaatttgtaatttttctgtacgatagttttgataatttatagtactttgatgtcatgtagccattgtatcagttgaagtaatacttgtttactagaggagtttgaacaaagcctttcctacttttttatccctttaagagaaccaatgattctttaggaactttgaatactgaatgactctcaatcaccgtcagctttagtaaaatctctttcttatcctaacaagtgtcttatttggtggaagaagaattaagagtgatggtgatggtgtgcacgtttcattaatccaaccaaaaataatgaaataaaatttgagccacagtataccactccttgggataaagttaaatatttttaaagatcacattttccatgaacgcctctagtagcaaaccattcttttgcacaccacaatgtttccctcagtgccctttctcaaatgggtacaatgttcccttgtggccaaatttccctcccagggagcaatttcagtgctaggatcattggattcagttcccaaaatagaatgtttcagtgagaccatgagaattccaggctcacaaagggagaggagagaacagggcaagacgtttggtttcatttgtcaccatttttaaaactctgtatgctagcacaccaaactcttgtctatatttacctttgtaccacagtattaatcgctattgttcatgtatcgtgctggaagtctgaactgactctagaggatgaattagcaagagggtattttaccaggtatgatctgacttcagttgtgcccatgttataatgtgtttccgacataggagagtcgtgctgctgtctagatcttcttgaatgttgataaaaatgaatgactactacaatacattttgtgttgcttgttggatgaatttgcatgttaactgtaggccaatatagatttgcctttaaaactctggaagagctacatagtcatcattagtttctattaattatgcatcagacaaaagccatttgttaccaaactgggaaaacagaggcttttcttaactatttcacatactgtaacaaatatgaatttaaatttgtgatagcgctctggttgctctaagcataattaagaatttttgtaattaataggttgctaattatttatcactgctaaaaaggaaaaaaggcataaaatgaccttctactgattagattttcagttttctttcaaactggaaatgcctccataaatatgatctatgattttgcttcataaaacagcaaatcaatgttttatgtaaaatattaaagcattaatataaatatgtgagaataaaaacaatctaaatccagaaaatggcagtcctaaatgttcatgagacagattgtattaatttaaccaggactatgtagaagtagaaagaaaagaaaaagaaaatcttttttaaaccagaataaacattaaaaactattgcagaaaatagtggattttggattccaaacattttcgacagtgtaatggaaatttttctgtaattttcttaccatcgggtattttttaaagtattcattgagtttaccaaaagttactgtagcttaaaaggttttgtgagcactaactattggcagaaactgcatttgcaaataaaaataaatgtttgccttttc

SEQ ID NO: 11205 - protein, 719 aa, Homo sapiens; identical to SEQ ID NO: 1869

SEQ ID NO: 11206 - DNA, 4308 bp, Homo sapiens
ggagcagctgcgtacgctcatggacagtcctccgaggggcgaagccgggcagctgggcatgctcatagtagttccccagcgtgcgcccggggagaccgggaacatggcgctgggagcgctgtagcagctgagaaggggctgaggcaccgccgcttcgctgacagccggccaccagaaatacactgtggtgaaatgcttccacctcttgctaaaatgaacactgaggaaaaatgaagaagactgacaagcaccagcgaaaagttgcagaatagaaatagccacactcctctggagtctttaattcatccacagccatcatataaaggttttggcatcatgtttgggaagaaaaagaaaaagattgaaatatctggcccgtccaactttgaacacagggttcatactgggtttgatccacaagagcagaagtttaccggccttccccagcagtggcacagcctgttagcagatacggccaacaggccaaagcctatggtggacccttcatgcatcacacccatccagctggctcctatgaagacaatcgttagaggaaacaaaccctgcaaggaaacctccatcaacggcctgctagaggattttgacaacatctcggtgactcgctccaactccctaaggaaagaaagcccacccaccccagatcagggagcctccagccacggtccaggccacgcggaagaaaatggcttcatcaccttctcccagtattccagcgaatccgatactactgctgactacacgaccgaaaagtacagggagaagagtctctatggagatgatctggatccgtattatagaggcagccacgcagccaagcaaaatgggcacgtaatgaaaatgaagcacggggaggcctactattctgaggtgaagcctttgaaatccgattttgccagattttctgccgattatcactcacatttggactcactgagcaaaccaagtgaatacagtgacctcaagtgggagtatcagagagcctcgagtagctcccctctggattattcattccaattcacaccttctagaactgcagggaccagcgggtgctccaaggagagcctggcgtacagtgaaagtgaatggggacccagcctggatgactatgacaggaggccaaagtcttcgtacctgaatcagacaagccctcagcccaccatgcggcagaggtccaggtcaggctcgggactccaggaaccgatgatgccatttggagcaagtgcatttaaaacccatccccaaggacactcctacaactcctacacctaccctcgcttgtccgagcccacaatgtgcattccaaaggtggattacgatcgagcacagatggtcctcagccctccactgtcagggtctgacacctaccccaggggccctgccaaactacctcaaagtcaaagcaaatcgggctattcctcaagcagtcaccagtacccgtctgggtaccacaaagccaccttgtaccatcacccctccctgcagagcagttcgcagtacatctccacggcttcctacctgagctccctcagcctctcatccagcacctacccgccgcccagctggggctcctcctccgaccagcagccctccagggtgtcccatgaacagtttcgggcggccctgcagctggtggtcagcccaggagaccccagggaatacttggccaactttatcaaaatcggggaaggctcaaccggcatcgtatgcatcgccaccgagaaacacacagggaaacaagttgcagtgaagaaaatggacctccggaagcaacagagacgagaactgcttttcaatgaggtcgtgatcatgcgggattaccaccatgacaatgtggttgacatgtacagcagctaccttgtcggcgatgagctctgggtggtcatggagtttctagaaggtggtgccttgacagacattgtgactcacaccagaatgaatgaagaacagatagctactgtctgcctgtcagttctgagagctctctcctaccttcataaccaaggagtgattcacagggacataaaaagtgactccatcctcctgacaagcgatggccgggtttcttcagtgctccggggattcctagacttgatgttggtgagggagccctctcagagagcaacagcccaggaactcctcggacatccattcttaaaactagcaggtccaccgtcttgcatcgtccccctcatgagacaatacaggcatcactgagcagaggattcgtgtaggtggcaaagctagatgaggacatgagaataattcaggagaacaaaaggaaacacagaacatgcaaaaggcctgtgcattctagaccagccaattggtgggacagcgtgatgaccggcagggttcaacagaccagggcatcttcttgtgtcttaaacaggcatctctccactgacagccggtgtggtcacttggagcacggctttaataagtcattattatatttttcagcccttcatccagcaaatcagaaggactcagtacaaactccgttatgatatatcctagccacatgcagggtaacatgtaggattttctatattgaaagaatacttttctggcaaaaaaaaaaaaaaaagaaagaaaggaaaacaaaaagcacttttttcttaatggtagcagtataatgtattttgcaacgaatttgtaatttttctgtacgatagttttgataatttatagtactttgatgtcatgtagccattgtatcagttgaagtaatacttgtttactagaggagtttgaacaaagcctttcctacttttttatccctttaagagaaccaatgattctttaggaactttgaatactgaatgactctcaatcaccgtcagctttagtaaaatctctttcttatcctaacaagtgtcttatttggtggaagaagaattaagagtgatggtgatggtgtgcacgtttcattaatccaaccaaaaataatgaaataaaatttgagccacagtataccactccttgggataaagttaaatatttttaaagatcacattttccatgaacgcctctagtagcaaaccattcttttgcacaccacaatgtttccctcagtgccctttctcaaatgggtacaatgttcccttgtggccaaatttccctcccagggagcaatttcagtgctaggatcattggattcagttcccaaaatagaatgtttcagtgagaccatgagaattccaggctcacaaagggagaggagagaacagggcaagacgtttggtttcatttgtcaccatttttaaaactctgtatgctagcacaccaaactcttgtctatatttacctttgtaccacagtattaatcgctattgttcatgtatcgtgctggaagtctgaactgactctagaggatgaattagcaagagggtattttaccaggtatgatctgacttcagttgtgcccatgttataatgtgtttccgacataggagagtcgtgctgctgtctagatcttcttgaatgttgataaaaatgaatgactactacaatacattttgtgttgcttgttggatgaatttgcatgttaactgtaggccaatatagatttgcctttaaaactctggaagagctacatagtcatcattagtttctattaattatgcatcagacaaaagccatttgttaccaaactgggaaaacagaggcttttcttaactatttcacatactgtaacaaatatgaatttaaatttgtgatagcgctctggttgctctaagcataattaagaatttttgtaattaataggttgctaattatttatcactgctaaaaaggaaaaaaggcataaaatgaccttctactgattagattttcagttttctttcaaactggaaatgcctccataaatatgatctatgattttgcttcataaaacagcaaatcaatgttttatgtaaaatattaaagcattaatataaatatgtgagaataaaaacaatctaaatccagaaaatggcagtcctaaatgttcatgagacagattgtattaatttaaccaggactatgtagaagtagaaagaaaagaaaaagaaaatcttttttaaaccagaataaacattaaaaactattgcagaaaatagtggattttggattccaaacattttcgacagtgtaatggaaatttttctgtaattttcttaccatcgggtattttttaaagtattcattgagtttaccaaaagttactgtagcttaaaaggttttgtgagcactaactattggcagaaactgcatttgcaaataaaaataaatgtttgccttttc

SEQ ID NO: 11207 - protein, 632 aa, Homo sapiens
MFGKKKKKIEISGPSNFEHRVHTGFDPQEQKFTGLPQQWHSLLADTANRPKPMVDPSCITPIQLAPMKTIVRGNKPCKETSINGLLEDFDNISVTRSNSLRKESPPTPDQGASSHGPGHAEENGFITFSQYSSESDTTADYTTEKYREKSLYGDDLDPYYRGSHAAKQNGHVMKMKHGEAYYSEVKPLKSDFARFSADYHSHLDSLSKPSEYSDLKWEYQRASSSSPLDYSFQFTPSRTAGTSGCSKESLAYSESEWGPSLDDYDRRPKSSYLNQTSPQPTMRQRSRSGSGLQEPMMPFGASAFKTHPQGHSYNSYTYPRLSEPTMCIPKVDYDRAQMVLSPPLSGSDTYPRGPAKLPQSQSKSGYSSSSHQYPSGYHKATLYHHPSLQSSSQYISTASYLSSLSLSSSTYPPPSWGSSSDQQPSRVSHEQFRAALQLVVSPGDPREYLANFIKIGEGSTGIVCIATEKHTGKQVAVKKMDLRKQQRRELLFNEVVIMRDYHHDNVVDMYSSYLVGDELWVVMEFLEGGALTDIVTHTRMNEEQIATVCLSVLRALSYLHNQGVIHRDIKSDSILLTSDGRVSSVLRGFLDLMLVREPSQRATAQELLGHPFLKLAGPPSCIVPLMRQYRHH

SEQ ID NO: 11208 - DNA, 4780 bp, Homo sapiens
cgaaaacccggagcagctgcgtacgctcatggacagtcctccgaggggcgaagccgggcagctgggcatgctcagtagctgggggaggtttgggtggagagtagaaagctgtggctctgcctctcaccccctcccgctggcccccgccccccttgcccctacccagccagtagtagttccccagcgtgcgcccggggagaccgggaacatggcgctgggagcgctgtagcagctgagaaggggctgaggcaccgccgcttcgctgacagccggccaccagatgttcatgcattctagagaaagtggaaaacttagaagcctaattaatgactgtcttctggacctctgagaccatgtttctagtgttttccgtggaatattatcagaaatacactgtggtgaaatgcttccacctcttgctaaaatgaacactgaggaaaaatgaagaagactgacaagcaccagcgaaaagttgcagaatagaaatagccacactcctctggagtctttaattcatccacagccatcatataaaggttttggcatcatgtttgggaagaaaaagaaaaagattgaaatatctggcccgtccaactttgaacacagggttcatactgggtttgatccacaagagcagaagtttaccggccttccccagcagtggcacagcctgttagcagatacggccaacaggccaaagcctatggtggacccttcatgcatcacacccatccagctggctcctatgaagacaatcgttagaggaaacaaaccctgcaaggaaacctccatcaacggcctgctagaggattttgacaacatctcggtgactcgctccaactccctaaggaaagaaagcccacccaccccagatcagggagcctccagccacggtccaggccacgcggaagaaaatggcttcatcaccttctcccagtattccagcgaatccgatactactgctgactacacgaccgaaaagtacagggagaagagtctctatggagatgatctggatccgtattatagaggcagccacgcagccaagcaaaatgggcacgtaatgaaaatgaagcacggggaggcctactattctgaggtgaagcctttgaaatccgattttgccagattttctgccgattatcactcacatttggactcactgagcaaaccaagtgaatacagtgacctcaagtgggagtatcagagagcctcgagtagctcccctctggattattcattccaattcacaccttctagaactgcagggaccagcgggtgctccaaggagagcctggcgtacagtgaaagtgaatggggacccagcctggatgactatgacaggaggccaaagtcttcgtacctgaatcagacaagccctcagcccaccatgcggcagaggtccaggtcaggctcgggactccaggaaccgatgatgccatttggagcaagtgcatttaaaacccatccccaaggacactcctacaactcctacacctaccctcgcttgtccgagcccacaatgtgcattccaaaggtggattacgatcgagcacagatggtcctcagccctccactgtcagggtctgacacctaccccaggggccctgccaaactacctcaaagtcaaagcaaatcgggctattcctcaagcagtcaccagtacccgtctgggtaccacaaagccaccttgtaccatcacccctccctgcagagcagttcgcagtacatctccacggcttcctacctgagctccctcagcctctcatccagcacctacccgccgcccagctggggctcctcctccgaccagcagccctccagggtgtcccatgaacagtttcgggcggccctgcagctggtggtcagcccaggagaccccagggaatacttggccaactttatcaaaatcggggaaggctcaaccggcatcgtatgcatcgccaccgagaaacacacagggaaacaagttgcagtgaagaaaatggacctccggaagcaacagagacgagaactgcttttcaatgaggtcgtgatcatgcgggattaccaccatgacaatgtggttgacatgtacagcagctaccttgtcggcgatgagctctgggtggtcatggagtttctagaaggtggtgccttgacagacattgtgactcacaccagaatgaatgaagaacagatagctactgtctgcctgtcagttctgagagctctctcctaccttcataaccaaggagtgattcacagggacataaaaagtgactccatcctcctgacaagcgatggccggataaagttgtctgattttggtttctgtgctcaagtttccaaagaggtgccgaagaggaaatcattggttggcactccctactggatggcccctgaggtgatttctaggctaccttatgggacagaggtggacatctggtccctcgggatcatggtgatagaaatgattgatggcgagcccccctacttcaatgagcctcccctccaggcgatgcggaggatccgggacagtttacctccaagagtgaaggacctacacaaggtttcttcagtgctccggggattcctagacttgatgttggtgagggagccctctcagagagcaacagcccaggaactcctcggacatccattcttaaaactagcaggtccaccgtcttgcatcgtccccctcatgagacaatacaggcatcactgagcagaggattcgtgtaggtggcaaagctagatgaggacatgagaataattcaggagaacaaaaggaaacacagaacatgcaaaaggcctgtgcattctagaccagccaattggtgggacagcgtgatgaccggcagggttcaacagaccagggcatcttcttgtgtcttaaacaggcatctctccactgacagccggtgtggtcacttggagcacggctttaataagtcattattatatttttcagcccttcatccagcaaatcagaaggactcagtacaaactccgttatgatatatcctagccacatgcagggtaacatgtaggattttctatattgaaagaatacttttctggcaaaaaaaaaaaaaaaagaaagaaaggaaaacaaaaagcacttttttcttaatggtagcagtataatgtattttgcaacgaatttgtaatttttctgtacgatagttttgataatttatagtactttgatgtcatgtagccattgtatcagttgaagtaatacttgtttactagaggagtttgaacaaagcctttcctacttttttatccctttaagagaaccaatgattctttaggaactttgaatactgaatgactctcaatcaccgtcagctttagtaaaatctctttcttatcctaacaagtgtcttatttggtggaagaagaattaagagtgatggtgatggtgtgcacgtttcattaatccaaccaaaaataatgaaataaaatttgagccacagtataccactccttgggataaagttaaatatttttaaagatcacattttccatgaacgcctctagtagcaaaccattcttttgcacaccacaatgtttccctcagtgccctttctcaaatgggtacaatgttcccttgtggccaaatttccctcccagggagcaatttcagtgctaggatcattggattcagttcccaaaatagaatgtttcagtgagaccatgagaattccaggctcacaaagggagaggagagaacagggcaagacgtttggtttcatttgtcaccatttttaaaactctgtatgctagcacaccaaactcttgtctatatttacctttgtaccacagtattaatcgctattgttcatgtatcgtgctggaagtctgaactgactctagaggatgaattagcaagagggtattttaccaggtatgatctgacttcagttgtgcccatgttataatgtgtttccgacataggagagtcgtgctgctgtctagatcttcttgaatgttgataaaaatgaatgactactacaatacattttgtgttgcttgttggatgaatttgcatgttaactgtaggccaatatagatttgcctttaaaactctggaagagctacatagtcatcattagtttctattaattatgcatcagacaaaagccatttgttaccaaactgggaaaacagaggcttttcttaactatttcacatactgtaacaaatatgaatttaaatttgtgatagcgctctggttgctctaagcataattaagaatttttgtaattaataggttgctaattatttatcactgctaaaaaggaaaaaaggcataaaatgaccttctactgattagattttcagttttctttcaaactggaaatgcctccataaatatgatctatgattttgcttcataaaacagcaaatcaatgttttatgtaaaatattaaagcattaatataaatatgtgagaataaaaacaatctaaatccagaaaatggcagtcctaaatgttcatgagacagattgtattaatttaaccaggactatgtagaagtagaaagaaaagaaaaagaaaatcttttttaaaccagaataaacattaaaaactattgcagaaaatagtggattttggattccaaacattttcgacagtgtaatggaaatttttctgtaattttcttaccatcgggtattttttaaagtattcattgagtttaccaaaagttactgtagcttaaaaggttttgtgagcactaactattggcagaaactgcatttgcaaataaaaataaatgtttgccttttc

SEQ ID NO: 11209 - protein, 719 aa, Homo sapiens; identical to SEQ ID NO: 1869

SEQ ID NO: 11210 - DNA, 2956 bp, Homo sapiens
ataaatcaagtccgcggggcatggaggctgctgtcgctgcagcagctcagcttgcccggggcgggaactccccctttctcctttcgcctccccagcacccacaccctgtctcccccttaattcttccctggataatagcaccctaacgacaacagtcataataatagggttagaacgacaggggaggaaaactcaacagcctaaatatctctgaaaactgcatcgcaaaatggaagaaagagggggtcccactactgtttcaaaagagagccatggaagtcaaatgctgaggatggtggcatcataggatgaatggagctgggttcttgaaacactgcctggaggaaagacagcaaaaatgcctcatgaatccaactggactgttaggatgctcacccttggagaccagcaacaatgtgtgcagaaacccaggccatgtggagaggccccacatacgtgtccaactgaggtcccagctgacagctggcattgacataatgttcactctgggggaagccagctgccacgctgtaaggacactcgggcagtcctatgaagaggcccgtgtggtgagaaagagaggcctccagccaacagccatagatggggtcttgctatgtttcccagttggagtgcagtgattattcacagacatgatcccactactgatcagcatgggagttttcacctgctccatttcccacctgggaggtcatcatattgatggcgagctaagtgtggacacctgatcagcatagcacagtacagcccagaacccctgggctccagtgatcctcttacttcagcctcttgagtagctggaactacaggcctgcaccactgcacccggctagtttgtttttgttagagttttgtctctaggattttcctcagctgagtatgtgaaggctaacttctccttgtgaatctgcaaatatccttattttaccctttattttaccatgtatcatttacaggtaaatgatatcttagctgtgtattgaatttctgttttttgttttttcttcagtactctataaatattactccagtatcttctagcttctcccattttctcctagtgaatggttattctgctcttatctagcaggtgataaatctgtcaacagatagtttttcctttttgttttatgtgtaagttgttatttcttccttaaagttcataatcttttcccatttattctctaaattttagactataaccaggatgtgtttaggttgatatctttgcttatctattctgcctggaaatcaggaacctcttccaatattcagacttgtgttttcagctcagaataattattttatcatttgtttgattattcctttagttgcactggatcttagttaaaatgcccattctgattcaaagtatctggaaggcaagtatttgtcaactaagggaaaggtgaccatgcatcattggttttgctgagactacctggtttacaccttcaggctttatacttagaaaatattgcgatcatcttctggtcatgaagttacaaacttcaggacaaaggctaaccagctaagactagcagagcaaattccaagaacttggggctttaattaacttgaattgatttggacttgccctacctttaacttcacactgagataaaaattccccacattttcaagccatttttgagatgagtctcttatggttgaaagcatcctaatttatacaacatccttttggtacctaactaaatattcaccaatatttggcacatttgttaaatcttttggtgtgtgcctcttctatgtaatgtaaatatggtctgaatatccattcagaaattatagttgatttgcaaaaataactactatatcacctatattaattgatagttattccttcccaaccttctttcactcttccatatatatacagagtaaatctacatcattatgttgattaaacaaaatagcagtgaaatcaggatgttactgctcattgtgcatttatttcaattatggaaaaagccaacactttactcccttatttaacacttctgtagaaaagcagttgaaataacctagtgtcattctaaaatgatttgtatactatgtagaccagaatctagggctatacctaaaaatacataaatgaaattattctagaagttaaatcttcatgaaaaaacaaattaaatggtttactaacctcaagctgattaaatgtttttattaaatgcagcctcagccagcacctcttttcatggctgcaataattaagtataataaatattcaaatcagtaattgaatttgttaaaaaaaacatgctcagctcagtgaagactttctaataaatagaattcaggtaccatattttcatacttcatgacacttgcctcatcttagtttgatgactgccgtttcttgcactgtaacaagattttatttttattttgttttacgctattcaaacaaatacattcaaagtcataggctacacctatgtataaccatattctgagagttggcttatgtgtttgtttattttctcacaattaaagataggtcagatgttgccaaattagtaaataactaaacttgagatgggaaatactctagagacacaatctgcttagttttgcatagttttgcatagttttagtcacttttcccgttactctgtccagctttccagtaatactcataacattgccttgatttcatatgaccacgcagtaaagtgattactgcacttagaattttgttgcttttgctgtgctaacaacttaaaagtttaaaataactgatgttcaaaacagtgaagatttccttttataaacaagttggaaaggaaagtttttatgttattatcctcaagtattctaactaatataaaatgtctttcagtcttttaggcaaaccatttagacaaaaagtacaaataataaatttacattgtgttaagctgcg

SEQ ID NO: 11211 - protein, 110 aa, Homo sapiens
MNGAGFLKHCLEERQQKCLMNPTGLLGCSPLETSNNVCRNPGHVERPHIRVQLRSQLTAGIDIMFTLGEASCHAVRTLGQSYEEARVVRKRGLQPTAIDGVLLCFPVGVQ

SEQ ID NO: 11212 - DNA, 4998 bp, Homo sapiens
gcgtgcgccctggggcccaagttggggcgcgccgtggctagaacacggagagcggcgggcagtgcagccaatgggaggcggcgctgcctagcggctggtaggcggtgcctgcgcgggtgttaggttagcgcgaggcgtgacctagttgacaggctctgaggtgctgctgtggcggcgtccgcggggctgaggcgggtgggagccggagccgagcgcgggctgagggaggagggcggcgactggagagcggcgagcggcgagcagcgcaggacgcagagcctctttcactttttccctgctgagtgccccctcccacccctcccactccacacacaccctgtttgcccgtgagcctggggaacttgcagcttaaagccagccacccccacggcaacatgtaccccagcaacaagaagaaaaaggtgtggagagaggagaaagaacgtttattgaagatgaccttagaagagagacgcaaagaatacctaagagactatattcccctgaacagcattctatcatggaaggaggagatgaagggcaagggccaaaatgatgaagaaaatactcaggaaacatcccaggtgaagaaaagtttgactgaaaaagtttctctctatagaggtgacatcacattgctagaggtagatgctatagtcaatgccgcaaatgccagtcttcttggaggaggaggtgtggatggctgtattcatagagcagccggcccctgtttgctagctgaatgtcgtaacctgaatggctgtgatactggacatgcaaaaatcacatgtggctatgaccttcctgcaaaatatgtcatccatactgtagggccaatagccaggggccatattaatggttcccacaaggaagaccttgcaaattgctataaatcatctctgaagctcgtgaaagaaaataacatccgatcagttgcatttccctgcatctcaacaggcatttatggctttcccaacgagcctgctgcagtcattgccctcaacaccattaaggaatggcttgccaagaatcaccatgaggtggatcggatcattttctgtgtcttcttagaagttgacttcaaaatctacaaaaagaaaatgaatgagtttttctccgtagacgataataatgaagaagaagaggatgttgaaatgaaagaagattcagatgagaacggtccagaggagaagcaaagtgtggaagaaatggaagagcagagccaagatgcagatggtgtcaacactgtcactgtgcccggccctgcttcagaagaggcagttgaagactgtaaagatgaagattttgcaaaggatgaaaatattacaaaaggcggtgaagtgacagatcattctgtgcgtgaccaagatcatcccgatggacaagagaatgattcaacgaagaatgaaataaaaattgaaacagaatcgcagagctcatatatggaaacagaagaactttcatcaaaccaagaagatgccgtgattgtggagcaaccagaagtgattccattaacagaggaccaagaagaaaaagaaggtgaaaaagctccaggcgaggacacacctaggatgcctgggaaaagtgaaggctccagtgacctagaaaatactccaggtcctgatgcaggggcacaagatgaagcgaaggaacaaagaaatggaactaaatgacaatcctcagcatcgcaaggcctctcctggctctgggggagctcgggaagatagcagcacacgctgtggaggagggtgggggtggggggaaggcaagtcccatggaaggacggggaatcctttactctaatttctccagctgcattttgttccgtttatctgcagaaaaagaaagaaaaaaaagaaaaaaaaagtttcctttaatttggtggagggacccatgttgacgcatctttcaggcattatccttgtaatttctgtcttttctcttacaactttgccccagggtcacagtggcttgattgaacactcacatgtgtatcctggcccctgtctgctttcttggttatttcacaaagctggtcacacagtggtttattcaaaggaaggggaggaagacagtggtttgataagctgcaggataaattttaggaatcaatgagcccagcagcagtataatccccagacagaggaggcaggatagaaaatgggcaaaagcctcggaaaccacttggaaaaggtctggacaatgaggtgaaaatattttcttcagggttcccaaggcacaatttgttccaagtggctaatgagaaatatggaagctgaattttttccagagcagagtgcagaggcataacagaagggtgggccctggcagccatctgggtctcttccttcctaaccatggtggcaggtgcatccttctttgacactgactttcagcagagcttacttggttcatgaggtcttcacatggagactaccagcaagaggtgactctctgctgcataactgtaaaggatggccctttgctaggtgttacagttaaaagctaagaaaaggggcagtgcatttaggacccaaacatatgcctatgaatatcaaaagctcctcctgaaattgctgtgagttttccataaaagaatatcctgtcttcacccaaggcttgacagcccacagagtggtctcatttgaaattacaggaaattagagcttttgcttgcagttctgccttcctggcctgtgtttaaatgctgtcacttgtttatgccaagttcaaggctgattcaatggttggtcccctcacccagaaaaccctgaaggggaggatacagctctgaaggggggcagcagtactaaaaacccaagatgccagtggtatagtgggcacaagggatggcgaccatgaggatgccaggcatcatcaccaatatctatcctagagccagtataaggccagatgcctacttcccacagcctccccgggttccaaagtcatgtcattgttttcagtggaaacatatcgtttgttgcatatcttcttaaatccatcttccttgtaagggctttagaactaaaacttacttatattgtttttccttaacagagggagaaaaatagtggattattatttctaaaataaaaggatgttctgctttctaaatatcccatcaaaatcttcagttttgcacttttttgatggaaaattcatcttatcttcctatgactttggttttagcctttctgaatttgttaccccttctggatggcttatttgatatactggaatagttaacaagctatacttcagcatatgcactatattctaacaaattttttttaataaaatcaagacatcagcaagaatgacatttacgtgacctcataatgtgggattatggccttctgttgctattccagtttgatatggaagcatctatatcctctattgccgttagatgttgttgcttttcagaaaagtaacgaaaaggctcattttaaagaatccaagaaacgatgtcatccaaatattgacagtttctacatttcatgccatctttataactcaattgaaagttgccgtcattcttgtgaagtatttgacaagtgcaatctgctagaagctcgtttttcttgtgactcccaaatgttagtgctacttagcctcagtaatgagttacagttgaaaaaaacatgagggaaacagagggacagagattttctaatgaacaatgatggaagagacctaatgtccttgctagaaacagccaggatggaaattatccagccctggcattctccttatcatcaatgacagtcattttattcatttatttcaaatgtgggtgggctagaagtggaaggagggaattctctctgcctaaaaattctagaagaatgaaagtaatctttgtatccaggaaactaagagaatgaggaataaatatcttcagcccgactcctgaatttgtttattcttccatctataattagattgtgttttcatttttgctttgtcatgctttttggttgttatttggctatacagttttatgctttaaaacaaatgataaagttaatttccaattcaatagtgaaatattaacaatctaactatagccagatcaaagacacctgaacacagaaaacctttatttgctggtgctgccattgcacaggctgtacaatgaaatagatttgaaaagctgattgattttcccgcacataaattctggatgtcaatttccaaccaaactccaatacagctatgtggcatgaagagttacaggagggagggaggaaaatagccctatgttagtcatgtttgcatacagaggatcaaagtaggccttcaccataatagttctaattaaaatggtcctcgctgtaggagagacaaaggggcttttcctctagctggtaactattcagatgatggacaagtcttctttcataaaagattacaaagaaggcatccgaatcactgtctgtgatactgggtcacatattaatcactgcagctaattgtaaatctttctatgaaacactgaaaagcctctttgtgaattaatacagttctgcttgatgcacttgatttgaaaagacatttctctgtatgtggcgcatgtcggctttgctttgaaaaataacaaagttagcagaatatgttcaatatattttcttggggaatagggtttttattacatgattcattaaggatttgccttaccctgacatttgtgatataaaggaaaatcagaaaaaaagtaattttcttgatcaagatatgtttttacttaatgcaaataaatgtagtctgttgcttgcaaggaaaaaaaaatggcttctgatatctggtataaactgctaaataggataatacgtgcctcttttgttaaaccggcatttaaatgctggactgcttctaaatctgtttgtttcttttcatctgtgccatacactaaaaaacaactgttgccttcatactatatttgttagagcagaatacaaataaaatttgtttgagaggataatgtgaaattat

SEQ ID NO: 11213 - protein, 425 aa, Homo sapiens; identical to SEQ ID NO: 1875

SEQ ID NO: 11214 - DNA, 532 bp, Homo sapiens
agaaatggcagcctggctcccaggcttcaggctgtccctggcttgaaggtggggtttcaccagggactcgcgcctttctccccaggaccctttctgcctcccgccatcagcatgccatccagggcacccaggctgttcgtgcccaggcccgcaccgagctgaccgcccccgctggcctccctcccacactcatgtcatccatactgtagggccaatagccaggggccatattaatggttcccacaaggaagaccttgcaaattgctataaatcatctctgaagctcgtgaaagaaaataacatccgatcagttgcatttccctgcatctcaacaggcatttatggctttcccaacgagcctgctgcagtcattgccctcaacaccattaaggaatggcttgccaagaatcaccatgaggtggatcggatcattttctgtgtcttcttagaagttgacttcaaaatctacaaaaagaaaatgaatgagtttttctccgtagacgataataatgaagaagaagaggatgttgaa

SEQ ID NO: 11215 - protein, 35 aa, Homo sapiens
MAFPTSLLQSLPSTPLRNGLPRITMRWIGSFSVSS

SEQ ID NO: 11216 - DNA, 4438 bp, Homo sapiens
agatatgccactatcgagaagcagatgacaggctcaggccttaccagggatgcacttgccacattttggaaagactacataaaaaacctttaaaaattggagccctttgggcctcaggtatccaaagagcacattttttggaaactcaacactcaggaaggtcgcatagagccagtttatgcagatgtcatccatactgtagggccaatagccaggggccatattaatggttcccacaaggaagaccttgcaaattgctataaatcatctctgaagctcgtgaaagaaaataacatccgatcagttgcatttccctgcatctcaacaggcatttatggctttcccaacgagcctgctgcagtcattgccctcaacaccattaaggaatggcttgccaagaatcaccatgaggtggatcggatcattttctgtgtcttcttagaagttgacttcaaaatctacaaaaagaaaatgaatgagtttttctccgtagacgataataatgaagaagaagaggatgttgaaatgaaagaagattcagatgagaacggtccagaggagaagcaaagtgtggaagaaatggaagagcagagccaagatgcagatggtgtcaacactgtcactgtgcccggccctgcttcagaagaggcagttgaagactgtaaagatgaagattttgcaaaggatgaaaatattacaaaaggcggtgaagtgacagatcattctgtgcgtgaccaagatcatcccgatggacaagagaatgattcaacgaagaatgaaataaaaattgaaacagaatcgcagagctcatatatggaaacagaagaactttcatcaaaccaagaagatgccgtgattgtggagcaaccagaagtgattccattaacagaggaccaagaagaaaaagaaggtgaaaaagctccaggcgaggacacacctaggatgcctgggaaaagtgaaggctccagtgacctagaaaatactccaggtcctgatgttgaaatgaatagtcaggttgacaaggtaaatgacccaacagagagtcaacaagaagatcaactaatagcaggggcacaagatgaagcgaaggaacaaagaaatggaactaaatgacaatcctcagcatcgcaaggcctctcctggctctgggggagctcgggaagatagcagcacacgctgtggaggagggtgggggtggggggaaggcaagtcccatggaaggacggggaatcctttactctaatttctccagctgcattttgttccgtttatctgcagaaaaagaaagaaaaaaaagaaaaaaaaagtttcctttaatttggtggagggacccatgttgacgcatctttcaggcattatccttgtaatttctgtcttttctcttacaactttgccccagggtcacagtggcttgattgaacactcacatgtgtatcctggcccctgtctgctttcttggttatttcacaaagctggtcacacagtggtttattcaaaggaaggggaggaagacagtggtttgataagctgcaggataaattttaggaatcaatgagcccagcagcagtataatccccagacagaggaggcaggatagaaaatgggcaaaagcctcggaaaccacttggaaaaggtctggacaatgaggtgaaaatattttcttcagggttcccaaggcacaatttgttccaagtggctaatgagaaatatggaagctgaattttttccagagcagagtgcagaggcataacagaagggtgggccctggcagccatctgggtctcttccttcctaaccatggtggcaggtgcatccttctttgacactgactttcagcagagcttacttggttcatgaggtcttcacatggagactaccagcaagaggtgactctctgctgcataactgtaaaggatggccctttgctaggtgttacagttaaaagctaagaaaaggggcagtgcatttaggacccaaacatatgcctatgaatatcaaaagctcctcctgaaattgctgtgagttttccataaaagaatatcctgtcttcacccaaggcttgacagcccacagagtggtctcatttgaaattacaggaaattagagcttttgcttgcagttctgccttcctggcctgtgtttaaatgctgtcacttgtttatgccaagttcaaggctgattcaatggttggtcccctcacccagaaaaccctgaaggggaggatacagctctgaaggggggcagcagtactaaaaacccaagatgccagtggtatagtgggcacaagggatggcgaccatgaggatgccaggcatcatcaccaatatctatcctagagccagtataaggccagatgcctacttcccacagcctccccgggttccaaagtcatgtcattgttttcagtggaaacatatcgtttgttgcatatcttcttaaatccatcttccttgtaagggctttagaactaaaacttacttatattgtttttccttaacagagggagaaaaatagtggattattatttctaaaataaaaggatgttctgctttctaaatatcccatcaaaatcttcagttttgcacttttttgatggaaaattcatcttatcttcctatgactttggttttagcctttctgaatttgttaccccttctggatggcttatttgatatactggaatagttaacaagctatacttcagcatatgcactatattctaacaaattttttttaataaaatcaagacatcagcaagaatgacatttacgtgacctcataatgtgggattatggccttctgttgctattccagtttgatatggaagcatctatatcctctattgccgttagatgttgttgcttttcagaaaagtaacgaaaaggctcattttaaagaatccaagaaacgatgtcatccaaatattgacagtttctacatttcatgccatctttataactcaattgaaagttgccgtcattcttgtgaagtatttgacaagtgcaatctgctagaagctcgtttttcttgtgactcccaaatgttagtgctacttagcctcagtaatgagttacagttgaaaaaaacatgagggaaacagagggacagagattttctaatgaacaatgatggaagagacctaatgtccttgctagaaacagccaggatggaaattatccagccctggcattctccttatcatcaatgacagtcattttattcatttatttcaaatgtgggtgggctagaagtggaaggagggaattctctctgcctaaaaattctagaagaatgaaagtaatctttgtatccaggaaactaagagaatgaggaataaatatcttcagcccgactcctgaatttgtttattcttccatctataattagattgtgttttcatttttgctttgtcatgctttttggttgttatttggctatacagttttatgctttaaaacaaatgataaagttaatttccaattcaatagtgaaatattaacaatctaactatagccagatcaaagacacctgaacacagaaaacctttatttgctggtgctgccattgcacaggctgtacaatgaaatagatttgaaaagctgattgattttcccgcacataaattctggatgtcaatttccaaccaaactccaatacagctatgtggcatgaagagttacaggagggagggaggaaaatagccctatgttagtcatgtttgcatacagaggatcaaagtaggccttcaccataatagttctaattaaaatggtcctcgctgtaggagagacaaaggggcttttcctctagctggtaactattcagatgatggacaagtcttctttcataaaagattacaaagaaggcatccgaatcactgtctgtgatactgggtcacatattaatcactgcagctaattgtaaatctttctatgaaacactgaaaagcctctttgtgaattaatacagttctgcttgatgcacttgatttgaaaagacatttctctgtatgtggcgcatgtcggctttgctttgaaaaataacaaagttagcagaatatgttcaatatattttcttggggaatagggtttttattacatgattcattaaggatttgccttaccctgacatttgtgatataaaggaaaatcagaaaaaaagtaattttcttgatcaagatatgtttttacttaatgcaaataaatgtagtctgttgcttgcaaggaaaaaaaaatggcttctgatatctggtataaactgctaaataggataatacgtgcctcttttgttaaaccggcatttaaatgctggactgcttctaaatctgtttgtttcttttcatctgtgccatacactaaaaaacaactgttgccttcatactatatttgttagagcagaatacaaataaaatttgtttgagaggataatgtgaaattat

SEQ ID NO: 11217 - protein, 213 aa, Homo sapiens; identical to SEQ ID NO: 1873

SEQ ID NO: 11218 - DNA, 9538 bp, Homo sapiens
acagctgaggcggcggcggcggcggcggcggcggcagcagcggggctgggggcggcgagtggcccgcgcgacacgcgccggcctcgaccctatgctttgattcgcgtggcgcaggcgcctactgccccgccggcggggcccgggcttcctgccgcgggatgttctcccgaaggagccacggggatgtgaagaagtccacccagaaggtgctggacccgaagaaggacgtgctgacccgcctgaagcacctgcgggcgctgctggataatgtggatgcaaatgatcttaagcagttttttgagaccaactattctcagatatatttcatcttctatgaaaattttatagcactggaaaatagtttgaaattaaaagggaataataagtcacaaagggaggagctggactccatcctcttcctttttgaaaaaatactgcagtttctacctgaacgaattttctttcgatggcattaccagagtataggctcaactttaaagaagcttctacacactggaaattctattaagataagatgtgaaggaatcaggctgtttcttctgtggcttcaagcacttcagacaaactgtgcagaagagcaggttctgatttttgcttgcctggtgcctggtttcccagcagtcatgtcatccaggggcccttgcacactggagacactcatcaatcccagccctagtgtagctgatgtaaagatatatccagaagaaatcactccactcctaccagccatatcaggggagaagattgctgaggaccaaacctgcttttttcttcaaatactgttgaagtatatggttattcaggctgcgagcttggagtggaagaataaggagaatcaagatactggttttaaatttctttttacattgtttcgaaagtattatcttcctcatttatttccatcatttactaagttaacaaacatctacaaacctgtacttgacatcccccatttgagaccaaagcctgtgtacattactaccactcgagacaatgagaacatttacagtacaaagattccatatatggcagctcgtgttgtttttattaagtggattgtaaccttctttttggaaaaaaagtatctaactgcaacacaaaacactaaaaatggagttgatgtattgcctaaaatcatccagactgttggtggtggtgctgtgcaggagagagcgcctgagctggatggtggtgggcccacggagcaggacaaaagccattctaacagcagcaccttgtcggaccgaagactcagcaactccagcctctgtagcattgaagaagagcaccgaatggtgtatgaaatggtacagcggattctcttgtcaacacgaggttatgtcaacttcgtgaatgaagtatttcaccaggcatttttgttgccttcctgtgagatagctgtaacaagaaaagtagttcaagtgtacagaaagtggattctccaggacaaacctgtgttcatggaggagccagatagaaaagatgttgcccaagaagatgctgaaaaattaggattttccgagactgatagcaaggaggcctcatctgaaagttctggtcataaacgatcttccagttggggacgcacatactccttcacaagtgcaatgagcagagggtgtgtgacagaggaggaaaatacaaatgtgaaagccggcgtccaggctttgttgcaggtatttttgacgaactctgcaaacatctttttgttggaaccatgtgctgaagttcctgtgctcttgaaagaacaagttgatgcttgtaaagctgttttgattatttttaggcgcatgataatggagcttacaatgaataaaaagacatgggaacagatgttgcaaatactactcaggataacagaagctgtcatgcagaagccaaaggataaacaaataaaggacttgtttgcccagagcttggcagggttactatttaggacgctcatggtagcttggatccgagcaaacctctgtgtgtacatttctcgagagctctgggatgactttcttggtgtgctgtcctccctcacggaatgggaggaacttataaacgagtgggccaacattatggactccttgacagcagtgcttgcaagaaccgtttatggagttgagatgacaaacctacctctggataaattaagtgaacaaaaggaaaagaagcaacgaggcaaaggctgtgttctagatcctcagaaaggaaccaccgtggggaggtccttttctctcagctggcggagccacccagatgtgaccgaaccgatgcgatttaggagtgccaccacgtctggagcaccgggagtggaaaaggcaagaaatattgttcgccaaaaagcaactgaagtggaggagtgtcaacagtcagaaaatgcacctgcagccggatctggccatctcacagtgggacagcagcagcaggtccttcggagcagcagcacctccgacatccccgagccgctgtgctcagattcttctcagggtcaaaaggcagaaaacacacagaattcgagttcttcagagcctcagcctattcaagagaataaaggacatgtgaagagagaacatgaaggaataacaatcttagttcgaagaagcagcagccctgctgaattggatttgaaagatgatttgcagcagacacaaggaaaatgtagggaaagacagaagagtgaaagtaccaacagtgacacaactctgggctgtaccaatgaggcagagctgtccatgggcccatggcagacctgtgaggaagacccagaactgaatactcccacagatgttgtggctgatgctgatgcccgtcattggttacaactgagtcccaccgatgcttcaaatttaacagatagcagcgagtgcctcacagatgactgtagtataatcgccggggggagcctcactggttggcacccagactctgctgctgtgttatggcgaagggtcttggggatcctcggagatgtgaataacatccagtcacccaagatccatgccagagttttctgctatctctatgaactctggtacaaactagcaaagatacgggataatctagcaataagcctggataaccagtcttctccatctcctccagttttgatcccaccactcagaatgtttgcatcatggctgtttaaggcggcgacactgccaaatgaatataaggaaggcaaactacaagcctacaggctgatctgtgccatgatgaccagacgccaggacgttctgccaaactcagatttcctggtgcatttttaccttgtgatgcacctgggattaaccagcgaggatcaggatatcttaaatacgatcataaggcactgtccaccccgctttttctccctgggttttcctggcttctcaatgctggtgggggacttcatcacggccgctgccagggtccttagcacagacattttgacggcgcctcgttcagaggctgtcactgtcctcggctctctggtctgctttccaaatacctaccaggagattcctttactgcagtcagtgccagaagtaaatgaggccattacaggaactgaagatgtcaagcattacctcataaatattttactgaagaatgccacagaagaaccaaatgaatatgcaagatgcattgctgtttgctcccttggggtctggatatgtgaagagcttgcacagtgtacaagccaccctcaggtgaaagaggccatcaatgtgataggagtaactctgaagtttcccaacaaaatcgtggcccaggtagcttgcgatgtccttcagttgctggtttcctactgggagaagcttcagatgtttgaaacctctctgcctcggaaaatggcagaaatcctcgtggccacagttgcttttcttttaccaagtgcagagtactcctcagtggaaacagacaagaagtttattgtgtccttgctactctgcctcttggactggtgcatggcattgcccgtgagtgtccttctccaccccgtgtccacagcagtcctagaggagcagcattcggccagagcccccttgctggattatatctacagggttttgcactgctgtgtgtgtggctcaagcacgtacacccaacagagtcactacatactgaccctggctgacttgtcatccacggattatgaccccttcctgccactggcaaatgtgaagagctctgagccagtccagtatcattcatcagcagaattgggtaacctgctgactgttgaagaggagaagaagagaagaagtttggagttgatccctttgactgctcgaatggtgatggcccacctggtgaaccacctggggcactaccccctcagtgggggccctgccatactgcacagccttgtcagcgagaaccatgacaatgcccatgtggaaggctccgagctgtcctttgaggtgttcagaagtccaaacctgcagctgtttgtatttaatgatagcaccctcatctcctaccttcagacacccacagaaggaccggtagggggatcaccagtgggctctctctctgatgtgagagtaattgtgagggatatctcagggaagtactcttgggatggtaaggttttatatggacctttggaaggctgcttagcacccaatggaagaaatccttcatttctgatttcgagctggcatcgtgacacatttggacctcagaaagactcttctcaagttgaggagggggatgatgttcttgacaaattacttgaaaacattggccatacaagtcctgaatgccttttaccgtcacagctaaatctaaatgaaccttccctaaccccatgtggcatgaactatgaccaagagaaggaaatcattgaggtcattttgcgccaaaatgctcaagaggatgagtatatccagagtcataacttcgattctgcaatgaaagtcaccagccaagggcagccctccccagtggagccccgaggacccttttatttctgcaggttattgcttgatgacttgggaatgaattcttgggacagaaggaagaattttcatctattgaagaaaaattcaaaattattgagagagctgaaaaatttggactcccgccagtgccgtgagacacacaaaatcgcagtgttttacattgctgaaggtcaagaagacaagtgttcaatcctctctaatgaaagaggaagccaagcatatgaagactttgttgctggacttggatgggaggtggatctctccacccactgtgggttcatgggtggccttcagcgcaatggcagcaccgggcagacggccccttactatgctacctcaactgtggaagtgattttccatgtttccactcgaatgccgtcagactcagatgattccctcaccaaaaagcttcgtcacttggggaatgacgaggtccatatcgtctggtctgaacactccagagactaccgcaggggtattatcccaactgcctttggagatgtttcaatcattatttacccaatgaagaatcacatgttcttcatcgcgataacgaagaaacctgaggttccattttttgggcctctgtttgatggagccatagtgagtgggaagctgctgccaagccttgtatgtgccacgtgcatcaacgccagcagggctgtgaagtgcctcatcccactctaccagagcttctatgaagagcgagctctgtatctcgaagcaataattcagaaccaccgcgaagtaatgacattcgaggatttcgcagcccaagtcttttctccctctcccagctactccctcagcggaacggattaaaacacgtaaaggtctcatttcaatatttgagcaaggggccctggcctccagtctgagtgctgacctcgaagagcccctgagtgaggaggagacagaacaccctctcctgcctctgccccgagccactaaacccagaatctccaggaaatttcgttgctgtactagtgccctcagcaggtcttcccattagtggacttctgaagcccatggtgaatcccactaccgtgtctcagatgggactcaaactaggctgtatcatcttgtcctgaaacctcacaaaccttggacttccaaagaagaaaagaaaaagtcaccaaaaaccagagatgaacccactgacacgtgggcactggtgtggctgctctgggcagatgacagcaggaaaagattctgcgctttcagggagggggcagagggcagcttgcttctgcaccccaagttgtttcttctcatttatgaacccaagcatgattcacaaaggggctggcaaaacaattgtctaattgaggaatctgatctgcattgattttgctagttccttttatgttaggatttatggtttactcaaaaatttcatcatcatggaaattggctttccccggggtcttttgcccaggagaagttttacctcagttgtccagtgttttcccacatggtacctgacgcccgctaactaagcagaggctctcctcaccacgcagaggcgcttcaggtcatgacagtgatgcccctatcttagaacactcagaagattccagaaatacagggtcctgtccttgcataagttcctgcaggacaggaagtgtcccaaggctcaaaacaacacagaccacatccacacaaaaggcgcatgccggcttcaggcgctaggctgagacgggtaccccccgaatggccttgtgcctccaaaagcctcacgctgcaactttgctgctcctgtctgttgcccagagaggcctcacacaggcctcagaaatgtttcttgtcacacaaagcttttggtagccgattccaagcgagggatttaatccttacatttttgcccatttggctccaaggaaggcttattagacctgtttttttgttgttgttgtttttttttcttaaaaacaaaatgaatgaatgaatgaaaagagaagcaatggtgagccctctcctgctggggcgccctgggtgggccttgcccgtcctgcagcagagaaatcagtcagcagcgaagagctgctggcgcaggccccaggctgtgtcctggacccttgacctgcctcagagctagaggtttgctccaccccgcacttcacttgggaagtaaatccaagaagcttaccagagtccatcgccactgcgcaggctttgttctcacagcggccaggtacagagcaacgccctgcagtgggaagggacagcagcacgagagacgcagcccctaactcagggcttatgatgggtgggctggtcctgggaaaggcgggccctgtgcgggaggcctccccaccttcctgtgccctctgccctctgcccttgcacacacttgttaccttcaggctgcttggccacccaggcctgaagaagccttctgaggctctcaccccatcagaacggccattttcactgaggagccagttttttccatttgccatggagctggtttggctggaacctggcctttgtagggaaaacggggagactcaggagccagactcactcttgggacaaatgagaaagagctgagccagtcgttcctgtcggaagggcgggcctgctcatcctggcgagaatttgcttttctgctttataggggattgcaggccaggcccactgacaggagcaccttgagaaccacctgaacagaagagaatgagggtgccccaaagtggaaggaagcttctggcccctgggccgttttgggaagggcccaggatactcacgggggctgaagggcaatgtgaagagtgactgcaagtcctggcattttctgtggtgtcagcaaatgcccctttattttaaatgattccagacatctgggcagcatagcttggccaccatcactcaggcttgatcctgctgttgagctgctcctgtctcctgtttacctcactcctgttgggaaggccatcgcatgctcctaggctccagagtcccctgtaggtctctaccagcaggtcgcctctgggagaacgtttcatcttcaggctctagaaactcctgttgcggaattgctggctttagtagaaaagatatgtcaggatttagaaatcgtattgaactctcctggacttctgctccatgatttcattttgctttcacgaaccagcgatccctaccttggggtgggaaattcaattgtaggcagcaaataactcaaccctcctgtaacccctgaggattataacgaccccatgacccccgatgacagccagcagtttggtgactagagttttttgagcctgccattctcagtagcagctttggtctggagatggaacgtggagcagggaatctgacagccacgtttctcgtgatcacgtggactggagttgtttttgttatctggggtggaaaattgcaatgatcaagtttcttttttattttttttttacttagaaaagcaaatattgtgtttttgtaataaatccctttcagcaaaattgcggaggatcattcatccactagggccccacctgaggcacagcgctgactcatcacggtggtaccagtaggtcagccatctggaaacagaagtggccctaattgggccaaaatgtggtaagactcgctggcctcaggcagggccaggccagttccctcacttctctgcacacctattcccagattccatccagagcaaagctgatgtttatcgtctcattgtacttaggctttcgtactttaaaaaattatgactttttaaaaataagccttcagcagacagaagtgaagaaatttagcctgggttgcctcagcaacaaagtctgcggttcctaagagccacatgttggggaagtggggtgacccaaacttggtgacataggttgattgatcagaccctcagccttacaagcaagagctcatgcagatccacagagccatgcacatcctgtcttcctgaccttcctcaggtggcaccacctgcgccccatggacctgctgtatcggtgtcatgtggaggtctgatgaatcctttaaaacctaactgtgatgtcgtaaatgtaactgtgctacctttatatctactgaagggcagcgtctgcatccgagggaaattcaacatgaaacaaccatcgttttagttgcactcagtctgtccatatgacatacacatgaagtgaatgtttccttatgttttcaggtctacaatgtttagtacatgtaaataaggaaaaaatttgataaatatggtaaattaagttatagcgtgtcatttgattcttattttgctgtctcttgttatttaattttcctaatgctccacatctaggttccttcctaggtggtgggaacaccttgcagacgtgtgtgcaccaggacacaccgcggcccaggcagccacaccgagaaagcacacatctccactgatggcagccacccgactctccagttaacctcttttactctttaattctgatttactgtgatgatttaataaagtggaaacacagcacttcagtgctatatgtttctctcattctcattatagtttataagaaaataaagttcaccctggcatctaataaaaaggtggctttcatttttattgg

SEQ ID NO: 11219 - protein, 1873 aa, Homo sapiens; identical to SEQ ID NO: 1877

SEQ ID NO: 11220 - DNA, 9498 bp, Homo sapiens
acagctgaggcggcggcggcggcggcggcggcggcagcagcggggctgggggcggcgagtggcccgcgcgacacgcgccggcctcgaccctatgctttgattcgcgtggcgcaggcgcctactgccccgccggcggggcccgggcttcctgccgcgggatgttctcccgaaggagccacggggatgtgaagaagtccacccagaaggtgctggacccgaagaaggacgtgctgacccgcctgaagcacctgcgggcgctgctggataatgtggatgcaaatgatcttaagcagttttttgagaccaactattctcagatatatttcatcttctatgaaaattttatagcactggaaaatagtttgaaattaaaagggaataataagtcacaaagggaggagctggactccatcctcttcctttttgaaaaaatactgcagtttctacctgaacgaattttctttcgatggcattaccagagtataggctcaactttaaagaagcttctacacactggaaattctattaagataagatgtgaaggaatcaggctgtttcttctgtggcttcaagcacttcagacaaactgtgcagaagagcaggttctgatttttgcttgcctggtgcctggtttcccagcagtcatgtcatccaggggcccttgcacactggagacactcatcaatcccagccctagtgtagctgatgtaaagatatatccagaagaaatcactccactcctaccagccatatcaggggagaagattgctgaggaccaaacctgcttttttcttcaaatactgttgaagtatatggttattcaggctgcgagcttggagtggaagaataaggagaatcaagatactggttttaaatttctttttacattgtttcgaaagtattatcttcctcatttatttccatcatttactaagttaacaaacatctacaaacctgtacttgacatcccccatttgagaccaaagcctgtgtacattactaccactcgagacaatgagaacatttacagtacaaagattccatatatggcagctcgtgttgtttttattaagtggattgtaaccttctttttggaaaaaaagtatctaactgcaacacaaaacactaaaaatggagttgatgtattgcctaaaatcatccagactgttggtggtggtgctgtgcaggagagagcgcctgagctggatggtggtgggcccacggagcaggacaaaagccattctaacagcagcaccttgtcggaccgaagactcagcaactccagcctctgtagcattgaagaagagcaccgaatggtgtatgaaatggtacagcggattctcttgtcaacacgaggttatgtcaacttcgtgaatgaagtatttcaccaggcatttttgttgccttcctgtgagatagctgtaacaagaaaagtagttcaagtgtacagaaagtggattctccaggacaaacctgtgttcatggaggagccagatagaaaagatgttgcccaagaagatgctgaaaaattaggattttccgagactgatagcaaggaggcctcatctgaaagttctggtcataaacgatcttccagttggggacgcacatactccttcacaagtgcaatgagcagagggtgtgtgacagaggaggaaaatacaaatgtgaaagccggcgtccaggctttgttgcaggtatttttgacgaactctgcaaacatctttttgttggaaccatgtgctgaagttcctgtgctcttgaaagaacaagttgatgcttgtaaagctgttttgattatttttaggcgcatgataatggagcttacaatgaataaaaagacatgggaacagatgttgcaaatactactcaggataacagaagctgtcatgcagaagccaaaggataaacaaataaaggacttgtttgcccagagcttggcagggttactatttaggacgctcatggtagcttggatccgagcaaacctctgtgtgtacatttctcgagagctctgggatgactttcttggtgtgctgtcctccctcacggaatgggaggaacttataaacgagtgggccaacattatggactccttgacagcagtgcttgcaagaaccgtttatggagttgagatgacaaacctacctctggataaattaagtgaacaaaaggaaaagaagcaacgaggcaaaggctgtgttctagatcctcagaaaggaaccaccgtggggaggtccttttctctcagctggcggagccacccagatgtgaccgaaccgatgcgatttaggagtgccaccacgtctggagcaccgggagtggaaaaggcaagaaatattgttcgccaaaaagcaactgaagtggaggagtgtcaacagtcagaaaatgcacctgcagccggatctggccatctcacagtgggacagcagcagcaggtccttcggagcagcagcacctccgacatccccgagccgctgtgctcagattcttctcagggtcaaaaggcagaaaacacacagaattcgagttcttcagagcctcagcctattcaagagaataaaggacatgtgaagagagaacatgaaggaataacaatcttagttcgaagaagcagcagccctgctgaattggatttgaaagatgatttgcagcagacacaaggaaaatgtagggaaagacagaagagtgaaagtaccaacagtgacacaactctgggctgtaccaatgaggcagagctgtccatgggcccatggcagacctgtgaggaagacccagaactgaatactcccacagatgttgtggctgatgctgatgcccgtcattggttacaactgagtcccaccgatgcttcaaatttaacagatagcagcgagtgcctcacagatgactgtagtataatcgccggggggagcctcactggttggcacccagactctgctgctgtgttatggcgaagggtcttggggatcctcggagatgtgaataacatccagtcacccaagatccatgccagagttttctgctatctctatgaactctggtacaaactagcaaagatacgggataatctagcaataagcctggataaccagtcttctccatctcctccagttttgatcccaccactcagaatgtttgcatcatggctgtttaaggcggcgacactgccaaatgaatataaggaaggcaaactacaagcctacaggctgatctgtgccatgatgaccagacgccaggacgttctgccaaactcagatttcctggtgcatttttaccttgtgatgcacctgggattaaccagcgaggatcaggatatcttaaatacgatcataaggcactgtccaccccgctttttctccctgggttttcctggcttctcaatgctggtgggggacttcatcacggccgctgccagggtccttagcacagacattttgacggcgcctcgttcagaggctgtcactgtcctcggctctctggtctgctttccaaatacctaccaggagattcctttactgcagtcagtgccagaagtaaatgaggccattacaggaactgaagatgtcaagcattacctcataaatattttactgaagaatgccacagaagaaccaaatgaatatgcaagatgcattgctgtttgctcccttggggtctggatatgtgaagagcttgcacagtgtacaagccaccctcaggtgaaagaggccatcaatgtgataggagtaactctgaagtttcccaacaaaatcgtggcccaggtagcttgcgatgtccttcagttgctggtttcctactgggagaagcttcagatgtttgaaacctctctgcctcggaaaatggcagaaatcctcgtggccacagttgcttttcttttaccaagtgcagagtactcctcagtggaaacagacaagaagtttattgtgtccttgctactctgcctcttggactggtgcatggcattgcccgtgagtgtccttctccaccccgtgtccacagcagtcctagaggagcagcattcggccagagcccccttgctggattatatctacagggttttgcactgctgtgtgtgtggctcaagcacgtacacccaacagagtcactacatactgaccctggctgacttgtcatccacggattatgaccccttcctgccactggcaaatgtgaagagctctgagccagtccagtatcattcatcagcagaattgggtaacctgctgactgttgaagaggagaagaagagaagaagtttggagttgatccctttgactgctcgaatggtgatggcccacctggtgaaccacctggggcactaccccctcagtgggggccctgccatactgcacagccttgtcagcgagaaccatgacaatgcccatgtggaaggctccgagctgtcctttgaggtgttcagaagtccaaacctgcagctgtttgtatttaatgatagcaccctcatctcctaccttcagacacccacagaaggaccggtagggggatcaccagtgggctctctctctgatgtgagagtaattgtgagggatatctcagggaagtactcttgggatggtaaggttttatatggacctttggaaggctgcttagcacccaatggaagaaatccttcatttctgatttcgagctggcatcgtgacacatttggacctcagaaagactcttctcaagttgaggagggggatgatgttcttgacaaattacttgaaaacattggccatacaagtcctgaatgccttttaccgtcacagctaaatctaaatgaaccttccctaaccccatgtggcatgaactatgaccaagagaaggaaatcattgaggtcattttgcgccaaaatgctcaagaggatgagtatatccagagtcataacttcgattctgcaatgaaagtcaccagccaagggcagccctccccagtggagccccgaggacccttttatttctgcaggttattgcttgatgacttgggaatgaattcttgggacagaaggaagaattttcatctattgaagaaaaattcaaaattattgagagagctgaaaaatttggactcccgccagtgccgtgagacacacaaaatcgcagtgttttacattgctgaaggtcaagaagacaagtgttcaatcctctctaatgaaagaggaagccaagcatatgaagactttgttgctggacttggatgggaggtggatctctccacccactgtgggttcatgggtggccttcagcgcaatggcagcaccgggcagacggccccttactatgctacctcaactgtggaagtgattttccatgtttccactcgaatgccgtcagactcagatgattccctcaccaaaaagcttcgtcacttggggaatgacgaggtccatatcgtctggtctgaacactccagagactaccgcaggggtattatcccaactgcctttggagatgtttcaatcattatttacccaatgaagaatcacatgttcttcatcgcgataacgaagaaacctgaggttccattttttgggcctctgtttgatggagccatagtgagtgggaagctgctgccaagccttgtatgtgccacgtgcatcaacgccagcagggctgtgaagtgcctcatcccactctaccagagcttctatgaagagcgagctctgtatctcgaagcaataattcagaaccaccgcgaagtaatgacattcgaggatttcgcagcccaagtcttttctccctctcccagctactccctcagcggaacgggggccctggcctccagtctgagtgctgacctcgaagagcccctgagtgaggaggagacagaacaccctctcctgcctctgccccgagccactaaacccagaatctccaggaaatttcgttgctgtactagtgccctcagcaggtcttcccattagtggacttctgaagcccatggtgaatcccactaccgtgtctcagatgggactcaaactaggctgtatcatcttgtcctgaaacctcacaaaccttggacttccaaagaagaaaagaaaaagtcaccaaaaaccagagatgaacccactgacacgtgggcactggtgtggctgctctgggcagatgacagcaggaaaagattctgcgctttcagggagggggcagagggcagcttgcttctgcaccccaagttgtttcttctcatttatgaacccaagcatgattcacaaaggggctggcaaaacaattgtctaattgaggaatctgatctgcattgattttgctagttccttttatgttaggatttatggtttactcaaaaatttcatcatcatggaaattggctttccccggggtcttttgcccaggagaagttttacctcagttgtccagtgttttcccacatggtacctgacgcccgctaactaagcagaggctctcctcaccacgcagaggcgcttcaggtcatgacagtgatgcccctatcttagaacactcagaagattccagaaatacagggtcctgtccttgcataagttcctgcaggacaggaagtgtcccaaggctcaaaacaacacagaccacatccacacaaaaggcgcatgccggcttcaggcgctaggctgagacgggtaccccccgaatggccttgtgcctccaaaagcctcacgctgcaactttgctgctcctgtctgttgcccagagaggcctcacacaggcctcagaaatgtttcttgtcacacaaagcttttggtagccgattccaagcgagggatttaatccttacatttttgcccatttggctccaaggaaggcttattagacctgtttttttgttgttgttgtttttttttcttaaaaacaaaatgaatgaatgaatgaaaagagaagcaatggtgagccctctcctgctggggcgccctgggtgggccttgcccgtcctgcagcagagaaatcagtcagcagcgaagagctgctggcgcaggccccaggctgtgtcctggacccttgacctgcctcagagctagaggtttgctccaccccgcacttcacttgggaagtaaatccaagaagcttaccagagtccatcgccactgcgcaggctttgttctcacagcggccaggtacagagcaacgccctgcagtgggaagggacagcagcacgagagacgcagcccctaactcagggcttatgatgggtgggctggtcctgggaaaggcgggccctgtgcgggaggcctccccaccttcctgtgccctctgccctctgcccttgcacacacttgttaccttcaggctgcttggccacccaggcctgaagaagccttctgaggctctcaccccatcagaacggccattttcactgaggagccagttttttccatttgccatggagctggtttggctggaacctggcctttgtagggaaaacggggagactcaggagccagactcactcttgggacaaatgagaaagagctgagccagtcgttcctgtcggaagggcgggcctgctcatcctggcgagaatttgcttttctgctttataggggattgcaggccaggcccactgacaggagcaccttgagaaccacctgaacagaagagaatgagggtgccccaaagtggaaggaagcttctggcccctgggccgttttgggaagggcccaggatactcacgggggctgaagggcaatgtgaagagtgactgcaagtcctggcattttctgtggtgtcagcaaatgcccctttattttaaatgattccagacatctgggcagcatagcttggccaccatcactcaggcttgatcctgctgttgagctgctcctgtctcctgtttacctcactcctgttgggaaggccatcgcatgctcctaggctccagagtcccctgtaggtctctaccagcaggtcgcctctgggagaacgtttcatcttcaggctctagaaactcctgttgcggaattgctggctttagtagaaaagatatgtcaggatttagaaatcgtattgaactctcctggacttctgctccatgatttcattttgctttcacgaaccagcgatccctaccttggggtgggaaattcaattgtaggcagcaaataactcaaccctcctgtaacccctgaggattataacgaccccatgacccccgatgacagccagcagtttggtgactagagttttttgagcctgccattctcagtagcagctttggtctggagatggaacgtggagcagggaatctgacagccacgtttctcgtgatcacgtggactggagttgtttttgttatctggggtggaaaattgcaatgatcaagtttcttttttattttttttttacttagaaaagcaaatattgtgtttttgtaataaatccctttcagcaaaattgcggaggatcattcatccactagggccccacctgaggcacagcgctgactcatcacggtggtaccagtaggtcagccatctggaaacagaagtggccctaattgggccaaaatgtggtaagactcgctggcctcaggcagggccaggccagttccctcacttctctgcacacctattcccagattccatccagagcaaagctgatgtttatcgtctcattgtacttaggctttcgtactttaaaaaattatgactttttaaaaataagccttcagcagacagaagtgaagaaatttagcctgggttgcctcagcaacaaagtctgcggttcctaagagccacatgttggggaagtggggtgacccaaacttggtgacataggttgattgatcagaccctcagccttacaagcaagagctcatgcagatccacagagccatgcacatcctgtcttcctgaccttcctcaggtggcaccacctgcgccccatggacctgctgtatcggtgtcatgtggaggtctgatgaatcctttaaaacctaactgtgatgtcgtaaatgtaactgtgctacctttatatctactgaagggcagcgtctgcatccgagggaaattcaacatgaaacaaccatcgttttagttgcactcagtctgtccatatgacatacacatgaagtgaatgtttccttatgttttcaggtctacaatgtttagtacatgtaaataaggaaaaaatttgataaatatggtaaattaagttatagcgtgtcatttgattcttattttgctgtctcttgttatttaattttcctaatgctccacatctaggttccttcctaggtggtgggaacaccttgcagacgtgtgtgcaccaggacacaccgcggcccaggcagccacaccgagaaagcacacatctccactgatggcagccacccgactctccagttaacctcttttactctttaattctgatttactgtgatgatttaataaagtggaaacacagcacttcagtgctatatgtttctctcattctcattatagtttataagaaaataaagttcaccctggcatctaataaaaaggtggctttcatttttattgg

SEQ ID NO: 11221 - protein, 1923 aa, Homo sapiens
MFSRRSHGDVKKSTQKVLDPKKDVLTRLKHLRALLDNVDANDLKQFFETNYSQIYFIFYENFIALENSLKLKGNNKSQREELDSILFLFEKILQFLPERIFFRWHYQSIGSTLKKLLHTGNSIKIRCEGIRLFLLWLQALQTNCAEEQVLIFACLVPGFPAVMSSRGPCTLETLINPSPSVADVKIYPEEITPLLPAISGEKIAEDQTCFFLQILLKYMVIQAASLEWKNKENQDTGFKFLFTLFRKYYLPHLFPSFTKLTNIYKPVLDIPHLRPKPVYITTTRDNENIYSTKIPYMAARVVFIKWIVTFFLEKKYLTATQNTKNGVDVLPKIIQTVGGGAVQERAPELDGGGPTEQDKSHSNSSTLSDRRLSNSSLCSIEEEHRMVYEMVQRILLSTRGYVNFVNEVFHQAFLLPSCEIAVTRKVVQVYRKWILQDKPVFMEEPDRKDVAQEDAEKLGFSETDSKEASSESSGHKRSSSWGRTYSFTSAMSRGCVTEEENTNVKAGVQALLQVFLTNSANIFLLEPCAEVPVLLKEQVDACKAVLIIFRRMIMELTMNKKTWEQMLQILLRITEAVMQKPKDKQIKDLFAQSLAGLLFRTLMVAWIRANLCVYISRELWDDFLGVLSSLTEWEELINEWANIMDSLTAVLARTVYGVEMTNLPLDKLSEQKEKKQRGKGCVLDPQKGTTVGRSFSLSWRSHPDVTEPMRFRSATTSGAPGVEKARNIVRQKATEVEECQQSENAPAAGSGHLTVGQQQQVLRSSSTSDIPEPLCSDSSQGQKAENTQNSSSSEPQPIQENKGHVKREHEGITILVRRSSSPAELDLKDDLQQTQGKCRERQKSESTNSDTTLGCTNEAELSMGPWQTCEEDPELNTPTDVVADADARHWLQLSPTDASNLTDSSECLTDDCSIIAGGSLTGWHPDSAAVLWRRVLGILGDVNNIQSPKIHARVFCYLYELWYKLAKIRDNLAISLDNQSSPSPPVLIPPLRMFASWLFKAATLPNEYKEGKLQAYRLICAMMTRRQDVLPNSDFLVHFYLVMHLGLTSEDQDILNTIIRHCPPRFFSLGFPGFSMLVGDFITAAARVLSTDILTAPRSEAVTVLGSLVCFPNTYQEIPLLQSVPEVNEAITGTEDVKHYLINILLKNATEEPNEYARCIAVCSLGVWICEELAQCTSHPQVKEAINVIGVTLKFPNKIVAQVACDVLQLLVSYWEKLQMFETSLPRKMAEILVATVAFLLPSAEYSSVETDKKFIVSLLLCLLDWCMALPVSVLLHPVSTAVLEEQHSARAPLLDYIYRVLHCCVCGSSTYTQQSHYILTLADLSSTDYDPFLPLANVKSSEPVQYHSSAELGNLLTVEEEKKRRSLELIPLTARMVMAHLVNHLGHYPLSGGPAILHSLVSENHDNAHVEGSELSFEVFRSPNLQLFVFNDSTLISYLQTPTEGPVGGSPVGSLSDVRVIVRDISGKYSWDGKVLYGPLEGCLAPNGRNPSFLISSWHRDTFGPQKDSSQVEEGDDVLDKLLENIGHTSPECLLPSQLNLNEPSLTPCGMNYDQEKEIIEVILRQNAQEDEYIQSHNFDSAMKVTSQGQPSPVEPRGPFYFCRLLLDDLGMNSWDRRKNFHLLKKNSKLLRELKNLDSRQCRETHKIAVFYIAEGQEDKCSILSNERGSQAYEDFVAGLGWEVDLSTHCGFMGGLQRNGSTGQTAPYYATSTVEVIFHVSTRMPSDSDDSLTKKLRHLGNDEVHIVWSEHSRDYRRGIIPTAFGDVSIIIYPMKNHMFFIAITKKPEVPFFGPLFDGAIVSGKLLPSLVCATCINASRAVKCLIPLYQSFYEERALYLEAIIQNHREVMTFEDFAAQVFSPSPSYSLSGTGALASSLSADLEEPLSEEETEHPLLPLPRATKPRISRKFRCCTSALSRSSH

SEQ ID NO: 11222 - DNA, 9509 bp, Homo sapiens
acagctgaggcggcggcggcggcggcggcggcggcagcagcggggctgggggcggcgagtggcccgcgcgacacgcgccggcctcgaccctatgctttgattcgcgtggcgcaggcgcctactgccccgccggcggggcccgggcttcctgccgcgggatgttctcccgaaggagccacggggatgtgaagaagtccacccagaaggtgctggacccgaagaaggacgtgctgacccgcctgaagcacctgcgggcgctgctggataatgtggatgcaaatgatcttaagcagttttttgagaccaactattctcagatatatttcatcttctatgaaaattttatagcactggaaaatagtttgaaattaaaagggaataataagtcacaaagggaggagctggactccatcctcttcctttttgaaaaaatactgcagtttctacctgaacgaattttctttcgatggcattaccagagtataggctcaactttaaagaagcttctacacactggaaattctattaagataagatgtgaaggaatcaggctgtttcttctgtggcttcaagcacttcagacaaactgtgcagaagagcaggttctgatttttgcttgcctggtgcctggtttcccagcagtcatgtcatccaggggcccttgcacactggagacactcatcaatcccagccctagtgtagctgatgtaaagatatatccagaagaaatcactccactcctaccagccatatcaggggagaagattgctgaggaccaaacctgcttttttcttcaaatactgttgaagtatatggttattcaggctgcgagcttggagtggaagaataaggagaatcaagatactggttttaaatttctttttacattgtttcgaaagtattatcttcctcatttatttccatcatttactaagttaacaaacatctacaaacctgtacttgacatcccccatttgagaccaaagcctgtgtacattactaccactcgagacaatgagaacatttacagtacaaagattccatatatggcagctcgtgttgtttttattaagtggattgtaaccttctttttggaaaaaaagtatctaactgcaacacaaaacactaaaaatggagttgatgtattgcctaaaatcatccagactgttggtggtggtgctgtgcaggagagagcgcctgagctggatggtggtgggcccacggagcaggacaaaagccattctaacagcagcaccttgtcggaccgaagactcagcaactccagcctctgtagcattgaagaagagcaccgaatggtgtatgaaatggtacagcggattctcttgtcaacacgaggttatgtcaacttcgtgaatgaagtatttcaccaggcatttttgttgccttcctgtgagatagctgtaacaagaaaagtagttcaagtgtacagaaagtggattctccaggacaaacctgtgttcatggaggagccagatagaaaagatgttgcccaagaagatgctgaaaaattaggattttccgagactgatagcaaggaggcctcatctgaaagttctggtcataaacgatcttccagttggggacgcacatactccttcacaagtgcaatgagcagagggtgtgtgacagaggaggaaaatacaaatgtgaaagccggcgtccaggctttgttgcaggtatttttgacgaactctgcaaacatctttttgttggaaccatgtgctgaagttcctgtgctcttgaaagaacaagttgatgcttgtaaagctgttttgattatttttaggcgcatgataatggagcttacaatgaataaaaagacatgggaacagatgttgcaaatactactcaggataacagaagctgtcatgcagaagccaaaggataaacaaataaaggacttgtttgcccagagcttggcagggttactatttaggacgctcatggtagcttggatccgagcaaacctctgtgtgtacatttctcgagagctctgggatgactttcttggtgtgctgtcctccctcacggaatgggaggaacttataaacgagtgggccaacattatggactccttgacagcagtgcttgcaagaaccgtttatggagttgagatgacaaacctacctctggataaattaagtgaacaaaaggaaaagaagcaacgaggcaaaggctgtgttctagatcctcagaaaggaaccaccgtggggaggtccttttctctcagctggcggagccacccagatgtgaccgaaccgatgcgatttaggagtgccaccacgtctggagcaccgggagtggaaaaggcaagaaatattgttcgccaaaaagcaactgaagtggaggagtgtcaacagtcagaaaatgcacctgcagccggatctggccatctcacagtgggacagcagcagcaggtccttcggagcagcagcacctccgacatccccgagccgctgtgctcagattcttctcagggtcaaaaggcagaaaacacacagaattcgagttcttcagagcctcagcctattcaagagaataaaggacatgtgaagagagaacatgaaggaataacaatcttagttcgaagaagcagcagccctgctgaattggatttgaaagatgatttgcagcagacacaaggaaaatgtagggaaagacagaagagtgaaagtaccaacagtgacacaactctgggctgtaccaatgaggcagagctgtccatgggcccatggcagacctgtgaggaagacccagaactgaatactcccacagatgttgtggctgatgctgatgcccgtcattggttacaactgagtcccaccgatgcttcaaatttaacagatagcagcgagtgcctcacagatgactgtagtataatcgccggggggagcctcactggttggcacccagactctgctgctgtgttatggcgaagggtcttggggatcctcggagatgtgaataacatccagtcacccaagatccatgccagagttttctgctatctctatgaactctggtacaaactagcaaagatacgggataatctagcaataagcctggataaccagtcttctccatctcctccagttttgatcccaccactcagaatgtttgcatcatggctgtttaaggcggcgacactgccaaatgaatataaggaaggcaaactacaagcctacaggctgatctgtgccatgatgaccagacgccaggacgttctgccaaactcagatttcctggtgcatttttaccttgtgatgcacctgggattaaccagcgaggatcaggatatcttaaatacgatcataaggcactgtccaccccgctttttctccctgggttttcctggcttctcaatgctggtgggggacttcatcacggccgctgccagggtccttagcacagacattttgacggcgcctcgttcagaggctgtcactgtcctcggctctctggtctgctttccaaatacctaccaggagattcctttactgcagtcagtgccagaagtaaatgaggccattacaggaactgaagatgtcaagcattacctcataaatattttactgaagaatgccacagaagaaccaaatgaatatgcaagatgcattgctgtttgctcccttggggtctggatatgtgaagagcttgcacagtgtacaagccaccctcaggtgaaagaggccatcaatgtgataggagtaactctgaagtttcccaacaaaatcgtggcccaggtagcttgcgatgtccttcagttgctggtttcctactgggagaagcttcagatgtttgaaacctctctgcctcggaaaatggcagaaatcctcgtggccacagttgcttttcttttaccaagtgcagagtactcctcagtggaaacagacaagaagtttattgtgtccttgctactctgcctcttggactggtgcatggcattgcccgtgagtgtccttctccaccccgtgtccacagcagtcctagaggagcagcattcggccagagcccccttgctggattatatctacagggttttgcactgctgtgtgtgtggctcaagcacgtacacccaacagagtcactacatactgaccctggctgacttgtcatccacggattatgaccccttcctgccactggcaaatgtgaagagctctgagccagtccagtatcattcatcagcagaattgggtaacctgctgactgttgaagaggagaagaagagaagaagtttggagttgatccctttgactgctcgaatggtgatggcccacctggtgaaccacctggggcactaccccctcagtgggggccctgccatactgcacagccttgtcagcgagaaccatgacaatgcccatgtggaaggctccgagctgtcctttgaggtgttcagaagtccaaacctgcagctgtttgtatttaatgatagcaccctcatctcctaccttcagacacccacagaaggaccggtagggggatcaccagtgggctctctctctgatgtgagagtaattgtgagggatatctcagggaagtactcttgggatggtaaggttttatatggacctttggaaggctgcttagcacccaatggaagaaatccttcatttctgatttcgagctggcatcgtgacacatttggacctcagaaagactcttctcaagttgaggagggggatgatgttcttgacaaattacttgaaaacattggccatacaagtcctgaatgccttttaccgtcacagctaaatctaaatgaaccttccctaaccccatgtggcatgaactatgaccaagagaaggaaatcattgaggtcattttgcgccaaaatgctcaagaggatgagtatatccagagtcataacttcgattctgcaatgaaagtcaccagccaagggcagccctccccagtggagccccgaggacccttttatttctgcaggttattgcttgatgacttgggaatgaattcttgggacagaaggaagaattttcatctattgaagaaaaattcaaaattattgagagagctgaaaaatttggactcccgccagtgccgtgagacacacaaaatcgcagtgttttacattgctgaaggtcaagaagacaagtgttcaatcctctctaatgaaagaggaagccaagcatatgaagactttgttgctggacttggatgggaggtggatctctccacccactgtgggttcatgggtggccttcagcgcaatggcagcaccgggcagacggccccttactatgctacctcaactgtggaagtgattttccatgtttccactcgaatgccgtcagactcagatgattccctcaccaaaaagcttcgtcacttggggaatgacgaggtccatatcgtctggtctgaacactccagagactaccgcaggggtattatcccaactgcctttggagatgtttcaatcattatttacccaatgaagaatcacatgttcttcatcgcgataacgaagaaacctgaggttccattttttgggcctctgtttgatggagccatagtgagtgggaagctgctgccaagccttgtatgtgccacgtgcatcaacgccagcagggctgtgaagtgcctcatcccactctaccagagcttctatgaagagcgagctctgtatctcgaagcaataattcagaaccaccgcgaagtaatgacattcgaggatttcgcagcccaagtcttttctccctctcccagctactccctcagcggaacggattaaaacacgtaaaggtctcatttcaatatttgagcaaggggccctggcctccagtctgagtgctgacctcgaagagcccctgagtgaggaggagacagaacaccctctcctgcctctgccccgagccactaaacccagaatctccaggaaatttcgttgctgtactagtgccctcagcaggtcttcccattagtggacttctgaagcccatggtgaatcccactaccgtgtctcagatgggactcaaactaggctgtatcatcttgtcctgaaacctcacaaaccttggacttccaaagaagaaaagaaaaagtcaccaaaaaccagagatgaacccactgacacgtgggcactggtgtggctgctctgggcagatgacagcaggaaaagattctgcgctttcagggagggggcagagggcagcttgcttctgcaccccaagttgtttcttctcatttatgaacccaagcatgattcacaaaggggctggcaaaacaattgtctaattgaggaatctgatctgcattgattttgctagttccttttatgttaggatttatggtttactcaaaaatttcatcatcatggaaattggctttccccggggtcttttgcccaggagaagttttacctcagttgtccagtgttttcccacatggtacctgacgcccgctaactaagcagaggctctcctcaccacgcagaggcgcttcaggtcatgacagtgatgcccctatcttagaacactcagaagattccagaaatacagggtcctgtccttgcataagttcctgcaggacaggaagtgtcccaaggctcaaaacaacacagaccacatccacacaaaaggcgcatgccggcttcaggcgctaggctgagacgggtaccccccgaatggccttgtgcctccaaaagcctcacgctgcaactttgctgctcctgtctgttgcccagagaggcctcacacaggcctcagaaatgtttcttgtcacacaaagcttttggtagccgattccaagcgagggatttaatccttacatttttgcccatttggctccaaggaaggcttattagacctgtttttttgttgttgttgtttttttttcttaaaaacaaaatgaatgaatgaatgaaaagagaagcaatggtgagccctctcctgctggggcgccctgggtgggccttgcccgtcctgcagcagagaaatcagtcagcagcgaagagctgctggcgcaggccccaggctgtgtcctggacccttgacctgcctcagagctagaggtttgctccaccccgcacttcacttgggaagtaaatccaagaagcttaccagagtccatcgccactgcgcaggctttgttctcacagcggccaggtacagagcaacgccctgcagtgggaagggacagcagcacgagagacgcagcccctaactcagggcttatgatgggtgggctggtcctgggaaaggcgggccctgtgcgggaggcctccccaccttcctgtgccctctgccctctgcccttgcacacacttgttaccttcaggctgcttggccacccaggcctgaagaagccttctgaggctctcaccccatcagaacggccattttcactgaggagccagttttttccatttgccatggagctggtttggctggaacctggcctttgtagggaaaacggggagactcaggagccagactcactcttgggacaaatgagaaagagctgagccagtcgttcctgtcggaagggcgggcctgctcatcctggcgagaatttgcttttctgctttataggggattgcaggccaggcccactgacaggagcaccttgagaaccacctgaacagaagagaatgagggtgccccaaagtggaaggaagcttctggcccctgggccgttttgggaagggcccaggatactcacgggggctgaagggcaatgtgaagagtgactgcaagtcctggcattttctgtggtgtcagcaaatgcccctttattttaaatgattccagacatctgggcagcatagcttggccaccatcactcaggcttgatcctgctgttgagctgctcctgtctcctgtttacctcactcctgttgggaaggccatcgcatgctcctaggctccagagtcccctgtaggtctctaccagcaggtcgcctctgggagaacgtttcatcttcaggctctagaaactcctgttgcggaattgctggctttagtagaaaagatatgtcaggatttagaaatcgtattgaactctcctggacttctgctccatgatttcattttgctttcacgaaccagcgatccctaccttggggtgggaaattcaattgtaggcagcaaataactcaaccctcctgtaacccctgaggattataacgaccccatgacccccgatgacagccagcagtttggtgactagagttttttgagcctgccattctcagtagcagctttggtctggagatggaacgtggagcagggaatctgacagccacgtttctcgtgatcacgtggactggagttgtttttgttatctggggtggaaaattgcaatgatcaagtttcttttttattttttttttacttagaaaagcaaatattgtgtttttgtaataaatccctttcagcaaaattgcggaggatcattcatccactagggccccacctgaggcacagcgctgactcatcacggtggtaccagtaggtcagccatctggaaacagaagtggccctaattgggccaaaatgtggtaagactcgctggcctcaggcagggccaggccagttccctcacttctctgcacacctattcccagattccatccagagcaaagctgatgtttatcgtctcattgtacttaggctttcgtactttaaaaaattatgactttttaaaaataagccttcagcagacagaagtgaagaaatttagcctgggttgcctcagcaacaaagtctgcggttcctaagagccacatgttggggaagtggggtgacccaaacttggtgacataggttgattgatcagaccctcagccttacaagcaagagctcatgcagatccacagagccatgcacatcctgtcttcctgaccttcctcaggtggcaccacctgcgccccatggacctgctgtatcggtgtcatgtggaggtctgatgaatcctttaaaacctaactgtgatgtcgtaaatgtaactgtgctacctttatatctactgaagggcagcgtctgcatccgagggaaattcaacatgaaacaaccatcgttttagttgcactcagtctgtccatatgacatacacatgaagtgaatgtttccttatgttttcaggtctacaatgtttagtacatgtaaataaggaaaaaatttgataaatatggtaaattaagttatagcgtgtcatttgattcttattttgctgtctcttgttatttaattttcctaatgctccacatctaggttccttcctaggtggtgggaacaccttgcagacgtgtgtgcaccaggacacaccgcggcccaggcagccacaccgagaaagcacacatctccactgatggcagccacccgactctccagttaacctcttttactctttaattctgatttactgtgatgatttaataaagtggaaacacagcacttcagtgctatatgtttctctcattctcattatagtttataagaaaataaagttcaccctggcatct

SEQ ID NO: 11223 - protein, 1873 aa, Homo sapiens; identical to SEQ ID NO: 1877

SEQ ID NO: 11224 - DNA, 9469 bp, Homo sapiens
acagctgaggcggcggcggcggcggcggcggcggcagcagcggggctgggggcggcgagtggcccgcgcgacacgcgccggcctcgaccctatgctttgattcgcgtggcgcaggcgcctactgccccgccggcggggcccgggcttcctgccgcgggatgttctcccgaaggagccacggggatgtgaagaagtccacccagaaggtgctggacccgaagaaggacgtgctgacccgcctgaagcacctgcgggcgctgctggataatgtggatgcaaatgatcttaagcagttttttgagaccaactattctcagatatatttcatcttctatgaaaattttatagcactggaaaatagtttgaaattaaaagggaataataagtcacaaagggaggagctggactccatcctcttcctttttgaaaaaatactgcagtttctacctgaacgaattttctttcgatggcattaccagagtataggctcaactttaaagaagcttctacacactggaaattctattaagataagatgtgaaggaatcaggctgtttcttctgtggcttcaagcacttcagacaaactgtgcagaagagcaggttctgatttttgcttgcctggtgcctggtttcccagcagtcatgtcatccaggggcccttgcacactggagacactcatcaatcccagccctagtgtagctgatgtaaagatatatccagaagaaatcactccactcctaccagccatatcaggggagaagattgctgaggaccaaacctgcttttttcttcaaatactgttgaagtatatggttattcaggctgcgagcttggagtggaagaataaggagaatcaagatactggttttaaatttctttttacattgtttcgaaagtattatcttcctcatttatttccatcatttactaagttaacaaacatctacaaacctgtacttgacatcccccatttgagaccaaagcctgtgtacattactaccactcgagacaatgagaacatttacagtacaaagattccatatatggcagctcgtgttgtttttattaagtggattgtaaccttctttttggaaaaaaagtatctaactgcaacacaaaacactaaaaatggagttgatgtattgcctaaaatcatccagactgttggtggtggtgctgtgcaggagagagcgcctgagctggatggtggtgggcccacggagcaggacaaaagccattctaacagcagcaccttgtcggaccgaagactcagcaactccagcctctgtagcattgaagaagagcaccgaatggtgtatgaaatggtacagcggattctcttgtcaacacgaggttatgtcaacttcgtgaatgaagtatttcaccaggcatttttgttgccttcctgtgagatagctgtaacaagaaaagtagttcaagtgtacagaaagtggattctccaggacaaacctgtgttcatggaggagccagatagaaaagatgttgcccaagaagatgctgaaaaattaggattttccgagactgatagcaaggaggcctcatctgaaagttctggtcataaacgatcttccagttggggacgcacatactccttcacaagtgcaatgagcagagggtgtgtgacagaggaggaaaatacaaatgtgaaagccggcgtccaggctttgttgcaggtatttttgacgaactctgcaaacatctttttgttggaaccatgtgctgaagttcctgtgctcttgaaagaacaagttgatgcttgtaaagctgttttgattatttttaggcgcatgataatggagcttacaatgaataaaaagacatgggaacagatgttgcaaatactactcaggataacagaagctgtcatgcagaagccaaaggataaacaaataaaggacttgtttgcccagagcttggcagggttactatttaggacgctcatggtagcttggatccgagcaaacctctgtgtgtacatttctcgagagctctgggatgactttcttggtgtgctgtcctccctcacggaatgggaggaacttataaacgagtgggccaacattatggactccttgacagcagtgcttgcaagaaccgtttatggagttgagatgacaaacctacctctggataaattaagtgaacaaaaggaaaagaagcaacgaggcaaaggctgtgttctagatcctcagaaaggaaccaccgtggggaggtccttttctctcagctggcggagccacccagatgtgaccgaaccgatgcgatttaggagtgccaccacgtctggagcaccgggagtggaaaaggcaagaaatattgttcgccaaaaagcaactgaagtggaggagtgtcaacagtcagaaaatgcacctgcagccggatctggccatctcacagtgggacagcagcagcaggtccttcggagcagcagcacctccgacatccccgagccgctgtgctcagattcttctcagggtcaaaaggcagaaaacacacagaattcgagttcttcagagcctcagcctattcaagagaataaaggacatgtgaagagagaacatgaaggaataacaatcttagttcgaagaagcagcagccctgctgaattggatttgaaagatgatttgcagcagacacaaggaaaatgtagggaaagacagaagagtgaaagtaccaacagtgacacaactctgggctgtaccaatgaggcagagctgtccatgggcccatggcagacctgtgaggaagacccagaactgaatactcccacagatgttgtggctgatgctgatgcccgtcattggttacaactgagtcccaccgatgcttcaaatttaacagatagcagcgagtgcctcacagatgactgtagtataatcgccggggggagcctcactggttggcacccagactctgctgctgtgttatggcgaagggtcttggggatcctcggagatgtgaataacatccagtcacccaagatccatgccagagttttctgctatctctatgaactctggtacaaactagcaaagatacgggataatctagcaataagcctggataaccagtcttctccatctcctccagttttgatcccaccactcagaatgtttgcatcatggctgtttaaggcggcgacactgccaaatgaatataaggaaggcaaactacaagcctacaggctgatctgtgccatgatgaccagacgccaggacgttctgccaaactcagatttcctggtgcatttttaccttgtgatgcacctgggattaaccagcgaggatcaggatatcttaaatacgatcataaggcactgtccaccccgctttttctccctgggttttcctggcttctcaatgctggtgggggacttcatcacggccgctgccagggtccttagcacagacattttgacggcgcctcgttcagaggctgtcactgtcctcggctctctggtctgctttccaaatacctaccaggagattcctttactgcagtcagtgccagaagtaaatgaggccattacaggaactgaagatgtcaagcattacctcataaatattttactgaagaatgccacagaagaaccaaatgaatatgcaagatgcattgctgtttgctcccttggggtctggatatgtgaagagcttgcacagtgtacaagccaccctcaggtgaaagaggccatcaatgtgataggagtaactctgaagtttcccaacaaaatcgtggcccaggtagcttgcgatgtccttcagttgctggtttcctactgggagaagcttcagatgtttgaaacctctctgcctcggaaaatggcagaaatcctcgtggccacagttgcttttcttttaccaagtgcagagtactcctcagtggaaacagacaagaagtttattgtgtccttgctactctgcctcttggactggtgcatggcattgcccgtgagtgtccttctccaccccgtgtccacagcagtcctagaggagcagcattcggccagagcccccttgctggattatatctacagggttttgcactgctgtgtgtgtggctcaagcacgtacacccaacagagtcactacatactgaccctggctgacttgtcatccacggattatgaccccttcctgccactggcaaatgtgaagagctctgagccagtccagtatcattcatcagcagaattgggtaacctgctgactgttgaagaggagaagaagagaagaagtttggagttgatccctttgactgctcgaatggtgatggcccacctggtgaaccacctggggcactaccccctcagtgggggccctgccatactgcacagccttgtcagcgagaaccatgacaatgcccatgtggaaggctccgagctgtcctttgaggtgttcagaagtccaaacctgcagctgtttgtatttaatgatagcaccctcatctcctaccttcagacacccacagaaggaccggtagggggatcaccagtgggctctctctctgatgtgagagtaattgtgagggatatctcagggaagtactcttgggatggtaaggttttatatggacctttggaaggctgcttagcacccaatggaagaaatccttcatttctgatttcgagctggcatcgtgacacatttggacctcagaaagactcttctcaagttgaggagggggatgatgttcttgacaaattacttgaaaacattggccatacaagtcctgaatgccttttaccgtcacagctaaatctaaatgaaccttccctaaccccatgtggcatgaactatgaccaagagaaggaaatcattgaggtcattttgcgccaaaatgctcaagaggatgagtatatccagagtcataacttcgattctgcaatgaaagtcaccagccaagggcagccctccccagtggagccccgaggacccttttatttctgcaggttattgcttgatgacttgggaatgaattcttgggacagaaggaagaattttcatctattgaagaaaaattcaaaattattgagagagctgaaaaatttggactcccgccagtgccgtgagacacacaaaatcgcagtgttttacattgctgaaggtcaagaagacaagtgttcaatcctctctaatgaaagaggaagccaagcatatgaagactttgttgctggacttggatgggaggtggatctctccacccactgtgggttcatgggtggccttcagcgcaatggcagcaccgggcagacggccccttactatgctacctcaactgtggaagtgattttccatgtttccactcgaatgccgtcagactcagatgattccctcaccaaaaagcttcgtcacttggggaatgacgaggtccatatcgtctggtctgaacactccagagactaccgcaggggtattatcccaactgcctttggagatgtttcaatcattatttacccaatgaagaatcacatgttcttcatcgcgataacgaagaaacctgaggttccattttttgggcctctgtttgatggagccatagtgagtgggaagctgctgccaagccttgtatgtgccacgtgcatcaacgccagcagggctgtgaagtgcctcatcccactctaccagagcttctatgaagagcgagctctgtatctcgaagcaataattcagaaccaccgcgaagtaatgacattcgaggatttcgcagcccaagtcttttctccctctcccagctactccctcagcggaacgggggccctggcctccagtctgagtgctgacctcgaagagcccctgagtgaggaggagacagaacaccctctcctgcctctgccccgagccactaaacccagaatctccaggaaatttcgttgctgtactagtgccctcagcaggtcttcccattagtggacttctgaagcccatggtgaatcccactaccgtgtctcagatgggactcaaactaggctgtatcatcttgtcctgaaacctcacaaaccttggacttccaaagaagaaaagaaaaagtcaccaaaaaccagagatgaacccactgacacgtgggcactggtgtggctgctctgggcagatgacagcaggaaaagattctgcgctttcagggagggggcagagggcagcttgcttctgcaccccaagttgtttcttctcatttatgaacccaagcatgattcacaaaggggctggcaaaacaattgtctaattgaggaatctgatctgcattgattttgctagttccttttatgttaggatttatggtttactcaaaaatttcatcatcatggaaattggctttccccggggtcttttgcccaggagaagttttacctcagttgtccagtgttttcccacatggtacctgacgcccgctaactaagcagaggctctcctcaccacgcagaggcgcttcaggtcatgacagtgatgcccctatcttagaacactcagaagattccagaaatacagggtcctgtccttgcataagttcctgcaggacaggaagtgtcccaaggctcaaaacaacacagaccacatccacacaaaaggcgcatgccggcttcaggcgctaggctgagacgggtaccccccgaatggccttgtgcctccaaaagcctcacgctgcaactttgctgctcctgtctgttgcccagagaggcctcacacaggcctcagaaatgtttcttgtcacacaaagcttttggtagccgattccaagcgagggatttaatccttacatttttgcccatttggctccaaggaaggcttattagacctgtttttttgttgttgttgtttttttttcttaaaaacaaaatgaatgaatgaatgaaaagagaagcaatggtgagccctctcctgctggggcgccctgggtgggccttgcccgtcctgcagcagagaaatcagtcagcagcgaagagctgctggcgcaggccccaggctgtgtcctggacccttgacctgcctcagagctagaggtttgctccaccccgcacttcacttgggaagtaaatccaagaagcttaccagagtccatcgccactgcgcaggctttgttctcacagcggccaggtacagagcaacgccctgcagtgggaagggacagcagcacgagagacgcagcccctaactcagggcttatgatgggtgggctggtcctgggaaaggcgggccctgtgcgggaggcctccccaccttcctgtgccctctgccctctgcccttgcacacacttgttaccttcaggctgcttggccacccaggcctgaagaagccttctgaggctctcaccccatcagaacggccattttcactgaggagccagttttttccatttgccatggagctggtttggctggaacctggcctttgtagggaaaacggggagactcaggagccagactcactcttgggacaaatgagaaagagctgagccagtcgttcctgtcggaagggcgggcctgctcatcctggcgagaatttgcttttctgctttataggggattgcaggccaggcccactgacaggagcaccttgagaaccacctgaacagaagagaatgagggtgccccaaagtggaaggaagcttctggcccctgggccgttttgggaagggcccaggatactcacgggggctgaagggcaatgtgaagagtgactgcaagtcctggcattttctgtggtgtcagcaaatgcccctttattttaaatgattccagacatctgggcagcatagcttggccaccatcactcaggcttgatcctgctgttgagctgctcctgtctcctgtttacctcactcctgttgggaaggccatcgcatgctcctaggctccagagtcccctgtaggtctctaccagcaggtcgcctctgggagaacgtttcatcttcaggctctagaaactcctgttgcggaattgctggctttagtagaaaagatatgtcaggatttagaaatcgtattgaactctcctggacttctgctccatgatttcattttgctttcacgaaccagcgatccctaccttggggtgggaaattcaattgtaggcagcaaataactcaaccctcctgtaacccctgaggattataacgaccccatgacccccgatgacagccagcagtttggtgactagagttttttgagcctgccattctcagtagcagctttggtctggagatggaacgtggagcagggaatctgacagccacgtttctcgtgatcacgtggactggagttgtttttgttatctggggtggaaaattgcaatgatcaagtttcttttttattttttttttacttagaaaagcaaatattgtgtttttgtaataaatccctttcagcaaaattgcggaggatcattcatccactagggccccacctgaggcacagcgctgactcatcacggtggtaccagtaggtcagccatctggaaacagaagtggccctaattgggccaaaatgtggtaagactcgctggcctcaggcagggccaggccagttccctcacttctctgcacacctattcccagattccatccagagcaaagctgatgtttatcgtctcattgtacttaggctttcgtactttaaaaaattatgactttttaaaaataagccttcagcagacagaagtgaagaaatttagcctgggttgcctcagcaacaaagtctgcggttcctaagagccacatgttggggaagtggggtgacccaaacttggtgacataggttgattgatcagaccctcagccttacaagcaagagctcatgcagatccacagagccatgcacatcctgtcttcctgaccttcctcaggtggcaccacctgcgccccatggacctgctgtatcggtgtcatgtggaggtctgatgaatcctttaaaacctaactgtgatgtcgtaaatgtaactgtgctacctttatatctactgaagggcagcgtctgcatccgagggaaattcaacatgaaacaaccatcgttttagttgcactcagtctgtccatatgacatacacatgaagtgaatgtttccttatgttttcaggtctacaatgtttagtacatgtaaataaggaaaaaatttgataaatatggtaaattaagttatagcgtgtcatttgattcttattttgctgtctcttgttatttaattttcctaatgctccacatctaggttccttcctaggtggtgggaacaccttgcagacgtgtgtgcaccaggacacaccgcggcccaggcagccacaccgagaaagcacacatctccactgatggcagccacccgactctccagttaacctcttttactctttaattctgatttactgtgatgatttaataaagtggaaacacagcacttcagtgctatatgtttctctcattctcattatagtttataagaaaataaagttcaccctggcatct

SEQ ID NO: 11225 - protein, 1923 aa, Homo sapiens; identical to SEQ ID NO: 11221

SEQ ID NO: 11226 - DNA, 9445 bp, Homo sapiens
acagctgaggcggcggcggcggcggcggcggcggcagcagcggggctgggggcggcgagtggcccgcgcgacacgcgccggcctcgaccctatgctttgattcgcgtggcgcaggcgcctactgccccgccggcggggcccgggcttcctgccgcgggatgttctcccgaaggagccacggggatgtgaagaagtccacccagaaggtgctggacccgaagaaggacgtgctgacccgcctgaagcacctgcgggcgctgctggataatgtggatgcaaatgatcttaagcagttttttgagaccaactattctcagatatatttcatcttctatgaaaattttatagcactggaaaatagtttgaaattaaaagggaataataagtcacaaagggaggagctggactccatcctcttcctttttgaaaaaatactgcagtttctacctgaacgaattttctttcgatggcattaccagagtataggctcaactttaaagaagcttctacacactggaaattctattaagataagatgtgaaggaatcaggctgtttcttctgtggcttcaagcacttcagacaaactgtgcagaagagcaggttctgatttttgcttgcctggtgcctggtttcccagcagtcatgtcatccaggggcccttgcacactggagacactcatcaatcccagccctagtgtagctgatgtaaagatatatccagaagaaatcactccactcctaccagccatatcaggggagaagattgctgaggaccaaacctgcttttttcttcaaatactgttgaagtatatggttattcaggctgcgagcttggagtggaagaataaggagaatcaagatactggttttaaatttctttttacattgtttcgaaagtattatcttcctcatttatttccatcatttactaagttaacaaacatctacaaacctgtacttgacatcccccatttgagaccaaagcctgtgtacattactaccactcgagacaatgagaacatttacagtacaaagattccatatatggcagctcgtgttgtttttattaagtggattgtaaccttctttttggaaaaaaagtatctaactgcaacacaaaacactaaaaatggagttgatgtattgcctaaaatcatccagactgttggtggtggtgctgtgcaggagagagcgcctgagctggatggtggtgggcccacggagcaggacaaaagccattctaacagcagcaccttgtcggaccgaagactcagcaactccagcctctgtagcattgaagaagagcaccgaatggtgtatgaaatggtacagcggattctcttgtcaacacgaggttatgtcaacttcgtgaatgaagtatttcaccaggcatttttgttgccttcctgtgagatagctgtaacaagaaaagtagttcaagtgtacagaaagtggattctccaggacaaacctgtgttcatggaggagccagatagaaaagatgttgcccaagaagatgctgaaaaattaggattttccgagactgatagcaaggaggcctcatctgaaagttctggtcataaacgatcttccagttggggacgcacatactccttcacaagtgcaatgagcagagggtgtgtgacagaggaggaaaatacaaatgtgaaagccggcgtccaggctttgttgcaggtatttttgacgaactctgcaaacatctttttgttggaaccatgtgctgaagttcctgtgctcttgaaagaacaagttgatgcttgtaaagctgttttgattatttttaggcgcatgataatggagcttacaatgaataaaaagacatgggaacagatgttgcaaatactactcaggataacagaagctgtcatgcagaagccaaaggataaacaaataaaggacttgtttgcccagagcttggcagggttactatttaggacgctcatggtagcttggatccgagcaaacctctgtgtgtacatttctcgagagctctgggatgactttcttggtgtgctgtcctccctcacggaatgggaggaacttataaacgagtgggccaacattatggactccttgacagcagtgcttgcaagaaccgtttatggagttgagatgacaaacctacctctggataaattaagtgaacaaaaggaaaagaagcaacgaggcaaaggctgtgttctagatcctcagaaaggaaccaccgtggggaggtccttttctctcagctggcggagccacccagatgtgaccgaaccgatgcgatttaggagtgccaccacgtctggagcaccgggagtggaaaaggcaagaaatattgttcgccaaaaagcaactgaagtggaggagtgtcaacagtcagaaaatgcacctgcagccggatctggccatctcacagtgggacagcagcagcaggtccttcggagcagcagcacctccgacatccccgagccgctgtgctcagattcttctcagggtcaaaaggcagaaaacacacagaattcgagttcttcagagcctcagcctattcaagagaataaaggacatgtgaagagagaacatgaaggaataacaatcttagttcgaagaagcagcagccctgctgaattggatttgaaagatgatttgcagcagacacaaggaaaatgtagggaaagacagaagagtgaaagtaccaacagtgacacaactctgggctgtaccaatgaggcagagctgtccatgggcccatggcagacctgtgaggaagacccagaactgaatactcccacagatgttgtggctgatgctgatgcccgtcattggttacaactgagtcccaccgatgcttcaaatttaacagatagcagcgagtgcctcacagatgactgtagtataatcgccggggggagcctcactggttggcacccagactctgctgctgtgttatggcgaagggtcttggggatcctcggagatgtgaataacatccagtcacccaagatccatgccagagttttctgctatctctatgaactctggtacaaactagcaaagatacgggataatctagcaataagcctggataaccagtcttctccatctcctccagttttgatcccaccactcagaatgtttgcatcatggctgtttaaggcggcgacactgccaaatgaatataaggaaggcaaactacaagcctacaggctgatctgtgccatgatgaccagacgccaggacgttctgccaaactcagatttcctggtgcatttttaccttgtgatgcacctgggattaaccagcgaggatcaggatatcttaaatacgatcataaggcactgtccaccccgctttttctccctgggttttcctggcttctcaatgctggtgggggacttcatcacggccgctgccagggtccttagcacagacattttgacggcgcctcgttcagaggctgtcactgtcctcggctctctggtctgctttccaaatacctaccaggagattcctttactgcagtcagtgccagaagtaaatgaggccattacaggaactgaagatgtcaagcattacctcataaatattttactgaagaatgccacagaagaaccaaatgaatatgcaagatgcattgctgtttgctcccttggggtctggatatgtgaagagcttgcacagtgtacaagccaccctcaggtgaaagaggccatcaatgtgataggagtaactctgaagtttcccaacaaaatcgtggcccaggtagcttgcgatgtccttcagttgctggtttcctactgggagaagcttcagatgtttgaaacctctctgcctcggaaaatggcagaaatcctcgtggccacagttgcttttcttttaccaagtgcagagtactcctcagtggaaacagacaagaagtttattgtgtccttgctactctgcctcttggactggtgcatggcattgcccgtgagtgtccttctccaccccgtgtccacagcagtcctagaggagcagcattcggccagagcccccttgctggattatatctacagggttttgcactgctgtgtgtgtggctcaagcacgtacacccaacagagtcactacatactgaccctggctgacttgtcatccacggattatgaccccttcctgccactggcaaatgtgaagagctctgagccagtccagtatcattcatcagcagaattgggtaacctgctgactgttgaagaggagaagaagagaagaagtttggagttgatccctttgactgctcgaatggtgatggcccacctggtgaaccacctggggcactaccccctcagtgggggccctgccatactgcacagccttgtcagcgagaaccatgacaatgcccatgtggaaggctccgagctgtcctttgaggtgttcagaagtccaaacctgcagctgtttgtatttaatgatagcaccctcatctcctaccttcagacacccacagaaggaccggtagggggatcaccagtgggctctctctctgatgtgagagtaattgtgagggatatctcagggaagtactcttgggatggtaaggttttatatggacctttggaaggctgcttagcacccaatggaagaaatccttcatttctgatttcgagctggcatcgtgacacatttggacctcagaaagactcttctcaagttgaggagggggatgatgttcttgacaaattacttgaaaacattggccatacaagtcctgaatgccttttaccgtcacagctaaatctaaatgaaccttccctaaccccatgtggcatgaactatgaccaagagaaggaaatcattgaggtcattttgcgccaaaatgctcaagaggatgagtatatccagagtcataacttcgattctgcaatgaaagtcaccagccaagggcagccctccccagtggagccccgaggacccttttatttctgcaggttattgcttgatgacttgggaatgaattcttgggacagaaggaagaattttcatctattgaagaaaaattcaaaattattgagagagctgaaaaatttggactcccgccagtgccgtgagacacacaaaatcgcagtgttttacattgctgaaggtcaagaagacaagtgttcaatcctctctaatgaaagaggaagccaagcatatgaagactttgttgctggacttggatgggaggtggatctctccacccactgtgggttcatgggtggccttcagcgcaatggcagcaccgggcagacggccccttactatgctacctcaactgtggaagtgattttccatgtttccactcgaatgccgtcagactcagatgattccctcaccaaaaagcttcgtcacttggggaatgacgaggtccatatcgtctggtctgaacactccagagactaccgcaggggtattatcccaactgcctttggagatgtttcaatcattatttacccaatgaagaatcacatgttcttcatcgcgataacgaagaaacctgaggttccattttttgggcctctgtttgatggagccatagtgagtgggaagctgctgccaagccttgtatgtgccacgtgcatcaacgccagcagggctgtgaagtgcctcatcccactctaccagagcttctatgaagagcgagctctgtatctcgaagcaataattcagaaccaccgcgaagtaatgacattcgaggatttcgcagcccaagtcttttctccctctcccagctactccctcagcggaacggattaaaacacgtaaaggtctcatttcaatatttgagcaaggggccctggcctccagtctgagtgctgacctcgaagagcccctgagtgaggaggagacagaacaccctctcctgcctctgccccgagccactaaacccagaatctccaggaaatttcgttgctgtactagtgccctcagcaggtcttcccattagtggacttctgaagcccatggtgaatcccactaccgtgtctcagatgggactcaaactaggctgtatcatcttgtcctgaaacctcacaaaccttggacttccaaagaagaaaagaaaaagtcaccaaaaaccagagatgaacccactgacacgtgggcactggtgtggctgctctgggcagatgacagcaggaaaagattctgcgctttcagggagggggcagagggcagcttgcttctgcaccccaagttgtttcttctcatttatgaacccaagcatgattcacaaaggggctggcaaaacaattgtctaattgaggaatctgatctgcattgattttgctagttccttttatgttaggatttatggtttactcaaaaatttcatcatcatggaaattggctttccccggggtcttttgcccaggagaagttttacctcagttgtccagtgttttcccacatggtacctgacgcccgctaactaagcagaggctctcctcaccacgcagaggcgcttcaggtcatgacagtgatgcccctatcttagaacactcagaagattccagaaatacagggtcctgtccttgcataagttcctgcaggacaggaagtgtcccaaggctcaaaacaacacagaccacatccacacaaaaggcgcatgccggcttcaggcgctaggctgagacgggtaccccccgaatggccttgtgcctccaaaagcctcacgctgcaactttgctgctcctgtctgttgcccagagaggcctcacacaggcctcagaaatgtttcttgtcacacaaagcttttggtagccgattccaagcgagggatttaatccttacatttttgcccatttggctccaaggaaggcttattagacctgtttttttgttgttgttgtttttttttcttaaaaacaaaatgaatgaatgaatgaaaagagaagcaatggtgagccctctcctgctggggcgccctgggtgggccttgcccgtcctgcagcagagaaatcagtcagcagcgaagagctgctggcgcaggccccaggctgtgtcctggacccttgacctgcctcagagctagaggtttgctccaccccgcacttcacttgggaagtaaatccaagaagcttaccagagtccatcgccactgcgcaggctttgttctcacagcggccaggtacagagcaacgccctgcagtgggaagggacagcagcacgagagacgcagcccctaactcagggcttatgatgggtgggctggtcctgggaaaggcgggccctgtgcgggaggcctccccaccttcctgtgccctctgccctctgcccttgcacacacttgttaccttcaggctgcttggccacccaggcctgaagaagccttctgaggctctcaccccatcagaacggccattttcactgaggagccagttttttccatttgccatggagctggtttggctggaacctggcctttgtagggaaaacggggagactcaggagccagactcactcttgggacaaatgagaaagagctgagccagtcgttcctgtcggaagggcgggcctgctcatcctggcgagaatttgcttttctgctttataggggattgcaggccaggcccactgacaggagcaccttgagaaccacctgaacagaagagaatgagggtgccccaaagtggaaggaagcttctggcccctgggccgttttgggaagggcccaggatactcacgggggctgaagggcaatgtgaagagtgactgcaagtcctggcattttctgtggtgtcagcaaatgcccctttattttaaatgattccagacatctgggcagcatagcttggccaccatcactcaggcttgatcctgctgttgagctgctcctgtctcctgtttacctcactcctgttgggaaggccatcgcatgctcctaggctccagagtcccctgtaggtctctaccagcaggtcgcctctgggagaacgtttcatcttcaggctctagaaactcctgttgcggaattgctggctttagtagaaaagatatgtcaggatttagaaatcgtattgaactctcctggacttctgctccatgatttcattttgctttcacgaaccagcgatccctaccttggggtgggaaattcaattgtaggcagcaaataactcaaccctcctgtaacccctgaggattataacgaccccatgacccccgatgacagccagcagtttggtgactagagttttttgagcctgccattctcagtagcagctttggtctggagatggaacgtggagcagggaatctgacagccacgtttctcgtgatcacgtggactggagttgtttttgttatctggggtggaaaattgcaatgatcaagtttcttttttattttttttttacttagaaaagcaaatattgtgtttttgtaataaatccctttcagcaaaattgcggaggatcattcatccactagggccccacctgaggcacagcgctgactcatcacggtggtaccagtaggtcagccatctggaaacagaagtggccctaattgggccaaaatgtggtaagactcgctggcctcaggcagggccaggccagttccctcacttctctgcacacctattcccagattccatccagagcaaagctgatgtttatcgtctcattgtacttaggctttcgtactttaaaaaattatgactttttaaaaataagccttcagcagacagaagtgaagaaatttagcctgggttgcctcagcaacaaagtctgcggttcctaagagccacatgttggggaagtggggtgacccaaacttggtgacataggttgattgatcagaccctcagccttacaagcaagagctcatgcagatccacagagccatgcacatcctgtcttcctgaccttcctcaggtggcaccacctgcgccccatggacctgctgtatcggtgtcatgtggaggtctgatgaatcctttaaaacctaactgtgatgtcgtaaatgtaactgtgctacctttatatctactgaagggcagcgtctgcatccgagggaaattcaacatgaaacaaccatcgttttagttgcactcagtctgtccatatgacatacacatgaagtgaatgtttccttatgttttcaggtctacaatgtttagtacatgtaaataaggaaaaaatttgataaatatggtaaattaagttatagcgtgtcatttgattcttattttgctgtctcttgttatttaattttcctaatgctccacatctaggttccttcctaggtggtgggaacaccttgcagacgtgtgtgcaccaggacacaccgcggcccaggcagccacaccgagaaagcacacatctccactgatggcagccacccgactctccagttaacctcttttactctttaattctgatttactgtgatgatttaataaagtggaaacacagcacttc

SEQ ID NO: 11227 - protein, 1873 aa, Homo sapiens; identical to SEQ ID NO: 1877

SEQ ID NO: 11228 - DNA, 9405 bp, Homo sapiens
acagctgaggcggcggcggcggcggcggcggcggcagcagcggggctgggggcggcgagtggcccgcgcgacacgcgccggcctcgaccctatgctttgattcgcgtggcgcaggcgcctactgccccgccggcggggcccgggcttcctgccgcgggatgttctcccgaaggagccacggggatgtgaagaagtccacccagaaggtgctggacccgaagaaggacgtgctgacccgcctgaagcacctgcgggcgctgctggataatgtggatgcaaatgatcttaagcagttttttgagaccaactattctcagatatatttcatcttctatgaaaattttatagcactggaaaatagtttgaaattaaaagggaataataagtcacaaagggaggagctggactccatcctcttcctttttgaaaaaatactgcagtttctacctgaacgaattttctttcgatggcattaccagagtataggctcaactttaaagaagcttctacacactggaaattctattaagataagatgtgaaggaatcaggctgtttcttctgtggcttcaagcacttcagacaaactgtgcagaagagcaggttctgatttttgcttgcctggtgcctggtttcccagcagtcatgtcatccaggggcccttgcacactggagacactcatcaatcccagccctagtgtagctgatgtaaagatatatccagaagaaatcactccactcctaccagccatatcaggggagaagattgctgaggaccaaacctgcttttttcttcaaatactgttgaagtatatggttattcaggctgcgagcttggagtggaagaataaggagaatcaagatactggttttaaatttctttttacattgtttcgaaagtattatcttcctcatttatttccatcatttactaagttaacaaacatctacaaacctgtacttgacatcccccatttgagaccaaagcctgtgtacattactaccactcgagacaatgagaacatttacagtacaaagattccatatatggcagctcgtgttgtttttattaagtggattgtaaccttctttttggaaaaaaagtatctaactgcaacacaaaacactaaaaatggagttgatgtattgcctaaaatcatccagactgttggtggtggtgctgtgcaggagagagcgcctgagctggatggtggtgggcccacggagcaggacaaaagccattctaacagcagcaccttgtcggaccgaagactcagcaactccagcctctgtagcattgaagaagagcaccgaatggtgtatgaaatggtacagcggattctcttgtcaacacgaggttatgtcaacttcgtgaatgaagtatttcaccaggcatttttgttgccttcctgtgagatagctgtaacaagaaaagtagttcaagtgtacagaaagtggattctccaggacaaacctgtgttcatggaggagccagatagaaaagatgttgcccaagaagatgctgaaaaattaggattttccgagactgatagcaaggaggcctcatctgaaagttctggtcataaacgatcttccagttggggacgcacatactccttcacaagtgcaatgagcagagggtgtgtgacagaggaggaaaatacaaatgtgaaagccggcgtccaggctttgttgcaggtatttttgacgaactctgcaaacatctttttgttggaaccatgtgctgaagttcctgtgctcttgaaagaacaagttgatgcttgtaaagctgttttgattatttttaggcgcatgataatggagcttacaatgaataaaaagacatgggaacagatgttgcaaatactactcaggataacagaagctgtcatgcagaagccaaaggataaacaaataaaggacttgtttgcccagagcttggcagggttactatttaggacgctcatggtagcttggatccgagcaaacctctgtgtgtacatttctcgagagctctgggatgactttcttggtgtgctgtcctccctcacggaatgggaggaacttataaacgagtgggccaacattatggactccttgacagcagtgcttgcaagaaccgtttatggagttgagatgacaaacctacctctggataaattaagtgaacaaaaggaaaagaagcaacgaggcaaaggctgtgttctagatcctcagaaaggaaccaccgtggggaggtccttttctctcagctggcggagccacccagatgtgaccgaaccgatgcgatttaggagtgccaccacgtctggagcaccgggagtggaaaaggcaagaaatattgttcgccaaaaagcaactgaagtggaggagtgtcaacagtcagaaaatgcacctgcagccggatctggccatctcacagtgggacagcagcagcaggtccttcggagcagcagcacctccgacatccccgagccgctgtgctcagattcttctcagggtcaaaaggcagaaaacacacagaattcgagttcttcagagcctcagcctattcaagagaataaaggacatgtgaagagagaacatgaaggaataacaatcttagttcgaagaagcagcagccctgctgaattggatttgaaagatgatttgcagcagacacaaggaaaatgtagggaaagacagaagagtgaaagtaccaacagtgacacaactctgggctgtaccaatgaggcagagctgtccatgggcccatggcagacctgtgaggaagacccagaactgaatactcccacagatgttgtggctgatgctgatgcccgtcattggttacaactgagtcccaccgatgcttcaaatttaacagatagcagcgagtgcctcacagatgactgtagtataatcgccggggggagcctcactggttggcacccagactctgctgctgtgttatggcgaagggtcttggggatcctcggagatgtgaataacatccagtcacccaagatccatgccagagttttctgctatctctatgaactctggtacaaactagcaaagatacgggataatctagcaataagcctggataaccagtcttctccatctcctccagttttgatcccaccactcagaatgtttgcatcatggctgtttaaggcggcgacactgccaaatgaatataaggaaggcaaactacaagcctacaggctgatctgtgccatgatgaccagacgccaggacgttctgccaaactcagatttcctggtgcatttttaccttgtgatgcacctgggattaaccagcgaggatcaggatatcttaaatacgatcataaggcactgtccaccccgctttttctccctgggttttcctggcttctcaatgctggtgggggacttcatcacggccgctgccagggtccttagcacagacattttgacggcgcctcgttcagaggctgtcactgtcctcggctctctggtctgctttccaaatacctaccaggagattcctttactgcagtcagtgccagaagtaaatgaggccattacaggaactgaagatgtcaagcattacctcataaatattttactgaagaatgccacagaagaaccaaatgaatatgcaagatgcattgctgtttgctcccttggggtctggatatgtgaagagcttgcacagtgtacaagccaccctcaggtgaaagaggccatcaatgtgataggagtaactctgaagtttcccaacaaaatcgtggcccaggtagcttgcgatgtccttcagttgctggtttcctactgggagaagcttcagatgtttgaaacctctctgcctcggaaaatggcagaaatcctcgtggccacagttgcttttcttttaccaagtgcagagtactcctcagtggaaacagacaagaagtttattgtgtccttgctactctgcctcttggactggtgcatggcattgcccgtgagtgtccttctccaccccgtgtccacagcagtcctagaggagcagcattcggccagagcccccttgctggattatatctacagggttttgcactgctgtgtgtgtggctcaagcacgtacacccaacagagtcactacatactgaccctggctgacttgtcatccacggattatgaccccttcctgccactggcaaatgtgaagagctctgagccagtccagtatcattcatcagcagaattgggtaacctgctgactgttgaagaggagaagaagagaagaagtttggagttgatccctttgactgctcgaatggtgatggcccacctggtgaaccacctggggcactaccccctcagtgggggccctgccatactgcacagccttgtcagcgagaaccatgacaatgcccatgtggaaggctccgagctgtcctttgaggtgttcagaagtccaaacctgcagctgtttgtatttaatgatagcaccctcatctcctaccttcagacacccacagaaggaccggtagggggatcaccagtgggctctctctctgatgtgagagtaattgtgagggatatctcagggaagtactcttgggatggtaaggttttatatggacctttggaaggctgcttagcacccaatggaagaaatccttcatttctgatttcgagctggcatcgtgacacatttggacctcagaaagactcttctcaagttgaggagggggatgatgttcttgacaaattacttgaaaacattggccatacaagtcctgaatgccttttaccgtcacagctaaatctaaatgaaccttccctaaccccatgtggcatgaactatgaccaagagaaggaaatcattgaggtcattttgcgccaaaatgctcaagaggatgagtatatccagagtcataacttcgattctgcaatgaaagtcaccagccaagggcagccctccccagtggagccccgaggacccttttatttctgcaggttattgcttgatgacttgggaatgaattcttgggacagaaggaagaattttcatctattgaagaaaaattcaaaattattgagagagctgaaaaatttggactcccgccagtgccgtgagacacacaaaatcgcagtgttttacattgctgaaggtcaagaagacaagtgttcaatcctctctaatgaaagaggaagccaagcatatgaagactttgttgctggacttggatgggaggtggatctctccacccactgtgggttcatgggtggccttcagcgcaatggcagcaccgggcagacggccccttactatgctacctcaactgtggaagtgattttccatgtttccactcgaatgccgtcagactcagatgattccctcaccaaaaagcttcgtcacttggggaatgacgaggtccatatcgtctggtctgaacactccagagactaccgcaggggtattatcccaactgcctttggagatgtttcaatcattatttacccaatgaagaatcacatgttcttcatcgcgataacgaagaaacctgaggttccattttttgggcctctgtttgatggagccatagtgagtgggaagctgctgccaagccttgtatgtgccacgtgcatcaacgccagcagggctgtgaagtgcctcatcccactctaccagagcttctatgaagagcgagctctgtatctcgaagcaataattcagaaccaccgcgaagtaatgacattcgaggatttcgcagcccaagtcttttctccctctcccagctactccctcagcggaacgggggccctggcctccagtctgagtgctgacctcgaagagcccctgagtgaggaggagacagaacaccctctcctgcctctgccccgagccactaaacccagaatctccaggaaatttcgttgctgtactagtgccctcagcaggtcttcccattagtggacttctgaagcccatggtgaatcccactaccgtgtctcagatgggactcaaactaggctgtatcatcttgtcctgaaacctcacaaaccttggacttccaaagaagaaaagaaaaagtcaccaaaaaccagagatgaacccactgacacgtgggcactggtgtggctgctctgggcagatgacagcaggaaaagattctgcgctttcagggagggggcagagggcagcttgcttctgcaccccaagttgtttcttctcatttatgaacccaagcatgattcacaaaggggctggcaaaacaattgtctaattgaggaatctgatctgcattgattttgctagttccttttatgttaggatttatggtttactcaaaaatttcatcatcatggaaattggctttccccggggtcttttgcccaggagaagttttacctcagttgtccagtgttttcccacatggtacctgacgcccgctaactaagcagaggctctcctcaccacgcagaggcgcttcaggtcatgacagtgatgcccctatcttagaacactcagaagattccagaaatacagggtcctgtccttgcataagttcctgcaggacaggaagtgtcccaaggctcaaaacaacacagaccacatccacacaaaaggcgcatgccggcttcaggcgctaggctgagacgggtaccccccgaatggccttgtgcctccaaaagcctcacgctgcaactttgctgctcctgtctgttgcccagagaggcctcacacaggcctcagaaatgtttcttgtcacacaaagcttttggtagccgattccaagcgagggatttaatccttacatttttgcccatttggctccaaggaaggcttattagacctgtttttttgttgttgttgtttttttttcttaaaaacaaaatgaatgaatgaatgaaaagagaagcaatggtgagccctctcctgctggggcgccctgggtgggccttgcccgtcctgcagcagagaaatcagtcagcagcgaagagctgctggcgcaggccccaggctgtgtcctggacccttgacctgcctcagagctagaggtttgctccaccccgcacttcacttgggaagtaaatccaagaagcttaccagagtccatcgccactgcgcaggctttgttctcacagcggccaggtacagagcaacgccctgcagtgggaagggacagcagcacgagagacgcagcccctaactcagggcttatgatgggtgggctggtcctgggaaaggcgggccctgtgcgggaggcctccccaccttcctgtgccctctgccctctgcccttgcacacacttgttaccttcaggctgcttggccacccaggcctgaagaagccttctgaggctctcaccccatcagaacggccattttcactgaggagccagttttttccatttgccatggagctggtttggctggaacctggcctttgtagggaaaacggggagactcaggagccagactcactcttgggacaaatgagaaagagctgagccagtcgttcctgtcggaagggcgggcctgctcatcctggcgagaatttgcttttctgctttataggggattgcaggccaggcccactgacaggagcaccttgagaaccacctgaacagaagagaatgagggtgccccaaagtggaaggaagcttctggcccctgggccgttttgggaagggcccaggatactcacgggggctgaagggcaatgtgaagagtgactgcaagtcctggcattttctgtggtgtcagcaaatgcccctttattttaaatgattccagacatctgggcagcatagcttggccaccatcactcaggcttgatcctgctgttgagctgctcctgtctcctgtttacctcactcctgttgggaaggccatcgcatgctcctaggctccagagtcccctgtaggtctctaccagcaggtcgcctctgggagaacgtttcatcttcaggctctagaaactcctgttgcggaattgctggctttagtagaaaagatatgtcaggatttagaaatcgtattgaactctcctggacttctgctccatgatttcattttgctttcacgaaccagcgatccctaccttggggtgggaaattcaattgtaggcagcaaataactcaaccctcctgtaacccctgaggattataacgaccccatgacccccgatgacagccagcagtttggtgactagagttttttgagcctgccattctcagtagcagctttggtctggagatggaacgtggagcagggaatctgacagccacgtttctcgtgatcacgtggactggagttgtttttgttatctggggtggaaaattgcaatgatcaagtttcttttttattttttttttacttagaaaagcaaatattgtgtttttgtaataaatccctttcagcaaaattgcggaggatcattcatccactagggccccacctgaggcacagcgctgactcatcacggtggtaccagtaggtcagccatctggaaacagaagtggccctaattgggccaaaatgtggtaagactcgctggcctcaggcagggccaggccagttccctcacttctctgcacacctattcccagattccatccagagcaaagctgatgtttatcgtctcattgtacttaggctttcgtactttaaaaaattatgactttttaaaaataagccttcagcagacagaagtgaagaaatttagcctgggttgcctcagcaacaaagtctgcggttcctaagagccacatgttggggaagtggggtgacccaaacttggtgacataggttgattgatcagaccctcagccttacaagcaagagctcatgcagatccacagagccatgcacatcctgtcttcctgaccttcctcaggtggcaccacctgcgccccatggacctgctgtatcggtgtcatgtggaggtctgatgaatcctttaaaacctaactgtgatgtcgtaaatgtaactgtgctacctttatatctactgaagggcagcgtctgcatccgagggaaattcaacatgaaacaaccatcgttttagttgcactcagtctgtccatatgacatacacatgaagtgaatgtttccttatgttttcaggtctacaatgtttagtacatgtaaataaggaaaaaatttgataaatatggtaaattaagttatagcgtgtcatttgattcttattttgctgtctcttgttatttaattttcctaatgctccacatctaggttccttcctaggtggtgggaacaccttgcagacgtgtgtgcaccaggacacaccgcggcccaggcagccacaccgagaaagcacacatctccactgatggcagccacccgactctccagttaacctcttttactctttaattctgatttactgtgatgatttaataaagtggaaacacagcacttc

SEQ ID NO: 11229 - protein, 1923 aa, Homo sapiens; identical to SEQ ID NO: 11221

SEQ ID NO: 11230 - DNA, 9150 bp, Homo sapiens
acagctgaggcggcggcggcggcggcggcggcggcagcagcggggctgggggcggcgagtggcccgcgcgacacgcgccggcctcgaccctatgctttgattcgcgtggcgcaggcgcctactgccccgccggcggggcccgggcttcctgccgcgggatgttctcccgaaggagccacggggatgtgaagaagtccacccagaaggtgctggacccgaagaaggacgtgctgacccgcctgaagcacctgcgggcgctgctggataatgtggatgcaaatgatcttaagcagttttttgagaccaactattctcagatatatttcatcttctatgaaaattttatagcactggaaaatagtttgaaattaaaagggaataataagtcacaaagggaggagctggactccatcctcttcctttttgaaaaaatactgcagtttctacctgaacgaattttctttcgatggcattaccagagtataggctcaactttaaagaagcttctacacactggaaattctattaagataagatgtgaaggaatcaggctgtttcttctgtggcttcaagcacttcagacaaactgtgcagaagagcaggttctgatttttgcttgcctggtgcctggtttcccagcagtcatgtcatccaggggcccttgcacactggagacactcatcaatcccagccctagtgtagctgatgtaaagatatatccagaagaaatcactccactcctaccagccatatcaggggagaagattgctgaggaccaaacctgcttttttcttcaaatactgttgaagtatatggttattcaggctgcgagcttggagtggaagaataaggagaatcaagatactggttttaaatttctttttacattgtttcgaaagtattatcttcctcatttatttccatcatttactaagttaacaaacatctacaaacctgtacttgacatcccccatttgagaccaaagcctgtgtacattactaccactcgagacaatgagaacatttacagtacaaagattccatatatggcagctcgtgttgtttttattaagtggattgtaaccttctttttggaaaaaaagtatctaactgcaacacaaaacactaaaaatggagttgatgtattgcctaaaatcatccagactgttggtggtggtgctgtgcaggagagagcgcctgagctggatggtggtgggcccacggagcaggacaaaagccattctaacagcagcaccttgtcggaccgaagactcagcaactccagcctctgtagcattgaagaagagcaccgaatggtgtatgaaatggtacagcggattctcttgtcaacacgaggttatgtcaacttcgtgaatgaagtatttcaccaggcatttttgttgccttcctgtgagatagctgtaacaagaaaagtagttcaagtgtacagaaagtggattctccaggacaaacctgtgttcatggaggagccagatagaaaagatgttgcccaagaagatgctgaaaaattaggattttccgagactgatagcaaggaggcctcatctgaaagttctggtcataaacgatcttccagttggggacgcacatactccttcacaagtgcaatgagcagagggtgtgtgacagaggaggaaaatacaaatgtgaaagccggcgtccaggctttgttgcaggtatttttgacgaactctgcaaacatctttttgttggaaccatgtgctgaagttcctgtgctcttgaaagaacaagttgatgcttgtaaagctgttttgattatttttaggcgcatgataatggagcttacaatgaataaaaagacatgggaacagatgttgcaaatactactcaggataacagaagctgtcatgcagaagccaaaggataaacaaataaaggacttgtttgcccagagcttggcagggttactatttaggacgctcatggtagcttggatccgagcaaacctctgtgtgtacatttctcgagagctctgggatgactttcttggtgtgctgtcctccctcacggaatgggaggaacttataaacgagtgggccaacattatggactccttgacagcagtgcttgcaagaaccgtttatggagttgagatgacaaacctacctctggataaattaagtgaacaaaaggaaaagaagcaacgaggcaaaggctgtgttctagatcctcagaaaggaaccaccgtggggaggtccttttctctcagctggcggagccacccagatgtgaccgaaccgatgcgatttaggagtgccaccacgtctggagcaccgggagtggaaaaggcaagaaatattgttcgccaaaaagcaactgaagtggaggagtgtcaacagtcagaaaatgcacctgcagccggatctggccatctcacagtgggacagcagcagcaggtccttcggagcagcagcacctccgacatccccgagccgctgtgctcagattcttctcagggtcaaaaggcagaaaacacacagaattcgagttcttcagagcctcagcctattcaagagaataaaggacatgtgaagagagaacatgaaggaataacaatcttagttcgaagaagcagcagccctgctgaattggatttgaaagatgatttgcagcagacacaaggaaaatgtagggaaagacagaagagtgaaagtaccaacagtgacacaactctgggctgtaccaatgaggcagagctgtccatgggcccatggcagacctgtgaggaagacccagaactgaatactcccacagatgttgtggctgatgctgatgcccgtcattggttacaactgagtcccaccgatgcttcaaatttaacagatagcagcgagtgcctcacagatgactgtagtataatcgccggggggagcctcactggttggcacccagactctgctgctgtgttatggcgaagggtcttggggatcctcggagatgtgaataacatccagtcacccaagatccatgccagagttttctgctatctctatgaactctggtacaaactagcaaagatacgggataatctagcaataagcctggataaccagtcttctccatctcctccagttttgatcccaccactcagaatgtttgcatcatggctgtttaaggcggcgacactgccaaatgaatataaggaaggcaaactacaagcctacaggctgatctgtgccatgatgaccagacgccaggacgttctgccaaactcagatttcctggtgcatttttaccttgtgatgcacctgggattaaccagcgaggatcaggatatcttaaatacgatcataaggcactgtccaccccgctttttctccctgggttttcctggcttctcaatgctggtgggggacttcatcacggccgctgccagggtccttagcacagacattttgacggcgcctcgttcagaggctgtcactgtcctcggctctctggtctgctttccaaatacctaccaggagattcctttactgcagtcagtgccagaagtaaatgaggccattacaggaactgaagatgtcaagcattacctcataaatattttactgaagaatgccacagaagaaccaaatgaatatgcaagatgcattgctgtttgctcccttggggtctggatatgtgaagagcttgcacagtgtacaagccaccctcaggtgaaagaggccatcaatgtgataggagtaactctgaagtttcccaacaaaatcgtggcccaggtagcttgcgatgtccttcagttgctggtttcctactgggagaagcttcagatgtttgaaacctctctgcctcggaaaatggcagaaatcctcgtggccacagttgcttttcttttaccaagtgcagagtactcctcagtggaaacagacaagaagtttattgtgtccttgctactctgcctcttggactggtgcatggcattgcccgtgagtgtccttctccaccccgtgtccacagcagtcctagaggagcagcattcggccagagcccccttgctggattatatctacagggttttgcactgctgtgtgtgtggctcaagcacgtacacccaacagagtcactacatactgaccctggctgacttgtcatccacggattatgaccccttcctgccactggcaaatgtgaagagctctgagccagtccagtatcattcatcagcagaattgggtaacctgctgactgttgaagaggagaagaagagaagaagtttggagttgatccctttgactgctcgaatggtgatggcccacctggtgaaccacctggggcactaccccctcagtgggggccctgccatactgcacagccttgtcagcgagaaccatgacaatgcccatgtggaaggctccgagctgtcctttgaggtgttcagaagtccaaacctgcagctgtttgtatttaatgatagcaccctcatctcctaccttcagacacccacagaaggaccggtagggggatcaccagtgggctctctctctgatgtgagagtaattgtgagggatatctcagggaagtactcttgggatggtaaggttttatatggacctttggaaggctgcttagcacccaatggaagaaatccttcatttctgatttcgagctggcatcgtgacacatttggacctcagaaagactcttctcaagttgaggagggggatgatgttcttgacaaattacttgaaaacattggccatacaagtcctgaatgccttttaccgtcacagctaaatctaaatgaaccttccctaaccccatgtggcatgaactatgaccaagagaaggaaatcattgaggtcattttgcgccaaaatgctcaagaggatgagtatatccagagtcataacttcgattctgcaatgaaagtcaccagccaagggcagccctccccagtggagccccgaggacccttttatttctgcaggttattgcttgatgacttgggaatgaattcttgggacagaaggaagaattttcatctattgaagaaaaattcaaaattattgagagagctgaaaaatttggactcccgccagtgccgtgagacacacaaaatcgcagtgttttacattgctgaaggtcaagaagacaagtgttcaatcctctctaatgaaagaggaagccaagcatatgaagactttgttgctggacttggatgggaggtggatctctccacccactgtgggttcatgggtggccttcagcgcaatggcagcaccgggcagacggccccttactatgctacctcaactgtggaagtgattttccatgtttccactcgaatgccgtcagactcagatgattccctcaccaaaaagcttcgtcacttggggaatgacgaggtccatatcgtctggtctgaacactccagagactaccgcaggggtattatcccaactgcctttggagatgtttcaatcattatttacccaatgaagaatcacatgttcttcatcgcgataacgaagaaacctgaggttccattttttgggcctctgtttgatggagccatagtgagtgggaagctgctgccaagccttgtatgtgccacgtgcatcaacgccagcagggctgtgaagtgcctcatcccactctaccagagcttctatgaagagcgagctctgtatctcgaagcaataattcagaaccaccgcgaagtaatgacattcgaggatttcgcagcccaagtcttttctccctctcccagctactccctcagcggaacgggggccctggcctccagtctgagtgctgacctcgaagagcccctgagtgaggaggagacagaacaccctctcctgcctctgccccgagccactaaacccagaatctccaggaaatttcgttgctgtactagtgccctcagcaggtcttcccattagtggacttctgaagcccatggtgaatcccactaccgtgtctcagatgggactcaaactaggctgtatcatcttgtcctgaaacctcacaaaccttggacttccaaagaagaaaagaaaaagtcaccaaaaaccagagatgaacccactgacacgtgggcactggtgtggctgctctgggcagatgacagcaggaaaagattctgcgctttcagggagggggcagagggcagcttgcttctgcaccccaagttgtttcttctcatttatgaacccaagcatgattcacaaaggggctggcaaaacaattgtctaattgaggaatctgatctgcattgattttgctagttccttttatgttaggatttatggtttactcaaaaatttcatcatcatggaaattggctttccccggggtcttttgcccaggagaagttttacctcagttgtccagtgttttcccacatggtacctgacgcccgctaactaagcagaggctctcctcaccacgcagaggcgcttcaggtcatgacagtgatgcccctatcttagaacactcagaagattccagaaatacagggtcctgtccttgcataagttcctgcaggacaggaagtgtcccaaggctcaaaacaacacagaccacatccacacaaaaggcgcatgccggcttcaggcgctaggctgagacgggtaccccccgaatggccttgtgcctccaaaagcctcacgctgcaactttgctgctcctgtctgttgcccagagaggcctcacacaggcctcagaaatgtttcttgtcacacaaagcttttggtagccgattccaagcgagggatttaatccttacatttttgcccatttggctccaaggaaggcttattagacctgtttttttgttgttgttgtttttttttcttaaaaacaaaatgaatgaatgaatgaaaagagaagcaatggtgagccctctcctgctggggcgccctgggtgggccttgcccgtcctgcagcagagaaatcagtcagcagcgaagagctgctggcgcaggccccaggctgtgtcctggacccttgacctgcctcagagctagaggtttgctccaccccgcacttcacttgggaagtaaatccaagaagcttaccagagtccatcgccactgcgcaggctttgttctcacagcggccaggtacagagcaacgccctgcagtgggaagggacagcagcacgagagacgcagcccctaactcagggcttatgatgggtgggctggtcctgggaaaggcgggccctgtgcgggaggcctccccaccttcctgtgccctctgccctctgcccttgcacacacttgttaccttcaggctgcttggccacccaggcctgaagaagccttctgaggctctcaccccatcagaacggccattttcactgaggagccagttttttccatttgccatggagctggtttggctggaacctggcctttgtagggaaaacggggagactcaggagccagactcactcttgggacaaatgagaaagagctgagccagtcgttcctgtcggaagggcgggcctgctcatcctggcgagaatttgcttttctgctttataggggattgcaggccaggcccactgacaggagcaccttgagaaccacctgaacagaagagaatgagggtgccccaaagtggaaggaagcttctggcccctgggccgttttgggaagggcccaggatactcacgggggctgaagggcaatgtgaagagtgactgcaagtcctggcattttctgtggtgtcagcaaatgcccctttattttaaatgattccagacatctgggcagcatagcttggccaccatcactcaggcttgatcctgctgttgagctgctcctgtctcctgtttacctcactcctgttgggaaggccatcgcatgctcctaggctccagagtcccctgtaggtctctaccagcaggtcgcctctgggagaacgtttcatcttcaggctctagaaactcctgttgcggaattgctggctttagtagaaaagatatgtcaggatttagaaatcgtattgaactctcctggacttctgctccatgatttcattttgctttcacgaaccagcgatccctaccttggggtgggaaattcaattgtaggcagcaaataactcaaccctcctgtaacccctgaggattataacgaccccatgacccccgatgacagccagcagtttggtgactagagttttttgagcctgccattctcagtagcagctttggtctggagatggaacgtggagcagggaatctgacagccacgtttctcgtgatcacgtggactggagttgtttttgttatctggggtggaaaattgcaatgatcaagtttcttttttattttttttttacttagaaaagcaaatattgtgtttttgtaataaatccctttcagcaaaattgcggaggatcattcatccactagggccccacctgaggcacagcgctgactcatcacggtggtaccagtaggtcagccatctggaaacagaagtggccctaattgggccaaaatgtggtaagactcgctggcctcaggcagggccaggccagttccctcacttctctgcacacctattcccagattccatccagagcaaagctgatgtttatcgtctcattgtacttaggctttcgtactttaaaaaattatgactttttaaaaataagccttcagcagacagaagtgaagaaatttagcctgggttgcctcagcaacaaagtctgcggttcctaagagccacatgttggggaagtggggtgacccaaacttggtgacataggttgattgatcagaccctcagccttacaagcaagagctcatgcagatccacagagccatgcacatcctgtcttcctgaccttcctcaggtggcaccacctgcgccccatggacctgctgtatcggtgtcatgtggaggtctgatgaatcctttaaaacctaactgtgatgtcgtaaatgtaactgtgctacctttatatctactgaagggcagcgtctgcatccgagggaaattcaacatgaaacaaccatcgttttagttgcactcagtctgtccatatgacatacacatgaagtgaatgtttccttatgttttcaggtctacaatgtttagtacatgtaaataaggaaaaaatttgataaatatggtaaattaagtt

SEQ ID NO: 11231 - protein, 1923 aa, Homo sapiens; identical to SEQ ID NO: 11221

SEQ ID NO: 11232 - DNA, 9190 bp, Homo sapiens
acagctgaggcggcggcggcggcggcggcggcggcagcagcggggctgggggcggcgagtggcccgcgcgacacgcgccggcctcgaccctatgctttgattcgcgtggcgcaggcgcctactgccccgccggcggggcccgggcttcctgccgcgggatgttctcccgaaggagccacggggatgtgaagaagtccacccagaaggtgctggacccgaagaaggacgtgctgacccgcctgaagcacctgcgggcgctgctggataatgtggatgcaaatgatcttaagcagttttttgagaccaactattctcagatatatttcatcttctatgaaaattttatagcactggaaaatagtttgaaattaaaagggaataataagtcacaaagggaggagctggactccatcctcttcctttttgaaaaaatactgcagtttctacctgaacgaattttctttcgatggcattaccagagtataggctcaactttaaagaagcttctacacactggaaattctattaagataagatgtgaaggaatcaggctgtttcttctgtggcttcaagcacttcagacaaactgtgcagaagagcaggttctgatttttgcttgcctggtgcctggtttcccagcagtcatgtcatccaggggcccttgcacactggagacactcatcaatcccagccctagtgtagctgatgtaaagatatatccagaagaaatcactccactcctaccagccatatcaggggagaagattgctgaggaccaaacctgcttttttcttcaaatactgttgaagtatatggttattcaggctgcgagcttggagtggaagaataaggagaatcaagatactggttttaaatttctttttacattgtttcgaaagtattatcttcctcatttatttccatcatttactaagttaacaaacatctacaaacctgtacttgacatcccccatttgagaccaaagcctgtgtacattactaccactcgagacaatgagaacatttacagtacaaagattccatatatggcagctcgtgttgtttttattaagtggattgtaaccttctttttggaaaaaaagtatctaactgcaacacaaaacactaaaaatggagttgatgtattgcctaaaatcatccagactgttggtggtggtgctgtgcaggagagagcgcctgagctggatggtggtgggcccacggagcaggacaaaagccattctaacagcagcaccttgtcggaccgaagactcagcaactccagcctctgtagcattgaagaagagcaccgaatggtgtatgaaatggtacagcggattctcttgtcaacacgaggttatgtcaacttcgtgaatgaagtatttcaccaggcatttttgttgccttcctgtgagatagctgtaacaagaaaagtagttcaagtgtacagaaagtggattctccaggacaaacctgtgttcatggaggagccagatagaaaagatgttgcccaagaagatgctgaaaaattaggattttccgagactgatagcaaggaggcctcatctgaaagttctggtcataaacgatcttccagttggggacgcacatactccttcacaagtgcaatgagcagagggtgtgtgacagaggaggaaaatacaaatgtgaaagccggcgtccaggctttgttgcaggtatttttgacgaactctgcaaacatctttttgttggaaccatgtgctgaagttcctgtgctcttgaaagaacaagttgatgcttgtaaagctgttttgattatttttaggcgcatgataatggagcttacaatgaataaaaagacatgggaacagatgttgcaaatactactcaggataacagaagctgtcatgcagaagccaaaggataaacaaataaaggacttgtttgcccagagcttggcagggttactatttaggacgctcatggtagcttggatccgagcaaacctctgtgtgtacatttctcgagagctctgggatgactttcttggtgtgctgtcctccctcacggaatgggaggaacttataaacgagtgggccaacattatggactccttgacagcagtgcttgcaagaaccgtttatggagttgagatgacaaacctacctctggataaattaagtgaacaaaaggaaaagaagcaacgaggcaaaggctgtgttctagatcctcagaaaggaaccaccgtggggaggtccttttctctcagctggcggagccacccagatgtgaccgaaccgatgcgatttaggagtgccaccacgtctggagcaccgggagtggaaaaggcaagaaatattgttcgccaaaaagcaactgaagtggaggagtgtcaacagtcagaaaatgcacctgcagccggatctggccatctcacagtgggacagcagcagcaggtccttcggagcagcagcacctccgacatccccgagccgctgtgctcagattcttctcagggtcaaaaggcagaaaacacacagaattcgagttcttcagagcctcagcctattcaagagaataaaggacatgtgaagagagaacatgaaggaataacaatcttagttcgaagaagcagcagccctgctgaattggatttgaaagatgatttgcagcagacacaaggaaaatgtagggaaagacagaagagtgaaagtaccaacagtgacacaactctgggctgtaccaatgaggcagagctgtccatgggcccatggcagacctgtgaggaagacccagaactgaatactcccacagatgttgtggctgatgctgatgcccgtcattggttacaactgagtcccaccgatgcttcaaatttaacagatagcagcgagtgcctcacagatgactgtagtataatcgccggggggagcctcactggttggcacccagactctgctgctgtgttatggcgaagggtcttggggatcctcggagatgtgaataacatccagtcacccaagatccatgccagagttttctgctatctctatgaactctggtacaaactagcaaagatacgggataatctagcaataagcctggataaccagtcttctccatctcctccagttttgatcccaccactcagaatgtttgcatcatggctgtttaaggcggcgacactgccaaatgaatataaggaaggcaaactacaagcctacaggctgatctgtgccatgatgaccagacgccaggacgttctgccaaactcagatttcctggtgcatttttaccttgtgatgcacctgggattaaccagcgaggatcaggatatcttaaatacgatcataaggcactgtccaccccgctttttctccctgggttttcctggcttctcaatgctggtgggggacttcatcacggccgctgccagggtccttagcacagacattttgacggcgcctcgttcagaggctgtcactgtcctcggctctctggtctgctttccaaatacctaccaggagattcctttactgcagtcagtgccagaagtaaatgaggccattacaggaactgaagatgtcaagcattacctcataaatattttactgaagaatgccacagaagaaccaaatgaatatgcaagatgcattgctgtttgctcccttggggtctggatatgtgaagagcttgcacagtgtacaagccaccctcaggtgaaagaggccatcaatgtgataggagtaactctgaagtttcccaacaaaatcgtggcccaggtagcttgcgatgtccttcagttgctggtttcctactgggagaagcttcagatgtttgaaacctctctgcctcggaaaatggcagaaatcctcgtggccacagttgcttttcttttaccaagtgcagagtactcctcagtggaaacagacaagaagtttattgtgtccttgctactctgcctcttggactggtgcatggcattgcccgtgagtgtccttctccaccccgtgtccacagcagtcctagaggagcagcattcggccagagcccccttgctggattatatctacagggttttgcactgctgtgtgtgtggctcaagcacgtacacccaacagagtcactacatactgaccctggctgacttgtcatccacggattatgaccccttcctgccactggcaaatgtgaagagctctgagccagtccagtatcattcatcagcagaattgggtaacctgctgactgttgaagaggagaagaagagaagaagtttggagttgatccctttgactgctcgaatggtgatggcccacctggtgaaccacctggggcactaccccctcagtgggggccctgccatactgcacagccttgtcagcgagaaccatgacaatgcccatgtggaaggctccgagctgtcctttgaggtgttcagaagtccaaacctgcagctgtttgtatttaatgatagcaccctcatctcctaccttcagacacccacagaaggaccggtagggggatcaccagtgggctctctctctgatgtgagagtaattgtgagggatatctcagggaagtactcttgggatggtaaggttttatatggacctttggaaggctgcttagcacccaatggaagaaatccttcatttctgatttcgagctggcatcgtgacacatttggacctcagaaagactcttctcaagttgaggagggggatgatgttcttgacaaattacttgaaaacattggccatacaagtcctgaatgccttttaccgtcacagctaaatctaaatgaaccttccctaaccccatgtggcatgaactatgaccaagagaaggaaatcattgaggtcattttgcgccaaaatgctcaagaggatgagtatatccagagtcataacttcgattctgcaatgaaagtcaccagccaagggcagccctccccagtggagccccgaggacccttttatttctgcaggttattgcttgatgacttgggaatgaattcttgggacagaaggaagaattttcatctattgaagaaaaattcaaaattattgagagagctgaaaaatttggactcccgccagtgccgtgagacacacaaaatcgcagtgttttacattgctgaaggtcaagaagacaagtgttcaatcctctctaatgaaagaggaagccaagcatatgaagactttgttgctggacttggatgggaggtggatctctccacccactgtgggttcatgggtggccttcagcgcaatggcagcaccgggcagacggccccttactatgctacctcaactgtggaagtgattttccatgtttccactcgaatgccgtcagactcagatgattccctcaccaaaaagcttcgtcacttggggaatgacgaggtccatatcgtctggtctgaacactccagagactaccgcaggggtattatcccaactgcctttggagatgtttcaatcattatttacccaatgaagaatcacatgttcttcatcgcgataacgaagaaacctgaggttccattttttgggcctctgtttgatggagccatagtgagtgggaagctgctgccaagccttgtatgtgccacgtgcatcaacgccagcagggctgtgaagtgcctcatcccactctaccagagcttctatgaagagcgagctctgtatctcgaagcaataattcagaaccaccgcgaagtaatgacattcgaggatttcgcagcccaagtcttttctccctctcccagctactccctcagcggaacggattaaaacacgtaaaggtctcatttcaatatttgagcaaggggccctggcctccagtctgagtgctgacctcgaagagcccctgagtgaggaggagacagaacaccctctcctgcctctgccccgagccactaaacccagaatctccaggaaatttcgttgctgtactagtgccctcagcaggtcttcccattagtggacttctgaagcccatggtgaatcccactaccgtgtctcagatgggactcaaactaggctgtatcatcttgtcctgaaacctcacaaaccttggacttccaaagaagaaaagaaaaagtcaccaaaaaccagagatgaacccactgacacgtgggcactggtgtggctgctctgggcagatgacagcaggaaaagattctgcgctttcagggagggggcagagggcagcttgcttctgcaccccaagttgtttcttctcatttatgaacccaagcatgattcacaaaggggctggcaaaacaattgtctaattgaggaatctgatctgcattgattttgctagttccttttatgttaggatttatggtttactcaaaaatttcatcatcatggaaattggctttccccggggtcttttgcccaggagaagttttacctcagttgtccagtgttttcccacatggtacctgacgcccgctaactaagcagaggctctcctcaccacgcagaggcgcttcaggtcatgacagtgatgcccctatcttagaacactcagaagattccagaaatacagggtcctgtccttgcataagttcctgcaggacaggaagtgtcccaaggctcaaaacaacacagaccacatccacacaaaaggcgcatgccggcttcaggcgctaggctgagacgggtaccccccgaatggccttgtgcctccaaaagcctcacgctgcaactttgctgctcctgtctgttgcccagagaggcctcacacaggcctcagaaatgtttcttgtcacacaaagcttttggtagccgattccaagcgagggatttaatccttacatttttgcccatttggctccaaggaaggcttattagacctgtttttttgttgttgttgtttttttttcttaaaaacaaaatgaatgaatgaatgaaaagagaagcaatggtgagccctctcctgctggggcgccctgggtgggccttgcccgtcctgcagcagagaaatcagtcagcagcgaagagctgctggcgcaggccccaggctgtgtcctggacccttgacctgcctcagagctagaggtttgctccaccccgcacttcacttgggaagtaaatccaagaagcttaccagagtccatcgccactgcgcaggctttgttctcacagcggccaggtacagagcaacgccctgcagtgggaagggacagcagcacgagagacgcagcccctaactcagggcttatgatgggtgggctggtcctgggaaaggcgggccctgtgcgggaggcctccccaccttcctgtgccctctgccctctgcccttgcacacacttgttaccttcaggctgcttggccacccaggcctgaagaagccttctgaggctctcaccccatcagaacggccattttcactgaggagccagttttttccatttgccatggagctggtttggctggaacctggcctttgtagggaaaacggggagactcaggagccagactcactcttgggacaaatgagaaagagctgagccagtcgttcctgtcggaagggcgggcctgctcatcctggcgagaatttgcttttctgctttataggggattgcaggccaggcccactgacaggagcaccttgagaaccacctgaacagaagagaatgagggtgccccaaagtggaaggaagcttctggcccctgggccgttttgggaagggcccaggatactcacgggggctgaagggcaatgtgaagagtgactgcaagtcctggcattttctgtggtgtcagcaaatgcccctttattttaaatgattccagacatctgggcagcatagcttggccaccatcactcaggcttgatcctgctgttgagctgctcctgtctcctgtttacctcactcctgttgggaaggccatcgcatgctcctaggctccagagtcccctgtaggtctctaccagcaggtcgcctctgggagaacgtttcatcttcaggctctagaaactcctgttgcggaattgctggctttagtagaaaagatatgtcaggatttagaaatcgtattgaactctcctggacttctgctccatgatttcattttgctttcacgaaccagcgatccctaccttggggtgggaaattcaattgtaggcagcaaataactcaaccctcctgtaacccctgaggattataacgaccccatgacccccgatgacagccagcagtttggtgactagagttttttgagcctgccattctcagtagcagctttggtctggagatggaacgtggagcagggaatctgacagccacgtttctcgtgatcacgtggactggagttgtttttgttatctggggtggaaaattgcaatgatcaagtttcttttttattttttttttacttagaaaagcaaatattgtgtttttgtaataaatccctttcagcaaaattgcggaggatcattcatccactagggccccacctgaggcacagcgctgactcatcacggtggtaccagtaggtcagccatctggaaacagaagtggccctaattgggccaaaatgtggtaagactcgctggcctcaggcagggccaggccagttccctcacttctctgcacacctattcccagattccatccagagcaaagctgatgtttatcgtctcattgtacttaggctttcgtactttaaaaaattatgactttttaaaaataagccttcagcagacagaagtgaagaaatttagcctgggttgcctcagcaacaaagtctgcggttcctaagagccacatgttggggaagtggggtgacccaaacttggtgacataggttgattgatcagaccctcagccttacaagcaagagctcatgcagatccacagagccatgcacatcctgtcttcctgaccttcctcaggtggcaccacctgcgccccatggacctgctgtatcggtgtcatgtggaggtctgatgaatcctttaaaacctaactgtgatgtcgtaaatgtaactgtgctacctttatatctactgaagggcagcgtctgcatccgagggaaattcaacatgaaacaaccatcgttttagttgcactcagtctgtccatatgacatacacatgaagtgaatgtttccttatgttttcaggtctacaatgtttagtacatgtaaataaggaaaaaatttgataaatatggtaaattaagtt

SEQ ID NO: 11233 - protein, 1873 aa, Homo sapiens; identical to SEQ ID NO: 1877

SEQ ID NO: 11234 - DNA, 6301 bp, Homo sapiens
acagctgaggcggcggcggcggcggcggcggcggcagcagcggggctgggggcggcgagtggcccgcgcgacacgcgccggcctcgaccctatgctttgattcgcgtggcgcaggcgcctactgccccgccggcggggcccgggcttcctgccgcgggatgttctcccgaaggagccacggggatgtgaagaagtccacccagaaggtgctggacccgaagaaggacgtgctgacccgcctgaagcacctgcgggcgctgctggataatgtggatgcaaatgatcttaagcagttttttgagaccaactattctcagatatatttcatcttctatgaaaattttatagcactggaaaatagtttgaaattaaaagggaataataagtcacaaagggaggagctggactccatcctcttcctttttgaaaaaatactgcagtttctacctgaacgaattttctttcgatggcattaccagagtataggctcaactttaaagaagcttctacacactggaaattctattaagataagatgtgaaggaatcaggctgtttcttctgtggcttcaagcacttcagacaaactgtgcagaagagcaggttctgatttttgcttgcctggtgcctggtttcccagcagtcatgtcatccaggggcccttgcacactggagacactcatcaatcccagccctagtgtagctgatgtaaagatatatccagaagaaatcactccactcctaccagccatatcaggggagaagattgctgaggaccaaacctgcttttttcttcaaatactgttgaagtatatggttattcaggctgcgagcttggagtggaagaataaggagaatcaagatactggttttaaatttctttttacattgtttcgaaagtattatcttcctcatttatttccatcatttactaagttaacaaacatctacaaacctgtacttgacatcccccatttgagaccaaagcctgtgtacattactaccactcgagacaatgagaacatttacagtacaaagattccatatatggcagctcgtgttgtttttattaagtggattgtaaccttctttttggaaaaaaagtatctaactgcaacacaaaacactaaaaatggagttgatgtattgcctaaaatcatccagactgttggtggtggtgctgtgcaggagagagcgcctgagctggatggtggtgggcccacggagcaggacaaaagccattctaacagcagcaccttgtcggaccgaagactcagcaactccagcctctgtagcattgaagaagagcaccgaatggtgtatgaaatggtacagcggattctcttgtcaacacgaggttatgtcaacttcgtgaatgaagtatttcaccaggcatttttgttgccttcctgtgagatagctgtaacaagaaaagtagttcaagtgtacagaaagtggattctccaggacaaacctgtgttcatggaggagccagatagaaaagatgttgcccaagaagatgctgaaaaattaggattttccgagactgatagcaaggaggcctcatctgaaagttctggtcataaacgatcttccagttggggacgcacatactccttcacaagtgcaatgagcagagggtgtgtgacagaggaggaaaatacaaatgtgaaagccggcgtccaggctttgttgcaggtatttttgacgaactctgcaaacatctttttgttggaaccatgtgctgaagttcctgtgctcttgaaagaacaagttgatgcttgtaaagctgttttgattatttttaggcgcatgataatggagcttacaatgaataaaaagacatgggaacagatgttgcaaatactactcaggataacagaagctgtcatgcagaagccaaaggataaacaaataaaggacttgtttgcccagagcttggcagggttactatttaggacgctcatggtagcttggatccgagcaaacctctgtgtgtacatttctcgagagctctgggatgactttcttggtgtgctgtcctccctcacggaatgggaggaacttataaacgagtgggccaacattatggactccttgacagcagtgcttgcaagaaccgtttatggagttgagatgacaaacctacctctggataaattaagtgaacaaaaggaaaagaagcaacgaggcaaaggctgtgttctagatcctcagaaaggaaccaccgtggggaggtccttttctctcagctggcggagccacccagatgtgaccgaaccgatgcgatttaggagtgccaccacgtctggagcaccgggagtggaaaaggcaagaaatattgttcgccaaaaagcaactgaagtggaggagtgtcaacagtcagaaaatgcacctgcagccggatctggccatctcacagtgggacagcagcagcaggtccttcggagcagcagcacctccgacatccccgagccgctgtgctcagattcttctcagggtcaaaaggcagaaaacacacagaattcgagttcttcagagcctcagcctattcaagagaataaaggacatgtgaagagagaacatgaaggaataacaatcttagttcgaagaagcagcagccctgctgaattggatttgaaagatgatttgcagcagacacaaggaaaatgtagggaaagacagaagagtgaaagtaccaacagtgacacaactctgggctgtaccaatgaggcagagctgtccatgggcccatggcagacctgtgaggaagacccagaactgaatactcccacagatgttgtggctgatgctgatgcccgtcattggttacaactgagtcccaccgatgcttcaaatttaacagatagcagcgagtgcctcacagatgactgtagtataatcgccggggggagcctcactggttggcacccagactctgctgctgtgttatggcgaagggtcttggggatcctcggagatgtgaataacatccagtcacccaagatccatgccagagttttctgctatctctatgaactctggtacaaactagcaaagatacgggataatctagcaataagcctggataaccagtcttctccatctcctccagttttgatcccaccactcagaatgtttgcatcatggctgtttaaggcggcgacactgccaaatgaatataaggaaggcaaactacaagcctacaggctgatctgtgccatgatgaccagacgccaggacgttctgccaaactcagatttcctggtgcatttttaccttgtgatgcacctgggattaaccagcgaggatcaggatatcttaaatacgatcataaggcactgtccaccccgctttttctccctgggttttcctggcttctcaatgctggtgggggacttcatcacggccgctgccagggtccttagcacagacattttgacggcgcctcgttcagaggctgtcactgtcctcggctctctggtctgctttccaaatacctaccaggagattcctttactgcagtcagtgccagaagtaaatgaggccattacaggaactgaagatgtcaagcattacctcataaatattttactgaagaatgccacagaagaaccaaatgaatatgcaagatgcattgctgtttgctcccttggggtctggatatgtgaagagcttgcacagtgtacaagccaccctcaggtgaaagaggccatcaatgtgataggagtaactctgaagtttcccaacaaaatcgtggcccaggtagcttgcgatgtccttcagttgctggtttcctactgggagaagcttcagatgtttgaaacctctctgcctcggaaaatggcagaaatcctcgtggccacagttgcttttcttttaccaagtgcagagtactcctcagtggaaacagacaagaagtttattgtgtccttgctactctgcctcttggactggtgcatggcattgcccgtgagtgtccttctccaccccgtgtccacagcagtcctagaggagcagcattcggccagagcccccttgctggattatatctacagggttttgcactgctgtgtgtgtggctcaagcacgtacacccaacagagtcactacatactgaccctggctgacttgtcatccacggattatgaccccttcctgccactggcaaatgtgaagagctctgagccagtccagtatcattcatcagcagaattgggtaacctgctgactgttgaagaggagaagaagagaagaagtttggagttgatccctttgactgctcgaatggtgatggcccacctggtgaaccacctggggcactaccccctcagtgggggccctgccatactgcacagccttgtcagcgagaaccatgacaatgcccatgtggaaggctccgagctgtcctttgaggtgttcagaagtccaaacctgcagctgtttgtatttaatgatagcaccctcatctcctaccttcagacacccacagaaggaccggtagggggatcaccagtgggctctctctctgatgtgagagtaattgtgagggatatctcagggaagtactcttgggatggtaaggttttatatggacctttggaaggctgcttagcacccaatggaagaaatccttcatttctgatttcgagctggcatcgtgacacatttggacctcagaaagactcttctcaagttgaggagggggatgatgttcttgacaaattacttgaaaacattggccatacaagtcctgaatgccttttaccgtcacagctaaatctaaatgaaccttccctaaccccatgtggcatgaactatgaccaagagaaggaaatcattgaggtcattttgcgccaaaatgctcaagaggatgagtatatccagagtcataacttcgattctgcaatgaaagtcaccagccaagggcagccctccccagtggagccccgaggacccttttatttctgcaggttattgcttgatgacttgggaatgaattcttgggacagaaggaagaattttcatctattgaagaaaaattcaaaattattgagagagctgaaaaatttggactcccgccagtgccgtgagacacacaaaatcgcagtgttttacattgctgaaggtcaagaagacaagtgttcaatcctctctaatgaaagaggaagccaagcatatgaagactttgttgctggacttggatgggaggtggatctctccacccactgtgggttcatgggtggccttcagcgcaatggcagcaccgggcagacggccccttactatgctacctcaactgtggaagtgattttccatgtttccactcgaatgccgtcagactcagatgattccctcaccaaaaagcttcgtcacttggggaatgacgaggtccatatcgtctggtctgaacactccagagactaccgcaggggtattatcccaactgcctttggagatgtttcaatcattatttacccaatgaagaatcacatgttcttcatcgcgataacgaagaaacctgaggttccattttttgggcctctgtttgatggagccatagtgagtgggaagctgctgccaagccttgtatgtgccacgtgcatcaacgccagcagggctgtgaagtgcctcatcccactctaccagagcttctatgaagagcgagctctgtatctcgaagcaataattcagaaccaccgcgaagtaatgacattcgaggatttcgcagcccaagtcttttctccctctcccagctactccctcagcggaacggattaaaacacgtaaaggtctcatttcaatatttgagcaaggggccctggcctccagtctgagtgctgacctcgaagagcccctgagtgaggaggagacagaacaccctctcctgcctctgccccgagccactaaacccagaatctccaggaaatttcgttgctgtactagtgccctcagcaggtcttcccattagtggacttctgaagcccatggtgaatcccactaccgtgtctcagatgggactcaaactaggctgtatcatcttgtcctgaaacctcacaaaccttggacttccaaagaagaaaagaaaaagtcaccaaaaaccagagatgaacccactgacacgtgggcactggtgtggctgctctgggcagatgacagcaggaaaagattctgcgctttcagggagggggcagagggcagcttgcttctgcaccccaagttgtttcttctcatttatgaacccaagcatgattcacaaaggggctggcaaaacaattgtctaattgaggaatctgatctgc

SEQ ID NO: 11235 - protein, 1873 aa, Homo sapiens; identical to SEQ ID NO: 1877

SEQ ID NO: 11236 - DNA, 5203 bp, Homo sapiens
atgactatatgctggagaagtgagagagcaaatgaatggcttatttcatctccaccattccccacctccttcattacatgtcagtaacaccaccctgcctgcagccccctgtatccgaccgacctttcctaccttggtgcctgggccttgccacccatacctggaaggagaccccacatcccccctgcattctccaggcacagcttagctctcctctccctccacgatgccttctctctgcctgttttcccccaagcctcatgtcccactcctgtctgcccatagcttttgtgtcttgtctgtgggctctcgtaattttcccttgtctgtttccagcttcttgagttcagagctttgccagccttatctttccacctggtgactctgccactgtggtgcatcagcaacacacacagtgcccactcatgttctcccactctctcagagtttcatcttcaccttaggcacaccacgcacatccttaagggggccatgctaggcattaaagatacagtggtgaacaatatatgcaggaaaataacaaacaaaaaggtcagcgctgatagcctgtaatgctgtgaaggagatctaataggggaataggatgaagctgaagagctgagggggtgggccaccacccagctcttgggggtgtggggggagggcggtgtggtggcctcagggaggagatgacattttgtgccacaatttgaaaggtataacaatgcaagccacatgcagacctggggattaagtgttccaagcaaagttgggaaggagcaggtgcaaaggccatggggcagaagcaagccagagtgtttgagagatggaacaaggtcagtggaaattgggtcatctgggatgtgaggtctctgtggccagagaaggctgtgaagagcccctgagtgcaacgactacaaccctgggtttagctagtgcctctcaggtaggggtagtcagtaactgtttattctgtagaattaaaaacctttcccttatcttcttccttattctgtacatttgtcactggggcactaaaagttgatgatggtctgcttcatgtggcttagagtgaggtgtccctagactagggtcagcgacgaacctttcctgctatagataatgagatatggataatggtgtagccccatgttctggccagggagggaagcagagggtgcccttgtcccttctgtgctctcccagcatgaaaaagtaagaccttgaaggtgctgcccttagacatgctgcctcgcaatcaatggaagcatccagcccttgttggtgacttgagatgcacgccagcctcaggaaacatactcaaaataattgagtataccataattcattagttatcttctcctacactctaattttacacattcttagtatgttatacatgtaggtcaagttttatttcataggatagaaagccatttgatcaatccctgtttctccatgtgtaaaatgaaaataacatctaccttgcagagctgtcagtgaagatttatcagtgagagaatgagtaaaatccttgtaaaaggttcagtgtatgggggtacattttaattttctctagttgtcaaaaatatgatttatgtgagctgaataagaaatttgaattatggttttaatttccaaatgagtaaatgaaagctccttgttcctgtagaacgttatgtaaattaacacagtgaggctagagaagagacagttttaaaatggtgatgtgacgatgtctaaactctgtggtaataggacatatttttcatcaatttgaggcaaaacagataaatgtaatctataaggaactgagaagaaataactattttgtccttaagaacgatacacctgttaagttatgtgtctgctttgggattcggtttccttttatagtttcccaacaaaatcgtggcccaggtagcttgcgatgtccttcagttgctggtttcctactgggagaagcttcagatgtttgaaacctctctgcctcggaaaatggcagaaatcctcgtggccacagttgcttttcttttaccaagtgcagagtactcctcagtggaaacagacaagaagtttattgtgtccttgctactctgcctcttggactggtgcatggcattgcccgtgagtgtccttctccaccccgtgtccacagcagtcctagaggagcagcattcggccagagcccccttgctggattatatctacagggttttgcactgctgtgtgtgtggctcaagcacgtacacccaacagagtcactacatactgaccctggctgacttgtcatccacggattatgaccccttcctgccactggcaaatgtgaagagctctgagccagtccagtatcattcatcagcagaattgggtaacctgctgactgttgaagaggagaagaagagaagaagtttggagttgatccctttgactgctcgaatggtgatggcccacctggtgaaccacctggggcactaccccctcagtgggggccctgccatactgcacagccttgtcagcgagaaccatgacaatgcccatgtggaaggctccgagctgtcctttgaggtgttcagaagtccaaacctgcagctgtttgtatttaatgatagcaccctcatctcctaccttcagacacccacagaaggaccggtagggggatcaccagtgggctctctctctgatgtgagagtaattgtgagggatatctcagggaagtactcttgggatggtaaggttttatatggacctttggaaggctgcttagcacccaatggaagaaatccttcatttctgatttcgagctggcatcgtgacacatttggacctcagaaagactcttctcaagttgaggagggggatgatgttcttgacaaattacttgaaaacattggccatacaagtcctgaatgccttttaccgtcacagctaaatctaaatgaaccttccctaaccccatgtggcatgaactatgaccaagagaaggaaatcattgaggtcattttgcgccaaaatgctcaagaggatgagtatatccagagtcataacttcgattctgcaatgaaagtcaccagccaagggcagccctccccagtggagccccgaggacccttttatttctgcaggttattgcttgatgacttgggaatgaattcttgggacagaaggaagaattttcatctattgaagaaaaattcaaaattattgagagagctgaaaaatttggactcccgccagtgccgtgagacacacaaaatcgcagtgttttacattgctgaaggtcaagaagacaagtgttcaatcctctctaatgaaagaggaagccaagcatatgaagactttgttgctggacttggatgggaggtggatctctccacccactgtgggttcatgggtggccttcagcgcaatggcagcaccgggcagacggccccttactatgctacctcaactgtggaagtgattttccatgtttccactcgaatgccgtcagactcagatgattccctcaccaaaaagcttcgtcacttggggaatgacgaggtccatatcgtctggtctgaacactccagagactaccgcaggggtattatcccaactgcctttggagatgtttcaatcattatttacccaatgaagaatcacatgttcttcatcgcgataacgaagaaacctgaggttccattttttgggcctctgtttgatggagccatagtgagtgggaagctgctgccaagccttgtatgtgccacgtgcatcaacgccagcagggctgtgaagtgcctcatcccactctaccagagcttgtatctttttgctttaaatgtgtaacttactaaccatcccagaatcaagattcctggcagtttttcataagaggtaagtattcaaaactgaattgaagagggaagagaatttttttcaacctctgttaaaaataacatagtggtttttcatagcatttgttaatttatattaaatataataattttatgctgcattaaacttagagtttactttcataatttactcacatacgtttgtgtctgagaagctgtgaccattatgagatgctcatatcttcttaggtattttgccccacgttcagtctcatcctgtatccctcttatttgtggcagtccattgtatataaggtgggatgctgagcaaaacgtatcgctcattcagagtgcctaccagaaaccaaagcaaatgaaatgaccctaataaatcaaagaatgtggcaggtaccacctgagaagtgcaagtaggtttctggaagatcagaggagatagaaattgcatttggttgagggtagagggaaagatgtcctgaattaagttgcatttggacttatcaataggaatagctagaaattcttttgtaattttcccaaatcattgatattttctctagttcctgattttgtttccaaaaacagaataaatttcactcctaaaattttttcctcaaacattaattggcctgctgtagtccttaaattcaagcatgatctcaagttataagaaaaagagattaagatgggtgaccttataaaattgatgcaaaaaaagtgacctcctaataaaacttagaatctctttgtttctaattggtattgataataatttgaaacatattgtgtttgacctctatatatacttctcccaacctgatagtaagtgatgtgttgctatagcaagtgagagttgggggtagatgaaaactatcccatgtgaatagatacggttcatgaaaaaatacctttcattaaaatcctggtcacttcattgactgatattctgcctttagattaaaaaaaaatacatatgccatgtggcaacttaaaattatcatagaaatgagtagtagaaaagagctattaggtcccatctggtccctcccctgggggccagggcaggattattcccttcagtgtactctctcgtgctttgtccaggctggtggtgagtgttttggagatggcattctttgcagtgatttccacaacactgtagacgtaatcttgtggctggtgtcaatttggccttcagcatggagtttttatttcacatactattaaaaagagcctcttggcagaaatgagaaagaactattcagcgattagtttgtcagtttgcatgtcaactaggacgagctgggcacgcatcagtcaagtatgttggaccaaggcagcaa

SEQ ID NO: 11237 - protein, 620 aa, Homo sapiens
MFETSLPRKMAEILVATVAFLLPSAEYSSVETDKKFIVSLLLCLLDWCMALPVSVLLHPVSTAVLEEQHSARAPLLDYIYRVLHCCVCGSSTYTQQSHYILTLADLSSTDYDPFLPLANVKSSEPVQYHSSAELGNLLTVEEEKKRRSLELIPLTARMVMAHLVNHLGHYPLSGGPAILHSLVSENHDNAHVEGSELSFEVFRSPNLQLFVFNDSTLISYLQTPTEGPVGGSPVGSLSDVRVIVRDISGKYSWDGKVLYGPLEGCLAPNGRNPSFLISSWHRDTFGPQKDSSQVEEGDDVLDKLLENIGHTSPECLLPSQLNLNEPSLTPCGMNYDQEKEIIEVILRQNAQEDEYIQSHNFDSAMKVTSQGQPSPVEPRGPFYFCRLLLDDLGMNSWDRRKNFHLLKKNSKLLRELKNLDSRQCRETHKIAVFYIAEGQEDKCSILSNERGSQAYEDFVAGLGWEVDLSTHCGFMGGLQRNGSTGQTAPYYATSTVEVIFHVSTRMPSDSDDSLTKKLRHLGNDEVHIVWSEHSRDYRRGIIPTAFGDVSIIIYPMKNHMFFIAITKKPEVPFFGPLFDGAIVSGKLLPSLVCATCINASRAVKCLIPLYQSLYLFALNV

SEQ ID NO: 11238 - DNA, 1312 bp, Homo sapiens
tggatctctccacccactgtgggttcatgggtggccttcagcgcaatggcagcaccgggcagacggccccttactatgctacctcaactgtggaagtgattttccatgtttccactcgaatgccgtcagactcagatgattccctcaccaaaaagcttcgtcacttggggaatgacgaggtccatatcgtctggtctgaacactccagagactaccgcaggggtattatcccaactgcctttggagatgtttcaatcattatttacccaatgaagaatcacatgttcttcatcgcgataacgaagaaacctgaggtacgttttcattgcattgttgtactgactcataaagcatttgccatgtgattcattgtcattgaaaatcagtgatacaaatatgttaaaggggactctcatccagttgttgaatgtcttacatatatctgaattatgcatgctttataggaattaaatatgaattgggattttcaaagaatttttcatcatgagcacaaaattgtattattgtattactaggcctctttggaaattataatgtcaaatttattattttgtaaatgttttaagttttctaaattttgtacttttgaaaaattgtatcttgaaattttggttatgttgattaataataagagttgaaggaaccccatatcacatctagcattttgtggagaaccgtgggtatggaatccagccttgcctggtgtcgggcacttgccaagcctctgactgtgctaatggggtcaatcctgcagaattgcaggcatgtccacgaagaggccgggactctggagcacggcccacgtgatgagtttcaacaattggagcaccttgctgcagaatcaattcagccatgtcaattggtattgatcatgggaagagctggaacaatccaatgatctgtgtgctgtgtactaaattggctgcagtttcgatccttgtcatacctttagtggtattttagccatgctttatgtagcgacttgtttttgttttagaattactaatagaagggcgtttttaaagttcttaaattaaacattagcatattaagccatccctcaagaggaatgacattgtgtttttcagcttgatagtatgtataatcttcattttcatttcaagttgttctcctgaaggagctgaaagttacccttctgaaaactctcttttaaagctttgaaataataggcaacagatttattgttcatattgggatttatgacctaatctaaagggttaaagttgtgaggattaaatgagctaataaatagaaagtgcttcaaacagtg

SEQ ID NO: 11239 - protein, 112 aa, Homo sapiens
MGGLQRNGSTGQTAPYYATSTVEVIFHVSTRMPSDSDDSLTKKLRHLGNDEVHIVWSEHSRDYRRGIIPTAFGDVSIIIYPMKNHMFFIAITKKPEVRFHCIVVLTHKAFAM

SEQ ID NO: 11240 - DNA, 1463 bp, Homo sapiens
tcagtgggggccctgccatactgcacagccttgtcagcgagaaccatgacaatgcccatgtggaaggctccgagctgtcctttgaggtgttcagaagtccaaacctgcagctgtttgtatttaatgatagcaccctcatctcctaccttcagacacccacagaaggaccggtagggggatcaccagtgggctctctctctgatgtgagagtaattgtgagggatatctcagggaagtactcttgggatggtaaggttttatatggacctttggaaggctgcttagcacccaatggaagaaatccttcatttctgatttcgagctggcatcgtgacacatttggacctcagaaagactcttctcaagttgaggagggggatgatgttcttgacaaattacttgaaaacattggccatacaagtcctgaatgccttttaccgtcacagctaaatctaaatgaaccttccctaaccccatgtggcatgaactatgaccaagagaaggaaatcattgaggtcattttgcgccaaaatgctcaagaggatgagtatatccagagtcataacttcgattctgcaatgaaagtcaccagccaagggcagccctccccagtggagccccgaggacccttttatttctgcaggttattgcttgatgacttgggaatgaattcttgggacagaaggaagaattttcatctattgaagaaaaattcaaaattattgagagagctgaaaaatttggactcccgccagtggtatgtgaaagtatatcaaaccacttttttcctgtttgtctttgggtattcttggataacagatacaacagcaggaatgaatagacttactgagacatccaagggtagttctgtaacctagcatctggtgacatttgcgcatgccataccgttggtgttttttactataaggaataaactttcatgtttgatacactaaaaagaggtcaccactcccacctaatctgtacttttgattatctttctttgtggctgccagtagaaatttattctcatttgatctctgcaaccacctccttatgatgaagaaaaagtttacctaggtttaacagcccgtggttgctcataccatattatctaaagccaagtgagtctgacttcagaatccatgttgtgtatcaaggcgctaacattctgtacttgtggcttcatagtgttggaaaggttaaaaccagtgtgttgtaattaataactctctgttaataaggctcattctccaaagctggccagactcagatccacccctgttctatactgtctcagaagcatttctaaagatgagctcacaaccatgaaaagtgtttgatttggggaatgtgtgtttccgaaatcatctaagtcaagaataagtataggacttggtacataacagatgttccaaagtttcgaagagaataagctgcctccttaatctttagttttttaa

SEQ ID NO: 11241 - protein, 131 aa, Homo sapiens
MNYDQEKEIIEVILRQNAQEDEYIQSHNFDSAMKVTSQGQPSPVEPRGPFYFCRLLLDDLGMNSWDRRKNFHLLKKNSKLLRELKNLDSRQWYVKVYQTTFFLFVFGYSWITDTTAGMNRLTETSKGSSVT

SEQ ID NO: 11242 - DNA, 561 bp, Homo sapiens
aggtatggacaaggttctgacccttattattggaactcaaatccagatggagtttgttgggacttcacatcattggaaggtgaatagaaaagtatgtcttaagaatttcaccatgttttggaagaattgcagcaagaaaaaaagaactcctttgtttccaccccatttcttttaaggaaaacctggaatatctgagggtgcaagctgagaaaagtctgcttatctgttccctactctggcaatcaaaaaggatccaagtctactgttctcttctcctggcactcttaacttgcacacattgcaaccttttatggcaaagtaatggtcaagctatcctaacaaggacgagcccttattaaataattcactgtggttgggaaatggtgaggaagccatcttcttttgtcttcttttctctgaaaataaaattttgtctaattttgtattaaggacatttgggcttcactttattacattctctactttctttaatagctcgaagctcatgacagtacatgtctggtcttgcaaaacaagatgaatttgttaaattaaactttt

SEQ ID NO: 11243 - protein, 56 aa, Homo sapiens
MDKVLTLIIGTQIQMEFVGTSHHWKVNRKVCLKNFTMFWKNCSKKKRTPLFPPHFF

SEQ ID NO: 11244 - DNA, 676 bp, Homo sapiens
gagagtaaggcgcatcaggcagatacaaagcattttgctgagattactggcactatataaaccctgcactcccagggagcagtagaaatcttgagaatggatccattagagtgtaaggcagacgttaaagatggagaaaccaacttctaatgacagcttggagcatctggatctagtcccagactttttagttataataactgcaagaaaaaatctacatcctgaaagggttgaacccatcttgaaaatggcaaaatctccatcctggtgatcactggcaccatcactcccagtacagccatcactctatgggatcctgggcactgcttagcactaggaaggcgaatggctttaaattatgattcctgtcctcaagagataagtcacattgttgaaaacctgacatcaacgtacaaagattcataatcataaaaggtaactcttgtggccatgggtgcagtgtctgccatgcagaggagaagccgctggttgtagcagcaacactccagcttacctggagcaaagtgcataaaggaaaggccatgtgaggacacagcaagaaggcggccctctgcaacctgaccagcaagatctcaccagaaaccacccctgcttgcactgtgatcttggaattctagcctctagaactgtgaaacaataaactgttgtttaagcc

SEQ ID NO: 11245 - protein, 46 aa, Homo sapiens
MEKPTSNDSLEHLDLVPDFLVIITARKNLHPERVEPILKMAKSPSW

SEQ ID NO: 11246 - DNA, 2596 bp, Homo sapiens
gcaacaatgaccaagccctaggcctgactcagtgcatgctgggatgtgtgtcctggttcacctgttttgcctgctccctgagaactcaggcccagcaggttctgtttaacacgtgcagatgcaagctgctgtgccagaagctcatggagaagacaggcattctgctcctctgtgctttcggattctggatgttttctattcacttaccatcgaaaatgaaagtctggcaggatgacagcataaatggtccactgcagatgcctggcctcttttttgtttcactgagccctgtctcgtcctgcatgaccaccatgctctgtgactccagctttggaatatatttggtacgtaccagcaccccctctttcttcctgtttcaaaacctccttggccattctcatccactttcttttccaggcaaacttgagaatcagcttgtcaacttgcatttttaaaatgctgctgaattggcactggttttatgcatgacgaacaaatctcttggccatgtcagctcttctcaaaacatagattcttctcccatttcttatggttttccttcaacgtccttcagtcagatggagcctcaatctgtcgcccaggctggatgcagtggtgtgatctcttctcactgcaacctctgcctcctgggttccagcaatcctcccacctcagcctcccaagtagctgggattacaagcatgcaccaacacgcctggctaatttttgtattttttagtggagacagggtttcaccatgttagccaggctggtctggaattcctgacctcaagtgatctgcctgcctcagcctcccaaagtgctgggattacaggcgtgagccactgctcccagctgttaaggagtgtttccatattaaattatattatggggtagaaggccaaaatcaggctaatctacgtaaaagaatcagagccttctgctgcactcttttgggctatgtctccagtggactcccagctagctgccttcagagagactgagatcagacccacactgaccacccttctcatcaccctccaaatacctctccctcgccctcatgagctgggggccctcagccagtatctgaggcaccgagtccaggttctgccttcggtgtccacaccaggcaaagctagctcattccccctttcccgagaccagaggtcgctacaggatctggtgatcacaagagccctgccacatgcaggctgctgggctgcaggacatgagcactccggcactgccagggggaagctgggtaagtgacacctcagctcgaccacctcccagctatgtgaccactcaccagtccctatccctcgcagggccttggttcatgcaggaaggactagaccaacgcctcgccttccattcaggtgtggatgcctgagtggcctgctgggcactgtgtggggtcctgaagccggtggagctagctcagaggtcggccgtggggctcaggcaggcagggcagtgctatcgaccacaaccccaccaggaagtccaggtcagagctgaccatcagtgctgggcaccaggaggtcacactggagcttgggagctcataggctgaggtctgacacctgggctggtgagggaggaagcatcagagcagatctccctccaccagcaacccttcatccttcagagagaatgtgcccgaatccccaagccctggcctcacttacaggaacgttcctcatggaaggtgaggacccggtgagggaggcacagcagagagaaagggcatctctgaggctctccccaagagggactgccttggaacagcctgggacaggaatccagcactcagccctggtcgcttgctgtgtggctgagggcaagtctcaacttctctgagcctccgtttccatcaatgtgaccagacgccatgggagcaaggagggagtgagctctggccctgctaggtttggagccagtccctggatccacagggaaagagggacagaaagagaggcagcctcctgggaacaacagcaataagaaaggacttcctgagcaactgtgactgtggagcctgccagctgcctaacctctgctccccaggaagtctgggttgtgcctgcagccattctgctcatctcttcatgtccacagagacagtgagtttgcatccatcaaccacaaacatggctctgaggatgagatcctgcaagggggattgggggtgaggcaaagaggagctcccaggtgtttggagctgaaaaggccaaaggaatcgtgaccaactcagcattccactggctatatgatcaaacagcaaactgtttatcatgaatgcaggatgtgggcaaactcacgactgcgcctactgccagaaggtttgctgagggccctggcaccgtgctcattgaggttatctactgggacatctagaacctattgtttgaagaatgcagtcttgcaagcctgctgtaaattaagcccctgatcgacaaccacccccacttctccctatctcctttacccaatcaaatgcgaagggctgtaaagctaagagcccttgttcactagaagcaaggagccccctgaccccttcttccaaatacactcttttgtctttatcttt

SEQ ID NO: 11247 - protein, 139 aa, Homo sapiens
MLGCVSWFTCFACSLRTQAQQVLFNTCRCKLLCQKLMEKTGILLLCAFGFWMFSIHLPSKMKVWQDDSINGPLQMPGLFFVSLSPVSSCMTTMLCDSSFGIYLVRTSTPSFFLFQNLLGHSHPLSFPGKLENQLVNLHF

SEQ ID NO: 11248 - DNA, 1254 bp, Homo sapiens
acttttcaggggacattcagaggcatcagccccttcctcctcaccagctcccagagttcccatctccatccccaatcctaaagaaggaaatcgatgccacggtcctcaaggagccctggggacccaggcgccctactcgaagatgtggcccacaatcccagaccccggaggattgcccagcgaggccggaacaccagcaggatggcagaggacacctccccaaacatgaatgacaacatcctgttgcctgtccgcaacaatgaccaagccctaggcctgactcagtgcatgctgggatgtgtgtcctggttcacctgttttgcctgctccctgagaactcaggcccagcaggttctgtttaacacgtgcagatgcaagctgctgtgccagaagctcatggagaagacaggcattctgctcctctgtgctttcggattctggatgttttctattcacttaccatcgaaaatgaaagtctggcaggatgacagcataaatggtccactgcagagcttgaggttgtaccaggagaaggtgcgacatcacagtggggaaatccaggacctccgaggtagcatgaaccagctcattgccaagctccaggagatggaagccatgtccgatgagcaaaaaatggcccagaaaataatgaagatgatacacggagattacatcgaaaagccagactttgccctgaagtctataggggccagcattgactttgagcacacgtcagtcacctataaccatgagaaggcccactcctactggaactggatccagctgtggaactacgcacagcccccagacgtgatccttgagcccaacgtgacacctggcaattgctgggcctttgagggtgaccgcggccaggtgaccatccaattggctcagaaggtttacctgtccaacctcacgctgcagcacatccccaagaccatctcattgtcaggcagcctggacaccgcccccaaggacttcgtcatctatggcatggagggctcccccaaggaggaggtgttcctgggggcatttcagtttcagccagaaaacatcatccagatgttcccactccagaaccagccggcccgggctttcagtgcggtcaaggtgaagatctcaagcaactgggggaacccaggcttcacttgcctgtaccgcgtgcgagtgcatggctctgtggccccgcccagagagcagcctcaccagaacccctaccctaagagagattaaaatttattctttacccccaga

SEQ ID NO: 11249 - protein, 379 aa, Homo sapiens; identical to SEQ ID NO: 1879

SEQ ID NO: 11250 - DNA, 528 bp, Homo sapiens
ggcgccctactcgaagatgtggcccacaatcccagaccccggaggattgcccagcgaggccggaacaccagcaggatggcagaggacacctccccaaacatgaatgacaacatcctgttgcctgtccgcaacaatgaccaagccctaggcctgactcagtgcatgctgggatgtgtgtcctggttcacctgttttgcctgctccctgagaactcaggcccagcaggttctgtttaacacgtgcagatgcaagctgctgtgccagaagctcatggagaagacaggcattctgctcctctgtgctttcggtgtgtcccagggccctgcccagtcccaggtggaggtatccctgggccctggcactgattataggacactgggcaagacactgcactgccacgtgactcagtttccccatctgcctgatgggtgttgctgtgagaattatgaaatgaaatgatgaccatgaaaatattgtagaagccaagaaatgcttcagaagttataaagctctccccaaaccgtgtta

SEQ ID NO: 11251 - protein, 127 aa, Homo sapiens
MAEDTSPNMNDNILLPVRNNDQALGLTQCMLGCVSWFTCFACSLRTQAQQVLFNTCRCKLLCQKLMEKTGILLLCAFGVSQGPAQSQVEVSLGPGTDYRTLGKTLHCHVTQFPHLPDGCCCENYEMK

SEQ ID NO: 11252 - DNA, 513 bp, Homo sapiens
atcctaaagaaggaaatcgatgccacggtcctcaaggagccctggggacccaggcgccctactcgaagatgtggcccacaatcccagaccccggaggattgcccagcgaggccggaacaccagcaggatggcagaggacacctccccaaacatgaatgacaacatcctgttgcctgtccgcaacaatgaccaagccctaggcctgactcagtgcatgctgggatgtgtgtatgcaagctgctgtgccagaagctcatggagaagacaggcattctgctcctctgtgctttcggtgtgtcccagggccctgcccagtcccaggtggaggtatccctgggccctggcactgattataggacactgggcaagacactgcactgccacgtgactcagtttccccatctgcctgatgggtgttgctgtgagaattatgaaatgaaatgatgaccatgaaaatattgtagaagccaagaaatgcttcagaagttataaagctctccccaaaccgtgtta

SEQ ID NO: 11253 - protein, 122 aa, Homo sapiens
MPRSSRSPGDPGALLEDVAHNPRPRRIAQRGRNTSRMAEDTSPNMNDNILLPVRNNDQALGLTQCMLGCVYASCCARSSWRRQAFCSSVLSVCPRALPSPRWRYPWALALIIGHWARHCTAT

SEQ ID NO: 11254 - DNA, 1920 bp, Homo sapiens
ggcaaaggccatgtttgcagggaaaacacttgcaaccacaagcaaactcgccgctccctgggtcccttcccagtggactctgcacattgggagccttataaagtagcctctgcatctgcctgcctcgggcagaggagggctaccctggggctgagagttcacctgtctcaggaaccacctgagcccacagatcctgtgggcagcggccagggcagccatggcttgggcaagtaggctgggcctgctgctggcactgctgctgcccgtggtcggtgcctccacgccaggcaccgtggtccgactcaacaaggcagcattgagctacgtgtctgaaattgggaaagcccctctccagcgggccctgcaggtcactgtccctcatttcctggactggagtggagaggcgcttcagcccaccaggatccggattctgaatgtccatgtgccccgcctccacctgaaattcattgctggtttcggagtgcgcctgctggcagcagctaattttactttcaaggtctttcgcgccccagagcccctggagctgacgctgcctgtggaactgctggctgacacccgcgtgacccagagctccatcaggacccctgtggtcagcatctctgcctgctctttattctcgggccacgccaacgagtttgatggcagtaacagcacctcccacgcgctgctggtcctggtgcagaagcacattaaagctgtcttgagtaacaagctgtgcctgagcatctccaacctggtgcagggtgtcaatgtccacctgggcaccttaattggcctcaaccccgtgggtcctgagtcccagatccgctattccatggtcagtgtgcccactgtcaccagtgactacatttccctggaagtcaatgctgttctcttcctgctgggcaagcccatcatcctgcccacggatgccaccccttttgtgttgccaaggcatgtgggtaccgagggctccatggccaccgtgggcctctcccagcagctgtttgactctgcgctcctgctgctgcagaaggccggtgccctcaacctggacatcacagggcagctgaggtcggatgacaacctgctgaacacctctgctctgggccggctcatcccggaggtggcccgccagtttcccgagcccatgcctgtggtgctcaaggtgcggctgggtgccacacctgtggccatgctccacacaaacaacgccaccctgcggctgcagcccttcgtggaggtcctggccacagcctccaactcggctttccagtccctcttctccctggatgtggtagtgaacttgagactccagctctctgtgtccaaggtgaagcttcaggggaccacgtctgtgctgggggatgtccagctcacggtggcctcctccaacgtgggcttcattgatacagatcaggtgcgcacactgatgggcaccgtttttgagaagcccctgctggaccatctcaatgctctcttggccatgggaattgccctccctggtgtggtcaacctccactatgtcgcccctgagatctttgtctatgagggctacgtggtgatatccagtggactcttctaccagagctgaggcaagaccactgggaggcctgagagtgggccagctcgctgctcaggcgaatttctcatttcaagccactggggaaactgaggcaaaaccatacttagtcatcaccaacaagctggactgcttagctgggctgttttatcttccctgagtgcctgggtctccctccctcacttctgccctttcccttcctcctcctcttctcctccctcttccctcatctcccccctccttcctctgccccaccccagcggggagcagactgctcctccaggctgtatagacctgccctcttgcattaaacaacttctcttgagctgcaactttca

SEQ ID NO: 11255 - protein, 458 aa, Homo sapiens; identical to SEQ ID NO: 1881

SEQ ID NO: 11256 - DNA, 580 bp, Homo sapiens
aaagtagcctctgcatctgcctgcctcgggcagaggagggctaccctggggctgagagttcacctgtctcaggaaccacctgagcccacagatcctgtgggcagcggccagggcagccatggcttgggcaagtaggctgggcctgctgctggcactgctgctgcccgtggtcggtgcctccacgccaggcaccgtggtccgactcaacaaggcagcattgagctacggtaagcggtgtgttacccagtgagtgtctgtgagcctgtacatgcgtgtgcaatcctaagtgtgtgtgcgtagctgtgaactcaaaaggcccatgaggacccagattttaattggaagttgtgtccctggcacccagacagtgcctgacacatggcgctgctcaacaaatgcttattacataaatgcgtgaggggggagtacgtcatgtggccagtgtgcaagtgtgcacatgtgacttgctcacatgctttggtgatgtgggcataggtcggtttgaggggctatttttacctgtgtgtgtctacttatgagtttgaaatttcatagagctgtgcccacgtgtgtacttaag

SEQ ID NO: 11257 - protein, 43 aa, Homo sapiens
MAWASRLGLLLALLLPVVGASTPGTVVRLNKAALSYGKRCVTQ

SEQ ID NO: 11258 - DNA, 540 bp, Homo sapiens
ggctgggacgggcccatctccctggctccgtggccacagacagatcaggtgcgcacactgatgggcaccgtttttgagaagcccctgctggaccatctcaatgctctcttggccatgggaattgccctccctggtgtggtcaacctccactatgtcgcccctgagatctttgtctatgagggctacgtggtgatatccagtggactcttctaccagagctgaggcaagaccactgggaggcctgagagtgggccagctcgctgctcaggcgaatttctcatttcaagccactggggaaactgaggcaaaaccatacttagtcatcaccaacaagctggactgcttagctgggctgttttatcttccctgagtgcctgggtctccctccctcacttctgccctttcccttcctcctcctcttctcctccctcttccctcatctcccccctccttcctctgccccaccccagcggggagcagactgctcctccaggctgtatagacctgccctcttgcattaaacaacttctcttgagctgc

SEQ ID NO: 11259 - protein, 53 aa, Homo sapiens
MGTVFEKPLLDHLNALLAMGIALPGVVNLHYVAPEIFVYEGYVVISSGLFYQS

SEQ ID NO: 11260 - DNA, 377 bp, Homo sapiens
tgcatacctaaggccagttccctacatgcagtctccaggttctgtctgtccctggagccaccaacgctgcctgggagaagaagaagacataaccacatctctgttgatgacatctctgttgatgacatccattgactgtgtcacctctttgcctgggggagctcctgttttgaaagaggaccctggagagccgcatggatgagcctgaagttagagcaccatggtggcactttgggcacagtgccccttgcctggcagcttgccccgtcttgtaactagaacctcataggagccccatgaatcagaggtccagagcgccatggatgagagtcatatcctggagaagatggcagccgaggcaggcaagaaacagccag

SEQ ID NO: 11261 - protein, 58 aa, Homo sapiens
MQSPGSVCPWSHQRCLGEEEDITTSLLMTSLLMTSIDCVTSLPGGAPVLKEDPGEPHG

SEQ ID NO: 11262 - DNA, 6427 bp, Homo sapiens
gtctggtggcccgacccgcgccgcccgcggctcccttatgtctctcgccgtctccagcctcagtccctctctgtctctctctcagtctctctccctgtcctccccggccgctcctccgagatgacgccggggtcggtgccccgggcctgccctatcccctggctccagggctaggcgggaccgagggctgccccagacagacggacccgcggacccacagaccccgcgcccaggagaggagccgcgccgcccgccgctggcagcccgtcaccatggaccctccatccctcgacacagccatccagcatgccctggcgggcctctatcctcctttcgaggccacagcacccaccgtcctgggtcaggtgttccgtctcctggactctggcttccagggggatgggctgagcttccttctggatttcctgatccctgccaagcgcctgtgtgagcaagtgcgagaagcagcctgtgctccctactcacactgcctcttcttacacgagggctggccactctgtctgagggatgaagttgtggtccacttggcacccctcaaccctctcttattgcgccagggtgacttctacctccaagtggagccccaggaggagcagtctgtctgcatcatgatcaaatgcctctccctggacctctgcacagtggacaagaagcctgttccagagccagcctaccctatacttttcacccaagaatggctggaggccatcaacagtgactttgagggaaatcccctacacaactgcttggtagcatcagaaaatgggattgcccctgtgccttggaccaagataaccagcccagagtttgtggatgacagaccccaagtagtgaatgccctctgccaagcctgggggccccttccattagaggcactggatttgagcagccctcaagagttgcaccaggccagctccccagacaaccaggtgcttcctgcccagagtttggccaagggtaagggcaggacatatgggagcaagtatccaggactcatcaaggtggagcaagcccggtgtggggaggtggctttcaggatggacgaggtggtcagccaggacttcgagggagactatgtggctctcctaggcttttcccaagagagcagaggagagtctcccagtagggaggcaggcacatccagtgggtgtacttctggggcactagaggagatagctggaactaaggaaactcccttatttcaaaagatactgcctctctcagaggccaatgaaggaccttccttgggaaatcgggcttgcacaaagccagaaagctctgaggagaggccctataatttgggcttcaggagaaaggtcaatcttaaagcacccacccacaactcagaaaggccgccccaaggctcctacatgaatgtccttgaggacgcactggactgtgcctctggtctcagggcaggtgtctcacaagagccagctgcctccaagatgcagggacctctaggaaacccagagaatatggtgcagctcaggcctggaccaagacaagcctcctctccccgcctgtccccagcttctcctgcagctgcagcctctgaaacaaagatagaggtgaagaccaaagagagaaatgggagacttcccaagcccatgccctgccctagcagaaacacctcctcccctgagccccccactcctgggctcaaattctcattcttgagagggcagaggcaaccctctgtgaccccggagaaagcctcactccagcacaatgggccctggaaagtcctgtgttccctctactctcctaaacccaaccgagccaaatctttggggaaagctggaacaactcagaccaaaacatctggcccagccactgcccccagcccactgactgaggaaaaggctgccttgccagaagcttctgcaggctccccagaaagaggccccaccctggaggaggagcccccagggcctgagcccaggattggggctctaggtgtcaaggttttccgctccaggatagcatgcctgccaggtggccgggacagggccgggcggcccctgcttctggtgtcaactacagagggggcctgggaggcaccatggtgcacagtttcagaggtcaccaagctactgtcctacctgtgtaccatccccaggcctgaagataaagccaaggggctggcggtcctgattgacgccaggagacagcccccacagcccggtctggtcagcgccctgcaggccacccaggctcaggtcccagcctctatccgggctattctcttcctgggggagaaggaggcggctctccagctgcagacattacctgacgtccaggtggaggtgctgacctcattgaaggccctcagccaccatgtggaccccagccagctgcccgcagtcctggaaggccccttcccctactgccacaccgagtgggttcatttcttccagaagctggaccctttccttgctgacctccaccaggcctcttccctgctacaagcttccatcgaggaattcgagaaggccgacccccctggggggatgcaggaggctaccaggtgcctgagcaagtccaaggagctgatggaggctgtgctgagggaccccggcctactgggcctccagcgggaaggtggagccaccctggccaggctgcagcatgatgccagcaggctggacttcagccctgatgtcaggagccatctggctgcagccactgccttgtacagccttgtggacgagcagcttcatgttctggtcaccgcttccaacagcctcctggggaagctggagctccgtgtccgcctgggccgcctggaagctgccattcaccaggtcagcgactggatggagcaggaaggaaggcggtgcctgcaatcactgacccccaaggatggaagtttggagacagtggagaaagcccacgcagaatttgagaacttcttcctccaggctgcagcccagtaccgccgaggcctggagctgtccaagcaggccgctcagctgggagctacagccagaggggctggggaggcagaacgtgcagagttcccagagctggcagcctttgcctctacccagcgggccttccaggctgagctgacccacttttacatggcggccgagcggcaacgcacggacctcgagacgctgctccacctgcaccgcttctgcaagaggatgacctggttccacatggactgtcaggacctgatggcccagctcaggctggacaagacctcaagggtcagtcctggggaccagcgccgcctccaccgctacctgcagcgactggcatctgagttccctgctgagaagctcgcagccgtggggctgcaggtggcctccctgagccgggcaggcctgggccaggagctatgggaggaggcccggatcaggcatgaggagatccggatgctcctggagaaggcactgacccacagctcttgcccagaggctccagctgctcactcagcgcgcccagaacgaagaggggtggcagccaagggccagggtgtgagtgtagaggtcacttccaaggggaggtgggatcagcctccactagactcactgggcatggaccatttgccaaagtcctattggcctcctgggccccccagaggggaacagaacagaactttccaggcaggctctccaccccaggaagctggccaggctgcagaggctgaagacggcaaaggctcccacaagctgcctgaccctgcccgcgagcatttgcttgccaccaccttcttccggcagcagccccccaggcagagccaggtccctcgcctcactgggggcagcttctcctcagaggggacagactcacagacatcccttgaggactcaccccagacaagtccccttgcctccctctagctgagaggccccttcagtcgcaccagcctccaggagcactgggccagggcccagctggaggggtagctgggagctctggtcagtcccagtgagacgtcaccatggagcactggttttacattctgcctctgctgggaggatgagaactgtcgacctgcccctggctccagaaaactcctggaagacccgatcttcacccatgcagaatagcaagagtgggcgtcagaaccagggcacaataaatggtgtgattggctccatccctccaggctctcattgtggaaagacctgtcggcacagacccctccagaggtctcgctcgcaggcaggcagacacccacctgcagctcaggaacatacacagctctcccctcgggtacgagggccagtgttgcccttaggcagaatcctcggggagattcgggagtgcttccttgtcttggattccaggaaaatggaccctgagatgaggatttaaggatcagtgtgtttggtgctgatccaggaacctctgctgggggagtaggaggcgaatctgcaaagggaataaagagtatgttgtcaagcaaattttcttttttttaatttttaaaacttcattgtattttatgtttagagatggggcctcactacattgcccaggctggtctcaaactcctgggctcaagtgatcctcttgccttggcctgccaaagtgctgggattgccttttccgcccaccccccccgaccccaccagagacagggtctcactctggtgtccaggctggagtgcagtggtgcaatcatagccttaaattcctgggttcaaccaatcctcccacctcagcctcctaagtagctgggactacagttatgcaccaccatgctcagcttattatttatttattttttgtagacatggggtcttgctatgttgcccaggcaggctgatctcaagctcaagtgatcctctggactcagcctcccaaagtgctgggattatacgtatgagccactgtgccccaccctcatacaaatttccatgttggcaactgtagctggatctttctggagatctctgaaagacagcatggaatccttgaacaccccctgaggcgtgaggcatccagagcatttatctgccaaccctcaggagctggcactcgtagacagcacgcacagccagctccattggtcttggcaaagagaattgcctcctggagccagaggccggttcctgtgcttagaaaggaaggacatgtcttctgtgctccctgtctcacaaggcctcttcagcaggcatgggaccttcattctcaagttcaaggaaccctgtggaaccttgtccttgtcctccagagagaatcctctccgccttagaggtccctcctctctctcacctccccaccaagcctccctgaactcaatgtcttctgtccccttccctgcccaacttccacttctctatgcccagcctctgtggcccagtaccattggggttctgtgggcagctgggtcctggtggttggggaccgtgggaaggggcctatctgtcggatcttagatggagcatccagaagccccacccttcatactggccagagtggcccctgccagcgcctctctggagtgtcattaagctgaaagtgtttgccttacctctgcagtaggatgcattactgaagtggcctcttggtcacctagctctgaattttcctggctccagaaagaggctgtggggcacaggtcccccacaatgaggctgtgaaggggagagaggcaggcctgggccaggcacaggaggacaactagggcttctcaggagctgtctcagccaagagtcacacacttgatacctaaaatggcttcaggaatcttccaagactgaagacttccccaggtgtggtctagggcctgcctgcctcagagccatgagcagagccggtcaaaaggcttcctagggaatcctaccccagacattaaaatagactcttggtgctggcaggtggctggaatctgcgtttgtagccaagtgctcttcctgtgtgactcagcaaagtgggggtgcatttggggaacacccggggctggggcctgagtcctccacccaaagccaggtttgattcttgcattcccctccctgccttccatccagacaggcccaaagatgcaagaggcgttgatcagcccatctccatccatgcctgttgcctcagagagggccgacggcttttaaaatgctgttgccatagcaacagcatccagccagtgggtaccacaggcagggagccacagaaactggggtgctgggatggaaactgacttgtgagagaccacagctactgctagaaggaaggggggcaaagcgggcacaggtaatctaagaatacttgggcgggaggagtccccaaggttaccttgtgcatccctctgtccccagaaagaactgtaccccaacaatctctcccctcactgcatcccctggggaagaagggaatgcagaaatgaaatgtcataatgagtaacaatgtataaaaatatcgaataataacagctaacatttcttttgca

SEQ ID NO: 11263 - protein, 1200 aa, Homo sapiens; identical to SEQ ID NO: 1883

SEQ ID NO: 11264 - DNA, 2125 bp, Homo sapiens
gcagagttcagctgagatgttatctcccccagagattcttaccagatggccaagcccaaagaatattctgaatcccccagagggtttcttaaaatgcagtttccagggccccatcctagacctaataactcagcctcacagagccgggggttggagggcagggaagctgcatcaacgtgatgcgatgtgacaaggctctggaccacagggtgattcagccccgtatcagcgctcaggaattctcaggccagtggggagcgggggcgggggcggggacaaacagggaagcgcacagtaagggagaatgtggggactcagagcaggagcctttggagtcagagaagttttccagaaggaacatctaagcagagcccggctaggcaaagtgaactgccatggcgagggcctggagacttccagaagcgtgataactgctcttaattgttcaaccctcaccaggagctaagccctgtgaggtgggtgctattagggtccccattctacagatgaggaaactgaagctcaggaagtctcctggctcgccagcaaggcagctggaggttgctgacctccgagggaggccccagccaaggtgggtgctgagtgggcgccccctcctctcccctctcaggcccagtaccgccgaggcctggagctgtccaagcaggccgctcagctgggagctacagccagaggggctggggaggcagaacgtgcagagttcccagagctggcagcctttgcctctacccagcgggccttccaggctgagctgacccacttttacatggcggccgagcggcaacgcacggacctcgagacgctgctccacctgcaccgcttctgcaagaggatgacctggttccacatggactgtcaggacctgatggcccagctcaggctggacaagacctcaagggtcagtcctggggaccagcgccgcctccaccgctacctgcagcgactggcatctgagttccctgctgagaagctcgcagccgtggggctgcaggtggcctccctgagccgggcaggcctgggccaggagctatgggaggaggcccggatcaggcatgaggagatccggatgctcctggagaaggcactgacccacagctcttgcccagaggctccagctgctcactcagcgcgcccagaacgaagaggggtggcagccaagggccagggtgtgagtgtagaggtcacttccaaggggaggtgggatcagcctccactagactcactgggcatggaccatttgccaaagtcctattggcctcctgggccccccagaggggaacagaacagaactttccaggcaggctctccaccccaggaagctggccaggctgcagaggctgaagacggcaaaggctcccacaagctgcctgaccctgcccgcgagcatttgcttgccaccaccttcttccggcagcagccccccaggcagagccaggtccctcgcctcactgggggcagcttctcctcagaggggacagactcacagacatcccttgaggactcaccccagacaagtccccttgcctccctctagctgagaggccccttcagtcgcaccagcctccaggagcactgggccagggcccagctggaggggtagctgggagctctggtcagtcccagtgagacgtcaccatggagcactggttttacattctgcctctgctgggaggatgagaactgtcgacctgcccctggctccagaaaactcctggaagacccgatcttcacccatgcagaatagcaagagtgggcgtcagaaccagggcacaataaatggtgtgattggctccatccctccaggctctcattgtggaaagacctgtcggcacagacccctccagaggtctcgctcgcaggcaggcagacacccacctgcagctcaggaacatacacagctctcccctcgggtacgagggccagtgttgcccttaggcagaatcctcggggagattcgggagtgcttccttgtcttggattccaggaaaatggaccctgagatgaggatttaaggatcagtgtgtttggtgctgatccaggaacctctgctgggggagtaggaggcgaatctgcaaagggaataaagagtatgttgtcaagcaaa

SEQ ID NO: 11265 - protein, 255 aa, Homo sapiens
MAAERQRTDLETLLHLHRFCKRMTWFHMDCQDLMAQLRLDKTSRVSPGDQRRLHRYLQRLASEFPAEKLAAVGLQVASLSRAGLGQELWEEARIRHEEIRMLLEKALTHSSCPEAPAAHSARPERRGVAAKGQGVSVEVTSKGRWDQPPLDSLGMDHLPKSYWPPGPPRGEQNRTFQAGSPPQEAGQAAEAEDGKGSHKLPDPAREHLLATTFFRQQPPRQSQVPRLTGGSFSSEGTDSQTSLEDSPQTSPLASL

SEQ ID NO: 11266 - DNA, 2349 bp, Homo sapiens
ggcactgccagggcaaagctgtggaggtgggaaagagcaagaaaagttccagagacagtgagggaaccagcttggattgcagagttcagctgagatgttatctcccccagagattcttaccagatggccaagcccaaagaatattctgaatcccccagagggtttcttaaaatgcagtttccagggccccatcctagacctaataactcagcctcacagagccgggggttggagggcagggaagctgcatcaacgtgatgcgatgtgacaaggctctggaccacagggtgattcagccccgtatcagcgctcaggaattctcaggccagtggggagcgggggcgggggcggggacaaacagggaagcgcacagtaagggagaatgtggggactcagagcaggagcctttggagtcagagaagttttccagaaggaacatctaagcagagcccggctaggcaaagtgaactgccatggcgagggcctggagacttccagaagcgtgataactgctcttaattgttcaaccctcaccaggagctaagccctgtgaggtgggtgctattagggtccccattctacagatgaggaaactgaagctcaggaagtctcctggctcgccagcaaggcagctggaggttgctgacctccgagggaggccccagccaaggtgggtgctgagtgggcgccccctcctctcccctctcaggcccagtaccgccgaggcctggagctgtccaagcaggccgctcagctgggagctacagccagaggggctggggaggcagaacgtgcagagttcccagagctggcagcctttgcctctacccagcgggccttccaggctgagctgacccacttttacatggcggccgagcggcaacgcacggacctcgagacgctgctccacctgcaccgcttctgcaagaggtcttgtaacaggaaaaaaacagaggaaggggaagagctgagatttgaacatagatgtgtctgtggtaccccgtgacatgccttatatgcttccccaaagagaagagaaatgacgacagatcccttcaccaagcaggcttgaccatgatgacctggttccacatggactgtcaggacctgatggcccagctcaggctggacaagacctcaagggtcagtcctggggaccagcgccgcctccaccgctacctgcagcgactggcatctgagttccctgctgagaagctcgcagccgtggggctgcaggtggcctccctgagccgggcaggcctgggccaggagctatgggaggaggcccggatcaggcatgaggagatccggatgctcctggagaaggcactgacccacagctcttgcccagaggctccagctgctcactcagcgcgcccagaacgaagaggggtggcagccaagggccagggtgtgagtgtagaggtcacttccaaggggaggtgggatcagcctccactagactcactgggcatggaccatttgccaaagtcctattggcctcctgggccccccagaggggaacagaacagaactttccaggcaggctctccaccccaggaagctggccaggctgcagaggctgaagacggcaaaggctcccacaagctgcctgaccctgcccgcgagcatttgcttgccaccaccttcttccggcagcagccccccaggcagagccaggtccctcgcctcactgggggcagcttctcctcagaggggacagactcacagacatcccttgaggactcaccccagacaagtccccttgcctccctctagctgagaggccccttcagtcgcaccagcctccaggagcactgggccagggcccagctggaggggtagctgggagctctggtcagtcccagtgagacgtcaccatggagcactggttttacattctgcctctgctgggaggatgagaactgtcgacctgcccctggctccagaaaactcctggaagacccgatcttcacccatgcagaatagcaagagtgggcgtcagaaccagggcacaataaatggtgtgattggctccatccctccaggctctcattgtggaaagacctgtcggcacagacccctccagaggtctcgctcgcaggcaggcagacacccacctgcagctcaggaacatacacagctctcccctcgggtacgagggccagtgttgcccttaggcagaatcctcggggagattcgggagtgcttccttgtcttggattccaggaaaatggaccctgagatgaggatttaaggatcagtgtgtttggtgctgatccaggaacctctgctgggggagtaggaggcgaatctgcaaagggaataaagagtatgttgtcaagcaaa

SEQ ID NO: 11267 - protein, 264 aa, Homo sapiens
MCLWYPVTCLICFPKEKRNDDRSLHQAGLTMMTWFHMDCQDLMAQLRLDKTSRVSPGDQRRLHRYLQRLASEFPAEKLAAVGLQVASLSRAGLGQELWEEARIRHEEIRMLLEKALTHSSCPEAPAAHSARPERRGVAAKGQGVSVEVTSKGRWDQPPLDSLGMDHLPKSYWPPGPPRGEQNRTFQAGSPPQEAGQAAEAEDGKGSHKLPDPAREHLLATTFFRQQPPRQSQVPRLTGGSFSSEGTDSQTSLEDSPQTSPLASL

SEQ ID NO: 11268 - DNA, 2452 bp, Homo sapiens
ggggggctgtgctccaggcagggggcaaacacatgtgaaggccctgaggtgggattatacctggggtgttcaggagtagcaaggaggccagtgtggagcagaatgagtgggaaagaagcatgagtggagcttctagatgcagcaggagctggaccaaggaagagttgggctgggattcagttcgaagcctgcagggaaagccactggagagttttaaaccaggggttatcagatttgcactttgagatccgttcaactgccatgtggagaacagactgtagggggagccagagggcagcagggagatcagcgaagaggctggaatgggtgtcccagcaagagatgctggagggtggaccaatgaggttgccgtggtgacgagaggggacatggctagaggggatgttttagagacagaaatgacagactttctggaggaccttgaatgccaaactgggagttggacttgatctgggtgtggggagccttggaaggttgcagagggagagtggggatggggcctcagggcacctccctacgctggcaggaggctaccaggtgcctgagcaagtccaaggagctgatggaggctgtgctgagggaccccggcctactgggcctccagcgggaaggtggagccaccctggccaggctgcagcatgatgccagcaggctggacttcagccctgatgtcaggagccatctggctgcagccactgccttgtacagccttgtggacgagcagcttcatgttctggtcaccgcttccaacagcctcctggggaagctggagctccgtgtccgcctgggccgcctggaagctgccattcaccaggtcagcgactggatggagcaggaaggaaggcggtgcctgcaatcactgacccccaaggatggaagtttggagacagtggagaaagcccacgcagaatttgagaacttcttcctccaggctgcagcccagtaccgccgaggcctggagctgtccaagcaggccgctcagctgggagctacagccagaggggctggggaggcagaacgtgcagagttcccagagctggcagcctttgcctctacccagcgggccttccaggctgagctgacccacttttacatggcggccgagcggcaacgcacggacctcgagacgctgctccacctgcaccgcttctgcaagaggatgacctggttccacatggactgtcaggacctgatggcccagctcaggctggacaagacctcaagggtcagtcctggggaccagcgccgcctccaccgctacctgcagcgactggcatctgagttccctgctgagaagctcgcagccgtggggctgcaggtggcctccctgagccgggcaggcctgggccaggagctatgggaggaggcccggatcaggcatgaggagatccggatgctcctggagaaggcactgacccacagctcttgcccagaggctccagctgctcactcagcgcgcccagaacgaagaggggtggcagccaagggccagggtgtgagtgtagaggtcacttccaaggggaggtgggatcagcctccactagactcactgggcatggaccatttgccaaagtcctattggcctcctgggccccccagaggggaacagaacagaactttccaggcaggctctccaccccaggaagctggccaggctgcagaggctgaagacggcaaaggctcccacaagctgcctgaccctgcccgcgagcatttgcttgccaccaccttcttccggcagcagccccccaggcagagccaggtccctcgcctcactgggggcagcttctcctcagaggggacagactcacagacatcccttgaggactcaccccagacaagtccccttgcctccctctagctgagaggccccttcagtcgcaccagcctccaggagcactgggccagggcccagctggaggggtagctgggagctctggtcagtcccagtgagacgtcaccatggagcactggttttacattctgcctctgctgggaggatgagaactgtcgacctgcccctggctccagaaaactcctggaagacccgatcttcacccatgcagaatagcaagagtgggcgtcagaaccagggcacaataaatggtgtgattggctccatccctccaggctctcattgtggaaagacctgtcggcacagacccctccagaggtctcgctcgcaggcaggcagacacccacctgcagctcaggaacatacacagctctcccctcgggtacgagggccagtgttgcccttaggcagaatcctcggggagattcgggagtgcttccttgtcttggattccaggaaaatggaccctgagatgaggatttaaggatcagtgtgtttggtgctgatccaggaacctctgctgggggagtaggaggcgaatctgcaaagggaataaagagtatgttgtcaagcaaa

SEQ ID NO: 11269 - protein, 478 aa, Homo sapiens
MPNWELDLIWVWGALEGCRGRVGMGPQGTSLRWQEATRCLSKSKELMEAVLRDPGLLGLQREGGATLARLQHDASRLDFSPDVRSHLAAATALYSLVDEQLHVLVTASNSLLGKLELRVRLGRLEAAIHQVSDWMEQEGRRCLQSLTPKDGSLETVEKAHAEFENFFLQAAAQYRRGLELSKQAAQLGATARGAGEAERAEFPELAAFASTQRAFQAELTHFYMAAERQRTDLETLLHLHRFCKRMTWFHMDCQDLMAQLRLDKTSRVSPGDQRRLHRYLQRLASEFPAEKLAAVGLQVASLSRAGLGQELWEEARIRHEEIRMLLEKALTHSSCPEAPAAHSARPERRGVAAKGQGVSVEVTSKGRWDQPPLDSLGMDHLPKSYWPPGPPRGEQNRTFQAGSPPQEAGQAAEAEDGKGSHKLPDPAREHLLATTFFRQQPPRQSQVPRLTGGSFSSEGTDSQTSLEDSPQTSPLASL

SEQ ID NO: 11270 - DNA, 2076 bp, Homo sapiens
ttaatacgggtaaagagctaggtctatgttaactgaaaataaatttacagggccgggcgctgtgattcacacctgtaatcccagcactttgggaggccgagatgggtggatcacatgaggtgaggagtttgagaccagcctggccaacatggtaaaacctcatatctactaaaaatacaagaaagaaaaagttagccaggcatggtggtatgcacctgtagtcccagctactcgggaggctgaggcatgagaattgcttgaacccaggaggcagagattgcagtgagccaagatcacaccactgcactccagcctaggtggcacagtgagactctgtctcaaaaagaatcttaaaataaaataaaataaatttacaggcacttgctctatggacccacacaactcaggaagctcagggtctggttccctcctataagagggaggaaataaggcagccgccagtgttgggctcctttcctgtgtaatcacagtccctcctccccacaaccccaagagggggcatttcatacccaatttagtacacgaggacacatagggcgagggtgcctttcggtgggcttaaaccacaccgaaaccgatgcccatcaatgcccgccccgggtcctctctagaccagggttgctcaaccttaacctattcacatttggggttgagcaattctgttttgttgggagctgtcttgtgtattgcggcatgcttggtaccagccctggctctacccactgtttgcaccccacaaattatgacaattaaaaaagtctcctgacattgctgaatgtccccgggggcaaagtcacccctcattgagaaccgccggtctatactaacagtgtaacatggtggcttatttactttttgcccaagtgatctttttaaaattgtgtgtttttgaataggcagtaagtatattcacatttcaaatggtccaaaaagatacctactgaacaatctccttttccgcttgtcccccagggtcctagcttccctttccagaggcctccaatgaatccactggtttttgaactgtattttagctttaaaccctttcctttacatgaaatcttacctgtagacccactacatggaagtgagaatgatgataaacacagtatgggctgggctctgttctaagtgccttgcatatattaatgggtttaatcctcacacaaccctataaggcaggaactactatgatctccattttaaagaggaggaagcagagacacagagaggttaagtaacttgcccaaggtctcacagcttgtaagtgatggagctgggccgaagtgggactcagctgaaaatgttcccctaactctgccctcttcctttccttaccaatcatggtatccccactggcctgggagtcgctcaggcctgtctcctttcttctccctcactcatactcaacaccagtggttctcaaagtgtggttccccaggccagcagcatcagcaacacctgggaacttgttagaaatgcactttctaccatgcctcgccccagaggaactgaagcagaacctcaggagcagagcccagagcctgtgttttaaccagctctccagatgcttctgatgcacctggagttggagagccactgcctcccacctcccctctgtgctcctgagaactgtcgacctgcccctggctccagaaaactcctggaagacccgatcttcacccatgcagaatagcaagagtgggcgtcagaaccagggcacaataaatggtgtgattggctccatccctccaggctctcattgtggaaagacctgtcggcacagacccctccagaggtctcgctcgcaggcaggcagacacccacctgcagctcaggaacatacacagctctcccctcgggtacgagggccagtgttgcccttaggcagaatcctcggggagattcgggagtgcttccttgtcttggattccaggaaaatggaccctgagatgaggatttaaggatcagtgtgtttggtgctgatccaggaacctctgctgggggagtaggaggcgaatctgcaaagggaataaagagtatgttgtcaagcaa

SEQ ID NO: 11271 - protein, 42 aa, Homo sapiens
MLLMHLELESHCLPPPLCAPENCRPAPGSRKLLEDPIFTHAE

SEQ ID NO: 11272 - DNA, 697 bp, Homo sapiens
tcccacgcccagaattgggagaatttcagtccaagccagtggtcacaggcctagccactgaatgagtgaagacagaagacctcagcctgcaaggaagtgggggagctggacaagggaggtctcctagcagcccctcatgtccaaatctgcctctcctgccccaggtcagcgactggatggagcaggaaggaaggcggtgcctgcaatcactgacccccaaggatggaagtttggagacagtggagaaagcccacgcagaatttgagaacttcttcctccaggctgcagtgcgttccagacaacagaggagcaggactggagcagatggagagggcgttagagggggtggcactgccagggcaaagctgtggaggtgggaaagagcaagaaaagttccagagacagtgagggaaccagcttggattgcagagttcagctgagatgttatctcccccagagattcttaccagatggccaagcccaaagaatattctgaatccccctcgggtacgagggccagtgttgcccttaggcagaatcctcggggagattcgggagtgcttccttgtcttggattccaggaaaatggaccctgagatgaggatttaaggatcagtgtgtttggtgctgatccaggaacctctgctgggggagtaggaggcgaatctgcaaagggaataaagagtatgttgtcaag

SEQ ID NO: 11273 - protein, 55 aa, Homo sapiens
MLSPPEILTRWPSPKNILNPPRVRGPVLPLGRILGEIRECFLVLDSRKMDPEMRI

SEQ ID NO: 11274 - DNA, 2557 bp, Homo sapiens
gtctggtggcccgacccgcgccgcccgcggctcccttatgtctctcgccgtctccagcctcagtccctctctgtctctctctcagtctctctccctgtcctccccggccgctcctccgagatgacgccggggtcggtgccccgggcctgccctatcccctggctccagggctaggcgggaccgagggctgccccagacagacggacccgcggacccacagaccccgcgcccaggagaggagccgcgccgcccgccgctggcagcccgtcaccatggaccctccatccctcgacacagccatccagcatgccctggcgggcctctatcctcctttcgaggccacagcacccaccgtcctgggtcaggtgttccgtctcctggactctggcttccagggggatgggctgagcttccttctggatttcctgatccctgccaagcgcctgtgtgagcaagtgcgagaagcagcctgtgctccctactcacactgcctcttcttacacgagggctggccactctgtctgagggatgaagttgtggtccacttggcacccctcaaccctctcttattgcgccagggtgacttctacctccaagtggagccccaggaggagcagtctgtctgcatcatgatcaaatgcctctccctggacctctgcacagtggacaagaagcctgttccagagccagcctaccctatacttttcacccaagaatggctggaggccatcaacagtgactttgagggaaatcccctacacaactgcttggtagcatcagaaaatgggattgcccctgtgccttggaccaagataaccagcccagagtttgtggatgacagaccccaagtagtgaatgccctctgccaagcctgggggccccttccattagaggcactggatttgagcagccctcaagagttgcaccaggccagctccccagacaaccaggtgcttcctgcccagagtttggccaagggtaagggcaggacatatgggagcaagtatccaggactcatcaaggtggagcaagcccggtgtggggaggtggctttcaggatggacgaggtggtcagccaggacttcgagggagactatgtggctctcctaggcttttcccaagagagcagaggagagtctcccagtagggaggcaggcacatccagtgggtgtacttctggggcactagaggagatagctggaactaaggaaactcccttatttcaaaagatactgcctctctcagaggccaatgaaggaccttccttgggaaatcgggcttgcacaaagccagaaagctctgaggagaggccctataatttgggcttcaggagaaaggtcaatcttaaagcacccacccacaactcagaaaggccgccccaaggctcctacatgaatgtccttgaggacgcactggactgtgcctctggtctcagggcaggtgtctcacaagagccagctgcctccaagatgcagggacctctaggaaacccagagaatatggtgcagctcaggcctggaccaagacaagcctcctctccccgcctgtccccagcttctcctgcagctgcagcctctgaaacaaagatagaggtgaagaccaaagagagaaatgggagacttcccaagcccatgccctgccctagcagaaacacctcctcccctgagccccccactcctgggctcaaattctcattcttgagagggcagaggcaaccctctgtgaccccggagaaagcctcactccagcacaatgggccctggaaagtcctgtgttccctctactctcctaaacccaaccgagccaaatctttggggaaagctggaacaactcagaccaaaacatctggcccagccactgcccccagcccactgactgaggaaaaggctgccttgccagaagcttctgcaggctccccagaaagaggccccaccctggaggaggagcccccagggcctgagcccaggattggggctctaggtgtcaaggttttccgctccaggatagcatgcctgccaggtggccgggacagggccgggcggcccctgcttctggtgtcaactacagagggggcctgggaggcaccatggtgcacagtttcagaggtcaccaagctactgtcctacctgtgtaccatccccaggcctgaagataaagccaaggggctggcggtcctgattgacgccaggagacagcccccacagcccggtctggtcagcgccctgcaggccacccaggctcaggtcccagcctctatccgggctattctcttcctgggggagaaggaggcggctctccagctgcagacattacctgacgtccaggtggaggtgctgacctcattgaaggccctcagccaccatgtggaccccagccagctgcccgcagtcctggaaggccccttcccctactgccacaccgagtgggttcatttcttccaggtgtttaccgtcacagcctttagcccctgacccccactccttctcttcttctcttcactcttctgtcccatggatccatcaaccctgctatgctaaaaaataaacggtcactcaac

SEQ ID NO: 11275 - protein, 732 aa, Homo sapiens
MDPPSLDTAIQHALAGLYPPFEATAPTVLGQVFRLLDSGFQGDGLSFLLDFLIPAKRLCEQVREAACAPYSHCLFLHEGWPLCLRDEVVVHLAPLNPLLLRQGDFYLQVEPQEEQSVCIMIKCLSLDLCTVDKKPVPEPAYPILFTQEWLEAINSDFEGNPLHNCLVASENGIAPVPWTKITSPEFVDDRPQVVNALCQAWGPLPLEALDLSSPQELHQASSPDNQVLPAQSLAKGKGRTYGSKYPGLIKVEQARCGEVAFRMDEVVSQDFEGDYVALLGFSQESRGESPSREAGTSSGCTSGALEEIAGTKETPLFQKILPLSEANEGPSLGNRACTKPESSEERPYNLGFRRKVNLKAPTHNSERPPQGSYMNVLEDALDCASGLRAGVSQEPAASKMQGPLGNPENMVQLRPGPRQASSPRLSPASPAAAASETKIEVKTKERNGRLPKPMPCPSRNTSSPEPPTPGLKFSFLRGQRQPSVTPEKASLQHNGPWKVLCSLYSPKPNRAKSLGKAGTTQTKTSGPATAPSPLTEEKAALPEASAGSPERGPTLEEEPPGPEPRIGALGVKVFRSRIACLPGGRDRAGRPLLLVSTTEGAWEAPWCTVSEVTKLLSYLCTIPRPEDKAKGLAVLIDARRQPPQPGLVSALQATQAQVPASIRAILFLGEKEAALQLQTLPDVQVEVLTSLKALSHHVDPSQLPAVLEGPFPYCHTEWVHFFQVFTVTAFSP

SEQ ID NO: 11276 - DNA, 1059 bp, Homo sapiens
gggtggtgcccacgtggagtggctggtggtcattgcagggcatcctggagtgaggtgactgaagtgcagggctctgagtccaggctgcgagacaggtgtggtttcccaaggcccgagcctctttccctgctgctgtatttgccctcccctttcctccccatgaggatgggctgtactggctcccggagcctcagcctcatgactcctgtggggagagtgaggcacaccgcccagattcctggaacaggaaatagcctgtcggaaacccagggttgaaagtctgcaagaagaaatagtgctggtggccacagggctgcacgctcaccaccccttggactggagacgagaacagagacagtgatcattgtaacgaccaacgattgagcaactcaatcattcactgagctcttgctgtgtattaagtgcttctcaggagctgtctgatttcatccttgaaataacctaataagctcagcatattattctccctgtttaacagatgaggaaactgaagctcagaggtgcactgacttgcccacagacacacagtgagtcactgcagagcagagacttgacccctttctgtgtgaccccagagctcatgccatgagctttgcctgcccacgtatcttatacagagggagtgctctgcacagaggagattcagggaagacttttctcacgaagtggtgtttgagctgggtcttgaaggataagtagaagtcagagttcacagaaggagaaggagagaaagggtgttccaggcaaaggaaccgttacggccaaaggtctgcaggccacaggagaggtccctagagggccccccacaagttctcactgctcacgtgtgccctctgtcctccaggtggccgggacagggccgggcggcccctgcttctggtgtcaactacagagggggcctgggaggcaccatggtgcacagtttcagaggtcaccaagctactgtcctacctgtgtaccatccccaggcctgaagataaagccaaggggctggcggtcctgattgacgccaggagacagcccccacagcccggtctg

SEQ ID NO: 11277 - protein, 38 aa, Homo sapiens
MRMGCTGSRSLSLMTPVGRVRHTAQIPGTGNSLSETQG

SEQ ID NO: 11278 - DNA, 1398 bp, Homo sapiens
tggctccagctgaaggtgtaggggactggccttttataagccttgtctgtcagtcattaactgtgggctgatccccagtctgtccgtcattaatgaactgcaggaacttcgggctgatcctggaatggggtggggcagggggagccagtgatccagttcagcccagagtgcttcttcagagagggggcatctgtgagccactgacaactgatactttcagactctggagaatgaacagagcccctgagattgagacctcaccctgagctctcagttgctccatatagatctttgaaatcctttttgcctttaaaatttctatacattttaaatatccataaatagaatacattcacactcgttttgatatgaaaaaatgcttttaattgcttgcaaattcaattacttaccattcctccctccccaaacttggagtgactcttcatgctgctggcagatgcaacacatttttcagcaactttgggcaaccccgacttacccaccaccctcattttgccatcctcattttcacctgaggctcacaatatctgtgaacagcacagcttcaagccacggttctgagatgctaatgatggtatttctggcgccagctggtaggtgaggataacatttggggcaaaagggtctccttggcccagctgaagacaaatcaggtggacaactgccccttgctgtaatcaactcagctggcactgggtgtgtgcagggccctgttccaggcagtgtggggaaccagacatgtgaactaatcgtatgactactgtgtcccagtgtggaatgtcctgagtgtgtgaaccctttgctgctcaaagtgtggtctggggactacctacatcagcgtgaccttggagctagggggagaggcagaatctcaggcctgctgaactggcatctgcattctaacaagatccccaggcccatcaaagtttgagaggtgttgctctaaccctccattccttcatgaatcaatcacagacattgattatccagccttgtgctgagcacagggatgcaacaatgagtttgacccagtgcacacccgtaagggctctcagtcttgcaggatctcacagaggcctacatttgctttgggaacctgggactggggaagagcttctaaagagggaaggcagtaaggaggtcttccaggaagaggtggcatcttggctagtctttgagcgatgagggggatttcaccagatagagataggacagaagggcatacctggcagaaggaatagggtgaacaaagctgggtggtatcatctgtcattggtggcaaggggagacttagtatattagtgtcccaggactgccataacgtgggtggcttaagcaacagagattcattttctcataggtctggaggctggaagt

SEQ ID NO: 11279 - protein, 57 aa, Homo sapiens
MNCRNFGLILEWGGAGGASDPVQPRVLLQRGGICEPLTTDTFRLWRMNRAPEIETSP

SEQ ID NO: 11280 - DNA, 1195 bp, Homo sapiens
ccctccgcggctgcggaaggggacgcgaaccgtcctggtcccatccgagccgccgtagcgcgagtgccgcgggagttcggcagcccaggtcgccaaggcaacgggctccgctgcgggttgcgggctgcgggcgctaggctgccccggggaggcgctgcggaccggcggcccaggcacggagaggcggcgagaccgcagaattcccgtactgattagtcaacagtggaaaatctgaagagatgcaagcaggaaaaagaaattaaaccaggcctgaggagcgatgcgacaggcatgatggaggtcgagtcctcctactcggacttcatctcctgtgaccggacaggccgtcggaatgcggtccctgacatccagggagactcagaggctgtgagcgtgaggaagctggctggagacatgggcgagctggcactcgagggggcagaaggacaggtggagggaagcgccccagacaaggaagctggcaaccagccccagagcagcgatgggaccacctcgtcttgaatctgaccttgtccaagaaggctggacgagagaccttctgtcccctcccagagggggaaccctggcactggcccagcagcctcttctctgagctccatgtcccagataaaccaggccagactgagaaggctccccagaggcctctgtggcctccactccgggaaagccctctgcccacacccacaggcttcacattcccaccaccttcgcaccgtgcccaggtacactttcaagacactgtaaccacaagatgttatttattgagctggcgccgggacttgggcggggcctgccctacagtgagcagcccacacaggaacgctcctctcgcgagcggcccgggcagggaccctgtcccaacaccaacacctcctctccagcccaatcttctgggtccagacctgcttgtcccttttttagaaaacacttttaaactttttaaaaattttaaaccttttttcagcagatatggagagagctgacaatcaattcacattttttaagccattttagctaaactgtcattgtgcatctctgaggttccctcatggagctccacagatccatttttagggaagggattttggctcaaaacgatctgaccacctctgccctgtccaccaggataagtgacacctaggacccaggaaataaatgccgatgatttgtgtga

SEQ ID NO: 11281 - protein, 76 aa, Homo sapiens; identical to SEQ ID NO: 1885

SEQ ID NO: 11282 - DNA, 1328 bp, Homo sapiens
ggaaggggacgcgaaccgtcctggtcccatccgagccgccgtagcgcgagtgccgcgggagttcggcagcccaggtcgccaaggcaacgggctccgctgcgggttgcgggctgcgggcgctaggctgccccggggaggcgctgcggaccggcggcccaggcacggagaggcggcgagaccgcaggagacacggggaagagacagagaggagggtaaagtgagaatcctgcccgcaccacaggtctggactgctaaccttgaatcctggtttcttaaattctgcctccgcttctgactgaggaccactggattttgaggaaactttggtcttaattcccgtactgattagtcaacagtggaaaatctgaagagatgcaagcaggaaaaagaaattaaaccaggcctgaggagcgatgcgacaggcatgatggaggtcgagtcctcctactcggacttcatctcctgtgaccggacaggccgtcggaatgcggtccctgacatccagggagactcagaggctgtgagcgtgaggaagctggctggagacatgggcgagctggcactcgagggggcagaaggacaggtggagggaagcgccccagacaaggaagctggcaaccagccccagagcagcgatgggaccacctcgtcttgaatctgaccttgtccaagaaggctggacgagagaccttctgtcccctcccagagggggaaccctggcactggcccagcagcctcttctctgagctccatgtcccagataaaccaggccagactgagaaggctccccagaggcctctgtggcctccactccgggaaagccctctgcccacacccacaggcttcacattcccaccaccttcgcaccgtgcccaggtacactttcaagacactgtaaccacaagatgttatttattgagctggcgccgggacttgggcggggcctgccctacagtgagcagcccacacaggaacgctcctctcgcgagcggcccgggcagggaccctgtcccaacaccaacacctcctctccagcccaatcttctgggtccagacctgcttgtcccttttttagaaaacacttttaaactttttaaaaattttaaaccttttttcagcagatatggagagagctgacaatcaattcacattttttaagccattttagctaaactgtcattgtgcatctctgaggttccctcatggagctccacagatccatttttagggaagggattttggctcaaaacgatctgaccacctctgccctgtccaccaggataagtgacacctaggacccaggaaataaatgccgatgatttgtgtga

SEQ ID NO: 11283 - protein, 76 aa, Homo sapiens; identical to SEQ ID NO: 1885

SEQ ID NO: 11284 - DNA, 1433 bp, Homo sapiens
ggaaggggacgcgaaccgtcctggtcccatccgagccgccgtagcgcgagtgccgcgggagttcggcagcccaggtcgccaaggcaacgggctccgctgcgggttgcgggctgcgggcgctaggctgccccggggaggcgctgcggaccggcggcccaggcacggagaggcggcgagaccgcaggagacacggggaagagacagagaggagggtaaagtgagaatcctgcccgcaccacaggtctggactgctaaccttgaatcctggtttcttaaattctgcctccgcttctgactgaggaccactggattttgaggaaactttggtcttgtggtggtgaggaggtgatgttctggaaggaaggtacctagactttgtggtccctgccaggaagtggagagtggaaatgtggaatgcctcacactcctcaactagaattcccgtactgattagtcaacagtggaaaatctgaagagatgcaagcaggaaaaagaaattaaaccaggcctgaggagcgatgcgacaggcatgatggaggtcgagtcctcctactcggacttcatctcctgtgaccggacaggccgtcggaatgcggtccctgacatccagggagactcagaggctgtgagcgtgaggaagctggctggagacatgggcgagctggcactcgagggggcagaaggacaggtggagggaagcgccccagacaaggaagctggcaaccagccccagagcagcgatgggaccacctcgtcttgaatctgaccttgtccaagaaggctggacgagagaccttctgtcccctcccagagggggaaccctggcactggcccagcagcctcttctctgagctccatgtcccagataaaccaggccagactgagaaggctccccagaggcctctgtggcctccactccgggaaagccctctgcccacacccacaggcttcacattcccaccaccttcgcaccgtgcccaggtacactttcaagacactgtaaccacaagatgttatttattgagctggcgccgggacttgggcggggcctgccctacagtgagcagcccacacaggaacgctcctctcgcgagcggcccgggcagggaccctgtcccaacaccaacacctcctctccagcccaatcttctgggtccagacctgcttgtcccttttttagaaaacacttttaaactttttaaaaattttaaaccttttttcagcagatatggagagagctgacaatcaattcacattttttaagccattttagctaaactgtcattgtgcatctctgaggttccctcatggagctccacagatccatttttagggaagggattttggctcaaaacgatctgaccacctctgccctgtccaccaggataagtgacacctaggacccaggaaataaatgccgatgatttgtgtga

SEQ ID NO: 11285 - protein, 76 aa, Homo sapiens; identical to SEQ ID NO: 1885

SEQ ID NO: 11286 - DNA, 1193 bp, Homo sapiens
gttcggcagcccaggtcgccaaggcaacgggctccgctgcgggttgcgggctgcgggcgctaggctgccccggggaggcgctgcggaccggcggcccaggcacggagaggcggcgagaccgcagaattcccgtactgattagtcaacagtggaaaatctgaagagatgcaagcaggaaaaagaaattaaaccaggcctgaggagcgatgcgacaggcatgatggaggtcgagtcctcctactcggacttcatctcctgtgaccggacaggccgtcggaatgcggtccctgacatccagggagactcagaggctgtgagcgtgaggaagctggctggagacatgggcgagctggcactcgagggggcaggttagagccagcaggtccttggcactactgcatgccagaggccctctgccgggccccgggctagcctccaagtcctagactgcccatactttcttagagaagaaaccacatttaagtcaggcctgccccatggtcagtggcagagtccagcaatctctaggttggaagatgtttgagtctcaggccccaaggactcctctggacaggcatccgggactcttcctgtccccctgccccctagcccaggtccctccacttctcgctatccccacagctatacctggctctggccactcacagctctcacctggctgactttagcggccggcttccctgggctccctacacccatctccgcccttcctgttcagctctatgcagcagccagcagaccccatttaaaccattctgtccatcatgcttctgccaaaaaaaaaaaatcccccagtggcttcactgagtgaagctaagcttgtcacattgccctggggcagtcctgctgtaggccgggccctgcccaagtctcacccggtgccactcctctccctgacaccctccagctacatctacctttggtctgtttctcagtcaagcctctccaaggggccttctctgagtgctagatcagccttccccaatcacatgaccctcatcactctctgacaaggtctcaggggtctaaatgtgagcgccgggagggcagaggccttgcattctgtttggcacacagcaggtgcttggtaaccacagaccgaatgacaaaaggaaacagcatccacccacccaagtcctggctggaacacccccaccccctccattccccca

SEQ ID NO: 11287 - protein, 81 aa, Homo sapiens [sequence omitted]

SEQ ID NO: 11288 - DNA, 1491 bp, Homo sapiens
gcgggcgctaggctgccccggggaggcgctgcggaccggcggcccaggcacggagaggcggcgagaccgcaggagacacggggaagagacagagaggagggtaaagtgagaatcctgcccgcaccacaggtctggactgctaaccttgaatcctggtttcttaaattctgcctccgcttctgactgaggaccactggattttgaggaaactttggtcttaattcccgtactgattagtcaacagtggaaaatctgaagagatgcaagcaggaaaaagaaattaaaccagtaagatagagactgccactctctgggaaccttgctgtgtagctgagcctcagcaagtttgataatacagacacagcaggaggcctggggaggacccagcatgcccggccaccaagcagtgatgcagctggactgttccgcagctttccagagacctccatggaagcacagacttccatgggttgaagagagtttgtgtcacaattccagtccctagccctggccctgtgtgaagtagtaacaccgccctgccagtaggatatagctgctgaggaggcctgaggagcgatgcgacaggcatgatggaggtcgagtcctcctactcggacttcatctcctgtgaccggacaggccgtcggaatgcggtccctgacatccagggagactcagaggctgtgagcgtgaggaagctggctggagacatgggcgagctggcactcgagggggcagaaggacaggtggagggaagcgccccagacaaggaagctggcaaccagccccagagcagcgatgggaccacctcgtcttgaatctgaccttgtccaagaaggctggacgagagaccttctgtcccctcccagagggggaaccctggcactggcccagcagcctcttctctgagctccatgtcccagataaaccaggccagactgagaaggctccccagaggcctctgtggcctccactccgggaaagccctctgcccacacccacaggcttcacattcccaccaccttcgcaccgtgcccaggtacactttcaagacactgtaaccacaagatgttatttattgagctggcgccgggacttgggcggggcctgccctacagtgagcagcccacacaggaacgctcctctcgcgagcggcccgggcagggaccctgtcccaacaccaacacctcctctccagcccaatcttctgggtccagacctgcttgtcccttttttagaaaacacttttaaactttttaaaaattttaaaccttttttcagcagatatggagagagctgacaatcaattcacattttttaagccattttagctaaactgtcattgtgcatctctgaggttccctcatggagctccacagatccatttttagggaagggattttggctcaaaacgatctgaccacctctgccctgtccaccaggataagtgacacctaggacccaggaaataaatgccgatgatttgtgtga

SEQ ID NO: 11289 - protein, 76 aa, Homo sapiens; identical to SEQ ID NO: 1885

SEQ ID NO: 11290 - DNA, 769 bp, Homo sapiens
aggctgccccggggaggcgctgcggaccggcggcccaggcacggagaggcggcgagaccgcaggagacacggggaagagacagagaggagggtaaagtgagaatcctgcccgcaccacaggtctggactgctaaccttgaatcctggtttcttaaattctgcctccgcttctgactgaggaccactggattttgaggaaactttggtcttaattcccgtactgattagtcaacagtggaaaatctgaagagatgcaagcaggaaaaagaaattaaaccaggcctgaggagcgatgcgacaggcatgatggaggtcgagtcctcctactcggacttcatctcctgtgaccggacaggccgtcggaatgcggtccctgacatccagggagactcagaggctgtgagcgtgaggaagctggctggagacatgggcgagctggcactcgagggggcagagatggatctcactatgttgccctggctggtctcaaactcctaggctcaagcaatcctcctgcctcgcctcccaaagtgctgggatcacaggcatgaaccaccacgcctggcccagggggattccagttccaagccttaagacccaacaaagacacacttcagaactcaggagacaccatggtccctggttcttgtgatttctcccaactatgggtgggagacaagctcacccagggccagcctctccattccttctcacaggacccacctggtaggcctggacatgtccaggcaagaggctgcttcctgggatg

SEQ ID NO: 11291 - protein, 64 aa, Homo sapiens
MMEVESSYSDFISCDRTGRRNAVPDIQGDSEAVSVRKLAGDMGELALEGAEMDLTMLPWLVSNS

SEQ ID NO: 11292 - DNA, 1238 bp, Homo sapiens
gggagagtccgttttcggctgtttattatatttgtagccattggtcgacctcattcgaaagtttcttaaaaaaaaaatcccttcttgtttgggggccagaaaataactcaaaactgtgcagaaaatttatttgtgtgtgtgactcttctggggccagagaggattgacttctttgtgcgtcagttttatcgtctgcaaaatgggaatcatggtagcacctgtctgatgacgttattacaagaattcccgtactgattagtcaacagtggaaaatctgaagagatgcaagcaggaaaaagaaattaaaccaggcctgaggagcgatgcgacaggcatgatggaggtcgagtcctcctactcggacttcatctcctgtgaccggacaggccgtcggaatgcggtccctgacatccagggagactcagaggctgtgagcgtgaggaagctggctggagacatgggcgagctggcactcgagggggcagaaggacaggtggagggaagcgccccagacaaggaagctggcaaccagccccagagcagcgatgggaccacctcgtcttgaatctgaccttgtccaagaaggctggacgagagaccttctgtcccctcccagagggggaaccctggcactggcccagcagcctcttctctgagctccatgtcccagataaaccaggccagactgagaaggctccccagaggcctctgtggcctccactccgggaaagccctctgcccacacccacaggcttcacattcccaccaccttcgcaccgtgcccaggtacactttcaagacactgtaaccacaagatgttatttattgagctggcgccgggacttgggcggggcctgccctacagtgagcagcccacacaggaacgctcctctcgcgagcggcccgggcagggaccctgtcccaacaccaacacctcctctccagcccaatcttctgggtccagacctgcttgtcccttttttagaaaacacttttaaactttttaaaaattttaaaccttttttcagcagatatggagagagctgacaatcaattcacattttttaagccattttagctaaactgtcattgtgcatctctgaggttccctcatggagctccacagatccatttttagggaagggattttggctcaaaacgatctgaccacctctgccctgtccaccaggataagtgacacctaggacccaggaaataaatgccgatgatttgtgtga

SEQ ID NO: 11293 - protein, 76 aa, Homo sapiens; identical to SEQ ID NO: 1885

SEQ ID NO: 11294 - DNA, 1286 bp, Homo sapiens
attatatttgtagccattggtcgacctcattcgaaagtttcttaaaaaaaaaatcccttcttgtttgggggccagaaaataactcaaaactgtgcagaaaatttatttgtgtgtgtgactcttctggggccagagaggattgacttctttgtgcgtcagttttatcgtctgcaaaatgggaatcatggtagcacctgtctgatgacgttattacaagaattcccgtactgattagtcaacagtggaaaatctgaagagatgcaagcaggaaaaagaaattaaaccaggcctgaggagcgatgcgacaggcatgatggaggtcgagtcctcctactcggacttcatctcctgtgaccggacaggccgtcggaatgcggtccctgacatccagggagactcagaggctgtgagcgtgaggaagctggctggagacatgggcgagctggcactcgagggggcaggttagagccagcaggtccttggcactactgcatgccagaggccctctgccgggccccgggctagcctccaagtcctagactgcccatactttcttagagaagaaaccacatttaagtcaggcctgccccatggtcagtggcagagtccagcaatctctaggttggaagatgtttgagtctcaggccccaaggactcctctggacaggcatccgggactcttcctgtccccctgccccctagcccaggtccctccacttctcgctatccccacagctatacctggctctggccactcacagctctcacctggctgactttagcggccggcttccctgggctccctacacccatctccgcccttcctgttcagctctatgcagcagccagcagaccccatttaaaccattctgtccatcatgcttctgccaaaaaaaaaaaatcccccagtggcttcactgagtgaagctaagcttgtcacattgccctggggcagtcctgctgtaggccgggccctgcccaagtctcacccggtgccactcctctccctgacaccctccagctacatctacctttggtctgtttctcagtcaagcctctccaaggggccttctctgagtgctagatcagccttccccaatcacatgaccctcatcactctctgacaaggtctcaggggtctaaatgtgagcgccgggagggcagaggccttgcattctgtttggcacacagcaggtgcttggtaaccacagaccgaatgacaaaaggaaacagcatccacccacccaagtcctggctggaacacccccaccccctccattccccca

SEQ ID NO: 11295 - protein, 81 aa, Homo sapiens [sequence omitted]

SEQ ID NO: 11296 - DNA, 1209 bp, Homo sapiens
attttgactgtggagaagggggctctggtaaagtatcttgatcatctcttagggtatgggattgtgaggaattactctcttttcacccaaaggaattggaatgagcatctgaagtcaaaactgcctctcctctacagcagaattcccgtactgattagtcaacagtggaaaatctgaagagatgcaagcaggaaaaagaaattaaaccaggcctgaggagcgatgcgacaggcatgatggaggtcgagtcctcctactcggacttcatctcctgtgaccggacaggccgtcggaatgcggtccctgacatccagggagactcagaggctgtgagcgtgaggaagctggctggagacatgggcgagctggcactcgagggggcaggttagagccagcaggtccttggcactactgcatgccagaggccctctgccgggccccgggctagcctccaagtcctagactgcccatactttcttagagaagaaaccacatttaagtcaggcctgccccatggtcagtggcagagtccagcaatctctaggttggaagatgtttgagtctcaggccccaaggactcctctggacaggcatccgggactcttcctgtccccctgccccctagcccaggtccctccacttctcgctatccccacagctatacctggctctggccactcacagctctcacctggctgactttagcggccggcttccctgggctccctacacccatctccgcccttcctgttcagctctatgcagcagccagcagaccccatttaaaccattctgtccatcatgcttctgccaaaaaaaaaaaatcccccagtggcttcactgagtgaagctaagcttgtcacattgccctggggcagtcctgctgtaggccgggccctgcccaagtctcacccggtgccactcctctccctgacaccctccagctacatctacctttggtctgtttctcagtcaagcctctccaaggggccttctctgagtgctagatcagccttccccaatcacatgaccctcatcactctctgacaaggtctcaggggtctaaatgtgagcgccgggagggcagaggccttgcattctgtttggcacacagcaggtgcttggtaaccacagaccgaatgacaaaaggaaacagcatccacccacccaagtcctggctggaacacccccaccccctccattccccca

SEQ ID NO: 11297 - protein, 81 aa, Homo sapiens [sequence omitted]

SEQ ID NO: 11298 - DNA, 1234 bp, Homo sapiens
aaagtgcttttcatttaggagacacggggaagagacagagaggagggtaaagtgagaatcctgcccgcaccacaggtctggactgctaaccttgaatcctggtttcttaaattctgcctccgcttctgactgaggaccactggattttgaggaaactttggtcttaattcccgtactgattagtcaacagtggaaaatctgaagagatgcaagcaggaaaaagaaattaaaccaggcctgaggagcgatgcgacaggcatgatggaggtcgagtcctcctactcggacttcatctcctgtgaccggacaggccgtcggaatgcggtccctgacatccagggagactcagaggctgtgagcgtgaggaagctggctggagacatgggcgagctggcactcgagggggcaggttagagccagcaggtccttggcactactgcatgccagaggccctctgccgggccccgggctagcctccaagtcctagactgcccatactttcttagagaagaaaccacatttaagtcaggcctgccccatggtcagtggcagagtccagcaatctctaggttggaagatgtttgagtctcaggccccaaggactcctctggacaggcatccgggactcttcctgtccccctgccccctagcccaggtccctccacttctcgctatccccacagctatacctggctctggccactcacagctctcacctggctgactttagcggccggcttccctgggctccctacacccatctccgcccttcctgttcagctctatgcagcagccagcagaccccatttaaaccattctgtccatcatgcttctgccaaaaaaaaaaaatcccccagtggcttcactgagtgaagctaagcttgtcacattgccctggggcagtcctgctgtaggccgggccctgcccaagtctcacccggtgccactcctctccctgacaccctccagctacatctacctttggtctgtttctcagtcaagcctctccaaggggccttctctgagtgctagatcagccttccccaatcacatgaccctcatcactctctgacaaggtctcaggggtctaaatgtgagcgccgggagggcagaggccttgcattctgtttggcacacagcaggtgcttggtaaccacagaccgaatgacaaaaggaaacagcatccacccacccaagtcctggctggaacacccccaccccctccattccccca

SEQ ID NO: 11299 - protein, 81 aa, Homo sapiens [sequence omitted]

SEQ ID NO: 11300 - DNA, 1078 bp, Homo sapiens
tagagataatatcttgcttcttttcattctccacggtgtattttggagatgcattttatagaattagaggaactagaattgacacaaactgtcttcaacccatgaaagtctgtgcttccatgaaggtctctggggaggacccagcatgcccggccaccaagcagtgatgcagctggactgttccgcagctttccagagacctccatggaagcacagacttccatgggttgaagagagtttgtgtcacaattccagtccctagccctggccctgtgtgaagtagtaacaccgccctgccagtaggatatagctgctgaggaggtaagagttttaaaaaattcataccccaaaataattatttttactcttgctgtgaagttagataccaaagagtagaatgtggtggtagaatcaagagagtcaacccaacatcactgaaaagattctgaaggtttgtatccagctgaatatccaaaacaggatgttgcttaagcatgggtaaaatgcatctggtgtatgttttagacagccttgtactatgttttccagggacttgcttactttcttgcccttccttaagaaatgccttattatgaagctgggggcaggggaaaaagaaggtcagaaaagggaatgggtacttttcagtaaatccatactacatgccaggcataatactaattcactcccctgctttatagcctaatagcacaggctccatctggctccaagctccctaaccttgctgagtttcagctgcctcttttgtactatgggataatgatactttctgtcatagagttgctataaaattaaatgcttgtaagatgcttagcacagtctggcatgcagtaagaaagaactgtgtaacaggccaggcaccgtggctcaagcctgcagtcccagcactttaggaggctgaggcgggcggatcacaaggtcaagagatcgagaccatcctggccaacatggtgaaaccctgtctctactaaaagtacaaaaattagctgggcatggtggcgcacacctatagtcccagctacttgggaggctgaggcaggagaatcgcttgaacctg

SEQ ID NO: 11301 - protein, 55 aa, Homo sapiens
MFSRDLLTFLPFLKKCLIMKLGAGEKEGQKREWVLFSKSILHARHNTNSLPCFIA

SEQ ID NO: 11302 - DNA, 1153 bp, Homo sapiens
aaaagtctgagcccatgttctttaaaatgttgatggtggttgtctgggtgtggaattatgagtgacttgttttgttctttgtacttttctgtgctttttgctttgttttcaataagaggcaataactgtcattttgacagaagccactgtgctggggaactggagctgtcctctctgcagaatgcatctggacttacctctgcccccttgccttctgtccccacaggcctgaggagcgatgcgacaggcatgatggaggtcgagtcctcctactcggacttcatctcctgtgaccggacaggccgtcggaatgcggtccctgacatccagggagactcagaggctgtgagcgtgaggaagctggctggagacatgggcgagctggcactcgagggggcagaaggacaggtggagggaagcgccccagacaaggaagctggcaaccagccccagagcagcgatgggaccacctcgtcttgaatctgaccttgtccaagaaggctggacgagagaccttctgtcccctcccagagggggaaccctggcactggcccagcagcctcttctctgagctccatgtcccagataaaccaggccagactgagaaggctccccagaggcctctgtggcctccactccgggaaagccctctgcccacacccacaggcttcacattcccaccaccttcgcaccgtgcccaggtacactttcaagacactgtaaccacaagatgttatttattgagctggcgccgggacttgggcggggcctgccctacagtgagcagcccacacaggaacgctcctctcgcgagcggcccgggcagggaccctgtcccaacaccaacacctcctctccagcccaatcttctgggtccagacctgcttgtcccttttttagaaaacacttttaaactttttaaaaattttaaaccttttttcagcagatatggagagagctgacaatcaattcacattttttaagccattttagctaaactgtcattgtgcatctctgaggttccctcatggagctccacagatccatttttagggaagggattttggctcaaaacgatctgaccacctctgccctgtccaccaggataagtgacacctaggacccaggaaataaatgccgatgatttgtgtga

SEQ ID NO: 11303 - protein, 140 aa, Homo sapiens [sequence omitted]

SEQ ID NO: 11304 - DNA, 704 bp, Homo sapiens
atccactgctatcagtttggctgggccctttcacacctccttctgtgcattactttgtgtatatgtgcccaagaaaaacctctttctctcctctccagaaggacaggtggagggaagcgccccagacaaggaagctggcaaccagccccagagcagcgatgggaccacctcgtcttgaatctgaccttgtccaagaaggctggacgagagaccttctgtcccctcccagagggggaaccctggcactggcccagcagcctcttctctgagctccatgtcccagataaaccaggccagactgagaaggctccccagaggcctctgtggcctccactccgggaaagccctctgcccacacccacaggcttcacattcccaccaccttcgcaccgtgcccaggtacactttcaagacactgtaaccacaagatacctgcttgtcccttttttagaaaacacttttaaactttttaaaaattttaaaccttttttcagcagatatggagagagctgacaatcaattcacattttttaagccattttagctaaactgtcattgtgcatctctgaggttccctcatggagctccacagatccatttttagggaagggattttggctcaaaacgatctgaccacctctgccctgtccaccaggataagtgacacctaggacccaggaaataaatgccgatgatttgtgtga

SEQ ID NO: 11305 - protein, 68 aa, Homo sapiens
MCPRKTSFSPLQKDRWREAPQTRKLATSPRAAMGPPRLESDLVQEGWTRDLLSPPRGGTLALAQQPLL

SEQ ID NO: 11306 - DNA, 497 bp, Homo sapiens
aaaaatgaccaggctaactagggacatgggctttactgaagaggagtttaaaaggctgaacatcaatgcggccaaatctagtttcctcccagaagatgaaaagagggagcttctcgacctgctctataaagcctatgggatgccaccttcagcctctgcagggcagaacctctgaagacgccactcctccaagccttcaccctgtggagtcaccccaactctgtggggctgagcaacatttttacatttattccttccaagaagaccatgatctcaatagtcagttactgatgctcctgaaccctatgtgtccatttctgcacacacgtatacctcggcatggccgcgtcacttctctgattatgtgccctggccagggaccagcgcccttgcacatgggcatggttgaatctgaaaccctccttctgtggcaacttgtactgaaaatctggtgctcaataaagaagcccatggctggtggcatgcagcaggtggca

SEQ ID NO: 11307 - protein, 143 aa, Homo sapiens
MRPNLVSSQKMKRGSFSTCSIKPMGCHLQPLQGRTSEDATPPSLHPVESPQLCGAEQHFYIYSFQEDHDLNSQLLMLLNPMCPFLHTRIPRHGRVTSLIMCPGQGPAPLHMGMVESETLLLWQLVLKIWCSIKKPMAGGMQQV

SEQ ID NO: 11308 - DNA, 1415 bp, Homo sapiens
cgagcggccaccgagccggcagagacccaccgagcggcggcggagggagcagcgccggggcgcacgagggcaccatggcccagacgcccgccttcgacaagcccaaagtggaactgcatgtccacctagacggatccatcaagcctgaaaccatcttatactatggcaggaggagagggatcgccctcccagctaacacagcagaggggctgctgaacgtcattggcatggacaagccgctcacccttccagacttcctggccaagtttgactactacatgcctgctatcgcgggctgccgggaggctatcaaaaggatcgcctatgagtttgtagagatgaaggccaaagagggcgtggtgtatgtggaggtgcggtacagtccgcacctgctggccaactccaaagtggagccaatcccctggaaccaggctgaaggggacctcaccccagacgaggtggtggccctagtgggccagggcctgcaggagggggagcgagacttcggggtcaaggcccggtccatcctgtgctgcatgcgccaccagcccaactggtcccccaaggtggtggagctgtgtaagaagtaccagcagcagaccgtggtagccattgacctggctggagatgagaccatcccaggaagcagcctcttgcctggacatgtccaggcctaccaggaggctgtgaagagcggcattcaccgtactgtccacgccggggaggtgggctcggccgaagtagtaaaagaggctgtggacatactcaagacagagcggctgggacacggctaccacaccctggaagaccaggccctttataacaggctgcggcaggaaaacatgcacttcgaggctcaaaaatgaccaggctaactactcgctcaacacagatgacccgctcatcttcaagtccaccctggacactgattaccagatgaccaaacgggacatgggctttactgaagaggagtttaaaaggctgaacatcaatgcggccaaatctagtttcctcccagaagatgaaaagagggagcttctcgacctgctctataaagcctatgggatgccaccttcagcctctgcagggcagaacctctgaagacgccactcctccaagccttcaccctgtggagtcaccccaactctgtggggctgagcaacatttttacatttattccttccaagaagaccatgatctcaatagtcagttactgatgctcctgaaccctatgtgtccatttctgcacacacgtatacctcggcatggccgcgtcacttctctgattatgtgccctggccagggaccagcgcccttgcacatgggcatggttgaatctgaaaccctccttctgtggcaacttgtactgaaaatctggtgctcaataaagaagcccatggctggtggcatgcagc

SEQ ID NO: 11309 - protein, 263 aa, Homo sapiens
MAQTPAFDKPKVELHVHLDGSIKPETILYYGRRRGIALPANTAEGLLNVIGMDKPLTLPDFLAKFDYYMPAIAGCREAIKRIAYEFVEMKAKEGVVYVEVRYSPHLLANSKVEPIPWNQAEGDLTPDEVVALVGQGLQEGERDFGVKARSILCCMRHQPNWSPKVVELCKKYQQQTVVAIDLAGDETIPGSSLLPGHVQAYQEAVKSGIHRTVHAGEVGSAEVVKEAVDILKTERLGHGYHTLEDQALYNRLRQENMHFEAQK

SEQ ID NO: 11310 - DNA, 1513 bp, Homo sapiens
ccggccgcggccaccgctggccccagggaaagccgagcggccaccgagccggcagagacccaccgagcggcggcggagggagcagcgccggggcgcacgagggcaccatggcccagacgcccgccttcgacaagcccaaagtggaactgcatgtccacctagacggatccatcaagcctgaaaccatcttatactatggcaggaggagagggatcgccctcccagctaacacagcagaggggctgctgaacgtcattggcatggacaagccgctcacccttccagacttcctggccaagtttgactactacatgcctgctatcgcgggctgccgggaggctatcaaaaggatcgcctatgagtttgtagagatgaaggccaaagagggcgtggtgtatgtggaggtgcggtacagtccgcacctgctggccaactccaaagtggagccaatcccctggaaccaggctgaaggggacctcaccccagacgaggtggtggccctagtgggccagggcctgcaggagggggagcgagacttcggggtcaaggcccggtccatcctgtgctgcatgcgccaccagcccaactggtcccccaaggtggtggagctgtgtaagaagtaccagcagcagaccgtggtagccattgacctggctggagatgagaccatcccaggaagcagcctcttgcctggacatgtccaggcctaccaggaggctgtgaagagcggcattcaccgtactgtccacgccggggaggtgggctcggccgaagtagtaaaagaggctgtggacatactcaagacagagcggctgggacacggctaccacaccctggaagaccaggccctttataacaggctgcggcaggaaaacatgcacttcgagatctgcccctggtccagctacctcactggtgcctggaagccggacacggagcatgcagtcattcggctcaaaaatgaccaggctaactactcgctcaacacagatgacccgctcatcttcaagtccaccctggacactgattaccagatgaccaaacgggacatgggctttactgaagaggagtttaaaaggctgaacatcaatgcggccaaatctagtttcctcccagaagatgaaaagagggagcttctcgacctgctctataaagcctatgggatgccaccttcagcctctgcagggcagaacctctgaagacgccactcctccaagccttcaccctgtggagtcaccccaactctgtggggctgagcaacatttttacatttattccttccaagaagaccatgatctcaatagtcagttactgatgctcctgaaccctatgtgtccatttctgcacacacgtatacctcggcatggccgcgtcacttctctgattatgtgccctggccagggaccagcgcccttgcacatgggcatggttgaatctgaaaccctccttctgtggcaacttgtactgaaaatctggtgctcaataaagaagcccatggctggtggcatgcagc

SEQ ID NO: 11311 - protein, 363 aa, Homo sapiens; identical to SEQ ID NO: 1891

SEQ ID NO: 11312 - DNA, 1471 bp, Homo sapiens
ttaagaagagcgtggccggccgcggccaccgctggccccagggaaagccgagcggccaccgagccggcagagacccaccgagcggcggcggagggagcagcgccggggcgcacgagggcaccatggcccagacgcccgccttcgacaagcccaaagtcaggaggagagggatcgccctcccagctaacacagcagaggggctgctgaacgtcattggcatggacaagccgctcacccttccagacttcctggccaagtttgactactacatgcctgctatcgcgggctgccgggaggctatcaaaaggatcgcctatgagtttgtagagatgaaggccaaagagggcgtggtgtatgtggaggtgcggtacagtccgcacctgctggccaactccaaagtggagccaatcccctggaaccaggctgaaggggacctcaccccagacgaggtggtggccctagtgggccagggcctgcaggagggggagcgagacttcggggtcaaggcccggtccatcctgtgctgcatgcgccaccagcccaactggtcccccaaggtggtggagctgtgtaagaagtaccagcagcagaccgtggtagccattgacctggctggagatgagaccatcccaggaagcagcctcttgcctggacatgtccaggcctaccaggaggctgtgaagagcggcattcaccgtactgtccacgccggggaggtgggctcggccgaagtagtaaaagaggctgtggacatactcaagacagagcggctgggacacggctaccacaccctggaagaccaggccctttataacaggctgcggcaggaaaacatgcacttcgagatctgcccctggtccagctacctcactggtgcctggaagccggacacggagcatgcagtcattcggctcaaaaatgaccaggctaactactcgctcaacacagatgacccgctcatcttcaagtccaccctggacactgattaccagatgaccaaacgggacatgggctttactgaagaggagtttaaaaggctgaacatcaatgcggccaaatctagtttcctcccagaagatgaaaagagggagcttctcgacctgctctataaagcctatgggatgccaccttcagcctctgcagggcagaacctctgaagacgccactcctccaagccttcaccctgtggagtcaccccaactctgtggggctgagcaacatttttacatttattccttccaagaagaccatgatctcaatagtcagttactgatgctcctgaaccctatgtgtccatttctgcacacacgtatacctcggcatggccgcgtcacttctctgattatgtgccctggccagggaccagcgcccttgcacatgggcatggttgaatctgaaaccctccttctgtggcaacttgtactgaaaatctggtgctcaataaagaagcccatggctggtggcatgcagc

SEQ ID NO: 11313 - protein, 344 aa, Homo sapiens
MAQTPAFDKPKVRRRGIALPANTAEGLLNVIGMDKPLTLPDFLAKFDYYMPAIAGCREAIKRIAYEFVEMKAKEGVVYVEVRYSPHLLANSKVEPIPWNQAEGDLTPDEVVALVGQGLQEGERDFGVKARSILCCMRHQPNWSPKVVELCKKYQQQTVVAIDLAGDETIPGSSLLPGHVQAYQEAVKSGIHRTVHAGEVGSAEVVKEAVDILKTERLGHGYHTLEDQALYNRLRQENMHFEICPWSSYLTGAWKPDTEHAVIRLKNDQANYSLNTDDPLIFKSTLDTDYQMTKRDMGFTEEEFKRLNINAAKSSFLPEDEKRELLDLLYKAYGMPPSASAGQNL

SEQ ID NO: 11314 - DNA, 403 bp, Homo sapiens
caggaggagagggatcgccctcccagctaacacagcagaggggctgctgaacgtcattggcatggacaagccgctcacccttccagacttcctggccaagtttgactactacatgcctgctatcgcgggctgccgggaggctatcaaaaggatcgcctatgagtttgtagagatgaaggccaaagagggcgtggtgtatgtggaggtgcggtacagtccgcacctgctggccaactccaaagtggagccaatcccctggaaccaggctgagtgagtgatgggcctggaaggggccatgctgagggtgtggctgggaggctcagctctgagactggaagggcgaactgctgggaatccctgacccaagcaagaccttgttcttgcccccagtctggtccatggc

SEQ ID NO: 11315 - protein, 70 aa, Homo sapiens
MDKPLTLPDFLAKFDYYMPAIAGCREAIKRIAYEFVEMKAKEGVVYVEVRYSPHLLANSKVEPIPWNQAE

SEQ ID NO: 11316 - DNA, 550 bp, Homo sapiens
tcctttcactcccagctccctggagtctctcacgtagaatgtcctctccacccccacccacccctgatgaactcctgcaggttctgcaggccacggctggcccccctcgaaagttccttaactatacaattatggtgtgtgtttctgcgacgagcgtccgtctatccggtggaaggcacgccgctcgaggcttgcgatgctcccggggtccccgcttctagcttgggcctggcgcacagcagcgcccagactgcagggggacgcttgaaagttgctggaggagccggggggaaggcagcgcccagcgaggcggctggagcgcgcgcccacaggtggaactgcatgtccacctagacggatccatcaagcctgaaaccatcttatactatggcaggtaagtccatacagaagagccctctctccctgggatttgagtggggtccccagctccacccagaggcccctggggaattccagggtcactgttccttcctgtctccctgtgggaatcaagccagctccaggccagaagtgggactgtgaggacatg

SEQ ID NO: 11317 - protein, 95 aa, Homo sapiens
MNSCRFCRPRLAPLESSLTIQLWCVFLRRASVYPVEGTPLEACDAPGVPASSLGLAHSSAQTAGGRLKVAGGAGGKAAPSEAAGARAHRWNCMST

SEQ ID NO: 11318 - DNA, 1048 bp, Homo sapiens
agggcctcgaggaagtaggtgagcttctccatccctgtctgtctagatgcagagaacccaaagccctgcaggatggcaaagctgcaacatggaagtcacccggatcaccacgtaaaggaaatctctccaaccaggaacaaacacctgccttgcaatattaggtgtctgcctcctgccccggtccacagccaggagccccggagccaacggccagcctggaagacttacagttctccctctgagggttgctgtggctttccatgttgtggtgactaagtccctgtgtttctgtgcagtccctgcttcctgggaccagggaagaatggtcccgtggccaccagactttctctgcttgtatcctcccaggaccacagaactcatcgcatcccaaggcagcctattccatcatggatgagctcaaagtgtttgaaagttctgctttatcaagagtggcgtgctgtgtggataatgaatattggggaaggcatctctctccagcccctctcaagctttctgtagtcactggtccactctgtattgctatgaagaagctcaagaccagcctgtatcactcggggtcctggcaggaaccaggtgccacactcaaactgagtaattgaagagggtttaatatgggagttatttacataggtgtgggctggtgtagctgcccatatgccctcaaaatcacctctacatggcaatagctacttactgctaacagagtctctctctcattgctgcaaatattttctagccatgcaagaaactcagccggtcatgttgaacaaactaagagtgccaggaagttaatgtcctggaagcattgccagaggggagggggcagttagattccccagcttcctcgctcctctgctgggttaagcctgcaacatattcatcatctcccagagtgctgcccagggatagagctccaggtgctcagtgtggtgacctgctcatgtcagcttcttcccctttcctgtcttgtttcgcacccacatccttcccatgtttcctcttcccaaataaactacttgcattgaaa

SEQ ID NO: 11319 - protein, 70 aa, Homo sapiens [sequence omitted]

SEQ ID NO: 11320 - DNA, 1148 bp, Homo sapiens
agggttataggatgtgggagcagaggctgaagaagagttggaggctgattcagcctggtggggagcgagctgaggaggagcagtctgggaagaagaactcttgatggcctgcttcccatcctccatcctggaagactgatctgaaaccccaggaggaggtcctctgagccctgaggcagagatctctcacctggaagatgggtctaatgactgcgccccacacacaccagagaggactgcagatagtgcgggatgagaggaagatctctggccctggagacagcatcatcaagcgaaaacgtatgaggaagaaaatagcagatgagaagaatcaaccaaattccggaagctggaaggcagatgcaagaaggcccttgaatgatgccagcaccttgatattggactttccagcctccagaaccatgagccaatacatttctgttccataaaaattacccagttccaggtattctgctatagcagcacaaaatggactaaaacaatgttggcacaagactcagtgctgggcctggcatgcaacaggtccttggagtggcgtgctgtgtggataatgaatattggggaaggcatctctctccagcccctctcaagctttctgtagtcactggtccactctgtattgctatgaagaagctcaagaccagcctgtatcactcggggtcctggcaggaaccaggtgccacactcaaactgagtaattgaagagggtttaatatgggagttatttacataggtgtgggctggtgtagctgcccatatgccctcaaaatcacctctacatggcaatagctacttactgctaacagagtctctctctcattgctgcaaatattttctagccatgcaagaaactcagccggtcatgttgaacaaactaagagtgccaggaagttaatgtcctggaagcattgccagaggggagggggcagttagattccccagcttcctcgctcctctgctgggttaagcctgcaacatattcatcatctcccagagtgctgcccagggatagagctccaggtgctcagtgtggtgacctgctcatgtcagcttcttcccctttcctgtcttgtttcgcacccacatccttcccatgtttcctcttcccaaataaactacttgcattg

SEQ ID NO: 11321 - protein, 83 aa, Homo sapiens
MGLMTAPHTHQRGLQIVRDERKISGPGDSIIKRKRMRKKIADEKNQPNSGSWKADARRPLNDASTLILDFPASRTMSQYISVP

SEQ ID NO: 11322 - DNA, 3334 bp, Homo sapiens
agtaggtgagcttctccatccctgtctgtctagatgcagagaacccaaagccctgcaggatggcaaagctgcaacatggaagtcacccggatcaccacgtaaaggaaatctctccaaccaggaacaaacacctgccttgcaatattaggtggccaccagactttctctgcttgtatcctcccaggaccacagaactcatcgcatcccaaggcagcctattccatcatggatgagctcaaagtgtttgaaagttctgctttatcaaagacaaggtctcactatgttgccctggctggtctgtaactcctggcctcaagcagtcctcttatctcagctttccaaagtgctgggattacagaactcttgatggcctgcttcccatcctccatcctggaagactgatctgaaaccccaggaggaggtcctctgagccctgaggcagagatctctcacctggaagatgggtctaatgactgcgccccacacacaccagagaggactgcagatagtgcgggatgagaggaagatctctggccctggagacagcatcatcaagcggtagcttcatctttgggagctggggcctctgcaggagctttaccctcctctctccatgctgagcctgtctcaaccccctaacctgcaccccagtcttttggggtcacctcaaggctttggctgatgcttctttgctgacgtcaaccaaggtgatggacccatttgtccttgtaaagtaactcttgaacatacaggcacttctccctccctcctcttgctttgaagggtgggtgggcacctgccaccatggtcagggtgagggccagccccatacccccaatgtcagaaggcagctgcccctggcctgtgggtttatctcagaggggccaggttttcctcactgtgtgtccccagcacctagcctggggcccagcccagggtcacactcagtaaatactggctgagaattaagggggaactttctcgttcccctccaacacttttcttttcttttttttgagacagagtctcactctgtcgcccaggctggagtgcagtggcgcgatctcggctcactgcaacctccacctcccagattcaagtgattctcctgcttcagcctcccgagtagttgggattacaggtgcccgtcaccacatccggctaatttttgtatttttagtagagacggggttttgcatgttgaccaggctggtctcgaacttttaacctcaagtgatccacccgccttggcctcccaaagtgctggaattacaggcatgagccaccgcacctggcaccaatgcttttctgcaagtgctagtgtgtgccatagagacatctgtgcatgcccaggggcggctgaggggccataagcctcctttgactccattatcttgcctgtgcaggccagacgattgcctgaacccacaatagcttcaccagaagaggggcttactcatcacttccacacaacctgtgcccctcccccactgggaccagctggggttgagggggtgagggtcaggctggggaaggctcctggagattgcatttgcaacctacccctcccctgccaacctctattaccacactgagaggaacagggagacatcactaaattgaggacctaggtagagagagaagaagagagtgtcctgtcagccttcaaaggttattcagagctcttggtgcaggaaggccctgctagaaaactccaagagtccaggagggccttgggcataaaagctcagagttgtcctcaagaagcaactgcatggcagttatatcagatgcacattcaacaataataatagcaaaaccttacacagacctacaagcccttatccacacttcagagatcccagtgtttctgaacaaaataatgtaacaccaaaactcattgggtagccaaaacctaacctgaacagatgtatgaatactcgtatattgttttctgcagaaatattaatgtgtttcgttatgggatgctaagccagatcccactacccactagtgtgttatataagtcatgtgctttccaaaatcccaaaactccctaaattccaaaatgcatcaggatcctgagacactggagtttcagttaaggagttgtgacctgtgtagcttcctccatgacaggcactgttctaactgctctccataatattaattcattcaatccttacaatgacctgacagagtagaacttactattattcttccaattttatagataaggaaactgaggcagagagaggtaaagtgacttgcccaaacacatacagctaatgaatgctgcaactgaagcttccagagcctagttccagagcccactctccgaacaagtctaccatctatttcccttaaaagggctggtgaggccgggcgcagtggctcacacctgtaatcccagcactttgggaggctgaggtgggtggatcacctgaggtcagaagtttgagaccaccctgccaacatggtgaaaccccatctctattaaaaatacaaaaattaggtgggcgtggtggcgggcacctgtaatctcagctactcgggaggctgaggcaggagaactgctggaacccaggaggcagaggttgcagtgagccgaatccgtgtcattgcactccagcccaggccaacaacagcaagaattcgtattaaaaaaaaggctggtgagaggggcgtggaggttgaggggtgtggtaaactgtaggagataacgattttatgttgtgtgtgtgctatggtttggatgtggtttgtctcctccaaaatgcatgtagaaacttggtccccaatgtaatggtattgggaggtggggcctttaagaggggattaggtcattaggagggattaatgcctttctcacaggagtgggttaattctcacagaagtgggtgagttattgagagcagttcattacaaaagtgagtttggcttcctcggctttctcttgcttcctcggctttctcttgcttcctctcaccctacgatgcattctgctgtgttacaacacagcacgaggccctcaccagaagctgaccagatccagccaccctgtcttggacttcccagcctccagaactgtaaaaaacaaaccccttttctttgtcaattacccagtcccatgggttctatgacagcaacagaaagtggacaaattgtgtaacatgcacatgtccaggagggtgtgtgagaggtaatcctgttgttacggttgttctgtagggtgaccacaattgggaatttccctgggactgttttggttttagcactgaaaactctgtatttcaataaactactcagacctggtaaaccaggatggttggtc

SEQ ID NO: 11323 - protein, 57 aa, Homo sapiens
MAKLQHGSHPDHHVKEISPTRNKHLPCNIRWPPDFLCLYPPRTTELIASQGSLFHHG

SEQ ID NO: 11324 - DNA, 1738 bp, Homo sapiens
gtgagcttctccatccctgtctgtctagatgcagagaacccaaagccctgcaggatggcaaagctgcaacatggaagtcacccggatcaccacgtaaaggaaatctctccaaccaggaacaaacacctgccttgcaatattaggtggccaccagactttctctgcttgtatcctcccaggaccacagaactcatcgcatcccaaggcagcctattccatcatggatgagctcaaagtgtttgaaagttctgctttatcaaaactcttgatggcctgcttcccatcctccatcctggaagactgatctgaaaccccaggaggaggtcctctgagccctgaggcagagatctctcacctggaagatgggtctaatgactgcgccccacacacaccagagaggactgcagatagtgcgggatgagaggaagatctctggccctggagacagcatcatcaagcggtagcttcatctttgggagctggggcctctgcaggagctttaccctcctctctccatgctgagcctgtctcaaccccctaacctgcaccccagtcttttggggtcacctcaaggctttggctgatgcttctttgctgacgtcaaccaaggtgatggacccatttgtccttgtaaagtaactcttgaacatacaggcacttctccctccctcctcttgctttgaagggtgggtgggcacctgccaccatggtcagggtgagggccagccccatacccccaatgtcagaaggcagctgcccctggcctgtgggtttatctcagaggggccaggttttcctcactgtgtgtccccagcacctagcctggggcccagcccagggtcacactcagtaaatactggctgagaattaagggggaactttctcgttcccctccaacacttttcttttcttttttttgagacagagtctcactctgtcgcccaggctggagtgcagtggcgcgatctcggctcactgcaacctccacctcccagattcaagagaactgctggaacccaggaggcagaggttgcagtgagccgaatccgtgtcattgcactccagcccaggccaacaacagcaagaattcgtattaaaaaaaaggctggtgagaggggcgtggaggttgaggggtgtggtaaactgtaggagataacgattttatgttgtgtgtgtgctatggtttggatgtggtttgtctcctccaaaatgcatgtagaaacttggtccccaatgtaatggtattgggaggtggggcctttaagaggggattaggtcattaggagggattaatgcctttctcacaggagtgggttaattctcacagaagtgggtgagttattgagagcagttcattacaaaagtgagtttggcttcctcggctttctcttgcttcctcggctttctcttgcttcctctcaccctacgatgcattctgctgtgttacaacacagcacgaggccctcaccagaagctgaccagatccagccaccctgtcttggacttcccagcctccagaactgtaaaaaacaaaccccttttctttgtcaattacccagtcccatgggttctatgacagcaacagaaagtggacaaattgtgtaacatgcacatgtccaggagggtgtgtgagaggtaatcctgttgttacggttgttctgtagggtgaccacaattgggaatttccctgggactgttttggttttagcactgaaaactctgtatttcaataaactac

SEQ ID NO: 11325 - protein, 57 aa, Homo sapiens; identical to SEQ ID NO: 11323

SEQ ID NO: 11326 - DNA, 198 bp, Homo sapiens
ggcacctgccaccatggtcagggtgagggccagccccatacccccaatgtcagaaggcagctgcccctggcctgtgggtttatctcagaggggccaggggggaactttctcgttcccctccaacacggctggtgagaggggcgtggaggttgaggggtgtggtaaactgtaggagataacgattttatgttgtgtgtg

SEQ ID NO: 11327 - protein, 52 aa, Homo sapiens
MVRVRASPIPPMSEGSCPWPVGLSQRGQGGTFSFPSNTAGERGVEVEGCGKL

SEQ ID NO: 11328 - DNA, 551 bp, Homo sapiens
aatagaagggttataggatgtgggagcagaggctgaagaagagttggaggctgattcagcctggtggggagcgagctgaggaggagcagtctgggaagaagaactcttgatggcctgcttcccatcctccatcctggaagactgatctgaaaccccaggaggaggtcctctgagccctgaggcagagatctctcacctggaagatgggtctaatgactgcgccccacacacaccagagaggactgcagatagtgcgggatgagaggaagatctctggccctggagacagcatcatcaagcggtagcttcatctttgggagctggggcctctgcaggagctttaccctcctctctccatgctgagcctgtctcaaccccctaacctgcaccccagtcttttggggtcacctcaaggctttggctgatgcttctttgctgacgtcaaccaaggtgatggacccatttgtccttgtaaagtaactcttgaacatacaggcacttctccctccctcctcttgctttgaagggtgggtgggcacctgccaccatgg

SEQ ID NO: 11329 - protein, 30 aa, Homo sapiens
MWEQRLKKSWRLIQPGGERAEEEQSGKKNS

SEQ ID NO: 11330 - DNA, 598 bp, Homo sapiens
aatagaagggttataggatgtgggagcagaggctgaagaagagttggaggctgattcagcctggtggggagcgagctgaggaggagcagtctgggaagaagagacaaggtctcactatgttgccctggctggtctgtaactcctggcctcaagcagtcctcttatctcagctttccaaagtgctgggattacagaactcttgatggcctgcttcccatcctccatcctggaagactgatctgaaaccccaggaggaggtcctctgagccctgaggcagagatctctcacctggaagatgggtctaatgactgcgccccacacacaccagagaggactgcagatagtgcgggatgagaggaagatctctggccctggagacagcatcatcaagcggtagcttcatctttgggagctggggcctctgcaggagctttaccctcctctctccatgctgagcctgtctcaaccccctaacctgcaccccagtcttttggggtcacctcaaggctttggctgatgcttctttgctgacgtcaaccaaggtgatggacccatttgtccttgtaaagtaactcttgaacatacaggcacttctcc

SEQ ID NO: 11331 - protein, 61 aa, Homo sapiens [sequence omitted]

SEQ ID NO: 11332 - DNA, 545 bp, Homo sapiens
aagtaggtgagcttctccatccctgtctgtctagatgcagagaacccaaagccctgcaggatggcaaagctgcaacatggaagtcacccggatcaccacgtaaaggaaatctctccaaccaggaacaaacacctgccttgcaatattaggtgtctgcctcctgccccggtccacagccaggagccccggagccaacggccagcctggaagacttacagttctccctctgagggttgctgtggctttccatgttgtggtgactaagtccctgtgtttctgtgcagtccctgcttcctgggaccagggaagaatggtcccgtggccaccagactttctctgcttgtatcctcccaggaccacagaactcatcgcatcccaaggcagcctattccatcatggatgagctcaaagtgtttgaaagttctgctttatcaaactgtctcgctctgctgctcaggccggagtgcagtagcacgatcttggctcactgcagcctccgcccctgggttcaagcaattgttgtgcctcagcctcccaagtagctg

SEQ ID NO: 11333 - protein, 67 aa, Homo sapiens [sequence omitted]

SEQ ID NO: 11334 - DNA, 700 bp, Homo sapiens
gtcaccatctataagaaacaggctcccaccagacactgagtctgctggagccttgatcttgaatttcccaacctccagaactgtggccaccagactttctctgcttgtatcctcccaggaccacagaactcatcgcatcccaaggcagcctattccatcatggatgagctcaaagtgtttgaaagttctgctttatcaagtgagccaaacttcctccctcaggaccatccactccagggcccagttattctactggaggagtgagggtaaagccatcaccaggacaaccttggtgacaggctggactggcagccagcttttggggatgacttcagggaaccctgaatagccatgggagccaaatgtattactcctctgatgcctacaattccactataatagtctggtgggcttctgttagggaggcttatacatggtggaaagaataaaggcttggactcagcctaggttcaagtactgcatcttgacctggcctgtaggcaagtcttttcacttctctgagttttggctttctcatttgtccaataggaataacaataatgataataataatacctcccatgcaggattgctagtatgttcaatgggataatatatctaaacacctcacacaatgcctggcacatagcaggtgttcaattaggtctgtattaaaatccaggctctgtctcttattatt

SEQ ID NO: 11335 - protein, 61 aa, Homo sapiens
MSSKCLKVLLYQVSQTSSLRTIHSRAQLFYWRSEGKAITRTTLVTGWTGSQLLGMTSGNPE

SEQ ID NO: 11336 - DNA, 865 bp, Homo sapiens
gcaacatggaagtcacccggatcaccacgtaaaggaaatctctccaaccaggaacaaacacctgccttgcaatattaggtgtctgcctcctgccccggtccacagccaggagccccggagccaacggccagcctggaagacttacagttctccctctgagggttgctgtggctttccatgttgtggtgactaagtccctgtgtttctgtgcagtccctgcttcctgggaccagggaagaatggtcccgtggccaccagactttctctgcttgtatcctcccaggaccacagaactcatcgcatcccaaggcagcctattccatcatggatgagctcaaagtgtttgaaagttctgctttatcaagtgagccaaacttcctccctcaggaccatccactccagggcccagttattctactggaggagtgagggtaaagccatcaccaggacaaccttggtgacaggctggactggcagccagcttttggggatgacttcagggaaccctgaatagccatgggagccaaatgtattactcctctgatgcctacaattccactataatagtctggtgggcttctgttagggaggcttatacatggtggaaagaataaaggcttggactcagcctaggttcaagtactgcatcttgacctggcctgtaggcaagtcttttcacttctctgagttttggctttctcatttgtccaataggaataacaataatgataataataatacctcccatgcaggattgctagtatgttcaatgggataatatatctaaacacctcacacaatgcctggcacatagcaggtgttcaattaggtctgtattaaaatccaggctctgtctcttattatt

SEQ ID NO: 11337 - protein, 30 aa, Homo sapiens
MVPWPPDFLCLYPPRTTELIASQGSLFHHG

SEQ ID NO: 11338 - DNA, 735 bp, Homo sapiens
agatgcagagaacccaaagccctgcaggatggcaaagctgcaacatggaagtcacccggatcaccacgtaaaggaaatctctccaaccaggaacaaacacctgccttgcaatattaggtggccaccagactttctctgcttgtatcctcccaggaccacagaactcatcgcatcccaaggcagcctattccatcatggatgagctcaaagtgtttgaaagttctgctttatcaagtgagccaaacttcctccctcaggaccatccactccagggcccagttattctactggaggagtgagggtaaagccatcaccaggacaaccttggtgacaggctggactggcagccagcttttggggatgacttcagggaaccctgaatagccatgggagccaaatgtattactcctctgatgcctacaattccactataatagtctggtgggcttctgttagggaggcttatacatggtggaaagaataaaggcttggactcagcctaggttcaagtactgcatcttgacctggcctgtaggcaagtcttttcacttctctgagttttggctttctcatttgtccaataggaataacaataatgataataataatacctcccatgcaggattgctagtatgttcaatgggataatatatctaaacacctcacacaatgcctggcacatagcaggtgttcaattaggtctgtattaaaatccaggctctgtctcttattatt

SEQ ID NO: 11339 - protein, 57 aa, Homo sapiens; identical to SEQ ID NO: 11323

SEQ ID NO: 11340 - DNA, 703 bp, Homo sapiens
tctttcatcctgatcaatgtcatcaggattctctacctcatgttgatttcatcctagacatggcttctggttctgttcgtcttctgcagtcttcctttgttctccaattcattgatttgttcccagaagcttttctgttaaacgcagctgagcctttctttggctcttaatgactctgagtagttccatctctccaaggctggctagcccacgctgcccctgcctttgccatggtgggaggggtgaagaggaaagtgctgagtactgcctgctcagctggcttgcaaatgtccagcccccaggcacctccctatgacctcctctcaccacatattccctggtttgggcaggaattcagaggtctgctcctggccctgagctcccaggtgccatgcaatggctcgcctggggcagctgtggggcttgaacagtttaatgcttggctccagtctgagctggcaaggatgagcgtgcagggactaatacggtcctcactaaggctaggatggaatgtgcagctcacagcacacacatgtgactgcctcctctgcacacggcagcacacaccagtcccagccaggcttcctgacaatgaagtggtcctcatttgctgggagagggtgttgtcatagggatcatgccaggcatgcagctagtgaggcatagaccagcctgctggggagctggaggaggtcatatggag

SEQ ID NO: 11341 - protein, 48 aa, Homo sapiens [sequence omitted]

SEQ ID NO: 11342 - DNA, 1611 bp, Homo sapiens
aaaccgcaggctgggccgcggctacccagagtcagggccacggagcttaggagaccttgggtcagctctgcaaaggggttgtttactgaatgcttctggtatctgcagccccgctggggttcggacagggggtctggaatagggcttcacaactacagcagggctaggaccctcttgggctggaaggagctggagaggcctctgcaagctgtcacaggctcttggtgctggcactggctcaggctttcacacacacacacgcgcacacacacacacacacacacacggacaggcacccccttggtggccttcacagtttcaccttcaggctcaaagctggctctgcaggggacatgagaggcacaccgaagacccacctcctggccttctccctcctctgcctcctctcaaaggtgcgtacccagctgtgcccgacaccatgtacctgcccctggccacctccccgatgcccgctgggagtacccctggtgctggatggctgtggctgctgccgggtatgtgcacggcggctgggggagccctgcgaccaactccacgtctgcgacgccagccagggcctggtctgccagcccggggcaggacccggtggccggggggccctgtgcctcttggcagaggacgacagcagctgtgaggtgaacggccgcctgtatcgggaaggggagaccttccagccccactgcagcatccgctgccgctgcgaggacggcggcttcacctgcgtgccgctgtgcagcgaggatgtgcggctgcccagctgggactgcccccaccccaggagggtcgaggtcctgggcaagtgctgccctgagtgggtgtgcggccaaggagggggactggggacccagccccttccagcccaaggaccccagttttctggccttgtctcttccctgccccctggtgtcccctgcccagaatggagcacggcctggggaccctgctcgaccacctgtgggctgggcatggccacccgggtgtccaaccagaaccgcttctgccgactggagacccagcgccgcctgtgcctgtccaggccctgcccaccctccaggggtcgcagtccacaaaacagtgccttctagagccgggctgggaatggggacacggtgtccaccatccccagctggtggccctgtgcctgggccctgggctgatggaagatggtccgtgcccaggcccttggctgcaggcaacactttagcttgggtccaccatgcagaacaccaatattaacacgctgcctggtctgtctggatcccgaggtatggcagaggtgcaagacctagtcccctttcctctaactcactgcctaggaggctggccaaggtgtccagggtcctctagcccactccctgcctacacacacagcctatatcaaacatgcacacgggcgagctttctctccgacttcccctgggcaagagatgggacaagcagtcccttaatattgaggctgcagcaggtgctgggctggactggccatttttctgggggtaggatgaagagaaggcacacagagattctggatctcctgctgccttttctggagtttgtaaaattgttcctgaatacaagcctatgcgtgat

SEQ ID NO: 11343 - protein, 250 aa, Homo sapiens; identical to SEQ ID NO: 1893

SEQ ID NO: 11344 - DNA, 1963 bp, Homo sapiens
aaaccgcaggctgggccgcggctacccagagtcagggccacggagcttaggagaccttgggtcagctctgcaaaggggttgtttactgaatgcttctggtatctgcagccccgctggggttcggacagggggtctggaatagggcttcacaactacagcagggctaggaccctcttgggctggaaggagctggagaggcctctgcaagctgtcacaggctcttggtgctggcactggctcaggctttcacacacacacacgcgcacacacacacacacacacacacggacaggcacccccttggtggccttcacagtttcaccttcaggctcaaagctggctctgcaggggacatgagaggcacaccgaagacccacctcctggccttctccctcctctgcctcctctcaaaggtgcgtacccagctgtgcccgacaccatgtacctgcccctggccacctccccgatgcccgctgggagtacccctggtgctggatggctgtggctgctgccgggtatgtgcacggcggctgggggagccctgcgaccaactccacgtctgcgacgccagccagggcctggtctgccagcccggggcaggacccggtggccggggggccctgtgcctcttggcagaggacgacagcagctgtgaggtgaacggccgcctgtatcgggaaggggagaccttccagccccactgcagcatccgctgccgctgcgaggacggcggcttcacctgcgtgccgctgtgcagcgaggatgtgcggctgcccagctgggactgcccccaccccaggagggtcgaggtcctgggcaagtgctgccctgagtgggtgtgcggccaaggagggggactggggacccagccccttccagcccaaggaccccagttttctggccttgtctcttccctgccccctggtgtcccctgcccagaatggagcacggcctggggaccctgctcgaccacctgtgggctgggcatggccacccgggtgtccaaccagaaccgcttctgccgactggagacccagcgccgcctgtgcctgtccaggccctgcccaccctccaggggtcgcagtccacaaaacagtgccttctagagccgggctgggaatggggacacggtgtccaccatccccagctggtggccctgtgcctgggccctgggctgatggaagatggtccgtgcccaggcccttggctgcaggcaacactttagcttgggtccaccatgcagaacaccaatattaacacgctgcctggtctgtctggatcccgaggtatggcagaggtgcaagacctagtcccctttcctctaactcactgcctaggaggctggccaaggtgtccagggtcctctagcccactccctgcctacacacacagcctatatcaaacatgcacacgggcgagctttctctccgacttcccctgggcaagagatgggacaagcagtcccttaatattgaggctgcagcaggtgctgggctggactggccatttttctgggggtaggatgaagagaaggcacacagagattctggatctcctgctgccttttctggagtttgtaaaattgttcctgaatacaagcctatgcgtgatcttgtgtgtcaggcctgtgttttctgagaaagccctcccattatccggggcagaattcaggggcagagttctctgtgaacctcacaaggtgaaatcacatggtcttaaagaaagccagaagacaggccttcaagtgatccaagaaacccaattcatattaataataattaacttttttatttatttatttttttgagatggagttttgctcttgttgcccaggctggagctggagtacaatagcacgatctcgactcactgcagcctcccgggttcaagtgattctcctgcctcaagactcctgagtagctgggattataggcgcatgccaccatgctcggctttttttttt

SEQ ID NO: 11345 - protein, 250 aa, Homo sapiens; identical to SEQ ID NO: 1893

SEQ ID NO: 11346 - DNA, 1766 bp, Homo sapiens
ggagaccttgggtcagctctgcaaaggggttgtttactgaatgcttctggtatctgcagccccgctggggttcggacagggggtctggaatagggcttcacaactacagcagggctaggaccctcttgggctggaaggagctggagaggcctctgcaagctgtcacaggctcttggtgctggcactggctcaggctttcacacacacacacgcgcacacacacacacacacacacacggacaggcacccccttggtggccttcacagtttcaccttcaggtaaatgggctcatcctttgagccatgaggatgggaagcgaagcaaggaatgaaaaagctagtgtgtttgtgtgtgtgtgtgtgtgtgtgtgtgtgtgtgagcgcgcgcgcgcgcgcgcgtgtgtactcgtgcgtgtgcctgtgtgtgcctgggagtgacctcacagctgccggaacataaagactcacaggtccgcctcccaggctcaaagctggctctgcaggggacatgagaggcacaccgaagacccacctcctggccttctccctcctctgcctcctctcaaaggtgcgtacccagctgtgcccgacaccatgtacctgcccctggccacctccccgatgcccgctgggagtacccctggtgctggatggctgtggctgctgccgggtatgtgcacggcggctgggggagccctgcgaccaactccacgtctgcgacgccagccagggcctggtctgccagcccggggcaggacccggtggccggggggccctgtgcctcttggcagaggacgacagcagctgtgaggtgaacggccgcctgtatcgggaaggggagaccttccagccccactgcagcatccgctgccgctgcgaggacggcggcttcacctgcgtgccgctgtgcagcgaggatgtgcggctgcccagctgggactgcccccaccccaggagggtcgaggtcctgggcaagtgctgccctgagtgggtgtgcggccaaggagggggactggggacccagccccttccagcccaaggaccccagttttctggccttgtctcttccctgccccctggtgtcccctgcccagaatggagcacggcctggggaccctgctcgaccacctgtgggctgggcatggccacccgggtgtccaaccagaaccgcttctgccgactggagacccagcgccgcctgtgcctgtccaggccctgcccaccctccaggggtcgcagtccacaaaacagtgccttctagagccgggctgggaatggggacacggtgtccaccatccccagctggtggccctgtgcctgggccctgggctgatggaagatggtccgtgcccaggcccttggctgcaggcaacactttagcttgggtccaccatgcagaacaccaatattaacacgctgcctggtctgtctggatcccgaggtatggcagaggtgcaagacctagtcccctttcctctaactcactgcctaggaggctggccaaggtgtccagggtcctctagcccactccctgcctacacacacagcctatatcaaacatgcacacgggcgagctttctctccgacttcccctgggcaagagatgggacaagcagtcccttaatattgaggctgcagcaggtgctgggctggactggccatttttctgggggtaggatgaagagaaggcacacagagattctggatctcctgctgccttttctggagtttgtaaaattgttcctgaatacaagcctatgcgtgat

SEQ ID NO: 11347 - protein, 250 aa, Homo sapiens; identical to SEQ ID NO: 1893

SEQ ID NO: 11348 - DNA, 1519 bp, Homo sapiens
ggagaccttgggtcagctctgcaaaggggttgtttactgaatgcttctggtatctgcagccccgctggggttcggacagggggtctggaatagggcttcacaactacagcagggctaggaccctcttgggctggaaggagctggagaggcctctgcaagctgtcacaggctcttggtgctggcactggctcaggctttcacacacacacacgcgcacacacacacacacacacacacggacaggcacccccttggtggccttcacagtttcaccttcaggtaaatgggctcatcctttgagccatgaggatgggaagcgaagcaaggaatgaaaaagctagtgtgtttgtgtgtgtgtgtgtgtgtgtgtgtgtgtgtgagcgcgcgcgcgcgcgcgcgtgtgtactcgtgcgtgtgcctgtgtgtgcctgggagtgacctcacagctgccggaacataaagactcacaggtccgcctcccaggctcaaagctggctctgcaggggacatgagaggcacaccgaagacccacctcctggccttctccctcctctgcctcctctcaaaggtgcgtacccagctgtgcccgacaccatgtacctgcccctggccacctccccgatgcccgctgggagtacccctggtgctggatggctgtggctgctgccgggtatgtgcacggcggctgggggagccctgcgaccaactccacgtctgcgacgccagccagggcctggtctgccagcccggggcaggacccggtggccggggggccctgtgcctctgtaagcaggaccccagttttctggccttgtctcttccctgccccctggtgtcccctgcccagaatggagcacggcctggggaccctgctcgaccacctgtgggctgggcatggccacccgggtgtccaaccagaaccgcttctgccgactggagacccagcgccgcctgtgcctgtccaggccctgcccaccctccaggggtcgcagtccacaaaacagtgccttctagagccgggctgggaatggggacacggtgtccaccatccccagctggtggccctgtgcctgggccctgggctgatggaagatggtccgtgcccaggcccttggctgcaggcaacactttagcttgggtccaccatgcagaacaccaatattaacacgctgcctggtctgtctggatcccgaggtatggcagaggtgcaagacctagtcccctttcctctaactcactgcctaggaggctggccaaggtgtccagggtcctctagcccactccctgcctacacacacagcctatatcaaacatgcacacgggcgagctttctctccgacttcccctgggcaagagatgggacaagcagtcccttaatattgaggctgcagcaggtgctgggctggactggccatttttctgggggtaggatgaagagaaggcacacagagattctggatctcctgctgccttttctggagtttgtaaaattgttcctgaatacaagcctatgcgtgat

SEQ ID NO: 11349 - protein, 218 aa, Homo sapiens
MRGTPKTHLLAFSLLCLLSKVRTQLCPTPCTCPWPPPRCPLGVPLVLDGCGCCRVCARRLGEPCDQLHVCDASQGLVCQPGAGPGGRGALCLCKQDPSFLALSLPCPLVSPAQNGARPGDPARPPVGWAWPPGCPTRTASADWRPSAACACPGPAHPPGVAVHKTVPSRAGLGMGTRCPPSPAGGPVPGPWADGRWSVPRPLAAGNTLAWVHHAEHQY

SEQ ID NO: 11350 - DNA, 2145 bp, Homo sapiens
gaatgcttctggtatctgcagccccgctggggttcggacagggggtctggaatagggcttcacaactacagcagggctaggaccctcttgggctggaaggagctggagaggcctctgcaagctgtcacaggctcttggtgctggcactggctcaggctttcacacacacacacgcgcacacacacacacacacacacacggacaggcacccccttggtggccttcacagtttcaccttcaggtaaatgggctcatcctttgagccatgaggatgggaagcgaagcaaggaatgaaaaagctagtgtgtttgtgtgtgtgtgtgtgtgtgtgtgtgtgtgtgagcgcgcgcgcgcgcgcgcgtgtgtactcgtgcgtgtgcctgtgtgtgcctgggagtgacctcacagctgccggaacataaagactcacaggtccgcctcccaggctcaaagctggctctgcaggggacatgagaggcacaccgaagacccacctcctggccttctccctcctctgcctcctctcaaaggtgcgtacccagctgtgcccgacaccatgtacctgcccctggccacctccccgatgcccgctgggagtacccctggtgctggatggctgtggctgctgccgggtatgtgcacggcggctgggggagccctgcgaccaactccacgtctgcgacgccagccagggcctggtctgccagcccggggcaggacccggtggccggggggccctgtgcctctgtaagcaggtttgcaggactgagtgggggcgggtgtgagcgggaggtcaaggccgtggtgtcctggatcaaagtgcagccctcctctctctacctccttgggtgctcacttcaggtatcccatccattccagctgaacttggtgtcccaaagcccactccccactccctcctctcccttcttggcctctgcttaaaccatctcactaccccaataacctttccccatccctacctgtccaaatcattgccaactttcaaagccaagttcaaacagcttctcccctgagaagcccccccagattcttcaaaccagatgccaccactcccttctcaggatccttacaacactttggggaaaataaaagtgcaaccttttagggcataatatgtgtccagaactgtgctaagcacttactacacaagtcacatcatcctcacaataaccctatgatgggaagtactttcagacctattttatgaatgaggaaacaggttcaccagcattaagggacatgcttcatgtcacacggcacgggaccagatccaacgggctctaaggaacagtttattctgtcttctcccatagtgggggccctcggagcactgctgggatcctgggtttgccatgtattcagcagtcacccgagcatgtgacattcctcaccactcttctaggccttggtattctctgatgcttcggggcagggctttgcaagctggctccagtgactgggtgccagagaattagttgttgtgggagggctgtcctgtgcatggtaagacttctagcagcatccccgaactccacccactgtatgccagcagcactccccatcccccaagtcatgacagtctgtcttcagacagtgccaaatttccccagggggcaaaatctccagttgggaaccatcactttagagaaatgcaaagaggcaagagattgttcttcttttttcttttttaataataagccttgtagaacaatttgcctctttcatctatgtgcatgtcacacttttataaaaataagaacgaaagagagagagagagaagctcatgaatcattgataatgaattcatctgtaggaaaagccttgttaaaaaacaacaggccaggcacagtgactcatgcctataatcctatcagtttgggagactgaggcgggacgaccacttgagcccaggagttctagtccagccttggcaacatagtaagatcctctctctatcaaaaaaaaaaaaaaaaaattagccgggtgtggtggcacatgcctgtggtcccagctacttgagaggctgaggtgagaggctcgcttgagcctgggtgtttgaggctgcagtgagccatggttgcgccactacattccagcccgggcaacagaccaaaccctatctcc

SEQ ID NO: 11351 - protein, 104 aa, Homo sapiens
MRGTPKTHLLAFSLLCLLSKVRTQLCPTPCTCPWPPPRCPLGVPLVLDGCGCCRVCARRLGEPCDQLHVCDASQGLVCQPGAGPGGRGALCLCKQVCRTEWGRV

SEQ ID NO: 11352 - DNA, 891 bp, Homo sapiens
ccaggcaaggaaaagcaaatccagccacttggtctcccagccccgcttcacctatctccaagccccttggacgttttctgagcactcctgggtcagccttttggcaaactcgatttactgattcctcccgtccctgcctgcgtgggctgacagctccattcagcagaggggggcaaaggagaccagggagacgagggaggcgaaggagatgagggaggctcggtgagccgaaatgacccgtccaaagtagctcagctgggcgggggcagaggtgggaccgaaacccagaggcgccccgggacggctggggctggagcgggcgcggagggaggctccgggcggctcaccgatggtagtgatgacggtgatggcgaagtagaaggagccggggaacttccactggcggccggcgcggtggggctcagcctggagcgccaggcgctccagctcgcggtagtcctcggccgagaagccgaacttcctccggagagcgccccgcttctggaccagcagtcgctggcggccgctttccgcctcggactcgagcgcgtcgaagacagcagcgcccaccagcagatgcagagaacccaaagccctgcaggatggcaaagctgcaacatggaagtcacccggatcaccacgtaaaggaaatctctccaaccaggaacaaacacctgccttgcaatattaggtgtctgcctcctgccccggtccacagccaggagccccggagccaacggccagcctggaagacttacagttctccctctgagggttgctgtggctttccatgttgtggtgactaagtccctgtgtttctgtgcagtccctgcttcctgggaccagggaagaatggtcccgtaagtctcaccctaatggcaagtctaggac

SEQ ID NO: 11353 - protein, 67 aa, Homo sapiens [sequence omitted]

SEQ ID NO: 11354 - DNA, 234 bp, Homo sapiens
aggtccttcctagggcttggtgcatgtgcatatctccttccggaatcctggtcaatactaaggtgtctgcctcctgccccggtccacagccaggagccccggagccaacggccagcctggaagacttacagttctccctctgagggttgctgtggctttccatgttgtggtgactaagtccctgtgtttctgtgcagtccctgcttcctgggaccagggaagaatggtcccgta

SEQ ID NO: 11355 - protein, 39 aa, Homo sapiens
MCISPSGILVNTKVSASCPGPQPGAPEPTASLEDLQFSL

SEQ ID NO: 11356 - DNA, 2815 bp, Homo sapiens
gcagctcacacgcttcaccagcgctcttacttcattctgtcttggagatgatgccctcacacccgtccccctttcccaagcccatgagtccctcaaggcaggaactgtcctctttctgtctgggagcacagtggttggcacacaggcgggaaacagtaaatatctctggaatgataaggagtagggctattttatcagggtctctcatgtgccaaggcttatgccagctattcactgaaggggcattcctacagtactgtgtgtcgcacctaggctctgagcccaccggagggtgcagagacgcacactggccgccccagccctcaaggagttcatgtccagtggaggaagtggcaataacacccatatcttgagggcttcattgaaagagtgttccctgagcacctaggccatgcctagcactgtgtgctagagggtacggacatgtcatcccatggaacctgaagttacgattactgagctcatcattgctgtagttcaggccactcagagaagttaagtaacttactcaaagacacacagccagcaagttaagccctgacctgacagtgatgacagcacaagtggacaacgactttgttgcatgaaatctcagcgtgtatagaatacttaaactttattaatatatagtaactatactaatgataataacagagtagctaggacctatggaaggtctcttttatgttgtgatcattacgcctatcattccgagtagtctctaccaccctggaaaataagtaccattatatcccagcttgcaaatgtggaaactgaggcaagaagaagtgaaatcacttggcccaggttcacagctaagaaagggcagagtttggggggtcaatccaggcctgtcttcttgcaatccctgtgccgggatccagggtgccccagcaggctggtggagggctggggagaggtgcatatcctgggctggagccctgggcagggcccagctactgtgaggcagctgcctcaggcagcgggatctgggcagctctgcagagaaggctgtgccgctttgcgggtcaccgatgggggtgcggtttttcctccgcagtggcagaggacgacagcagctgtgaggtgaacggccgcctgtatcgggaaggggagaccttccagccccactgcagcatccgctgccgctgcgaggacggcggcttcacctgcgtgccgctgtgcagcgaggatgtgcggctgcccagctgggactgcccccaccccaggagggtcgaggtcctgggcaagtgctgccctgagtgggtgtgcggccaaggagggggactggggacccagccccttccagcccaaggaccccagttttctggccttgtctcttccctgccccctggtgtcccctgcccagaatggagcacggcctggggaccctgctcgaccacctgtgggctgggcatggccacccgggtgtccaaccagaaccgcttctgccgactggagacccagcgccgcctgtgcctgtccaggccctgcccaccctccaggggtcgcagtccacaaaacagtgccttctagagccgggctgggaatggggacacggtgtccaccatccccagctggtggccctgtgcctgggccctgggctgatggaagatggtccgtgcccaggcccttggctgcaggcaacactttagcttgggtccaccatgcagaacaccaatattaacacgctgcctggtctgtctggatcccgaggtatggcagaggtgcaagacctagtcccctttcctctaactcactgcctaggaggctggccaaggtgtccagggtcctctagcccactccctgcctacacacacagcctatatcaaacatgcacacgggcgagctttctctccgacttcccctgggcaagagatgggacaagcagtcccttaatattgaggctgcagcaggtgctgggctggactggccatttttctgggggtaggatgaagagaaggcacacagagattctggatctcctgctgccttttctggagtttgtaaaattgttcctgaatacaagcctatgcgtgatcttgtgtgtcaggcctgtgttttctgagaaagccctcccattatccggggcagaattcaggggcagagttctctgtgaacctcacaaggtgaaatcacatggtcttaaagaaagccagaagacaggccttcaagtgatccaagaaacccaattcatattaataataattaacttttttatttatttatttttttgagatggagttttgctcttgttgcccaggctggagctggagtacaatagcacgatctcgactcactgcagcctcccgggttcaagtgattctcctgcctcaagactcctgagtagctgggattataggcgcatgccaccatgctcggctttttttttttttttaaatatatttttagtagagatggggtttagccatgatggtcaggctggtctcgaactcctgacctcaagtgatccgcccgccgcctcggcctcccaaagtgctgggattacaggcgtgagctactgcgcccagccaataattaacattgcttgagcgcctgctatgtgctaggcactagcactttatacagaccagtgcttcccagcgtttttgaccagagaagagcagggagaatgaaggctgcctcccagggactggggagcatagcctgaaatcaactaacccaagggtgaaattgttcgaagtctcatgttttattgtttacaaacaaaacaaaacaaaaaacaaaaacaaaaaaaaacacccaacaccaaatacatatattttacattttc

SEQ ID NO: 11357 - protein, 164 aa, Homo sapiens
MCGCPAGTAPTPGGSRSWASAALSGCAAKEGDWGPSPFQPKDPSFLALSLPCPLVSPAQNGARPGDPARPPVGWAWPPGCPTRTASADWRPSAACACPGPAHPPGVAVHKTVPSRAGLGMGTRCPPSPAGGPVPGPWADGRWSVPRPLAAGNTLAWVHHAEHQY

SEQ ID NO: 11358 - DNA, 1250 bp, Homo sapiens
ggagcgcgcggtccgggcacacggagcaggttgggaccgcggcgggtaccggggccggggcgccatgcggaggccgagcgtgcgcgcggccgggctggtcctgtgcaccctgtgttacctgctggtgggcgctgctgtcttcgacgcgctcgagtccgaggcggaaagcggccgccagcgactgctggtccagaagcggggcgctctccggaggaagttcggcttctcggccgaggactaccgcgagctggagcgcctggcgctccaggctgagccccaccgcgccggccgccagtggaagttccccggctccttctacttcgccatcaccgtcatcactaccatcgagtacggccacgccgcgccgggtacggactccggcaaggtcttctgcatgttctacgcgctcctgggcatcccgctgacgctggtcactttccagagcctgggcgaacggctgaacgcggtggtgcggcgcctcctgttggcggccaagtgctgcctgggcctgcggtggacgtgcgtgtccacggagaacctggtggtggccgggctgctggcgtgtgccgccaccctggccctcggggccgtcgccttctcgcacttcgagggctggaccttcttccacgcctactactactgcttcatcaccctcaccaccatcggcttcggcgacttcgtggcactgcagagcggcgaggcgctgcagaggaagctcccctacgtggccttcagcttcctctacatcctcctggggctcacggtcattggcgccttcctcaacctggtggtcctgcgcttcctcgttgccagcgccgactggcccgagcgcgctgcccgcacccccagcccgcgccccccgggggcgcccgagagccgtggcctctggctgccccgccgcccggcccgctccgtgggctccgcctctgtcttctgccacgtgcacaagctggagaggtgcgcccgcgacaacctgggcttttcgcccccctcgagcccgggggtcgtgcgtggcgggcaggctcccaggcttggggcccggtggaagtccatctgacaaccccacccaggccagggtcgaatctggaatgggagggtctggcttcagctatcagggcaccctccccagggattggaaacggatgacgggcctctaggcggtcttctgccacgagcagtttctcattactgtctgtggctaagtcccctccctcctttccaaaaatatattacagtcacaccataagcac

SEQ ID NO: 11359 - protein, 330 aa, Homo sapiens
MRRPSVRAAGLVLCTLCYLLVGAAVFDALESEAESGRQRLLVQKRGALRRKFGFSAEDYRELERLALQAEPHRAGRQWKFPGSFYFAITVITTIEYGHAAPGTDSGKVFCMFYALLGIPLTLVTFQSLGERLNAVVRRLLLAAKCCLGLRWTCVSTENLVVAGLLACAATLALGAVAFSHFEGWTFFHAYYYCFITLTTIGFGDFVALQSGEALQRKLPYVAFSFLYILLGLTVIGAFLNLVVLRFLVASADWPERAARTPSPRPPGAPESRGLWLPRRPARSVGSASVFCHVHKLERCARDNLGFSPPSSPGVVRGGQAPRLGARWKSI

SEQ ID NO: 11360 - DNA, 3590 bp, Homo sapiens
acggagcaggttgggaccgcggcgggtaccggggccggggcgccatgcggaggccgagcgtgcgcgcggccgggctggtcctgtgcaccctgtgttacctgctggtgggcgctgctgtcttcgacgcgctcgagtccgaggcggaaagcggccgccagcgactgctggtccagaagcggggcgctctccggaggaagttcggcttctcggccgaggactaccgcgagctggagcgcctggcgctccaggctgagccccaccgcgccggccgccagtggaagttccccggctccttctacttcgccatcaccgtcatcactaccatcgagtacggccacgccgcgccgggtacggactccggcaaggtcttctgcatgttctacgcgctcctgggcatcccgctgacgctggtcactttccagagcctgggcgaacggctgaacgcggtggtgcggcgcctcctgttggcggccaagtgctgcctgggcctgcggtggacgtgcgtgtccacggagaacctggtggtggccgggctgctggcgtgtgccgccaccctggccctcggggccgtcgccttctcgcacttcgagggctggaccttcttccacgcctactactactgcttcatcaccctcaccaccatcggcttcggcgacttcgtggcactgcagagcggcgaggcgctgcagaggaagctcccctacgtggccttcagcttcctctacatcctcctggggctcacggtcattggcgccttcctcaacctggtggtcctgcgcttcctcgttgccagcgccgactggcccgagcgcgctgcccgcacccccagcccgcgccccccgggggcgcccgagagccgtggcctctggctgccccgccgcccggcccgctccgtgggctccgcctctgtcttctgccacgtgcacaagctggagaggtgcgcccgcgacaacctgggcttttcgcccccctcgagcccgggggtcgtgcgtggcgggcaggctcccaggcttggggcccggtggaagtccatctgacaaccccacccaggccagggtcgaatctggaatgggagggtctggcttcagctatcagggcaccctccccagggattggaaacggatgacgggcctctaggcggtcttctgccacgagcagtttctcattactgtctgtggctaagtcccctccctcctttccaaaaatatattacagtcacaccataagcacaaaccaggctccagggtcaccctgtaggagcaaattccttgtagtccaaattgtatgagggcgtggccacatcagcacttaggagaggctctgcacaggtccacctcagagccgaccctccagagcaacttttctgttgtgaagaggctggttttctgagtaacggttgaaatgtgcaactttcaacactggaatcttcgctgcaattagtgaggtcagatgctcacactacgagaagcatggggaacaaaggtggaccaaatgggaccgtgtacagtccagtgttgacaagggggtcaatctcttgcgctaaacgatctcattctctgcccagtgtatagagtggaatcagcccatgtgtgaatgatggcctctttcccccagacagctgatgctctttgtccctggccagccccacttcaggatgagggaggccttgctgtcacccacccaccatgtcactggggccacttggacacagcagaatgccatgggacgagctctcttccgggtcctgtcaatcaccagcaatatgaccttggagaatcgcatcctctcccagggcctcagtttccacatctgtagaatgacggggttcatccagaaccctgctccctcttacgcatctctggcaggactttctggaacaggcccctgcaccataagggggcagagacaaagcccgaggtgtggcatcctggcaccccgtggcactcagccacttcccctggcttcccagatagggctgtctcaacacaaagcatgaacgagccaggttagaaaagccaaaaactttaatttcaacatgagctacatggtcatgaacacaatgcaacgcgaccccactccaacccaagggccccagaaaccctccctccctaaaggcctgggcggctgctgctccaagagagggaatgagggaaaggtgggtggatggagagaggcccccagcctaaggacccaggctcctgccttcccaccacccgtccaggaagcagtcataaagtgaaagggctccagaggtgatgctcacagccctgggttcggctccattctgacctccctgaagcgctgggttagacgggcaccatcagcccacctcacaggctcggcgtcgggtgagctcgtggacgctaatgctttctgtccactctgaggtgctgctccagatgtggggccctcccagagggcctcggagacaccataggggaacagggagaggggctcggtccctgggcctgacacagcactgctgctcaataaataaatgcaggtgaccttgcctgacgcaacagctgtgcctccagagggggtgggactcggtactgtttctgacacggaaatgcacccaggagctcctggctgaagggaattggcttgtgaagtacataaccaccccctaagccacctgctccacctctgggtgtaaaagagtgagctctgggctgttggagaaccgagttccagtcctgcccacccactaacacagtgggacctcaggcaagcactttcccctcccaggacctcagctccctgctttgaaatggggatgacggcacaggccaccacctactccccaggggctcttgtgagggccgaagggcacactcgagataaaagcattctgaaaacaaagtctgaaaagcacaacaggaaggccaggtctcactgcatctgaaggtttggggaggacttgcctgaaatgaggcgcccacagctgctcccattccctcactgccccaggcaggagctggtgtttcctaactctccctccagttggtcctgaagaggctatggccccttacaagggccctccacccaggcatcaaggtctagacccaatcctgtgtaccctcagtcagctgggccagcccccaaggagagctgagtctccctggcaaccctctcccccagacccaggcccagagaagtcactggtttatagaggtggagcccagtagggctgtgcagcccagggcttcgaggccaggaatccttgtcccagcagacatgcactggagcaacggtctcctgtcgcctgaagaacaatggagcccctagttcttccccctttgcacccttgctgaggggtcttgtgtgagtcacttcctgtttctgggcctcagtttcccaacctctcagatgggctacagcttgtcctgcccatcttttggggggccattaggcttcaaagaaagaagggaggaggaggtatgggcagtggcagccccacctcatactgccctggctccggctcagcctctattgggaggaggggacccaggctgggggtgccactgaacacacaggtgactccaggggtggcttttcccccaagctgggtcttgatttccttgtct

SEQ ID NO: 11361 - protein, 330 aa, Homo sapiens; identical to SEQ ID NO: 11359

SEQ ID NO: 11362 - DNA, 582 bp, Homo sapiens
gtgcaccctgtgttacctgctggtgggcgctgctgtcttcgacgcgctcgagtccgaggcggaaagcggccgccagcgactgctggtccagaagcggggcgctctccggaggaagttcggcttctcggccgaggactaccgcgagctggagcgcctggcgctccaggctgagccccaccgcgccggccgccagtggaagttccccggctccttctacttcgccatcaccgtcatcactaccatcgggatgcagagcagttcctttggagcatctggaccaccagctgttgccatgactaccatctggctggtacctgctgagcctaaacctgggggaacaggaaggagagaagtgggctctgcagggctccaggcttggtgccagccactccccaggctccagctgtgaacgtcccggcaccccccctggggcttggatcaccagtccgaaagccagtgccttggagaaagtttccccataatgctcttgcaagtgaatatgagctgtggtttttgcagtggagttaaaagtatgagttctggaatcacagagactggagttctggtctcatctctattgcc

SEQ ID NO: 11363 - protein, 53 aa, Homo sapiens
MQSSSFGASGPPAVAMTTIWLVPAEPKPGGTGRREVGSAGLQAWCQPLPRLQL

SEQ ID NO: 11364 - DNA, 455 bp, Homo sapiens
gcggccgccagcgactgctggtccagaagcggggcgctctccggaggaagttcggcttctcggccgaggactaccgcgagctggagcgcctggcgctccaggctgagccccaccgcgccggccgccagtggaagttccccggctccttctacttcgccatcaccgtcatcactaccatcgatgaacacctgccgcgtaactgcagccacggtcaagacggaacattgccatcaacccccaaaattctaccatgccttctgtagttaagcctgcccccaaccccagctactggcaagcaaccacagatctgttctctgttgccacagttttgtcatttccagagtgtcatttatagggaaccatgcggtctgtaggctttcgagctcgtcttcctctactcagcttagacatttgagatccatccttggttgccgcaagttacaggagttcattca

SEQ ID NO: 11365 - protein, 34 aa, Homo sapiens
MPSVVKPAPNPSYWQATTDLFSVATVLSFPECHL

SEQ ID NO: 11366 - DNA, 1040 bp, Homo sapiens
gggaaccatgcggtctgtaggctttcgagctcgtcttcctctactcagcttagacatttgagatccatccttggttgccgcaagttacaggagttcattcagttgctgaaaaaaattggtgtttggatgccccacagagtacggccacgccgcgccgggtacggactccggcaaggtcttctgcatgttctacgcgctcctgggcatcccgctgacgctggtcactttccagagcctgggcgaacggctgaacgcggtggtgcggcgcctcctgttggcggccaagtgctgcctgggcctgcggtggacgtgcgtgtccacggagaacctggtggtggccgggctgctggcgtgtgccgccaccctggccctcggggccgtcgccttctcgcacttcgagggctggaccttcttccacgcctactactactgcttcatcaccctcaccaccatcggcttcggcgacttcgtggcactgcagagcggcgaggcgctgcagaggaagctcccctacgtggccttcagcttcctctacatcctcctggggctcacggtcattggcgccttcctcaacctggtggtcctgcgcttcctcgttgccagcgccgactggcccgagcgcgctgcccgcacccccagcccgcgccccccgggggcgcccgagagccgtggcctctggctgccccgccgcccggcccgctccgtgggctccgcctctgtcttctgccacgtgcacaagctggagaggtgcgcccgcgacaacctgggcttttcgcccccctcgagcccgggggtcgtgcgtggcgggcaggctcccaggcttggggcccggtggaagtccatctgacaaccccacccaggccagggtcgaatctggaatgggagggtctggcttcagctatcagggcaccctccccagggattggaaacggatgacgggcctctaggcggtcttctgccacgagcagtttctcattactgtctgtggctaagtcccctccctcctttccaaaaatatattacagtcacaccataagcac

SEQ ID NO: 11367 - protein, 269 aa, Homo sapiens
MPHRVRPRRAGYGLRQGLLHVLRAPGHPADAGHFPEPGRTAERGGAAPPVGGQVLPGPAVDVRVHGEPGGGRAAGVCRHPGPRGRRLLALRGLDLLPRLLLLLHHPHHHRLRRLRGTAERRGAAEEAPLRGLQLPLHPPGAHGHWRLPQPGGPALPRCQRRLARARCPHPQPAPPGGAREPWPLAAPPPGPLRGLRLCLLPRAQAGEVRPRQPGLFAPLEPGGRAWRAGSQAWGPVEVHLTTPPRPGSNLEWEGLASAIRAPSPGIGNG

SEQ ID NO: 11368 - DNA, 3400 bp, Homo sapiens
gggaaccatgcggtctgtaggctttcgagctcgtcttcctctactcagcttagacatttgagatccatccttggttgccgcaagttacaggagttcattcagttgctgaaaaaaattggtgtttggatgccccacagagtacggccacgccgcgccgggtacggactccggcaaggtcttctgcatgttctacgcgctcctgggcatcccgctgacgctggtcactttccagagcctgggcgaacggctgaacgcggtggtgcggcgcctcctgttggcggccaagtgctgcctgggcctgcggtggacgtgcgtgtccacggagaacctggtggtggccgggctgctggcgtgtgccgccaccctggccctcggggccgtcgccttctcgcacttcgagggctggaccttcttccacgcctactactactgcttcatcaccctcaccaccatcggcttcggcgacttcgtggcactgcagagcggcgaggcgctgcagaggaagctcccctacgtggccttcagcttcctctacatcctcctggggctcacggtcattggcgccttcctcaacctggtggtcctgcgcttcctcgttgccagcgccgactggcccgagcgcgctgcccgcacccccagcccgcgccccccgggggcgcccgagagccgtggcctctggctgccccgccgcccggcccgctccgtgggctccgcctctgtcttctgccacgtgcacaagctggagaggtgcgcccgcgacaacctgggcttttcgcccccctcgagcccgggggtcgtgcgtggcgggcaggctcccaggcttggggcccggtggaagtccatctgacaaccccacccaggccagggtcgaatctggaatgggagggtctggcttcagctatcagggcaccctccccagggattggaaacggatgacgggcctctaggcggtcttctgccacgagcagtttctcattactgtctgtggctaagtcccctccctcctttccaaaaatatattacagtcacaccataagcacaaaccaggctccagggtcaccctgtaggagcaaattccttgtagtccaaattgtatgagggcgtggccacatcagcacttaggagaggctctgcacaggtccacctcagagccgaccctccagagcaacttttctgttgtgaagaggctggttttctgagtaacggttgaaatgtgcaactttcaacactggaatcttcgctgcaattagtgaggtcagatgctcacactacgagaagcatggggaacaaaggtggaccaaatgggaccgtgtacagtccagtgttgacaagggggtcaatctcttgcgctaaacgatctcattctctgcccagtgtatagagtggaatcagcccatgtgtgaatgatggcctctttcccccagacagctgatgctctttgtccctggccagccccacttcaggatgagggaggccttgctgtcacccacccaccatgtcactggggccacttggacacagcagaatgccatgggacgagctctcttccgggtcctgtcaatcaccagcaatatgaccttggagaatcgcatcctctcccagggcctcagtttccacatctgtagaatgacggggttcatccagaaccctgctccctcttacgcatctctggcaggactttctggaacaggcccctgcaccataagggggcagagacaaagcccgaggtgtggcatcctggcaccccgtggcactcagccacttcccctggcttcccagatagggctgtctcaacacaaagcatgaacgagccaggttagaaaagccaaaaactttaatttcaacatgagctacatggtcatgaacacaatgcaacgcgaccccactccaacccaagggccccagaaaccctccctccctaaaggcctgggcggctgctgctccaagagagggaatgagggaaaggtgggtggatggagagaggcccccagcctaaggacccaggctcctgccttcccaccacccgtccaggaagcagtcataaagtgaaagggctccagaggtgatgctcacagccctgggttcggctccattctgacctccctgaagcgctgggttagacgggcaccatcagcccacctcacaggctcggcgtcgggtgagctcgtggacgctaatgctttctgtccactctgaggtgctgctccagatgtggggccctcccagagggcctcggagacaccataggggaacagggagaggggctcggtccctgggcctgacacagcactgctgctcaataaataaatgcaggtgaccttgcctgacgcaacagctgtgcctccagagggggtgggactcggtactgtttctgacacggaaatgcacccaggagctcctggctgaagggaattggcttgtgaagtacataaccaccccctaagccacctgctccacctctgggtgtaaaagagtgagctctgggctgttggagaaccgagttccagtcctgcccacccactaacacagtgggacctcaggcaagcactttcccctcccaggacctcagctccctgctttgaaatggggatgacggcacaggccaccacctactccccaggggctcttgtgagggccgaagggcacactcgagataaaagcattctgaaaacaaagtctgaaaagcacaacaggaaggccaggtctcactgcatctgaaggtttggggaggacttgcctgaaatgaggcgcccacagctgctcccattccctcactgccccaggcaggagctggtgtttcctaactctccctccagttggtcctgaagaggctatggccccttacaagggccctccacccaggcatcaaggtctagacccaatcctgtgtaccctcagtcagctgggccagcccccaaggagagctgagtctccctggcaaccctctcccccagacccaggcccagagaagtcactggtttatagaggtggagcccagtagggctgtgcagcccagggcttcgaggccaggaatccttgtcccagcagacatgcactggagcaacggtctcctgtcgcctgaagaacaatggagcccctagttcttccccctttgcacccttgctgaggggtcttgtgtgagtcacttcctgtttctgggcctcagtttcccaacctctcagatgggctacagcttgtcctgcccatcttttggggggccattaggcttcaaagaaagaagggaggaggaggtatgggcagtggcagccccacctcatactgccctggctccggctcagcctctattgggaggaggggacccaggctgggggtgccactgaacacacaggtgactccaggggtggcttttcccccaagctgggtcttgatttccttgtct

SEQ ID NO: 11369 - protein, 269 aa, Homo sapiens; identical to SEQ ID NO: 11367

SEQ ID NO: 11370 - DNA, 5207 bp, Homo sapiens
caagctgcccaagccgcccgccgccgccgccgccgccgcggccgaggcgcccggcgccggcgcgggcatggagcgctcgcagagccgcctcagtctgtccgcctccttcgaggcgctcgccatctacttcccgtgcatgaactccttcgacgacgaggacgcaggggacagccggaggctgaagggggccatccagaggagcacggagacgggcctggcagtggagatgcccagccggacactgcgccaggccagccacgagtccattgaggacagcatgaacagctatggctcagagggcaaccttaactatggaggagtttgcctggcgtcggacgcccagttcagtgacttcctgggaagcatggggccggcacagtttgtgggccgccagaccctggccaccacacccatgggggatgtggagatcggtctgcaggagcggaacggtcagttggaggtggacattatccaggctcggggactgacagccaagccaggctccaagacactgccagcggcctacatcaaggcctacctgctagagaatggcatctgcattgccaagaagaagaccaaagtcgctcgcaagtcgctggacccactgtataaccaggtgctgctgtttcctgagagtccccagggcaaagtcctccaggtgatcgtgtgggggaactacgggcggatggagcggaagcagttcatgggtgtggctcgcgtgctgctggaggagctggacttgaccaccctggccgtgggctggtacaagctcttccccacctcctccatggtggacccagccacaggccccctgctccggcaggcatcccagttgtccctcgagagcaccgtggggccctgcggagaacgatcttagtgctggaatggggaggggctccccaagatggcctggagaccacccagccctgacctgggaccccaggcccaggggcacattgaacaggaggacggggctctcccccacagtggggaagcagaacggggagacctgcccccccttgggcccctcctcaccccttctttgcctcctacccccgagacctcccctctcccaacgggattggctacacttttgacttggccggttcttgacctggtggatgtggctgcagtccagagaaaggaaagattgaggtggcagagcagaccactctcccttcccaaactgtccaacttctccccctttttgcctcctcggaagctcgctgcccagagccatgtccagaacccagccggccatctccatggtgccaattaccagcaagtgtctttcctgcggcaccgggttcaggcagctactcctgccccagagatgaaggggcagctttgcaaggatccggagccagctcccaggggcccagagccccccacttgaagaggagcttgagcttccctctgcctgcccgtggaaggagctttgccgcagcctgtccgagtccatccgtccgtcccctcctgcctgcccctcttctggtggctctaggaattggggttcagcagggaccaaaggaaaggaggaggtgccgggggcctggcacagacccctaggtgcctcgctccatgggattgcaacaagctagtttaggaaccgctggcggactagaaagaatgttgtcgtctgtgttccggtggaggagctgtggaacctgagtttccagaaccccaaccctagagagcatttgggggtgctgtattggagggggaggctaaggaaagttgggattgggactggtggtgccaagataagggtttctcaaattggagaacccctccttgttgcatgaggtcaatggtcatcctgtctacccaccctgcctccaggccagggggctggggaggcaaatagagcccccctattttagtctttttaaaaaaaacatcctatactaagggcagaacccactgccccggcctcaattaccttggctgaaggaaagatggcggtaggagagaaaagtgaagaggcgtgagtgtaagaactgggagattccttttccagcaggcctgggtagctgccttcccagcccagccctccctggggcctgcgggagcccttttgcatgcaagggaggatggaggctggcccctctttatagaagcacatttctgccacctcccctgggaggcacccagaagcctgccactctttacctagtccctgctgtgtagggcgtagtccaggttagctaggtagagttagtgctccaagccctggggcctgttcttagctcatgcatagtccttacagagtcccaggaccgggggtggagaggagcctcaagtacattccaggagaccactgtctcctcgctggcctgggcctagatggggcagcctggctcacaggaggccagcccctcctcctccgcccccttccttcccttgtccccgtagggttatagctggagctgcctgttatactcggctgttctgatttattattcttggtactgactttctttatgagggactcctaagggttgtaggaccttggcagagggggcctggtctccattagagggtgttgttttctcctgaggacacccaggctgcctttggtcccaccctgttcctggtcccggtcccggtcccagtcccaccaggcaactccttccacccggaaattcttcccttcccttagcctgtggaaaccctgggtattctttaaagttctggtcaatgtatatcacctccacagagctgcttaccctgcactgggaaggggagatggagacgccccctttacccaggaggtcttcagagtttcctgggaccgcggtgggtggaatcccaaggctgggggtggaaggagcagggctctggagggattcgcattcaaggcacagaattggccccttgcctgtttgtttttctaaccagtgtgatttctctgctgttcgtttattacttaccattggaatattttgagccaggagagcgccttctctctccagccatcaccgctgtggttgttcaggggtagcttttcaaaaacagggcagagcctggctgtcccaaccagggggagcaggggcttggccctgacagcctgagcccttcccctggtgtctgcacagcctttataaagagagagagagctccgaagcaataacaacacctgggggtggtcagtgagggccccctcaatgattttcttgtttgttctgtgaaatcccgctcacctcctggaggggtggagcagctgggggctggagccctgtttctttgtgtcatcgtgagcatgtgccccttcccaggggctgtgaccattgggtgtgggaactacggtctgtcctcaccaagggatgggggtttggggaggagagtgacattttcatcattagcttcggagaagcttcaagcccatcctgtccccgctactgcctggccccttgctgactcaggctgcactgtttgaagaggagcagagaggctggcactaggggccactggggggctggggtctccaggggatgactgttttcaatctctgggccaagatcacatgcaggataccatgggaaggagccatctccactctccttctccagaacccccttgaagggcctttgggaccattagtccatttccattttacagacaaggaaatcaagacccagcttgggggaaaagccacccctggagtcacctgtgtgttcagtggcacccccagcctgggtcccctcctcccaatagaggctgagccggagccagggcagtatgaggtggggctgccactgcccatacctcctcctcccttctttctttgaagcctaatggccccccaaaagatgggcaggacaagctgtagcccatctgagaggttgggaaactgaggcccagaaacaggaagtgactcacacaagacccctcagcaagggtgcaaagggggaagaactaggggctccattgttcttcaggcgacaggagaccgttgctccagtgcatgtctgctgggacaaggattcctggcctcgaagccctgggctgcacagccctactgggctccacctctataaaccagtgacttctctgggcctgggtctgggggagagggttgccagggagactcagctctccttgggggctggcccagctgactgagggtacacaggattgggtctagaccttgatgcctgggtggagggcccttgtaaggggccatagcctcttcaggaccaactggagggagagttaggaaacaccagctcctgcctggggcagtgagggaatgggagcagctgtgggcgcctcatttcaggcaagtcctccccaaaccttcagatgcagtgagacctggccttcctgttgtgcttttcagactttgttttcagaatgcttttatctcgagtgtgcccttcggccctcacaagagcccctggggagtaggtggtggcctgtgccgtcatccccatttcaaagcagggagctgaggtcctgggaggggaaagtgcttgcctgaggtcccactgtgttagtgggtgggcaggactggaactcggttctccaacagcccagagctcactcttttacacccagaggtggagcaggtggcttagggggtggttatgtacttcacaagccaattcccttcagccaggagctcctgggtgcatttccgtgtcagaaacagtaccgagtcccaccccctctggaggcacagctgttgcgtcaggcaaggtcacctgcatttatttattgagcagcagtgctgtgtcaggcccagggaccgagcccctctccctgttcccctatggtgtctccgaggccctctgggagggccccacatctggagcagcacctcagagtggacagaaagcattagcgtccacgagctcacccgacgccgagcctgtgaggtgggctgatggtgcccgtctaacccagcgcttcagggaggtcagaatggagccgaacccagggctgtgagcatcacctctggagccctttcactttatgactgcttcctggacgggtggtgggaaggcaggagcctgggtccttaggctgggggcctctctccatccacccacctttccctcattccctctcttggagcagcagccgcccaggcctttagggagggagggtttctggggcccttgggttggagtggggtcgcgttgcattgtgttcatgaccatgtagctcatgttgaaattaaagtttttggcttttctaacctg

SEQ ID NO: 11371 - protein, 269 aa, Homo sapiens; identical to SEQ ID NO: 1897

SEQ ID NO: 11372 - DNA, 1170 bp, Homo sapiens
ccagagccatgtccagaacccagccggccatctccatggtgccaattaccagcaagtgtctttcctgcggcaccgggttcaggcagctactcctgccccagagatgaaggggcagctttgcaaggatccggagccagctcccaggggcccagagccccccacttgaagaggagcttgagcttccctctgcctgcccgtggaaggagctttgccgcagcctgtccgagtccatccgtccgtcccctcctgcctgcccctcttctggtggctctaggaattggggttcagcagggaccaaaggaaaggaggaggtgccgggggcctggcacagacccctaggtgcctcgctccatgggattgcaacaagctagtttaggaaccgctggcggactagaaagaatgttgtcgtctgtgttccggtggaggagctgtggaacctgagtttccagaaccccaaccctagagagcatttgggggtgctgtattggagggggaggctaaggaaagttgggattgggactggtggtgccaagataagggtttctcaaattggagaacccctccttgttgcatgaggtcaatggtcatcctgtctacccaccctgcctccaggccagggggctggggaggcaaatagagcccccctattttagtctttttaaaaaaaacatcctatactaagggcagaacccactgccccggcctcaattaccttggctgaaggaaagatggcggtaggagagaaaagtgaagaggcgtgagtgtaagaactgggagattccttttccagcaggcctgggtagctgccttcccagcccagccctccctggggcctgcgggagcccttttgcatgcaagggaggatggaggctggcccctctttatagaagcacatttctgccacctcccctgggaggcacccagaagcctgccactctttacctagtcctgcttcctggacgggtggtgggaaggcaggagcctgggtccttaggctgggggcctctctccatccacccacctttccctcattccctctcttggagcagcagccgcccaggcctttagggagggagggtttctggggcccttgggttggagtggggtcgcgttgcattgtgttcatgaccatgtagctcatgttgaaattaaagtttttggcttttctaa

SEQ ID NO: 11373 - protein, 32 aa, Homo sapiens
MSRTQPAISMVPITSKCLSCGTGFRQLLLPQR

SEQ ID NO: 11374 - DNA, 1003 bp, Homo sapiens
ctcccttcccctcttctttctttgttctctttcattaaaccccttccccagttttttttttatactttaaaccccgctcctcatggccttggccctttctgaagctgcttcctcttataaaatagcttttgccgaaacatagtttttttttagcagatcccaaaatataatgaaggggatggtgggatatttgtgtctgtgttcttataatatattattattcttccttggttctagaaaaatagataaatatatttttttcaggaaatagtgtggtgtttccagtttgatgttgctgggtggttgagtgagtgaattttcatgtggctgggtgggtttttgcctttttctcttgccctgttcctggtgccttctgatggggctggaatagttgaggtggatggttctaccctttctgccttctgtttgggacccagctggtgttctttggtttgctttcttcaggctctagggctgtgctatccaatacagtaaccacatgcggctgtttaaagttaagccaattaaaatcacataagattaaaaattccttcctcagttgcactaaccacgtttctagaggcgtcactgtatgtagttcatggctactgtactgacagcgagagcatgtccatctgttggacagcactattctagagaactaaactggcttaacgagtcacagcctcagctgtgctgggacgacccttgtcctccctctcctgagaggggaggcctggtggcttagcctgggcaggtcgtgtctcctcctgaccccagtggctgcggtgaggggaaccaccctcccttgctgcaccagtggccattagctcccgtcaccactgcaacccagggtcccagctggctgggtcctcttctgcccccagtgcccttccccttgggctgtgttggagtgagcacctcctctgtaggcacctctcacactgttgtctgttactgattttttttgataaaaagataataaaacctggtactttctaaa

SEQ ID NO: 11375 - protein, 48 aa, Homo sapiens
MATVLTARACPSVGQHYSRELNWLNESQPQLCWDDPCPPSPERGGLVA

SEQ ID NO: 11376 - DNA, 1002 bp, Homo sapiens
ctcccttcccctcttctttctttgttctctttcattaaaccccttccccagttttttttttatactttaaaccccgctcctcatggccttggccctttctgaagctgcttcctcttataaaatagcttttgccgaaacatagtttttttttagcagatcccaaaatataatgaaggggatggtgggatatttgtgtctgtgttcttataatatattattattcttccttggttctagaaaaatagataaatatatttttttcaggaaatagtgtggtgtttccagtttgatgttgctgggtggttgagtgagtgaattttcatgtggctgggtgggtttttgcctttttctcttgccctgttcctggtgccttctgatggggctggaatagttgaggtggatggttctaccctttctgccttctgtttgggacccagctggtgttctttggtttgctttcttcaggctctagggctgtgctatccaatacagtaaccacatgcggctgtttaaagttaagccaattaaaatcacataagattaaaaattccttcctcagttgcactaaccacgtttctagaggcgtcactgtatgtagttcatggctactgtactgacagcgagagcatgtccatctgttggacagcactattctagagaactaaactggcttaacgagtcacagcctcagctgtgctgggacgacccttgtctccctgggtaggggggggggaatgggggagggctgatgaggccccagctggggcctgttgtctgggaccctccctctcctgagaggggaggcctggtggcttagcctgggcaggtcgtgtctcctccactgcaacccagggtcccagctggctgggtcctcttctgcccccagtgcccttccccttgggctgtgttggagtgagcacctcctctgtaggcacctctcacactgttgtctgttactgattttttttgataaaaagataataaaacctggtactttctaaa

SEQ ID NO: 11377 - protein, 57 aa, Homo sapiens [sequence omitted]

SEQ ID NO: 11378 - DNA, 1981 bp, Homo sapiens
cgtgggcatcctctttgccgtcttcctgatcctactgctcatgtaccgtatgaagaagaaggatgaaggcagctatgacctgggcaagaaacccatctacaagaaagcccccaccaatgagttctacgcgtgaagcttgcttgtgggcactggcttggactttagcggggagggaagccaggggattttgaagggtggacattagggtagggtgaggtcaacctaatactgacttgtcagtatctccagctctgattacctttgaagtgttcagaagagacattgtcttctactgttctgccaggttcttcttgagctttgggcctcagttgccctggcagaaaaatggattcaacttggcctttctgaaggcaagactgggattggatcacttcttaaacttccagttaagaatctaggtccgccctcaagcccatactgaccatgcctcatccagagctcctctgaagccagggggctaacggatgttgtgtggagtcctggctggaggtcctcccccagtggccttcctcccttcctttcacagccggtctctctgccaggaaatgggggaaggaactagaaccacctgcaccttgagatgtttctgtaaatgggtacttgtgatcacactacgggaatctctgtggtatatacctggggccattctaggctctttcaagtgacttttggaaatcaaccttttttatttgggggggaggatggggaaaagagctgagagtttatgctgaaatggatttatagaatatttgtaaatctatttttagtgtttgttcgtttttttaactgttcattcctttgtgcagagtgtatatctctgcctgggcaagagtgtggaggtgccgaggtgtcttcattctctcgcacatttccacagcacctgctaagtttgtatttaatgttctttctttgttctctttcattaaaccccttccccagttttttttttatactttaaaccccgctcctcatggccttggccctttctgaagctgcttcctcttataaaatagcttttgccgaaacatagtttttttttagcagatcccaaaatataatgaaggggatggtgggatatttgtgtctgtgttcttataatatattattattcttccttggttctagaaaaatagataaatatatttttttcaggaaatagtgtggtgtttccagtttgatgttgctgggtggttgagtgagtgaattttcatgtggctgggtgggtttttgcctttttctcttgccctgttcctggtgccttctgatggggctggaatagttgaggtggatggttctaccctttctgccttctgtttgggacccagctggtgttctttggtttgctttcttcaggctctagggctgtgctatccaatacagtaaccacatgcggctgtttaaagttaagccaattaaaatcacataagattaaaaattccttcctcagttgcactaaccacgtttctagaggcgtcactgtatgtagttcatggctactgtactgacagcgagagcatgtccatctgttggacagcactattctagagaactaaactggcttaacgagtcacagcctcagctgtgctgggacgacccttgtctccctgggtaggggggggggaatgggggagggctgatgaggccccagctggggcctgttgtctgggaccctccctctcctgagaggggaggcctggtggcttagcctgggcaggtcgtgtctcctcctgaccccagtggctgcggtgaggggaaccaccctcccttgctgcaccagtggccattagctcccgtcaccactgcaacccagggtcccagctggctgggtcctcttctgcccccagtgcccttccccttgggctgtgttggagtgagcacctcctctgtaggcacctctcacactgttgtctgttactgattttttttgataaaaagataataaaacctggtactttctaaa

SEQ ID NO: 11379 - protein, 77 aa, Homo sapiens
MLKWIYRIFVNLFLVFVRFFNCSFLCAECISLPGQECGGAEVSSFSRTFPQHLLSLYLMFFLCSLSLNPFPSFFFIL

SEQ ID NO: 11380 - DNA, 2064 bp, Homo sapiens
cagctctgattgtgggtggcatcgtgggcatcctctttgccgtcttcctgatcctactgctcatgtaccgtatgaagaagaaggatgaaggcagctatgacctgggcaagaaacccatctacaagaaagcccccaccaatgagttctacgcgtgaagcttgcttgtgggcactggcttggactttagcggggagggaagccaggggattttgaagggtggacattagggtagggtgaggtcaacctaatactgacttgtcagtatctccagctctgattacctttgaagtgttcagaaaaatggattcaacttggcctttctgaaggcaagactgggattggatcacttcttaaacttccagttaagaatctaggtccgccctcaagcccatactgaccatgcctcatccagagctcctctgaagccagggggctaacggatgttgtgtggagtcctggctggaggtcctcccccagtggccttcctcccttcctttcacagccggtctctctgccaggaaatgggggaaggaactagaaccacctgcaccttgagatgtttctgtaaatgggtacttgtgatcacactacgggaatctctgtggtatatacctggggccattctaggctctttcaagtgacttttggaaatcaaccttttttatttgggggggaggatggggaaaagagctgagagtttatgctgaaatggatttatagaatatttgtaaatctatttttagtgtttgttcgtttttttaactgttcattcctttgtgcagagtgtatatctctgcctgggcaagagtgtggaggtgccgaggtgtcttcattctctcgcacatttccacagcacctgctaagtttgtatttaatggtttttgtttttgtttttgtttgtttcttgaaaatgagagaagagccggagagatgatttttattaattttttttttttttttttttttttactatttatagctttagatagggcctcccttcccctcttctttctttgttctctttcattaaaccccttccccagttttttttttatactttaaaccccgctcctcatggccttggccctttctgaagctgcttcctcttataaaatagcttttgccgaaacatagtttttttttagcagatcccaaaatataatgaaggggatggtgggatatttgtgtctgtgttcttataatatattattattcttccttggttctagaaaaatagataaatatatttttttcaggaaatagtgtggtgtttccagtttgatgttgctgggtggttgagtgagtgaattttcatgtggctgggtgggtttttgcctttttctcttgccctgttcctggtgccttctgatggggctggaatagttgaggtggatggttctaccctttctgccttctgtttgggacccagctggtgttctttggtttgctttcttcaggctctagggctgtgctatccaatacagtaaccacatgcggctgtttaaagttaagccaattaaaatcacataagattaaaaattccttcctcagttgcactaaccacgtttctagaggcgtcactgtatgtagttcatggctactgtactgacagcgagagcatgtccatctgttggacagcactattctagagaactaaactggcttaacgagtcacagcctcagctgtgctgggacgacccttgtctccctgggtaggggggggggaatgggggagggctgatgaggccccagctggggcctgttgtctgggaccctccctctcctgagaggggaggcctggtggcttagcctgggcaggtcgtgtctcctcctgaccccagtggctgcggtgaggggaaccaccctcccttgctgcaccagtggccattagctcccgtcaccactgcaacccagggtcccagctggctgggtcctcttctgcccccagtgcccttccccttgggctgtgttggagtgagcacctcctctgtaggcacctctcacactgttgtctgttactgattttttttgataaaaagataataaaacctggtactttctaaa

SEQ ID NO: 11381 - protein, 77 aa, Homo sapiens [sequence omitted]

SEQ ID NO: 11382 - DNA, 1886 bp, Homo sapiens
actcgccgcagcctgcgcgccttctccagtccgcggtgccatggcccccgcccgtctgttcgcgctgctgctgttcttcgtaggcggagtcgccgagtcgatccgagagactgaggtcatcgacccccaggacctcctagaaggccgatacttctccggagccctaccagacgatgaggatgtagtggggcccgggcaggaatctgatgactttgagctgtctggctctggagatctggatgacttggaagactccatgatcggccctgaagttgtccatcccttggtgcctctagataaccatatccctgagagggcagggtctgggagccaagtccccaccgaacccaagaaactagaaaccacctgcaccttgagatgtttctgtaaatgggtacttgtgatcacactacgggaatctctgtggtatatacctggggccattctaggctctttcaagtgacttttggaaatcaaccttttttatttgggggggaggatggggaaaagagctgagagtttatgctgaaatggatttatagaatatttgtaaatctatttttagtgtttgttcgtttttttaactgttcattcctttgtgcagagtgtatatctctgcctgggcaagagtgtggaggtgccgaggtgtcttcattctctcgcacatttccacagcacctgctaagtttgtatttaatggtttttgtttttgtttttgtttgtttcttgaaaatgagagaagagccggagagatgatttttattaattttttttttttttttttttttttactatttatagctttagatagggcctcccttcccctcttctttctttgttctctttcattaaaccccttccccagttttttttttatactttaaaccccgctcctcatggccttggccctttctgaagctgcttcctcttataaaatagcttttgccgaaacatagtttttttttagcagatcccaaaatataatgaaggggatggtgggatatttgtgtctgtgttcttataatatattattattcttccttggttctagaaaaatagataaatatatttttttcaggaaatagtgtggtgtttccagtttgatgttgctgggtggttgagtgagtgaattttcatgtggctgggtgggtttttgcctttttctcttgccctgttcctggtgccttctgatggggctggaatagttgaggtggatggttctaccctttctgccttctgtttgggacccagctggtgttctttggtttgctttcttcaggctctagggctgtgctatccaatacagtaaccacatgcggctgtttaaagttaagccaattaaaatcacataagattaaaaattccttcctcagttgcactaaccacgtttctagaggcgtcactgtatgtagttcatggctactgtactgacagcgagagcatgtccatctgttggacagcactattctagagaactaaactggcttaacgagtcacagcctcagctgtgctgggacgacccttgtctccctgggtaggggggggggaatgggggagggctgatgaggccccagctggggcctgttgtctgggaccctccctctcctgagaggggaggcctggtggcttagcctgggcaggtcgtgtctcctcctgaccccagtggctgcggtgaggggaaccaccctcccttgctgcaccagtggccattagctcccgtcaccactgcaacccagggtcccagctggctgggtcctcttctgcccccagtgcccttccccttgggctgtgttggagtgagcacctcctctgtaggcacctctcacactgttgtctgttactgattttttttgataaaaagataataaaacctggtactttctaaa

SEQ ID NO: 11383 - protein, 140 aa, Homo sapiens
MAPARLFALLLFFVGGVAESIRETEVIDPQDLLEGRYFSGALPDDEDVVGPGQESDDFELSGSGDLDDLEDSMIGPEVVHPLVPLDNHIPERAGSGSQVPTEPKKLETTCTLRCFCKWVLVITLRESLWYIPGAILGSFK

SEQ ID NO: 11384 - DNA, 2613 bp, Homo sapiens
actcgccgcagcctgcgcgccttctccagtccgcggtgccatggcccccgcccgtctgttcgcgctgctgctgttcttcgtaggcggagtcgccgagtcgatccgagagactgaggtcatcgacccccaggacctcctagaaggccgatacttctccggagccctaccagacgatgaggatgtagtggggcccgggcaggaatctgatgactttgagctgtctggctctggagatctggatgacttggaagactccatgatcggccctgaagttgtccatcccttggtgcctctagataaccatatccctgagagggcagggtctgggagccaagtccccaccgaacccaagaaactagaggagaatgaggttatccccaagagaatctcacccgttgaagagagtgaggatgtgtccaacaaggtgtcaatgtccagcactgtgcagggcagcaacatctttgagagaacggaggtcctggcagctctgattgtgggtggcatcgtgggcatcctctttgccgtcttcctgatcctactgctcatgtaccgtatgaagaagaaggatgaaggcagctatgacctgggcaagaaacccatctacaagaaagcccccaccaatgagttctacgcgtgaagcttgcttgtgggcactggcttggactttagcggggagggaagccaggggattttgaagggtggacattagggtagggtgaggtcaacctaatactgacttgtcagtatctccagctctgattacctttgaagtgttcagaagagacattgtcttctactgttctgccaggttcttcttgagctttgggcctcagttgccctggcagaaaaatggattcaacttggcctttctgaaggcaagactgggattggatcacttcttaaacttccagttaagaatctaggtccgccctcaagcccatactgaccatgcctcatccagagctcctctgaagccagggggctaacggatgttgtgtggagtcctggctggaggtcctcccccagtggccttcctcccttcctttcacagccggtctctctgccaggaaatgggggaaggaactagaaccacctgcaccttgagatgtttctgtaaatgggtacttgtgatcacactacgggaatctctgtggtatatacctggggccattctaggctctttcaagtgacttttggaaatcaaccttttttatttgggggggaggatggggaaaagagctgagagtttatgctgaaatggatttatagaatatttgtaaatctatttttagtgtttgttcgtttttttaactgttcattcctttgtgcagagtgtatatctctgcctgggcaagagtgtggaggtgccgaggtgtcttcattctctcgcacatttccacagcacctgctaagtttgtatttaatggtttttgtttttgtttttgtttgtttcttgaaaatgagagaagagccggagagatgatttttattaattttttttttttttttttttttttactatttatagctttagatagggcctcccttcccctcttctttctttgttctctttcattaaaccccttccccagttttttttttatactttaaaccccgctcctcatggccttggccctttctgaagctgcttcctcttataaaatagcttttgccgaaacatagtttttttttagcagatcccaaaatataatgaaggggatggtgggatatttgtgtctgtgttcttataatatattattattcttccttggttctagaaaaatagataaatatatttttttcaggaaatagtgtggtgtttccagtttgatgttgctgggtggttgagtgagtgaattttcatgtggctgggtgggtttttgcctttttctcttgccctgttcctggtgccttctgatggggctggaatagttgaggtggatggttctaccctttctgccttctgtttgggacccagctggtgttctttggtttgctttcttcaggctctagggctgtgctatccaatacagtaaccacatgcggctgtttaaagttaagccaattaaaatcacataagattaaaaattccttcctcagttgcactaaccacgtttctagaggcgtcactgtatgtagttcatggctactgtactgacagcgagagcatgtccatctgttggacagcactattctagagaactaaactggcttaacgagtcacagcctcagctgtgctgggacgacccttgtctccctgggtaggggggggggaatgggggagggctgatgaggccccagctggggcctgttgtctgggaccctccctctcctgagaggggaggcctggtggcttagcctgggcaggtcgtgtctcctcctgaccccagtggctgcggtgaggggaaccaccctcccttgctgcaccagtggccattagctcccgtcaccactgcaacccagggtcccagctggctgggtcctcttctgcccccagtgcccttccccttgggctgtgttggagtgagcacctcctctgtaggcacctctcacactgttgtctgttactgattttttttgataaaaagataataaaacctggtactttctaaa

SEQ ID NO: 11385 - protein, 198 aa, Homo sapiens; identical to SEQ ID NO: 1899

SEQ ID NO: 11386 - DNA, 2330 bp, Homo sapiens
actcgccgcagcctgcgcgccttctccagtccgcggtgccatggcccccgcccgtctgttcgcgctgctgctgttcttcgtaggcggagtcgccgagtcgatccgagagactgaggtcatcgacccccaggacctcctagaaggccgatacttctccggagccctaccagacgatgaggatgtagtggggcccgggcaggaattctgattgtgggtggcatcgtgggcatcctctttgccgtcttcctgatcctactgctcatgtaccgtatgaagaagaaggatgaaggcagctatgacctgggcaagaaacccatctacaagaaagcccccaccaatgagttctacgcgtgaagcttgcttgtgggcactggcttggactttagcggggagggaagccaggggattttgaagggtggacattagggtagggtgaggtcaacctaatactgacttgtcagtatctccagctctgattacctttgaagtgttcagaagagacattgtcttctactgttctgccaggttcttcttgagctttgggcctcagttgccctggcagaaaaatggattcaacttggcctttctgaaggcaagactgggattggatcacttcttaaacttccagttaagaatctaggtccgccctcaagcccatactgaccatgcctcatccagagctcctctgaagccagggggctaacggatgttgtgtggagtcctggctggaggtcctcccccagtggccttcctcccttcctttcacagccggtctctctgccaggaaatgggggaaggaactagaaccacctgcaccttgagatgtttctgtaaatgggtacttgtgatcacactacgggaatctctgtggtatatacctggggccattctaggctctttcaagtgacttttggaaatcaaccttttttatttgggggggaggatggggaaaagagctgagagtttatgctgaaatggatttatagaatatttgtaaatctatttttagtgtttgttcgtttttttaactgttcattcctttgtgcagagtgtatatctctgcctgggcaagagtgtggaggtgccgaggtgtcttcattctctcgcacatttccacagcacctgctaagtttgtatttaatggtttttgtttttgtttttgtttgtttcttgaaaatgagagaagagccggagagatgatttttattaattttttttttttttttttttttttactatttatagctttagatagggcctcccttcccctcttctttctttgttctctttcattaaaccccttccccagttttttttttatactttaaaccccgctcctcatggccttggccctttctgaagctgcttcctcttataaaatagcttttgccgaaacatagtttttttttagcagatcccaaaatataatgaaggggatggtgggatatttgtgtctgtgttcttataatatattattattcttccttggttctagaaaaatagataaatatatttttttcaggaaatagtgtggtgtttccagtttgatgttgctgggtggttgagtgagtgaattttcatgtggctgggtgggtttttgcctttttctcttgccctgttcctggtgccttctgatggggctggaatagttgaggtggatggttctaccctttctgccttctgtttgggacccagctggtgttctttggtttgctttcttcaggctctagggctgtgctatccaatacagtaaccacatgcggctgtttaaagttaagccaattaaaatcacataagattaaaaattccttcctcagttgcactaaccacgtttctagaggcgtcactgtatgtagttcatggctactgtactgacagcgagagcatgtccatctgttggacagcactattctagagaactaaactggcttaacgagtcacagcctcagctgtgctgggacgacccttgtctccctgggtaggggggggggaatgggggagggctgatgaggccccagctggggcctgttgtctgggaccctccctctcctgagaggggaggcctggtggcttagcctgggcaggtcgtgtctcctcctgaccccagtggctgcggtgaggggaaccaccctcccttgctgcaccagtggccattagctcccgtcaccactgcaacccagggtcccagctggctgggtcctcttctgcccccagtgcccttccccttgggctgtgttggagtgagcacctcctctgtaggcacctctcacactgttgtctgttactgattttttttgataaaaagataataaaacctggtactttctaaa

SEQ ID NO: 11387 - protein, 55 aa, Homo sapiens
MAPARLFALLLFFVGGVAESIRETEVIDPQDLLEGRYFSGALPDDEDVVGPGQEF

SEQ ID NO: 11388 - DNA, 915 bp, Homo sapiens
actcgccgcagcctgcgcgccttctccagtccgcggtgccatggcccccgcccgtctgttcgcgctgctgctgttcttcgtaggcggagtcgccgagtcgatccgagagactgaggtcatcgacccccaggacctcctagaaggccgatacttctccggagccctaccagacgatgaggatgtagtggggcccgggcaggaatctgatgactttgagctgtctggctctggagatctggatgacttggaagactccatgatcggccctgaagttgtccatcccttggtgcctctagataaccatatccctgagagggcagggtctgggagccaagtccccaccgaacccaagaaactagaggagaatgaggttatccccaagagaatctcacccgttgaagagagtgaggatgtgtccaacaaggtgtcaatgtccagcactgtgcagggcagcaacatctttgagagaacggaggtcctggcaggttgccctagaacattgaaagactacaccttccttatggggtggctctgactgtgcagcctggtggagggagaggaaaaagcacctatcaaagtcttctggaaaataggcattgagtcattcttctgccttaagtctttctcatttattttgcaaaggactttcactgtataagtttggcatctgggagttaatcattaaaagttaatttcccttgtaagtctggaggctccttcgaattgggttagcttcccctccccctactctatcacttggcagccttgtgaccttggctgagaagctttcgaacttgatgagcctcagtttccttatctgtaaaatgggtacagtgataccttctggggttgatataatgagtccatgaaaaataaaatatgaaataactttgcacactataaagggctattccg

SEQ ID NO: 11389 - protein, 164 aa, Homo sapiens
MAPARLFALLLFFVGGVAESIRETEVIDPQDLLEGRYFSGALPDDEDVVGPGQESDDFELSGSGDLDDLEDSMIGPEVVHPLVPLDNHIPERAGSGSQVPTEPKKLEENEVIPKRISPVEESEDVSNKVSMSSTVQGSNIFERTEVLAGCPRTLKDYTFLMGWL

SEQ ID NO: 11390 - DNA, 1066 bp, Homo sapiens
ctggaacaacttacttcccgtctttccacttcagagagggggaacctaggatcaatgaagttgatgggttttcgtctgctggagtaggaataaccgctcctgccgccgtggtcgctggagctttgcctctctaggccggcagcgcctctcctccatggtcctgtctgtcagcgctgttttgggagcccgccggtgaggccgggccacgctcagacacttcgatcgtcgagtctgtcactgggcatggcgggtcagttccgcagctacgtgtgggacccgctgctgatcctgtcgcagatcgtcctcatgcagaccgtgtattacggctcgctgggcctgtggctggcgctggtggacgggctagtgcgaagcagcccctcgctggaccagatgttcgacgccgagatcctgggcttttccacccctccaggccggctctccatgatgtccttcatcctcaacgccctcacctgtgccctgggcttgctgtacttcatccggcgaggaaagcagtgtctggatttcactgtcactgtccatttctttcacctcctgggctgctggttctacagctcccgtttcccctcggcgctgacctggtggctggtccaagccgtgtgcattgcactcatggctgtcatcggggagtacctgtgcatgcggacggagctcaaggagatacccctcaactcagcccctaaatccaatgtctagaatcaggccctttggacatcctgctgacacttgggccccttaacaccttgggctgctcagaccctccagatgaggtccagcccagatctgagaggaaccctggaaatgtgaagtctctgttggtttgggagagatagtgagggcctgtcaaagaaggcaggtagcagtcagcatgacagctgcaagaatgacctctgtctgttgaagccttggtatctgagaggtcaggaaggggacctctttgagggtaataacagaattggaaccatgccactcttgagccacaatacctgtcaccagcctgttgttttaagagagaaaaaaaatcaaggatatctgattggagcaaacc

SEQ ID NO: 11391 - protein, 156 aa, Homo sapiens
MAGQFRSYVWDPLLILSQIVLMQTVYYGSLGLWLALVDGLVRSSPSLDQMFDAEILGFSTPPGRLSMMSFILNALTCALGLLYFIRRGKQCLDFTVTVHFFHLLGCWFYSSRFPSALTWWLVQAVCIALMAVIGEYLCMRTELKEIPLNSAPKSNV

SEQ ID NO: 11392 - DNA, 1724 bp, Homo sapiens
ctggaacaacttacttcccgtctttccacttcagagagggggaacctaggatcaatgaagttgatgggttttcgtctgctggagtaggaataaccgctcctgccgccgtggtcgctggagctttgcctctctaggccggcagcgcctctcctccatggtcctgtctgtcagcgctgttttgggagcccgccggtgaggccgggccacgctcagacacttcgatcgtcgagtctgtcactgggcatggcgggtcagttccgcagctacgtgtgggacccgctgctgatcctgtcgcagatcgtcctcatgcagaccgtgtattacggctcgctgggcctgtggctggcgctggtggacgggctagtgcgaagcagcccctcgctggaccagatgttcgacgccgagatcctgggcttttccacccctccaggccggctctccatgatgtccttcatcctcaacgccctcacctgtgccctgggcttgctgtacttcatccggcgaggaaagcagtgtctggatttcactgtcactgtccatttctttcacctcctgggctgctggttctacagctcccgtttcccctcggcgctgacctggtggctggtccaagccgtgtgcattgcactcatggctgtcatcggggagtacctgtgcatgcggacggagctcaaggagatacccctcaactcagcccctaaatccaatgtctagaatcaggccctttggacatcctgctgacacttgggccccttaacaccttgggctgctcagaccctccagatgaggtccagcccagatctgagaggaaccctggaaatgtgaagtctctgttggtttgggagagatagtgagggcctgtcaaagaaggcaggtagcagtcagcatgacagctgcaagaatgacctctgtctgttgaagccttggtatctgagaggtcaggaaggggacctctttgagggtaataacagaattggaaccatgccactcttgagccacaatacctgtcaccagcctgttgttttaagagagaaaaaaaatcaaggatatctgattggagcaaaccacttctttagtcatctgtcttacccccctgggacagctgttacctttgcagtgttgccgaatcacagcagttacctttgcagtgttgccgaatcacagcagttctgttggagaaacgcttggtttccggatccagagccacagaaagaaatgtaggtgtgaagtattaggctgctgtcagggagaggatggcagatggaggcatcaagcacaaggaaaatgcacaacctgtgccctgttatacacacgttcatgtgcacccaagaacctatgactttcttccagttccttctaccaggtccccatcctgctgccagctctcaacatagcaggccataggacccagagaagaatcccagcgttgctcaaagtctaaccatcataaagacactgcctgtcttctaggaatgaccaggcacccagctcccactggactccaattttttttcctgccttatttagaattctttggcgggaagggtatgatgggttcccagagacaagaagcccaaccttctggcctgggctgtgctgatagtgctgagggagataggaatttgctgctaagatttttctttggggtggagtttcctctgtgaggggcttgcagctatccttcctgtgtatacaaatacagtattttccatggttctgcctgc

SEQ ID NO: 11393 - protein, 156 aa, Homo sapiens; identical to SEQ ID NO: 11391

SEQ ID NO: 11394 - DNA, 2820 bp, Homo sapiens
ctggaacaacttacttcccgtctttccacttcagagagggggaacctaggatcaatgaagttgatgggttttcgtctgctggagtaggaataaccgctcctgccgccgtggtcgctggagctttgcctctctaggccggcagcgcctctcctccatggtcctgtctgtcagcgctgttttgggagcccgccggtgaggccgggccacgctcagacacttcgatcgtcgagtctgtcactgggcatggcgggtcagttccgcagctacgtgtgggacccgctgctgatcctgtcgcagatcgtcctcatgcagaccgtgtattacggctcgctgggcctgtggctggcgctggtggacgggctagtgcgaagcagcccctcgctggaccagatgttcgacgccgagatcctgggcttttccacccctccaggccggctctccatgatgtccttcatcctcaacgccctcacctgtgccctgggcttgctgtacttcatccggcgaggaaagcagtgtctggatttcactgtcactgtccatttctttcacctcctgggctgctggttctacagctcccgtttcccctcggcgctgacctggtggctggtccaagccgtgtgcattgcactcatggctgtcatcggggagtacctgtgcatgcggacggagctcaaggagatacccctcaactcagcccctaaatccaatgtctagaatcaggccctttggacatcctgctgacacttgggccccttaacaccttgggctgctcagaccctccagatgaggtccagcccagatctgagaggaaccctggaaatgtgaagtctctgttggtttgggagagatagtgagggcctgtcaaagaaggcaggtagcagtcagcatgacagctgcaagaatgacctctgtctgttgaagccttggtatctgagaggtcaggaaggggacctctttgagggtaataacagaattggaaccatgccactcttgagccacaatacctgtcaccagcctgttgttttaagagagaaaaaaaatcaaggatatctgattggagcaaaccacttctttagtcatctgtcttacccccctgggacagctgttacctttgcagtgttgccgaatcacagcagttacctttgcagtgttgccgaatcacagcagttctgttggagaaacgcttggtttccggatccagagccacagaaagaaatgtaggtgtgaagtattaggctgctgtcagggagaggatggcagatggaggcatcaagcacaaggaaaatgcacaacctgtgccctgttatacacacgttcatgtgcacccaagaacctatgactttcttccagttccttctaccaggtccccatcctgctgccagctctcaacatagcaggccataggacccagagaagaatcccagcgttgctcaaagtctaaccatcataaagacactgcctgtcttctaggaatgaccaggcacccagctcccactggactccaattttttttcctgccttatttagaattctttggcgggaagggtatgatgggttcccagagacaagaagcccaaccttctggcctgggctgtgctgatagtgctgagggagataggaatttgctgctaagatttttctttggggtggagtttcctctgtgaggggcttgcagctatccttcctgtgtatacaaatacagtattttccatggttctgcctgcacttactttgtaatgccacggttgagattgagagagatcagcgcagccaggcaagggaactttaaagaattattaggccaccttctccctttcctggaccccagagtcattcctccatttggttaaaatactcagtgcagggaactcttacatcctgtctccttcacttgcagcgtcccctgctatgcctcaggtgaaccacataattcttgggtttccgttcctacttgctagtgatttctgaacatgttcaatggagcggcacacagtctagacccacttccgcattgaaaccttcactgttcctctttggtttcttcagagctttcccaagagagctgtcagttttcagctgtcagtaacacaaatgagtttatggtaacacaaatgagttttgctatctctctgagaagctcatctgacctcctgactctcagccctacagagtagggagttgatgctgacaggatgaagatttaggaataaatatgcctgggaagagactgggaaggttctagggtgaggcacctcagtaactcatggtaccttggccaagttggaaggaagcagtttgttaatgaggcacagtaatcctggctgcagggtctaggaggtaagaccagctgggatgaccttccctgggttaatcaatttccctctagacaacacaaactgcaggcatgtgactaactttgaaagaacacccatcatgtggctgctgtcacccttgaccagccgtggtggtggttactccatctgtggttggagcgcctctttgggattcacttcaaggtcttgtgcctatttttctgcatatcttctgtgatgacaaatctctgtcccctgagtgttaatttgatttttagaaatggccaaaagtcacgtgatccaaactttttttcagtaatatggagactgagctgcatggtagttggggatcaaaaatatgtgaccttaatgagatttttatgatttctaaagtaacaataaaagcagtttttagagttgagttccagagagggcagggcaatggcagtgacatgtttgtcattttaataataaataacatctattgagtgcttaagaggtgtccagc

SEQ ID NO: 11395 - protein, 156 aa, Homo sapiens; identical to SEQ ID NO: 11391

SEQ ID NO: 11396 - DNA, 1114 bp, Homo sapiens
ttctgcgcatgtgctcagttcgctatccggctgcttgtacctggttcaggaggttcaggcagaggttgcacccactacgcctgcgcaacctcagccccgcccctccgctgctttccccggaaacgtttctttcctacgcagccgctcctgccgccgtggtcgctggagctttgcctctctaggccggcagcgcctctcctccatggtcctgtctgtcagcgctgttttgggagcccgccggtgaggccgggccacgctcagacacttcgatcgtcgagtctgtcactgggcatggcgggtcagttccgcagctacgtgtgggacccgctgctgatcctgtcgcagatcgtcctcatgcagaccgtgtattacggctcgctgggcctgtggctggcgctggtggacgggctagtgcgaagcagcccctcgctggaccagatgttcgacgccgagatcctgggcttttccacccctccaggccggctctccatgatgtccttcatcctcaacgccctcacctgtgccctgggcttgctgtacttcatccggcgaggaaagcagtgtctggatttcactgtcactgtccatttctttcacctcctgggctgctggttctacagctcccgtttcccctcggcgctgacctggtggctggtccaagccgtgtgcattgcactcatggctgtcatcggggagtacctgtgcatgcggacggagctcaaggagatacccctcaactcagcccctaaatccaatgtctagaatcaggccctttggacatcctgctgacacttgggccccttaacaccttgggctgctcagaccctccagatgaggtccagcccagatctgagaggaaccctggaaatgtgaagtctctgttggtttgggagagatagtgagggcctgtcaaagaaggcaggtagcagtcagcatgacagctgcaagaatgacctctgtctgttgaagccttggtatctgagaggtcaggaaggggacctctttgagggtaataacagaattggaaccatgccactcttgagccacaatacctgtcaccagcctgttgttttaagagagaaaaaaaatcaaggatatctgattggagcaaacc

SEQ ID NO: 11397 - protein, 156 aa, Homo sapiens; identical to SEQ ID NO: 11391

SEQ ID NO: 11398 - DNA, 1772 bp, Homo sapiens
ttctgcgcatgtgctcagttcgctatccggctgcttgtacctggttcaggaggttcaggcagaggttgcacccactacgcctgcgcaacctcagccccgcccctccgctgctttccccggaaacgtttctttcctacgcagccgctcctgccgccgtggtcgctggagctttgcctctctaggccggcagcgcctctcctccatggtcctgtctgtcagcgctgttttgggagcccgccggtgaggccgggccacgctcagacacttcgatcgtcgagtctgtcactgggcatggcgggtcagttccgcagctacgtgtgggacccgctgctgatcctgtcgcagatcgtcctcatgcagaccgtgtattacggctcgctgggcctgtggctggcgctggtggacgggctagtgcgaagcagcccctcgctggaccagatgttcgacgccgagatcctgggcttttccacccctccaggccggctctccatgatgtccttcatcctcaacgccctcacctgtgccctgggcttgctgtacttcatccggcgaggaaagcagtgtctggatttcactgtcactgtccatttctttcacctcctgggctgctggttctacagctcccgtttcccctcggcgctgacctggtggctggtccaagccgtgtgcattgcactcatggctgtcatcggggagtacctgtgcatgcggacggagctcaaggagatacccctcaactcagcccctaaatccaatgtctagaatcaggccctttggacatcctgctgacacttgggccccttaacaccttgggctgctcagaccctccagatgaggtccagcccagatctgagaggaaccctggaaatgtgaagtctctgttggtttgggagagatagtgagggcctgtcaaagaaggcaggtagcagtcagcatgacagctgcaagaatgacctctgtctgttgaagccttggtatctgagaggtcaggaaggggacctctttgagggtaataacagaattggaaccatgccactcttgagccacaatacctgtcaccagcctgttgttttaagagagaaaaaaaatcaaggatatctgattggagcaaaccacttctttagtcatctgtcttacccccctgggacagctgttacctttgcagtgttgccgaatcacagcagttacctttgcagtgttgccgaatcacagcagttctgttggagaaacgcttggtttccggatccagagccacagaaagaaatgtaggtgtgaagtattaggctgctgtcagggagaggatggcagatggaggcatcaagcacaaggaaaatgcacaacctgtgccctgttatacacacgttcatgtgcacccaagaacctatgactttcttccagttccttctaccaggtccccatcctgctgccagctctcaacatagcaggccataggacccagagaagaatcccagcgttgctcaaagtctaaccatcataaagacactgcctgtcttctaggaatgaccaggcacccagctcccactggactccaattttttttcctgccttatttagaattctttggcgggaagggtatgatgggttcccagagacaagaagcccaaccttctggcctgggctgtgctgatagtgctgagggagataggaatttgctgctaagatttttctttggggtggagtttcctctgtgaggggcttgcagctatccttcctgtgtatacaaatacagtattttccatggttctgcctgc

SEQ ID NO: 11399 - protein, 156 aa, Homo sapiens; identical to SEQ ID NO: 11391

SEQ ID NO: 11400 - DNA, 2868 bp, Homo sapiens
ttctgcgcatgtgctcagttcgctatccggctgcttgtacctggttcaggaggttcaggcagaggttgcacccactacgcctgcgcaacctcagccccgcccctccgctgctttccccggaaacgtttctttcctacgcagccgctcctgccgccgtggtcgctggagctttgcctctctaggccggcagcgcctctcctccatggtcctgtctgtcagcgctgttttgggagcccgccggtgaggccgggccacgctcagacacttcgatcgtcgagtctgtcactgggcatggcgggtcagttccgcagctacgtgtgggacccgctgctgatcctgtcgcagatcgtcctcatgcagaccgtgtattacggctcgctgggcctgtggctggcgctggtggacgggctagtgcgaagcagcccctcgctggaccagatgttcgacgccgagatcctgggcttttccacccctccaggccggctctccatgatgtccttcatcctcaacgccctcacctgtgccctgggcttgctgtacttcatccggcgaggaaagcagtgtctggatttcactgtcactgtccatttctttcacctcctgggctgctggttctacagctcccgtttcccctcggcgctgacctggtggctggtccaagccgtgtgcattgcactcatggctgtcatcggggagtacctgtgcatgcggacggagctcaaggagatacccctcaactcagcccctaaatccaatgtctagaatcaggccctttggacatcctgctgacacttgggccccttaacaccttgggctgctcagaccctccagatgaggtccagcccagatctgagaggaaccctggaaatgtgaagtctctgttggtttgggagagatagtgagggcctgtcaaagaaggcaggtagcagtcagcatgacagctgcaagaatgacctctgtctgttgaagccttggtatctgagaggtcaggaaggggacctctttgagggtaataacagaattggaaccatgccactcttgagccacaatacctgtcaccagcctgttgttttaagagagaaaaaaaatcaaggatatctgattggagcaaaccacttctttagtcatctgtcttacccccctgggacagctgttacctttgcagtgttgccgaatcacagcagttacctttgcagtgttgccgaatcacagcagttctgttggagaaacgcttggtttccggatccagagccacagaaagaaatgtaggtgtgaagtattaggctgctgtcagggagaggatggcagatggaggcatcaagcacaaggaaaatgcacaacctgtgccctgttatacacacgttcatgtgcacccaagaacctatgactttcttccagttccttctaccaggtccccatcctgctgccagctctcaacatagcaggccataggacccagagaagaatcccagcgttgctcaaagtctaaccatcataaagacactgcctgtcttctaggaatgaccaggcacccagctcccactggactccaattttttttcctgccttatttagaattctttggcgggaagggtatgatgggttcccagagacaagaagcccaaccttctggcctgggctgtgctgatagtgctgagggagataggaatttgctgctaagatttttctttggggtggagtttcctctgtgaggggcttgcagctatccttcctgtgtatacaaatacagtattttccatggttctgcctgcacttactttgtaatgccacggttgagattgagagagatcagcgcagccaggcaagggaactttaaagaattattaggccaccttctccctttcctggaccccagagtcattcctccatttggttaaaatactcagtgcagggaactcttacatcctgtctccttcacttgcagcgtcccctgctatgcctcaggtgaaccacataattcttgggtttccgttcctacttgctagtgatttctgaacatgttcaatggagcggcacacagtctagacccacttccgcattgaaaccttcactgttcctctttggtttcttcagagctttcccaagagagctgtcagttttcagctgtcagtaacacaaatgagtttatggtaacacaaatgagttttgctatctctctgagaagctcatctgacctcctgactctcagccctacagagtagggagttgatgctgacaggatgaagatttaggaataaatatgcctgggaagagactgggaaggttctagggtgaggcacctcagtaactcatggtaccttggccaagttggaaggaagcagtttgttaatgaggcacagtaatcctggctgcagggtctaggaggtaagaccagctgggatgaccttccctgggttaatcaatttccctctagacaacacaaactgcaggcatgtgactaactttgaaagaacacccatcatgtggctgctgtcacccttgaccagccgtggtggtggttactccatctgtggttggagcgcctctttgggattcacttcaaggtcttgtgcctatttttctgcatatcttctgtgatgacaaatctctgtcccctgagtgttaatttgatttttagaaatggccaaaagtcacgtgatccaaactttttttcagtaatatggagactgagctgcatggtagttggggatcaaaaatatgtgaccttaatgagatttttatgatttctaaagtaacaataaaagcagtttttagagttgagttccagagagggcagggcaatggcagtgacatgtttgtcattttaataataaataacatctattgagtgcttaagaggtgtccagc

SEQ ID NO: 11401 - protein, 156 aa, Homo sapiens; identical to SEQ ID NO: 11391

SEQ ID NO: 11402 - DNA, 1485 bp, Homo sapiens
ttctgcgcatgtgctcagttcgctatccggctgcttgtacctggttcaggaggttcaggcagaggttgcacccactacgcctgcgcaacctcagccccgcccctccgctgctttccccggaaacgtttctttcctacgcagccgctcctgccgccgtggtcgctggagctttgcctctctaggccggcagcgcctctcctccatggtcctgtctgtcagcgctgttttgggagcccgccggtgaggccgggccacgctcagacacttcgatcgtcgagtctgtcactgggcatggcgggtcagttccgcagctacgtgtgggacccgctgctgatcctgtcgcagatcgtcctcatgcagaccgtgtattacggctcgctgggcctgtggctggcgctggtggacgggctagtgcgaagcagcccctcgctggaccagatgttcgacgccgagatcctgggcttttccacccctccaggccggctctccatgatgtccttcatcctcaacgccctcacctggagctgacatggacccaaatcctcgggccgccctggagcgccagcagctccgccttcgggagcggcaaaaattcttcgaggacattttacagccagagacagagtttgtctttcctctgtcccatctgcatctcgagtcgcagagaccccccataggtagtatctcatccatggaagtgaatgtggacacactggagcaagtagaacttattgaccttggggacccggatgcagcagatgtgttcttgccttgcgaagatcctccaccaaccccccagtcgtctgggatggacaaccatttggaggagctgagcctgccggtgcctacatcagacaggaccacatctaggacctcctcctcctcctcctccgactcctccaccaacctgcatagcccaaatccaagtgatgatggagcagatacgcccttggcacagtcggatgaagaggaggaaaggggtgatggaggggcagagcctggagcctgcagctagcagtgggcccctgcctacagactgaccacgctggctattctccacatgagaccacaggcccagccagagcctgtcgggagaagaccagactctttacttgcagtaggcaccagaggtgggaaggatggtgggattgtgtacctttctaagaattaaccctctcctgctttactgctaattttttcctgctgcaaccctcccaccagtttttggcttactcctgagatatgatttgcaaatgaggagagagaagatgaggttggacaagatgccactgcttttcttagcactcttccctcccctaaaccatcccgtagtcttctaatacagtctctcagacaagtgtctctagatggatgtgaactccttaactcatcaagtaaggtggtactcaagccatgctgcctccttacatcctttttggaacagagcacggtataaataataaactaataataatatgccaacca

SEQ ID NO: 11403 - protein, 161 aa, Homo sapiens
MDPNPRAALERQQLRLRERQKFFEDILQPETEFVFPLSHLHLESQRPPIGSISSMEVNVDTLEQVELIDLGDPDAADVFLPCEDPPPTPQSSGMDNHLEELSLPVPTSDRTTSRTSSSSSSDSSTNLHSPNPSDDGADTPLAQSDEEEERGDGGAEPGACS

SEQ ID NO: 11404 - DNA, 1311 bp, Homo sapiens
agttcgctatccggctgcttgtacctggttcaggaggttcaggcagaggttgcacccactacgcctgcgcaacctcagccccgcccctccgctgctttccccggaaacgtttctttcctacgcagccgctcctgccgccgtggtcgctggagctttgcctctctaggccggcagcgcctctcctccatggtcctgtctgtcagcgctgttttgggagcccgccggtgaggccgggccacgctcagacacttcgatcgtcgagtctgtcactggtgagtagaccccagaggagctcgtgtacgggcgggggccgcgcaggcggaatgggctggatttcccctcactctgagaatgggtctgtctgccccgccttccccctgactcttggaatgggctcaccccttggttccagtccctcctcccgggcggggcgacgttgccatggagacaggccgctggctgaggcccggctcgtgtccctgcagggcatggcgggtcagttccgcagctacgtgtgggacccgctgctgatcctgtcgcagatcgtcctcatgcagaccgtgtattacggctcgctgggcctgtggctggcgctggtggacgggctagtgcgaagcagcccctcgctggaccagatgttcgacgccgagatcctgggcttttccacccctccaggccggctctccatgatgtccttcatcctcaacgccctcacctgtgccctgggcttgctgtacttcatccggcgaggaaagcagtgtctggatttcactgtcactgtccatttctttcacctcctgggctgctggttctacagctcccgtttcccctcggcgctgacctggtggctggtccaagccgtgtgcattgcactcatggctgtcatcggggagtacctgtgcatgcggacggagctcaaggagatacccctcaactcagcccctaaatccaatgtctagaatcaggccctttggacatcctgctgacacttgggccccttaacaccttgggctgctcagaccctccagatgaggtccagcccagatctgagaggaaccctggaaatgtgaagtctctgttggtttgggagagatagtgagggcctgtcaaagaaggcaggtagcagtcagcatgacagctgcaagaatgacctctgtctgttgaagccttggtatctgagaggtcaggaaggggacctctttgagggtaataacagaattggaaccatgccactcttgagccacaatacctgtcaccagcctgttgttttaagagagaaaaaaaatcaaggatatctgattggagcaaacc

SEQ ID NO: 11405 - protein, 211 aa, Homo sapiens
MGWISPHSENGSVCPAFPLTLGMGSPLGSSPSSRAGRRCHGDRPLAEARLVSLQGMAGQFRSYVWDPLLILSQIVLMQTVYYGSLGLWLALVDGLVRSSPSLDQMFDAEILGFSTPPGRLSMMSFILNALTCALGLLYFIRRGKQCLDFTVTVHFFHLLGCWFYSSRFPSALTWWLVQAVCIALMAVIGEYLCMRTELKEIPLNSAPKSNV

SEQ ID NO: 11406 - DNA, 1969 bp, Homo sapiens
agttcgctatccggctgcttgtacctggttcaggaggttcaggcagaggttgcacccactacgcctgcgcaacctcagccccgcccctccgctgctttccccggaaacgtttctttcctacgcagccgctcctgccgccgtggtcgctggagctttgcctctctaggccggcagcgcctctcctccatggtcctgtctgtcagcgctgttttgggagcccgccggtgaggccgggccacgctcagacacttcgatcgtcgagtctgtcactggtgagtagaccccagaggagctcgtgtacgggcgggggccgcgcaggcggaatgggctggatttcccctcactctgagaatgggtctgtctgccccgccttccccctgactcttggaatgggctcaccccttggttccagtccctcctcccgggcggggcgacgttgccatggagacaggccgctggctgaggcccggctcgtgtccctgcagggcatggcgggtcagttccgcagctacgtgtgggacccgctgctgatcctgtcgcagatcgtcctcatgcagaccgtgtattacggctcgctgggcctgtggctggcgctggtggacgggctagtgcgaagcagcccctcgctggaccagatgttcgacgccgagatcctgggcttttccacccctccaggccggctctccatgatgtccttcatcctcaacgccctcacctgtgccctgggcttgctgtacttcatccggcgaggaaagcagtgtctggatttcactgtcactgtccatttctttcacctcctgggctgctggttctacagctcccgtttcccctcggcgctgacctggtggctggtccaagccgtgtgcattgcactcatggctgtcatcggggagtacctgtgcatgcggacggagctcaaggagatacccctcaactcagcccctaaatccaatgtctagaatcaggccctttggacatcctgctgacacttgggccccttaacaccttgggctgctcagaccctccagatgaggtccagcccagatctgagaggaaccctggaaatgtgaagtctctgttggtttgggagagatagtgagggcctgtcaaagaaggcaggtagcagtcagcatgacagctgcaagaatgacctctgtctgttgaagccttggtatctgagaggtcaggaaggggacctctttgagggtaataacagaattggaaccatgccactcttgagccacaatacctgtcaccagcctgttgttttaagagagaaaaaaaatcaaggatatctgattggagcaaaccacttctttagtcatctgtcttacccccctgggacagctgttacctttgcagtgttgccgaatcacagcagttacctttgcagtgttgccgaatcacagcagttctgttggagaaacgcttggtttccggatccagagccacagaaagaaatgtaggtgtgaagtattaggctgctgtcagggagaggatggcagatggaggcatcaagcacaaggaaaatgcacaacctgtgccctgttatacacacgttcatgtgcacccaagaacctatgactttcttccagttccttctaccaggtccccatcctgctgccagctctcaacatagcaggccataggacccagagaagaatcccagcgttgctcaaagtctaaccatcataaagacactgcctgtcttctaggaatgaccaggcacccagctcccactggactccaattttttttcctgccttatttagaattctttggcgggaagggtatgatgggttcccagagacaagaagcccaaccttctggcctgggctgtgctgatagtgctgagggagataggaatttgctgctaagatttttctttggggtggagtttcctctgtgaggggcttgcagctatccttcctgtgtatacaaatacagtattttccatggttctgcctgc

SEQ ID NO: 11407 - protein, 211 aa, Homo sapiens; identical to SEQ ID NO: 11405

SEQ ID NO: 11408 - DNA, 3065 bp, Homo sapiens
agttcgctatccggctgcttgtacctggttcaggaggttcaggcagaggttgcacccactacgcctgcgcaacctcagccccgcccctccgctgctttccccggaaacgtttctttcctacgcagccgctcctgccgccgtggtcgctggagctttgcctctctaggccggcagcgcctctcctccatggtcctgtctgtcagcgctgttttgggagcccgccggtgaggccgggccacgctcagacacttcgatcgtcgagtctgtcactggtgagtagaccccagaggagctcgtgtacgggcgggggccgcgcaggcggaatgggctggatttcccctcactctgagaatgggtctgtctgccccgccttccccctgactcttggaatgggctcaccccttggttccagtccctcctcccgggcggggcgacgttgccatggagacaggccgctggctgaggcccggctcgtgtccctgcagggcatggcgggtcagttccgcagctacgtgtgggacccgctgctgatcctgtcgcagatcgtcctcatgcagaccgtgtattacggctcgctgggcctgtggctggcgctggtggacgggctagtgcgaagcagcccctcgctggaccagatgttcgacgccgagatcctgggcttttccacccctccaggccggctctccatgatgtccttcatcctcaacgccctcacctgtgccctgggcttgctgtacttcatccggcgaggaaagcagtgtctggatttcactgtcactgtccatttctttcacctcctgggctgctggttctacagctcccgtttcccctcggcgctgacctggtggctggtccaagccgtgtgcattgcactcatggctgtcatcggggagtacctgtgcatgcggacggagctcaaggagatacccctcaactcagcccctaaatccaatgtctagaatcaggccctttggacatcctgctgacacttgggccccttaacaccttgggctgctcagaccctccagatgaggtccagcccagatctgagaggaaccctggaaatgtgaagtctctgttggtttgggagagatagtgagggcctgtcaaagaaggcaggtagcagtcagcatgacagctgcaagaatgacctctgtctgttgaagccttggtatctgagaggtcaggaaggggacctctttgagggtaataacagaattggaaccatgccactcttgagccacaatacctgtcaccagcctgttgttttaagagagaaaaaaaatcaaggatatctgattggagcaaaccacttctttagtcatctgtcttacccccctgggacagctgttacctttgcagtgttgccgaatcacagcagttacctttgcagtgttgccgaatcacagcagttctgttggagaaacgcttggtttccggatccagagccacagaaagaaatgtaggtgtgaagtattaggctgctgtcagggagaggatggcagatggaggcatcaagcacaaggaaaatgcacaacctgtgccctgttatacacacgttcatgtgcacccaagaacctatgactttcttccagttccttctaccaggtccccatcctgctgccagctctcaacatagcaggccataggacccagagaagaatcccagcgttgctcaaagtctaaccatcataaagacactgcctgtcttctaggaatgaccaggcacccagctcccactggactccaattttttttcctgccttatttagaattctttggcgggaagggtatgatgggttcccagagacaagaagcccaaccttctggcctgggctgtgctgatagtgctgagggagataggaatttgctgctaagatttttctttggggtggagtttcctctgtgaggggcttgcagctatccttcctgtgtatacaaatacagtattttccatggttctgcctgcacttactttgtaatgccacggttgagattgagagagatcagcgcagccaggcaagggaactttaaagaattattaggccaccttctccctttcctggaccccagagtcattcctccatttggttaaaatactcagtgcagggaactcttacatcctgtctccttcacttgcagcgtcccctgctatgcctcaggtgaaccacataattcttgggtttccgttcctacttgctagtgatttctgaacatgttcaatggagcggcacacagtctagacccacttccgcattgaaaccttcactgttcctctttggtttcttcagagctttcccaagagagctgtcagttttcagctgtcagtaacacaaatgagtttatggtaacacaaatgagttttgctatctctctgagaagctcatctgacctcctgactctcagccctacagagtagggagttgatgctgacaggatgaagatttaggaataaatatgcctgggaagagactgggaaggttctagggtgaggcacctcagtaactcatggtaccttggccaagttggaaggaagcagtttgttaatgaggcacagtaatcctggctgcagggtctaggaggtaagaccagctgggatgaccttccctgggttaatcaatttccctctagacaacacaaactgcaggcatgtgactaactttgaaagaacacccatcatgtggctgctgtcacccttgaccagccgtggtggtggttactccatctgtggttggagcgcctctttgggattcacttcaaggtcttgtgcctatttttctgcatatcttctgtgatgacaaatctctgtcccctgagtgttaatttgatttttagaaatggccaaaagtcacgtgatccaaactttttttcagtaatatggagactgagctgcatggtagttggggatcaaaaatatgtgaccttaatgagatttttatgatttctaaagtaacaataaaagcagtttttagagttgagttccagagagggcagggcaatggcagtgacatgtttgtcattttaataataaataacatctattgagtgcttaagaggtgtccagc

SEQ ID NO: 11409 - protein, 211 aa, Homo sapiens; identical to SEQ ID NO: 11405

SEQ ID NO: 11410 - DNA, 1009 bp, Homo sapiens
cttgtacctggttcaggaggttcaggcagaggttgcacccactacgcctgcgcaacctcagccccgcccctccgctgctttccccggaaacgtttctttcctacgcagccgctcctgccgccgtggtcgctggagctttgcctctctaggccggcagcgcctctcctccatggtcctgtctgtcagcgctgttttgggagcccgccggtgaggccgggccacgctcagacacttcgatcgtcgagtctgtcactgggcatggcgggtcagttccgcagctacgtgtgggacccgctgctgatcctgtcgcagatcgtcctcatgcagaccgtgtattacggctcgctgggcctgtggctggcgctggtggacgggctagtgcgaagcagcccctcgctggaccagatgttcgacgccgagatcctgggcttttccacccctccaggccggctctccatgatgtccttcatcctcaacgccctcacctggtgagtatcaccagttttgctatccagcttttgggctcttagtgctgggactaacttcctaagtttgaacatgagacaggctggcacttgtttctggggagtggtggagtaaagtgggtgacagaggccagttctgggaccagctgtataatgggcctccttccattgctgttttgacttacctggaaagctcttatgtcactatgtttgtgctgcctgcaagacaacttccatctcagataacttccctgatgtggagtgagctgagaaaggattcgaccgagaggcaggagaactgggttctgttcttggtttgtgtgccattggccaagttacttgccatgggcctcaggctcctcttttgtccatgagggtttggactcagtgatgtctaaggtcacacgtaatcattgcctgtctcttaagaggcagtttagcatagtggtcaaggtgtcaggctctggaggcagactcatttggcattgaacctcagctttactactagtctagtgactttggac

SEQ ID NO: 11411 - protein, 77 aa, Homo sapiens
MAGQFRSYVWDPLLILSQIVLMQTVYYGSLGLWLALVDGLVRSSPSLDQMFDAEILGFSTPPGRLSMMSFILNALTW

SEQ ID NO: 11412 - DNA, 1153 bp, Homo sapiens
cttgtacctggttcaggaggttcaggcagaggttgcacccactacgcctgcgcaacctcagccccgcccctccgctgctttccccggaaacgtttctttcctacgcagccgctcctgccgccgtggtcgctggagctttgcctctctaggccggcagcgcctctcctccatggtcctgtctgtcagcgctgttttgggagcccgccggtgaggccgggccacgctcagacacttcgatcgtcgagtctgtcactgggcatggcgggtcagttccgcagctacgtgtgggacccgctgctgatcctgtcgcagatcgtcctcatgcagaccgtgtattacggctcgctgggcctgtggctggcgctggtggacgggctagtgcgaagcagcccctcgctggaccagatgttcgacgccgaggaggcttgctgagatcctggggctctgccaagtcacttctccagtatatttccatttgtgattccccctcagatcctgggcttttccacccctccaggccggctctccatgatgtccttcatcctcaacgccctcacctgtgccctgggcttgctgtacttcatccggcgaggaaagcagtgtctggatttcactgtcactgtccatttctttcacctcctgggctgctggttctacagctcccgtttcccctcggcgctgacctggtggctggtccaagccgtgtgcattgcactcatggctgtcatcggggagtacctgtgcatgcggacggagctcaaggagatacccctcaactcagcccctaaatccaatgtctagaatcaggccctttggacatcctgctgacacttgggccccttaacaccttgggctgctcagaccctccagatgaggtccagcccagatctgagaggaaccctggaaatgtgaagtctctgttggtttgggagagatagtgagggcctgtcaaagaaggcaggtagcagtcagcatgacagctgcaagaatgacctctgtctgttgaagccttggtatctgagaggtcaggaaggggacctctttgagggtaataacagaattggaaccatgccactcttgagccacaatacctgtcaccagcctgttgttttaagagagaaaaaaaatcaaggatatctgattggagcaaacc

SEQ ID NO: 11413 - protein, 90 aa, Homo sapiens
MMSFILNALTCALGLLYFIRRGKQCLDFTVTVHFFHLLGCWFYSSRFPSALTWWLVQAVCIALMAVIGEYLCMRTELKEIPLNSAPKSNV

SEQ ID NO: 11414 - DNA, 1024 bp, Homo sapiens
cttgtacctggttcaggaggttcaggcagaggttgcacccactacgcctgcgcaacctcagccccgcccctccgctgctttccccggaaacgtttctttcctacgcagccgctcctgccgccgtggtcgctggagctttgcctctctaggccggcagcgcctctcctccatggtcctgtctgtcagcgctgttttgggagcccgccggtgaggccgggccacgctcagacacttcgatcgtcgagtctgtcactgatcgtcctcatgcagaccgtgtattacggctcgctgggcctgtggctggcgctggtggacgggctagtgcgaagcagcccctcgctggaccagatgttcgacgccgagatcctgggcttttccacccctccaggccggctctccatgatgtccttcatcctcaacgccctcacctgtgccctgggcttgctgtacttcatccggcgaggaaagcagtgtctggatttcactgtcactgtccatttctttcacctcctgggctgctggttctacagctcccgtttcccctcggcgctgacctggtggctggtccaagccgtgtgcattgcactcatggctgtcatcggggagtacctgtgcatgcggacggagctcaaggagatacccctcaactcagcccctaaatccaatgtctagaatcaggccctttggacatcctgctgacacttgggccccttaacaccttgggctgctcagaccctccagatgaggtccagcccagatctgagaggaaccctggaaatgtgaagtctctgttggtttgggagagatagtgagggcctgtcaaagaaggcaggtagcagtcagcatgacagctgcaagaatgacctctgtctgttgaagccttggtatctgagaggtcaggaaggggacctctttgagggtaataacagaattggaaccatgccactcttgagccacaatacctgtcaccagcctgttgttttaagagagaaaaaaaatcaaggatatctgattggagcaaacc

SEQ ID NO: 11415 - protein, 135 aa, Homo sapiens
MQTVYYGSLGLWLALVDGLVRSSPSLDQMFDAEILGFSTPPGRLSMMSFILNALTCALGLLYFIRRGKQCLDFTVTVHFFHLLGCWFYSSRFPSALTWWLVQAVCIALMAVIGEYLCMRTELKEIPLNSAPKSNV

SEQ ID NO: 11416 - DNA, 696 bp, Homo sapiens
cttgtacctggttcaggaggttcaggcagaggttgcacccactacgcctgcgcaacctcagccccgcccctccgctgctttccccggaaacgtttctttcctacgcagccgctcctgccgccgtggtcgctggagctttgcctctctaggccggcagcgcctctcctccatggtcctgtctgtcagcgctgttttgggagcccgccggtgaggccgggccacgctcagacacttcgatcgtcgagtctgtcactgggcatggcgggtcagttccgcagctacgtgtgggacccgctgctgatcctgtcgcagatcgtcctcatgcagaccgtgtattacggctcgctgggcctgctgccagctctcaacatagcaggccataggacccagagaagaatcccagcgttgctcaaagtctaaccatcataaagacactgcctgtcttctaggaatgaccaggcacccagctcccactggactccaattttttttcctgccttatttagaattctttggcgggaagggtatgatgggttcccagagacaagaagcccaaccttctggcctgggctgtgctgatagtgctgagggagataggaatttgctgctaagatttttctttggggtggagtttcctctgtgaggggcttgcagctatccttcctgtgtatacaaatacagtattttccatggttc

SEQ ID NO: 11417 - protein, 53 aa, Homo sapiens
MAGQFRSYVWDPLLILSQIVLMQTVYYGSLGLLPALNIAGHRTQRRIPALLKV

SEQ ID NO: 11418 - DNA, 1811 bp, Homo sapiens
cttgtacctggttcaggaggttcaggcagaggttgcacccactacgcctgcgcaacctcagccccgcccctccgctgctttccccggaaacgtttctttcctacgcagccgctcctgccgccgtggtcgctggagctttgcctctctaggccggcagcgcctctcctccatggtcctgtctgtcagcgctgttttgggagcccgccggtgaggccgggccacgctcagacacttcgatcgtcgagtctgtcactgggcatggcgggtcagttccgcagctacgtgtgggacccgctgctgatcctgtcgcagatcgtcctcatgcagaccgtgtattacggctcgctgggcctgtggctggcgctggtggacgggctagtgcgaagcagcccctcgctggaccagatgttcgacgccgaggaggcttgctgagatcctggggctctgccaagtcacttctccagtatatttccatttgtgattccccctcagatcctgggcttttccacccctccaggccggctctccatgatgtccttcatcctcaacgccctcacctgtgccctgggcttgctgtacttcatccggcgaggaaagcagtgtctggatttcactgtcactgtccatttctttcacctcctgggctgctggttctacagctcccgtttcccctcggcgctgacctggtggctggtccaagccgtgtgcattgcactcatggctgtcatcggggagtacctgtgcatgcggacggagctcaaggagatacccctcaactcagcccctaaatccaatgtctagaatcaggccctttggacatcctgctgacacttgggccccttaacaccttgggctgctcagaccctccagatgaggtccagcccagatctgagaggaaccctggaaatgtgaagtctctgttggtttgggagagatagtgagggcctgtcaaagaaggcaggtagcagtcagcatgacagctgcaagaatgacctctgtctgttgaagccttggtatctgagaggtcaggaaggggacctctttgagggtaataacagaattggaaccatgccactcttgagccacaatacctgtcaccagcctgttgttttaagagagaaaaaaaatcaaggatatctgattggagcaaaccacttctttagtcatctgtcttacccccctgggacagctgttacctttgcagtgttgccgaatcacagcagttacctttgcagtgttgccgaatcacagcagttctgttggagaaacgcttggtttccggatccagagccacagaaagaaatgtaggtgtgaagtattaggctgctgtcagggagaggatggcagatggaggcatcaagcacaaggaaaatgcacaacctgtgccctgttatacacacgttcatgtgcacccaagaacctatgactttcttccagttccttctaccaggtccccatcctgctgccagctctcaacatagcaggccataggacccagagaagaatcccagcgttgctcaaagtctaaccatcataaagacactgcctgtcttctaggaatgaccaggcacccagctcccactggactccaattttttttcctgccttatttagaattctttggcgggaagggtatgatgggttcccagagacaagaagcccaaccttctggcctgggctgtgctgatagtgctgagggagataggaatttgctgctaagatttttctttggggtggagtttcctctgtgaggggcttgcagctatccttcctgtgtatacaaatacagtattttccatggttctgcctgc

SEQ ID NO: 11419 - protein, 90 aa, Homo sapiens; identical to SEQ ID NO: 11413

SEQ ID NO: 11420 - DNA, 1682 bp, Homo sapiens
cttgtacctggttcaggaggttcaggcagaggttgcacccactacgcctgcgcaacctcagccccgcccctccgctgctttccccggaaacgtttctttcctacgcagccgctcctgccgccgtggtcgctggagctttgcctctctaggccggcagcgcctctcctccatggtcctgtctgtcagcgctgttttgggagcccgccggtgaggccgggccacgctcagacacttcgatcgtcgagtctgtcactgatcgtcctcatgcagaccgtgtattacggctcgctgggcctgtggctggcgctggtggacgggctagtgcgaagcagcccctcgctggaccagatgttcgacgccgagatcctgggcttttccacccctccaggccggctctccatgatgtccttcatcctcaacgccctcacctgtgccctgggcttgctgtacttcatccggcgaggaaagcagtgtctggatttcactgtcactgtccatttctttcacctcctgggctgctggttctacagctcccgtttcccctcggcgctgacctggtggctggtccaagccgtgtgcattgcactcatggctgtcatcggggagtacctgtgcatgcggacggagctcaaggagatacccctcaactcagcccctaaatccaatgtctagaatcaggccctttggacatcctgctgacacttgggccccttaacaccttgggctgctcagaccctccagatgaggtccagcccagatctgagaggaaccctggaaatgtgaagtctctgttggtttgggagagatagtgagggcctgtcaaagaaggcaggtagcagtcagcatgacagctgcaagaatgacctctgtctgttgaagccttggtatctgagaggtcaggaaggggacctctttgagggtaataacagaattggaaccatgccactcttgagccacaatacctgtcaccagcctgttgttttaagagagaaaaaaaatcaaggatatctgattggagcaaaccacttctttagtcatctgtcttacccccctgggacagctgttacctttgcagtgttgccgaatcacagcagttacctttgcagtgttgccgaatcacagcagttctgttggagaaacgcttggtttccggatccagagccacagaaagaaatgtaggtgtgaagtattaggctgctgtcagggagaggatggcagatggaggcatcaagcacaaggaaaatgcacaacctgtgccctgttatacacacgttcatgtgcacccaagaacctatgactttcttccagttccttctaccaggtccccatcctgctgccagctctcaacatagcaggccataggacccagagaagaatcccagcgttgctcaaagtctaaccatcataaagacactgcctgtcttctaggaatgaccaggcacccagctcccactggactccaattttttttcctgccttatttagaattctttggcgggaagggtatgatgggttcccagagacaagaagcccaaccttctggcctgggctgtgctgatagtgctgagggagataggaatttgctgctaagatttttctttggggtggagtttcctctgtgaggggcttgcagctatccttcctgtgtatacaaatacagtattttccatggttctgcctgc

SEQ ID NO: 11421 - protein, 135 aa, Homo sapiens; identical to SEQ ID NO: 11415

SEQ ID NO: 11422 - DNA, 2778 bp, Homo sapiens
cttgtacctggttcaggaggttcaggcagaggttgcacccactacgcctgcgcaacctcagccccgcccctccgctgctttccccggaaacgtttctttcctacgcagccgctcctgccgccgtggtcgctggagctttgcctctctaggccggcagcgcctctcctccatggtcctgtctgtcagcgctgttttgggagcccgccggtgaggccgggccacgctcagacacttcgatcgtcgagtctgtcactgatcgtcctcatgcagaccgtgtattacggctcgctgggcctgtggctggcgctggtggacgggctagtgcgaagcagcccctcgctggaccagatgttcgacgccgagatcctgggcttttccacccctccaggccggctctccatgatgtccttcatcctcaacgccctcacctgtgccctgggcttgctgtacttcatccggcgaggaaagcagtgtctggatttcactgtcactgtccatttctttcacctcctgggctgctggttctacagctcccgtttcccctcggcgctgacctggtggctggtccaagccgtgtgcattgcactcatggctgtcatcggggagtacctgtgcatgcggacggagctcaaggagatacccctcaactcagcccctaaatccaatgtctagaatcaggccctttggacatcctgctgacacttgggccccttaacaccttgggctgctcagaccctccagatgaggtccagcccagatctgagaggaaccctggaaatgtgaagtctctgttggtttgggagagatagtgagggcctgtcaaagaaggcaggtagcagtcagcatgacagctgcaagaatgacctctgtctgttgaagccttggtatctgagaggtcaggaaggggacctctttgagggtaataacagaattggaaccatgccactcttgagccacaatacctgtcaccagcctgttgttttaagagagaaaaaaaatcaaggatatctgattggagcaaaccacttctttagtcatctgtcttacccccctgggacagctgttacctttgcagtgttgccgaatcacagcagttacctttgcagtgttgccgaatcacagcagttctgttggagaaacgcttggtttccggatccagagccacagaaagaaatgtaggtgtgaagtattaggctgctgtcagggagaggatggcagatggaggcatcaagcacaaggaaaatgcacaacctgtgccctgttatacacacgttcatgtgcacccaagaacctatgactttcttccagttccttctaccaggtccccatcctgctgccagctctcaacatagcaggccataggacccagagaagaatcccagcgttgctcaaagtctaaccatcataaagacactgcctgtcttctaggaatgaccaggcacccagctcccactggactccaattttttttcctgccttatttagaattctttggcgggaagggtatgatgggttcccagagacaagaagcccaaccttctggcctgggctgtgctgatagtgctgagggagataggaatttgctgctaagatttttctttggggtggagtttcctctgtgaggggcttgcagctatccttcctgtgtatacaaatacagtattttccatggttctgcctgcacttactttgtaatgccacggttgagattgagagagatcagcgcagccaggcaagggaactttaaagaattattaggccaccttctccctttcctggaccccagagtcattcctccatttggttaaaatactcagtgcagggaactcttacatcctgtctccttcacttgcagcgtcccctgctatgcctcaggtgaaccacataattcttgggtttccgttcctacttgctagtgatttctgaacatgttcaatggagcggcacacagtctagacccacttccgcattgaaaccttcactgttcctctttggtttcttcagagctttcccaagagagctgtcagttttcagctgtcagtaacacaaatgagtttatggtaacacaaatgagttttgctatctctctgagaagctcatctgacctcctgactctcagccctacagagtagggagttgatgctgacaggatgaagatttaggaataaatatgcctgggaagagactgggaaggttctagggtgaggcacctcagtaactcatggtaccttggccaagttggaaggaagcagtttgttaatgaggcacagtaatcctggctgcagggtctaggaggtaagaccagctgggatgaccttccctgggttaatcaatttccctctagacaacacaaactgcaggcatgtgactaactttgaaagaacacccatcatgtggctgctgtcacccttgaccagccgtggtggtggttactccatctgtggttggagcgcctctttgggattcacttcaaggtcttgtgcctatttttctgcatatcttctgtgatgacaaatctctgtcccctgagtgttaatttgatttttagaaatggccaaaagtcacgtgatccaaactttttttcagtaatatggagactgagctgcatggtagttggggatcaaaaatatgtgaccttaatgagatttttatgatttctaaagtaacaataaaagcagtttttagagttgagttccagagagggcagggcaatggcagtgacatgtttgtcattttaataataaataacatctattgagtgcttaagaggtgtccagc

SEQ ID NO: 11423 - protein, 135 aa, Homo sapiens; identical to SEQ ID NO: 11415

SEQ ID NO: 11424 - DNA, 2907 bp, Homo sapiens
cttgtacctggttcaggaggttcaggcagaggttgcacccactacgcctgcgcaacctcagccccgcccctccgctgctttccccggaaacgtttctttcctacgcagccgctcctgccgccgtggtcgctggagctttgcctctctaggccggcagcgcctctcctccatggtcctgtctgtcagcgctgttttgggagcccgccggtgaggccgggccacgctcagacacttcgatcgtcgagtctgtcactgggcatggcgggtcagttccgcagctacgtgtgggacccgctgctgatcctgtcgcagatcgtcctcatgcagaccgtgtattacggctcgctgggcctgtggctggcgctggtggacgggctagtgcgaagcagcccctcgctggaccagatgttcgacgccgaggaggcttgctgagatcctggggctctgccaagtcacttctccagtatatttccatttgtgattccccctcagatcctgggcttttccacccctccaggccggctctccatgatgtccttcatcctcaacgccctcacctgtgccctgggcttgctgtacttcatccggcgaggaaagcagtgtctggatttcactgtcactgtccatttctttcacctcctgggctgctggttctacagctcccgtttcccctcggcgctgacctggtggctggtccaagccgtgtgcattgcactcatggctgtcatcggggagtacctgtgcatgcggacggagctcaaggagatacccctcaactcagcccctaaatccaatgtctagaatcaggccctttggacatcctgctgacacttgggccccttaacaccttgggctgctcagaccctccagatgaggtccagcccagatctgagaggaaccctggaaatgtgaagtctctgttggtttgggagagatagtgagggcctgtcaaagaaggcaggtagcagtcagcatgacagctgcaagaatgacctctgtctgttgaagccttggtatctgagaggtcaggaaggggacctctttgagggtaataacagaattggaaccatgccactcttgagccacaatacctgtcaccagcctgttgttttaagagagaaaaaaaatcaaggatatctgattggagcaaaccacttctttagtcatctgtcttacccccctgggacagctgttacctttgcagtgttgccgaatcacagcagttacctttgcagtgttgccgaatcacagcagttctgttggagaaacgcttggtttccggatccagagccacagaaagaaatgtaggtgtgaagtattaggctgctgtcagggagaggatggcagatggaggcatcaagcacaaggaaaatgcacaacctgtgccctgttatacacacgttcatgtgcacccaagaacctatgactttcttccagttccttctaccaggtccccatcctgctgccagctctcaacatagcaggccataggacccagagaagaatcccagcgttgctcaaagtctaaccatcataaagacactgcctgtcttctaggaatgaccaggcacccagctcccactggactccaattttttttcctgccttatttagaattctttggcgggaagggtatgatgggttcccagagacaagaagcccaaccttctggcctgggctgtgctgatagtgctgagggagataggaatttgctgctaagatttttctttggggtggagtttcctctgtgaggggcttgcagctatccttcctgtgtatacaaatacagtattttccatggttctgcctgcacttactttgtaatgccacggttgagattgagagagatcagcgcagccaggcaagggaactttaaagaattattaggccaccttctccctttcctggaccccagagtcattcctccatttggttaaaatactcagtgcagggaactcttacatcctgtctccttcacttgcagcgtcccctgctatgcctcaggtgaaccacataattcttgggtttccgttcctacttgctagtgatttctgaacatgttcaatggagcggcacacagtctagacccacttccgcattgaaaccttcactgttcctctttggtttcttcagagctttcccaagagagctgtcagttttcagctgtcagtaacacaaatgagtttatggtaacacaaatgagttttgctatctctctgagaagctcatctgacctcctgactctcagccctacagagtagggagttgatgctgacaggatgaagatttaggaataaatatgcctgggaagagactgggaaggttctagggtgaggcacctcagtaactcatggtaccttggccaagttggaaggaagcagtttgttaatgaggcacagtaatcctggctgcagggtctaggaggtaagaccagctgggatgaccttccctgggttaatcaatttccctctagacaacacaaactgcaggcatgtgactaactttgaaagaacacccatcatgtggctgctgtcacccttgaccagccgtggtggtggttactccatctgtggttggagcgcctctttgggattcacttcaaggtcttgtgcctatttttctgcatatcttctgtgatgacaaatctctgtcccctgagtgttaatttgatttttagaaatggccaaaagtcacgtgatccaaactttttttcagtaatatggagactgagctgcatggtagttggggatcaaaaatatgtgaccttaatgagatttttatgatttctaaagtaacaataaaagcagtttttagagttgagttccagagagggcagggcaatggcagtgacatgtttgtcattttaataataaataacatctattgagtgcttaagaggtgtccagc

SEQ ID NO: 11425 - protein, 90 aa, Homo sapiens; identical to SEQ ID NO: 11413

SEQ ID NO: 11426 - DNA, 1799 bp, Homo sapiens
cttgtacctggttcaggaggttcaggcagaggttgcacccactacgcctgcgcaacctcagccccgcccctccgctgctttccccggaaacgtttctttcctacgcagccgctcctgccgccgtggtcgctggagctttgcctctctaggccggcagcgcctctcctccatggtcctgtctgtcagcgctgttttgggagcccgccggtgaggccgggccacgctcagacacttcgatcgtcgagtctgtcactgggcatggcgggtcagttccgcagctacgtgtgggacccgctgctgatcctgtcgcagatcgtcctcatgcagaccgtgtattacggctcgctgggcctgctgccagctctcaacatagcaggccataggacccagagaagaatcccagcgttgctcaaagtctaaccatcataaagacactgcctgtcttctaggaatgaccaggcacccagctcccactggactccaattttttttcctgccttatttagaattctttggcgggaagggtatgatgggttcccagagacaagaagcccaaccttctggcctgggctgtgctgatagtgctgagggagataggaatttgctgctaagatttttctttggggtggagtttcctctgtgaggggcttgcagctatccttcctgtgtatacaaatacagtattttccatggttctgcctgcacttactttgtaatgccacggttgagattgagagagatcagcgcagccaggcaagggaactttaaagaattattaggccaccttctccctttcctggaccccagagtcattcctccatttggttaaaatactcagtgcagggaactcttacatcctgtctccttcacttgcagcgtcccctgctatgcctcaggtgaaccacataattcttgggtttccgttcctacttgctagtgatttctgaacatgttcaatggagcggcacacagtctagacccacttccgcattgaaaccttcactgttcctctttggtttcttcagagctttcccaagagagctgtcagttttcagctgtcagtaacacaaatgagtttatggtaacacaaatgagttttgctatctctctgagaagctcatctgacctcctgactctcagccctacagagtagggagttgatgctgacaggatgaagatttaggaataaatatgcctgggaagagactgggaaggttctagggtgaggcacctcagtaactcatggtaccttggccaagttggaaggaagcagtttgttaatgaggcacagtaatcctggctgcagggtctaggaggtaagaccagctgggatgaccttccctgggttaatcaatttccctctagacaacacaaactgcaggcatgtgactaactttgaaagaacacccatcatgtggctgctgtcacccttgaccagccgtggtggtggttactccatctgtggttggagcgcctctttgggattcacttcaaggtcttgtgcctatttttctgcatatcttctgtgatgacaaatctctgtcccctgagtgttaatttgatttttagaaatggccaaaagtcacgtgatccaaactttttttcagtaatatggagactgagctgcatggtagttggggatcaaaaatatgtgaccttaatgagatttttatgatttctaaagtaacaataaaagcagtttttagagttgagttccagagagggcagggcaatggcagtgacatgtttgtcattttaataataaataacatctattgagtgcttaagaggtgtccagc

SEQ ID NO: 11427 - protein, 53 aa, Homo sapiens; identical to SEQ ID NO: 11417

SEQ ID NO: 11428 - DNA, 2990 bp, Homo sapiens
cttgtacctggttcaggaggttcaggcagaggttgcacccactacgcctgcgcaacctcagccccgcccctccgctgctttccccggaaacgtttctttcctacgcagccgctcctgccgccgtggtcgctggagctttgcctctctaggccggcagcgcctctcctccatggtcctgtctgtcagcgctgttttgggagcccgccggtgaggccgggccacgctcagacacttcgatcgtcgagtctgtcactgggcatggcgggtcagttccgcagctacgtgtgggacccgctgctgatcctgtcgcagatcgtcctcatgcagaccgtgtattacggctcgctgggcctgtggctggcgctggtggacgggctagtgcgaagcagcccctcgctggaccagatgttcgacgccgagatcctgggcttttccacccctccaggccggctctccatgatgtccttcatcctcaacgccctcacctgacagggtcttgctctcttgcccaggctggagtgcagtggcgaagtcacagctcactgcagcctcgactcctgggcttaagcgatcctccgacctcagcctcctgagtagctgatactacaagcgcaaggcaccacatctggctaatttttaaattttttgtagagacagtgtctcattatgttgcccaggatggtcttgaactcctggcctcaagcagtcttcctgcctcgacctcccaaggtgctgggattacaggcgtgagccaccatgcctagcctgttcagagtaaatcttatttgaggcatgaatcaatcaaacataaatagagagttgaattgatcttagagggaatgggatgcagcaaagccctacttgaccatctcccccctcccacatttggaaatccttaaacccacttatgtaggcctctgactgtgagattcagagccacagcagtttccacctctgctaaggccttcaggcagtgagatggctcacttcagtgcccctccttccacacatctcctagctgtatcctgagacgcctcaacctagtcactacccttctgtatgatgttggtctaaggcttccccctctctggacatgaaggcggagcctcccagcactaccagccacacaccactcaagactccagatcctgaaccctgactctggggcccagctctgggcctggcttggggcttgcatctcacctagcctggcagtgttgttgtcacacccaccttgtatggatgccacataggcatttcaagtgatgcggagcagaagcgggtgcagcggcgcttgacccaacgcagggtggaggatctgcacatcaccctgggcgccgggaggtggattcgtgtgggcagcccctcaaaccagatccactggtcggctacatccagctgcttcatgtgccccatgggagttctattgcggtagggcttaatgaagatgactcgggggccctcggtgagtggttgcctcccctggactccagggttcaagctatcatccctcgatgtccttggaacctcaggctctatatgcttttctttccgtggcattgccgccaatgacgttttctccttgttcctcatccctgactgcacctgggacttccactccttgtactcttttttcttagggtcccctgtggactctaatttcttggacttgagttccttctcggagcacccgatctcctggaactcttcattattttgttttgttttattgcaggcactgttttccctggcagggagaggaaaggcagtcagcacagcaggaccgaggccctggttcccgagacagttgctatgtagccagctcaggggagcctgttaagaaaggctagaggggcctgcaaagaaacttctctactgcccagaggccttgtgctggtgtgaggaggtgtgatgagcactagcagagggatgtgagagattgggaaggtgaaagccatgactagtagttaaggcccctaagaatgaatattgtctacatcatctgccactagattagggttctgtctctctggacttcagctgggagggtgaacagtccagtagtttttctaaattgtgctccaagaaccttagggttctgaggaggtgtctcaatgtcacctcccctgacccactggggcaggatacctctccccagctcataacaacacaattggggcttggaaatagatatttgaacagaggtttcactgctttaataaagttggaaaactgttcaagaccagcctgggcaacatggtgagactctgtctccatacaaaaaaaaaatttttaagttggaaaatgatggggctagatgatcctgatccttctagctctatgtttcctgattgcctgcgactagaggccaaatcagaaagaggagcccagaaaggtggccttgacagaaatattaaatgctgagactttcccaaagggtgtctgtaacagactgggccccctgcaaacccccagtggcaacaccatcctagccaagggcgtggagagagatgaggccttgggctgcagataatggcaatactgtgatgataataatggctcccgctgattgagtcctcgctctatgccagactcgggacccttacaacttgggatccttactatttctgtgaagtagaaggcagtgaaacagagtggcttacagagcacaggtgttggattcagacaaacgggctcagattctgcttctgcctcttaccacctgtgtgatttgggcaagatatttaacctctcagagccttagcttccttatctgtaaaactaggataattctgtctacctaacaggattgttgtgaagaataaactaaatgggaaaattcttaagtgcttaacactgtaggatggtacttagcaggcaccaatcaatgttagctttcttaatactgtcatgtgacttatgaggaaacggtttgaacttgtctcggaggcatggtaaaaaaaaataaaaataaaaataaattaataaag

SEQ ID NO: 11429 - protein, 76 aa, Homo sapiens
MAGQFRSYVWDPLLILSQIVLMQTVYYGSLGLWLALVDGLVRSSPSLDQMFDAEILGFSTPPGRLSMMSFILNALT

SEQ ID NO: 11430 - DNA, 705 bp, Homo sapiens
cttgtacctggttcaggaggttcaggcagaggttgcacccactacgcctgcgcaacctcagccccgcccctccgctgctttccccggaaacgtttctttcctacgcagccgctcctgccgccgtggtcgctggagctttgcctctctaggccggcagcgcctctcctccatggtcctgtctgtcagcgctgttttgggagcccgccggtgaggccgggccacgctcagacacttcgatcgtcgagtctgtcactgggcatggcgggtcagttccgcagctacgtgtgggacccgctgctgatcctgtcgcagatcgtcctcatgcagaccgtgtattacggctcgctgggcctgtggctggcgctggtggacgggctagtgcgaagcagcccctcgctggaccagatgttcgacgccgagatcctgggcttttccacccctccaggccggctctccatgatgtccttcatcctcaacgccctcacctggcacttctccttgctgctgccacatgaagaaggacgtgtttgcttccccttccaccatgattgctcttaggtggaagggacttgccttgtctcagaagagtctttggacttggacttttgggttaatactggaatgagttaagactttggaggactgttggaagcacataattgtgttttgaattgtgaggacatgagatttgggaggggctggggc

SEQ ID NO: 11431 - protein, 99 aa, Homo sapiens
MAGQFRSYVWDPLLILSQIVLMQTVYYGSLGLWLALVDGLVRSSPSLDQMFDAEILGFSTPPGRLSMMSFILNALTWHFSLLLPHEEGRVCFPFHHDCS

SEQ ID NO: 11432 - DNA, 1287 bp, Homo sapiens
cttgtacctggttcaggaggttcaggcagaggttgcacccactacgcctgcgcaacctcagccccgcccctccgctgctttccccggaaacgtttctttcctacgcagccgctcctgccgccgtggtcgctggagctttgcctctctaggccggcagcgcctctcctccatggtcctgtctgtcagcgctgttttgggagcccgccggtgaggccgggccacgctcagacacttcgatcgtcgagtctgtcactgatcctgggcttttccacccctccaggccggctctccatgatgtccttcatcctcaacgccctcacctggagctgacatggacccaaatcctcgggccgccctggagcgccagcagctccgccttcgggagcggcaaaaattcttcgaggacattttacagccagagacagagtttgtctttcctctgtcccatctgcatctcgagtcgcagagaccccccataggtagtatctcatccatggaagtgaatgtggacacactggagcaagtagaacttattgaccttggggacccggatgcagcagatgtgttcttgccttgcgaagatcctccaccaaccccccagtcgtctgggatggacaaccatttggaggagctgagcctgccggtgcctacatcagacaggaccacatctaggacctcctcctcctcctcctccgactcctccaccaacctgcatagcccaaatccaagtgatgatggagcagatacgcccttggcacagtcggatgaagaggaggaaaggggtgatggaggggcagagcctggagcctgcagctagcagtgggcccctgcctacagactgaccacgctggctattctccacatgagaccacaggcccagccagagcctgtcgggagaagaccagactctttacttgcagtaggcaccagaggtgggaaggatggtgggattgtgtacctttctaagaattaaccctctcctgctttactgctaattttttcctgctgcaaccctcccaccagtttttggcttactcctgagatatgatttgcaaatgaggagagagaagatgaggttggacaagatgccactgcttttcttagcactcttccctcccctaaaccatcccgtagtcttctaatacagtctctcagacaagtgtctctagatggatgtgaactccttaactcatcaagtaaggtggtactcaagccatgctgcctccttacatcctttttggaacagagcacggtataaataataaactaataataatatgccaacca

SEQ ID NO: 11433 - protein, 161 aa, Homo sapiens; identical to SEQ ID NO: 11403

SEQ ID NO: 11434 - DNA, 2779 bp, Homo sapiens
atggagacaggccgctggctgaggcccggctcgtgtccctgcagggcatggcgggtcagttccgcagctacgtgtgggacccgctgctgatcctgtcgcagatcgtcctcatgcagaccgtgtattacggctcgctgggcctgtggctggcgctggtggacgggctagtgcgaagcagcccctcgctggaccagatgttcgacgccgagatcctgggcttttccacccctccaggccggctctccatgatgtccttcatcctcaacgccctcacctgacagggtcttgctctcttgcccaggctggagtgcagtggcgaagtcacagctcactgcagcctcgactcctgggcttaagcgatcctccgacctcagcctcctgagtagctgatactacaagcgcaaggcaccacatctggctaatttttaaattttttgtagagacagtgtctcattatgttgcccaggatggtcttgaactcctggcctcaagcagtcttcctgcctcgacctcccaaggtgctgggattacaggcgtgagccaccatgcctagcctgttcagagtaaatcttatttgaggcatgaatcaatcaaacataaatagagagttgaattgatcttagagggaatgggatgcagcaaagccctacttgaccatctcccccctcccacatttggaaatccttaaacccacttatgtaggcctctgactgtgagattcagagccacagcagtttccacctctgctaaggccttcaggcagtgagatggctcacttcagtgcccctccttccacacatctcctagctgtatcctgagacgcctcaacctagtcactacccttctgtatgatgttggtctaaggcttccccctctctggacatgaaggcggagcctcccagcactaccagccacacaccactcaagactccagatcctgaaccctgactctggggcccagctctgggcctggcttggggcttgcatctcacctagcctggcagtgttgttgtcacacccaccttgtatggatgccacataggcatttcaagtgatgcggagcagaagcgggtgcagcggcgcttgacccaacgcagggtggaggatctgcacatcaccctgggcgccgggaggtggattcgtgtgggcagcccctcaaaccagatccactggtcggctacatccagctgcttcatgtgccccatgggagttctattgcggtagggcttaatgaagatgactcgggggccctcggtgagtggttgcctcccctggactccagggttcaagctatcatccctcgatgtccttggaacctcaggctctatatgcttttctttccgtggcattgccgccaatgacgttttctccttgttcctcatccctgactgcacctgggacttccactccttgtactcttttttcttagggtcccctgtggactctaatttcttggacttgagttccttctcggagcacccgatctcctggaactcttcattattttgttttgttttattgcaggcactgttttccctggcagggagaggaaaggcagtcagcacagcaggaccgaggccctggttcccgagacagttgctatgtagccagctcaggggagcctgttaagaaaggctagaggggcctgcaaagaaacttctctactgcccagaggccttgtgctggtgtgaggaggtgtgatgagcactagcagagggatgtgagagattgggaaggtgaaagccatgactagtagttaaggcccctaagaatgaatattgtctacatcatctgccactagattagggttctgtctctctggacttcagctgggagggtgaacagtccagtagtttttctaaattgtgctccaagaaccttagggttctgaggaggtgtctcaatgtcacctcccctgacccactggggcaggatacctctccccagctcataacaacacaattggggcttggaaatagatatttgaacagaggtttcactgctttaataaagttggaaaactgttcaagaccagcctgggcaacatggtgagactctgtctccatacaaaaaaaaaatttttaagttggaaaatgatggggctagatgatcctgatccttctagctctatgtttcctgattgcctgcgactagaggccaaatcagaaagaggagcccagaaaggtggccttgacagaaatattaaatgctgagactttcccaaagggtgtctgtaacagactgggccccctgcaaacccccagtggcaacaccatcctagccaagggcgtggagagagatgaggccttgggctgcagataatggcaatactgtgatgataataatggctcccgctgattgagtcctcgctctatgccagactcgggacccttacaacttgggatccttactatttctgtgaagtagaaggcagtgaaacagagtggcttacagagcacaggtgttggattcagacaaacgggctcagattctgcttctgcctcttaccacctgtgtgatttgggcaagatatttaacctctcagagccttagcttccttatctgtaaaactaggataattctgtctacctaacaggattgttgtgaagaataaactaaatgggaaaattcttaagtgcttaacactgtaggatggtacttagcaggcaccaatcaatgttagctttcttaatactgtcatgtgacttatgaggaaacggtttgaacttgtctcggaggcatggtaaaaaaaaataaaaataaaaataaattaataaag

SEQ ID NO: 11435 - protein, 76 aa, Homo sapiens; identical to SEQ ID NO: 11429

SEQ ID NO: 11436 - DNA, 1236 bp, Homo sapiens
gacaggccgctggctgaggcccggctcgtgtccctgcagggcatggcgggtcagttccgcagctacgtgtgggacccgctgctgatcctgtcgcagatcgtcctcatgcagaccgtgtattacggctcgctgggcctgtggctggcgctggtggacgggctagtgcgaagcagcccctcgctggaccagatgttcgacgccgagatcctgggcttttccacccctccaggccggctctccatgatgtccttcatcctcaacgccctcacctggagctgacatggacccaaatcctcgggccgccctggagcgccagcagctccgccttcgggagcggcaaaaattcttcgaggacattttacagccagagacagagtttgtctttcctctgtcccatctgcatctcgagtcgcagagaccccccataggtagtatctcatccatggaagtgaatgtggacacactggagcaagtagaacttattgaccttggggacccggatgcagcagatgtgttcttgccttgcgaagatcctccaccaaccccccagtcgtctgggatggacaaccatttggaggagctgagcctgccggtgcctacatcagacaggaccacatctaggacctcctcctcctcctcctccgactcctccaccaacctgcatagcccaaatccaagtgatgatggagcagatacgcccttggcacagtcggatgaagaggaggaaaggggtgatggaggggcagagcctggagcctgcagctagcagtgggcccctgcctacagactgaccacgctggctattctccacatgagaccacaggcccagccagagcctgtcgggagaagaccagactctttacttgcagtaggcaccagaggtgggaaggatggtgggattgtgtacctttctaagaattaaccctctcctgctttactgctaattttttcctgctgcaaccctcccaccagtttttggcttactcctgagatatgatttgcaaatgaggagagagaagatgaggttggacaagatgccactgcttttcttagcactcttccctcccctaaaccatcccgtagtcttctaatacagtctctcagacaagtgtctctagatggatgtgaactccttaactcatcaagtaaggtggtactcaagccatgctgcctccttacatcctttttggaacagagcacggtataaataataaactaataataatatgccaacca

SEQ ID NO: 11437 - protein, 161 aa, Homo sapiens; identical to SEQ ID NO: 11403

SEQ ID NO: 11438 - DNA, 1321 bp, Homo sapiens
agatcctgggcttttccacccctccaggccggctctccatgatgtccttcatcctcaacgccctcacctgtgccctgggcttgctgtacttcatccggcgaggaaagcagtgtctggatttcactgtcactgtccatttctttcacctcctgggctgctggttctacagctcccgtttcccctcggcgctgacctggtggctggtccaagccgtgtgcattgcactcatggctgtcatcggggagtacctgtgcatgcggacggagctcaaggagatacccctcaactcagcccctaaatccaatgtctagaatcaggccctttggacatcctgctgacacttgggccccttaacaccttgggctgctcagaccctccagatgaggtccagcccagatctgagaggaaccctggaaatgtgaagtctctgttggtttgggagagatagtgagggcctgtcaaagaaggcaggtagcagtcagcatgacagctgcaagaatgacctctgtctgttgaagccttggtatctgagaggtcaggaaggggacctctttgagggtaataacagaattggaaccatgccactcttgagccacaatacctgtcaccagcctgttgttttaagagagaaaaaaaatcaaggatatctgattggagcaaaccacttctttagtcatctgtcttacccccctgggacagctgttacctttgcagtgttgccgaatcacagcagttacctttgcagtgttgccgaatcacagcagttctgttggagaaacgcttggtttccggatccagagccacagaaagaaatgtaggtgtgaagtattaggctgctgtcagggagaggatggcagatggaggcatcaagcacaaggaaaatgcacaacctgtgccctgttatacacacgttcatgtgcacccaagaacctatgactttcttccagttccttctaccaggtccccatcctgctgccagctctcaacatagcaggccataggacccagagaagaatcccagcgttgctcaaagtctaaccatcataaagacactgcctgtcttctaggaatgaccaggcacccagctcccactggactccaattttttttcctgccttatttagaattctttggcgggaagggtatgatgggttcccagagacaagaagcccaaccttctggcctgggctgtgctgatagtgctgagggagataggaatttgctgctaagatttttctttggggtggagtttcctctgtgaggggcttgcagctatccttcctgtgtatacaaatacagtattttccatggttctgcctgc

SEQ ID NO: 11439 - protein, 90 aa, Homo sapiens; identical to SEQ ID NO: 11413

SEQ ID NO: 11440 - DNA, 2417 bp, Homo sapiens
agatcctgggcttttccacccctccaggccggctctccatgatgtccttcatcctcaacgccctcacctgtgccctgggcttgctgtacttcatccggcgaggaaagcagtgtctggatttcactgtcactgtccatttctttcacctcctgggctgctggttctacagctcccgtttcccctcggcgctgacctggtggctggtccaagccgtgtgcattgcactcatggctgtcatcggggagtacctgtgcatgcggacggagctcaaggagatacccctcaactcagcccctaaatccaatgtctagaatcaggccctttggacatcctgctgacacttgggccccttaacaccttgggctgctcagaccctccagatgaggtccagcccagatctgagaggaaccctggaaatgtgaagtctctgttggtttgggagagatagtgagggcctgtcaaagaaggcaggtagcagtcagcatgacagctgcaagaatgacctctgtctgttgaagccttggtatctgagaggtcaggaaggggacctctttgagggtaataacagaattggaaccatgccactcttgagccacaatacctgtcaccagcctgttgttttaagagagaaaaaaaatcaaggatatctgattggagcaaaccacttctttagtcatctgtcttacccccctgggacagctgttacctttgcagtgttgccgaatcacagcagttacctttgcagtgttgccgaatcacagcagttctgttggagaaacgcttggtttccggatccagagccacagaaagaaatgtaggtgtgaagtattaggctgctgtcagggagaggatggcagatggaggcatcaagcacaaggaaaatgcacaacctgtgccctgttatacacacgttcatgtgcacccaagaacctatgactttcttccagttccttctaccaggtccccatcctgctgccagctctcaacatagcaggccataggacccagagaagaatcccagcgttgctcaaagtctaaccatcataaagacactgcctgtcttctaggaatgaccaggcacccagctcccactggactccaattttttttcctgccttatttagaattctttggcgggaagggtatgatgggttcccagagacaagaagcccaaccttctggcctgggctgtgctgatagtgctgagggagataggaatttgctgctaagatttttctttggggtggagtttcctctgtgaggggcttgcagctatccttcctgtgtatacaaatacagtattttccatggttctgcctgcacttactttgtaatgccacggttgagattgagagagatcagcgcagccaggcaagggaactttaaagaattattaggccaccttctccctttcctggaccccagagtcattcctccatttggttaaaatactcagtgcagggaactcttacatcctgtctccttcacttgcagcgtcccctgctatgcctcaggtgaaccacataattcttgggtttccgttcctacttgctagtgatttctgaacatgttcaatggagcggcacacagtctagacccacttccgcattgaaaccttcactgttcctctttggtttcttcagagctttcccaagagagctgtcagttttcagctgtcagtaacacaaatgagtttatggtaacacaaatgagttttgctatctctctgagaagctcatctgacctcctgactctcagccctacagagtagggagttgatgctgacaggatgaagatttaggaataaatatgcctgggaagagactgggaaggttctagggtgaggcacctcagtaactcatggtaccttggccaagttggaaggaagcagtttgttaatgaggcacagtaatcctggctgcagggtctaggaggtaagaccagctgggatgaccttccctgggttaatcaatttccctctagacaacacaaactgcaggcatgtgactaactttgaaagaacacccatcatgtggctgctgtcacccttgaccagccgtggtggtggttactccatctgtggttggagcgcctctttgggattcacttcaaggtcttgtgcctatttttctgcatatcttctgtgatgacaaatctctgtcccctgagtgttaatttgatttttagaaatggccaaaagtcacgtgatccaaactttttttcagtaatatggagactgagctgcatggtagttggggatcaaaaatatgtgaccttaatgagatttttatgatttctaaagtaacaataaaagcagtttttagagttgagttccagagagggcagggcaatggcagtgacatgtttgtcattttaataataaataacatctattgagtgcttaagaggtgtccagc

SEQ ID NO: 11441 - protein, 90 aa, Homo sapiens; identical to SEQ ID NO: 11413

SEQ ID NO: 11442 - DNA, 1055 bp, Homo sapiens
gctactgtcacatttcagtgatgtcacagctgcaggtggtacagagccagcaccaccatctgatgcccagcctgagtgctggctgaactgagaggaacagggttggtgcctggcactggtgttgctccattcatctctgaggtctcacagccccagcatgagtccatcagcaaagaagaggcccaagaacagcagggtttccaagatgcaagatgagaaactgcgggacgagacagagcagcctgtgagcaaagtaattgagcggaaccgtctgagaacggtgttaaaaaacttgtcgctcttgaagctactcaagagctcaaaccgccggatccaagaactgcataagctggccaaaaggtgttggcattcactgctcagtgttccaaagattctccgcatctcctctggggaaaacagtgcctgcaataaaacaaaacaaaataatgaagagttccaggagatcgggtgctccgagaaggaactcaagtccaagaaattagagtccacaggggaccctaagaaaaaagagtacaaggagtggaagtcccaggtgcagtcagggatgaggaacaaggagaaaacgtcattggcggcaatgccacggaaagaaaagcatatagagcctgaggttccaaggacatcgagggatgatagcttgaaccctggagtccaggggaggcaaccactcaccgagggcccccgagtcatcttcattaagccctaccgcaatagaactcccatggggcacatgaagcagctggatgtagccgaccagtggatctggtttgaggggctgcccacacgaatccacctcccggcgcccagggtgatgtgcagatcctccaccctgcgttgggtcaagcgccgctgcacccgcttctgctccgcatcacttgaaatgcctatgtggcatccatacaaggttgatgtgacctggacgagagccagaggtgcgagcagagggtggagatcgcgccatcagctgaaggggaggaatgggtggcgaaattcacgagtctacaaataagatcttccatatggcacctaagacg

SEQ ID NO: 11443 - protein, 290 aa, Homo sapiens [sequence omitted]

SEQ ID NO: 11444 - DNA, 582 bp, Homo sapiens
aaacccttgctctgaagtcacaggcctgacttccagactaggctctgcccctaaggaaatcacctttctggtcttagtctccccatctgaaaatggcataaccaacctacctgcctcaaatacaagaccctgcttgtgaagcgtctcctggctcagaccagtgctagaagtgtccagtctagcagctcctggaccaagactccgtggccattcccttcctcctgccttccatccacccccttacgatacagaagttgagatacagagaggtgaaggaacttgtcccaggccctacagctaatgcaagatgagaaactgcgggacgagacagagcagcctgtgagcaaagtaattgagcggaaccgtctgagaacggtgttaaaaaacttgtcgctcttgaagctactcaagagctcaaaccgccggatccaagaactgcataagctggccaaaaggtgttggcattcactgctcagtgttccaaagattctccgcatctcctctggggaaaacagtgcctgcaataaaacaaaacaaaataatgaagagttccaggagatcgggtgctccgagaaggaactc

SEQ ID NO: 11445 - protein, 93 aa, Homo sapiens
MQDEKLRDETEQPVSKVIERNRLRTVLKNLSLLKLLKSSNRRIQELHKLAKRCWHSLLSVPKILRISSGENSACNKTKQNNEEFQEIGCSEKE

SEQ ID NO: 11446 - DNA, 479 bp, Homo sapiens
acaggcctgacttccagactaggctctgcccctaaggaaatcacctttctggtcttagtctccccatctgaaaatggcataaccaacctacctgcctcaaatacaagaccctgcttgtgaagcgtctcctggctcagaccagtgctagaagtgtccagtctagcagctcctggaccaagactccgtggccattcccttcctcctgccttccatccacccccttacgatacagaagttgagatacagagaggtgaaggaacttgtcccaggccctacagctaagacaaggtctcacactgtccagaggctgaagcacagtagtgcagtcatgactcactaagctcaagatcaaaaaaaaaaaaagagagagagaaaattcattaccagtggacgttctgtaagcagaagaaatatgatacctgagagaaacttggatctacataaagaaatgatgatctctggaaacagatagaataaag

SEQ ID NO: 11447 - protein, 55 aa, Homo sapiens
KWHNQPTCLKYKTLLVKRLLAQTSARSVQSSSSWTKTPWPFPSSCLPSTPLRYRS

SEQ ID NO: 11448 - DNA, 993 bp, Homo sapiens
cccggcgcccaccccgcccagtgtgcttggagctgacatggacccaaatcctcgggccgccctggagcgccagcagctccgccttcgggagcggcaaaaattcttcgaggacattttacagccagagacagagtttgtctttcctctgtcccatctgcatctcgagtcgcagagaccccccataggtagtatctcatccatggaagtgaatgtggacacactggagcaagtagaacttattgaccttggggacccggatgcagcagatgtgttcttgccttgcgaagatcctccaccaaccccccagtcgtctgggatggacaaccatttggaggagctgagcctgccggtgcctacatcagacaggaccacatctaggacctcctcctcctcctcctccgactcctccaccaacctgcatagcccaaatccaagtgatgatggagcagatacgcccttggcacagtcggatgaagaggaggaaaggggtgatggaggggcagagcctggagcctgcagctagcagtgggcccctgcctacagactgaccacgctggctattctccacatgagaccacaggcccagccagagcctgtcgggagaagaccagactctttacttgcagtaggcaccagaggtgggaaggatggtgggattgtgtacctttctaagaattaaccctctcctgctttactgctaattttttcctgctgcaaccctcccaccagtttttggcttactcctgagatatgatttgcaaatgaggagagagaagatgaggttggacaagatgccactgcttttcttagcactcttccctcccctaaaccatcccgtagtcttctaatacagtctctcagacaagtgtctctagatggatgtgaactccttaactcatcaagtaaggtggtactcaagccatgctgcctccttacatcctttttggaacagagcacggtataaataataaactaataataatatgccaacca

SEQ ID NO: 11449 - protein, 161 aa, Homo sapiens; identical to SEQ ID NO: 11403

SEQ ID NO: 11450 - DNA, 1160 bp, Homo sapiens
gtgcttggtaggttgggcggcggctctgtctagtcccagagccaggaatcaggggcagccgggcgagtcccagggcaggggtcctccgccgccttgcacctgccctgctgggcggcaccgggtcagtgccctgccccctcctgcgggtcccaactctctctttcccatcgtgcgtcctctggagaagtgcgcgcgtgagctgacatggacccaaatcctcgggccgccctggagcgccagcagctccgccttcgggagcggcaaaaattcttcgaggacattttacagccagagacagagtttgtctttcctctgtcccatctgcatctcgagtcgcagagaccccccataggtagtatctcatccatggaagtgaatgtggacacactggagcaagtagaacttattgaccttggggacccggatgcagcagatgtgttcttgccttgcgaagatcctccaccaaccccccagtcgtctgggatggacaaccatttggaggagctgagcctgccggtgcctacatcagacaggaccacatctaggacctcctcctcctcctcctccgactcctccaccaacctgcatagcccaaatccaagtgatgatggagcagatacgcccttggcacagtcggatgaagaggaggaaaggggtgatggaggggcagagcctggagcctgcagctagcagtgggcccctgcctacagactgaccacgctggctattctccacatgagaccacaggcccagccagagcctgtcgggagaagaccagactctttacttgcagtaggcaccagaggtgggaaggatggtgggattgtgtacctttctaagaattaaccctctcctgctttactgctaattttttcctgctgcaaccctcccaccagtttttggcttactcctgagatatgatttgcaaatgaggagagagaagatgaggttggacaagatgccactgcttttcttagcactcttccctcccctaaaccatcccgtagtcttctaatacagtctctcagacaagtgtctctagatggatgtgaactccttaactcatcaagtaaggtggtactcaagccatgctgcctccttacatcctttttggaacagagcacggtataaataataaactaataataatatgccaacca

SEQ ID NO: 11451 - protein, 161 aa, Homo sapiens; identical to SEQ ID NO: 11403

SEQ ID NO: 11452 - DNA, 1242 bp, Homo sapiens
gcggcggctctgtctagtcccagagccaggaatcaggggcagccgggcgagtcccagggcaggggtcctccgccgccttgcacctgccctgctgggcggcaccgggtcagtgccctgccccctcctgcgggtcccaactctctctttcccatcgtgcgtcctctggagaagtgcgcgcgtgagctgacatggacccaaatcctcgggccgccctggagcgccagcagctccgccttcgggagcggcaaaaattcttcgaggacattttacagccagagacagagtttgtctttcctctgtcccatctgcatctcgagtcgcagagaccccccataggtagtatctcatccatggaagtgaatgtggacacactggagcaagtagaacttattgaccttggggacccggatgcagcagatgtgttcttgccttgcgaagatcctccaccaaccccccagtcgtctggtatgcccctctgctttggggacttcagtgccagtcagccagagccggatgtcaggctctgaaacgaggctacaaggctgggctggggaagtacacaaggatggacaaccatttggaggagctgagcctgccggtgcctacatcagacaggaccacatctaggacctcctcctcctcctcctccgactcctccaccaacctgcatagcccaaatccaagtgatgatggagcagatacgcccttggcacagtcggatgaagaggaggaaaggggtgatggaggggcagagcctggagcctgcagctagcagtgggcccctgcctacagactgaccacgctggctattctccacatgagaccacaggcccagccagagcctgtcgggagaagaccagactctttacttgcagtaggcaccagaggtgggaaggatggtgggattgtgtacctttctaagaattaaccctctcctgctttactgctaattttttcctgctgcaaccctcccaccagtttttggcttactcctgagatatgatttgcaaatgaggagagagaagatgaggttggacaagatgccactgcttttcttagcactcttccctcccctaaaccatcccgtagtcttctaatacagtctctcagacaagtgtctctagatggatgtgaactccttaactcatcaagtaaggtggtactcaagccatgctgcctccttacatcctttttggaacagagcacggtataaataataaactaataataatatgccaacca

SEQ ID NO: 11453 - protein, 112 aa, Homo sapiens
MDPNPRAALERQQLRLRERQKFFEDILQPETEFVFPLSHLHLESQRPPIGSISSMEVNVDTLEQVELIDLGDPDAADVFLPCEDPPPTPQSSGMPLCFGDFSASQPEPDVRL

SEQ ID NO: 11454 - DNA, 1519 bp, Homo sapiens
cccatcgtgcgtcctctggagaagtgcgcgcgtgtaagtgtggcgagtgtggccaagggtgccggaggcagggttcgggtgcgtagtcgttgcgtgggcgctgcccaaaaggcgcagagcatcaagtgtgcgtgggcagaaccggcgcgggcgcccgccgcgggtctgcgcggggcgggggcgcagcaagtgcatccgagcgagcggagactagcgcaccggcgtcggtggcgagggtggtgcagaggagtccggctgggcggagggaggaaggatgggtgcgggtaactttttgaccgccttggaagtaccagtagccgcgctcgcaggggctgcctccgaccgccgggcgagctgcgagcgagtgagcccgccaccgcccctcccccacttccgcctcccgcctcttcctcgttcccggctcccagggcccgtcggtcccccgggagccctggaggcgcagccccaccccggccggcgcggctcgctcccacgcccccgccgcggcctcgctggagcggacggactgagtcagagggggcgccagcgctgcaggagctgacatggacccaaatcctcgggccgccctggagcgccagcagctccgccttcgggagcggcaaaaattcttcgaggacattttacagccagagacagagtttgtctttcctctgtcccatctgcatctcgagtcgcagagaccccccataggtagtatctcatccatggaagtgaatgtggacacactggagcaagtagaacttattgaccttggggacccggatgcagcagatgtgttcttgccttgcgaagatcctccaccaaccccccagtcgtctgggatggacaaccatttggaggagctgagcctgccggtgcctacatcagacaggaccacatctaggacctcctcctcctcctcctccgactcctccaccaacctgcatagcccaaatccaagtgatgatggagcagatacgcccttggcacagtcggatgaagaggaggaaaggggtgatggaggggcagagcctggagcctgcagctagcagtgggcccctgcctacagactgaccacgctggctattctccacatgagaccacaggcccagccagagcctgtcgggagaagaccagactctttacttgcagtaggcaccagaggtgggaaggatggtgggattgtgtacctttctaagaattaaccctctcctgctttactgctaattttttcctgctgcaaccctcccaccagtttttggcttactcctgagatatgatttgcaaatgaggagagagaagatgaggttggacaagatgccactgcttttcttagcactcttccctcccctaaaccatcccgtagtcttctaatacagtctctcagacaagtgtctctagatggatgtgaactccttaactcatcaagtaaggtggtactcaagccatgctgcctccttacatcctttttggaacagagcacggtataaataataaactaataataatatgccaacca

SEQ ID NO: 11455 - protein, 161 aa, Homo sapiens; identical to SEQ ID NO: 11403

SEQ ID NO: 11456 - DNA, 1524 bp, Homo sapiens
cccatcgtgcgtcctctggagaagtgcgcgcgtgtaagtgtggcgagtgtggccaagggtgccggaggcagggttcgggtgcgtagtcgttgcgtgggcgctgcccaaaaggcgcagagcatcaagtgtgcgtgggcagaaccggcgcgggcgcccgccgcgggtctgcgcggggcgggggcgcagcaagtgcatccgagcgagcggagactagcgcaccggcgtcggtggcgagggtggtgcagaggagtccggctgggcggagggaggaaggatgggtgcgggtaactttttgaccgccttggaagtaccagtagccgcgctcgcaggggctgcctccgaccgccgggcgagctgcgagcgagtgagcccgccaccgcccctcccccacttccgcctcccgcctcttcctcgttcccggctcccagggcccgtgtccaggccggagccaggggccccactgttgggatgctggctgcagtggggcgccccaagcccaggtcccctctgtcttctctttcgactttgcagctgtacttgttttgctcctctacccgcaggagctgacatggacccaaatcctcgggccgccctggagcgccagcagctccgccttcgggagcggcaaaaattcttcgaggacattttacagccagagacagagtttgtctttcctctgtcccatctgcatctcgagtcgcagagaccccccataggtagtatctcatccatggaagtgaatgtggacacactggagcaagtagaacttattgaccttggggacccggatgcagcagatgtgttcttgccttgcgaagatcctccaccaaccccccagtcgtctgggatggacaaccatttggaggagctgagcctgccggtgcctacatcagacaggaccacatctaggacctcctcctcctcctcctccgactcctccaccaacctgcatagcccaaatccaagtgatgatggagcagatacgcccttggcacagtcggatgaagaggaggaaaggggtgatggaggggcagagcctggagcctgcagctagcagtgggcccctgcctacagactgaccacgctggctattctccacatgagaccacaggcccagccagagcctgtcgggagaagaccagactctttacttgcagtaggcaccagaggtgggaaggatggtgggattgtgtacctttctaagaattaaccctctcctgctttactgctaattttttcctgctgcaaccctcccaccagtttttggcttactcctgagatatgatttgcaaatgaggagagagaagatgaggttggacaagatgccactgcttttcttagcactcttccctcccctaaaccatcccgtagtcttctaatacagtctctcagacaagtgtctctagatggatgtgaactccttaactcatcaagtaaggtggtactcaagccatgctgcctccttacatcctttttggaacagagcacggtataaataataaactaataataatatgccaacca

SEQ ID NO: 11457 - protein, 259 aa, Homo sapiens
MGAGNFLTALEVPVAALAGAASDRRASCERVSPPPPLPHFRLPPLPRSRLPGPVSRPEPGAPLLGCWLQWGAPSPGPLCLLFRLCSCTCFAPLPAGADMDPNPRAALERQQLRLRERQKFFEDILQPETEFVFPLSHLHLESQRPPIGSISSMEVNVDTLEQVELIDLGDPDAADVFLPCEDPPPTPQSSGMDNHLEELSLPVPTSDRTTSRTSSSSSSDSSTNLHSPNPSDDGADTPLAQSDEEEERGDGGAEPGACS

SEQ ID NO: 11458 - DNA, 1039 bp, Homo sapiens
atcgtgcgtcctctggagaagtgcgcgcgtgtaagtgtggcgagtgtggccaagggtgccggaggcagggttcgggagctgacatggacccaaatcctcgggccgccctggagcgccagcagctccgccttcgggagcggcaaaaattcttcgaggacattttacagccagagacagagtttgtctttcctctgtcccatctgcatctcgagtcgcagagaccccccataggtagtatctcatccatggaagtgaatgtggacacactggagcaagtagaacttattgaccttggggacccggatgcagcagatgtgttcttgccttgcgaagatcctccaccaaccccccagtcgtctgggatggacaaccatttggaggagctgagcctgccggtgcctacatcagacaggaccacatctaggacctcctcctcctcctcctccgactcctccaccaacctgcatagcccaaatccaagtgatgatggagcagatacgcccttggcacagtcggatgaagaggaggaaaggggtgatggaggggcagagcctggagcctgcagctagcagtgggcccctgcctacagactgaccacgctggctattctccacatgagaccacaggcccagccagagcctgtcgggagaagaccagactctttacttgcagtaggcaccagaggtgggaaggatggtgggattgtgtacctttctaagaattaaccctctcctgctttactgctaattttttcctgctgcaaccctcccaccagtttttggcttactcctgagatatgatttgcaaatgaggagagagaagatgaggttggacaagatgccactgcttttcttagcactcttccctcccctaaaccatcccgtagtcttctaatacagtctctcagacaagtgtctctagatggatgtgaactccttaactcatcaagtaaggtggtactcaagccatgctgcctccttacatcctttttggaacagagcacggtataaataataaactaataataatatgccaacca

SEQ ID NO: 11459 - protein, 161 aa, Homo sapiens; identical to SEQ ID NO: 11403

SEQ ID NO: 11460 - DNA, 1379 bp, Homo sapiens
ggtgcagaggagtccggctgggcggagggaggaaggatgggtgcgggtaactttttgaccgccttggaagtaccagtagccgcgctcgcaggggctgcctccgaccgccgggcgagctgcgagcgagtgagcccgccaccgcccctcccccacttccgcctcccgcctcttcctcgttcccggctcccagggcccgtcggtcccccgggagccctggaggcgcagccccaccccggccggcgcggctcgctcccacgcccccgccgcggcctcgctggagcggacggactgagtcagagggggcgccagcgctgcaggagctgacatggacccaaatcctcgggccgccctggagcgccagcagctccgccttcgggagcggcaaaaattcttcgaggacattttacagccagagacagagtttgtctttcctctgtcccatctgcatctcgagtcgcagagaccccccataggtagtatctcatccatggaagtgaatgtggacacactggagcaagtagaacttattgaccttggggacccggatgcagcagatgtgttcttgccttgcgaagatcctccaccaaccccccagtcgtctggtatgcccctctgctttggggacttcagtgccagtcagccagagccggatgtcaggctctgaaacgaggctacaaggctgggctggggaagtacacaaggatggacaaccatttggaggagctgagcctgccggtgcctacatcagacaggaccacatctaggacctcctcctcctcctcctccgactcctccaccaacctgcatagcccaaatccaagtgatgatggagcagatacgcccttggcacagtcggatgaagaggaggaaaggggtgatggaggggcagagcctggagcctgcagctagcagtgggcccctgcctacagactgaccacgctggctattctccacatgagaccacaggcccagccagagcctgtcgggagaagaccagactctttacttgcagtaggcaccagaggtgggaaggatggtgggattgtgtacctttctaagaattaaccctctcctgctttactgctaattttttcctgctgcaaccctcccaccagtttttggcttactcctgagatatgatttgcaaatgaggagagagaagatgaggttggacaagatgccactgcttttcttagcactcttccctcccctaaaccatcccgtagtcttctaatacagtctctcagacaagtgtctctagatggatgtgaactccttaactcatcaagtaaggtggtactcaagccatgctgcctccttacatcctttttggaacagagcacggtataaataataaactaataataatatgccaacca

SEQ ID NO: 11461 - protein, 112 aa, Homo sapiens; identical to SEQ ID NO: 11453

SEQ ID NO: 11462 - DNA, 949 bp, Homo sapiens
acttccagactaggctctgcccctaaggaaatcacctttctggtcttagtctccccatctgaaaatggcataaccaacctacctgcctcaaatacaagaccctgcttgtgaagggctgagaagctgagaccctgccagagcactgaggctatgggccagcccaggtcggtgcattcattcccattcgctcatctccttcccggcgttctgctctgagcccatcaccagaggcaagggagtttctagcttgaggatcagacgtcatcctccgcagactgccttccccacctcatctgcacccagcgtatcccagaccctggccagctccacgggcgccacagaggtggagagggacccaaccccgactggccaaggcagggccacggaagtctggggagaccgtgcggccgcgggctggcggcggaggagcgaggcgctgacgccgattcccgggaaaggctcttagagctgccgcccaggtcacaacgctaaaaatacccagggcccctggagcctgtgctccagcagcgaggagggggagggagaggccaaggtgggggagctgacgggggccaggggctctgggacaccccctctcttttcccctccccctaaccccaccgatctcacgagactgaaggagctgtcccccggggggccgcggagcccagagctggagaaagggagttgtttacgcgacctataggtactggaaagggggtgaagagatttgggggcaggaggctgccaggggccgggcaggagccagcgaaatggagaactccctctcggtctcagccccacccgcactggagccagcaagagggaaaaaattccctaaaaagggacacgaggcgtcggcggaggacggggggagggcgctcccccaaggccgttcccctcgtgctccggtcccctccgcggtccaccgcggcacctgcgcccaccg

SEQ ID NO: 11463 - protein, 57 aa, Homo sapiens
MENSLSVSAPPALEPARGKKFPKKGHEASAEDGGRALPQGRSPRAPVPSAVHRGTCA

SEQ ID NO: 11464 - DNA, 1154 bp, Homo sapiens
gctggctccagtgcgggtggggctgagaccgagagggagttctccatttcgctggctcctgcccggcccctggcagcctcctgcccccaaatctcttcaccccctttccagtacctataggtcgcgtaaacaactccctttctccagctctgggctccgcggccccccgggggacagctccttcagtctcgagctgacatggacccaaatcctcgggccgccctggagcgccagcagctccgccttcgggagcggcaaaaattcttcgaggacattttacagccagagacagagtttgtctttcctctgtcccatctgcatctcgagtcgcagagaccccccataggtagtatctcatccatggaagtgaatgtggacacactggagcaagtagaacttattgaccttggggacccggatgcagcagatgtgttcttgccttgcgaagatcctccaccaaccccccagtcgtctgggatggacaaccatttggaggagctgagcctgccggtgcctacatcagacaggaccacatctaggacctcctcctcctcctcctccgactcctccaccaacctgcatagcccaaatccaagtgatgatggagcagatacgcccttggcacagtcggatgaagaggaggaaaggggtgatggaggggcagagcctggagcctgcagctagcagtgggcccctgcctacagactgaccacgctggctattctccacatgagaccacaggcccagccagagcctgtcgggagaagaccagactctttacttgcagtaggcaccagaggtgggaaggatggtgggattgtgtacctttctaagaattaaccctctcctgctttactgctaattttttcctgctgcaaccctcccaccagtttttggcttactcctgagatatgatttgcaaatgaggagagagaagatgaggttggacaagatgccactgcttttcttagcactcttccctcccctaaaccatcccgtagtcttctaatacagtctctcagacaagtgtctctagatggatgtgaactccttaactcatcaagtaaggtggtactcaagccatgctgcctccttacatcctttttggaacagagcacggtataaataataaactaataataatatgccaacca

SEQ ID NO: 11465 - protein, 161 aa, Homo sapiens; identical to SEQ ID NO: 11403

SEQ ID NO: 11466 - DNA, 1860 bp, Homo sapiens
tccagtgcgggtggggctgagaccgagagggagttctccatttcgctggctcctgcccggcccctggcagcctcctgcccccaaatctcttcaccccctttccagtacctataggtcgcgtaaacaactccctttctccagctctgggctccgcggccccccgggggacagctccttcagtctcgtgagatcggtggggttagggggaggggaaaagagagggggtgtcccagagcccctggcccccgtcagctcccccaccttggcctctccctccccctcctcgctgctggagcacaggctccaggggccctgggtatttttagcgttgtgacctgggcggcagctctaagagcctttcccgggaatcggcgtcagcgcctcgctcctccgccgccagcccgcggccgcacggtctccccagacttccgtggccctgccttggccagtcggggttgggtccctctccacctctgtggcgcccgtggagctggccagggtctgggatacgctgggtgcagatgaggtggggaaggcagtctgcggaggatgacgtctgatcctcaagctagaaactcccttgcctctggtgatgggctcagagcagaacgccgggaaggagatgagcgaatgggaatgaatgcaccgacctgggctggcccatagcctcagtgctctggcagggtctcagcttctcagccctaggggtcaggaggcctgctctgaactggacccagaacccgcctttccaattgctcctcactgactaatggggagataagtcagtgagatgtgtcccaggagggggacgcataaagagctgttggagttcaaaggaaagatggtagtctcctaaatagctcaccttcacaagcagggtcttgtatttgaggcaggagctgacatggacccaaatcctcgggccgccctggagcgccagcagctccgccttcgggagcggcaaaaattcttcgaggacattttacagccagagacagagtttgtctttcctctgtcccatctgcatctcgagtcgcagagaccccccataggtagtatctcatccatggaagtgaatgtggacacactggagcaagtagaacttattgaccttggggacccggatgcagcagatgtgttcttgccttgcgaagatcctccaccaaccccccagtcgtctgggatggacaaccatttggaggagctgagcctgccggtgcctacatcagacaggaccacatctaggacctcctcctcctcctcctccgactcctccaccaacctgcatagcccaaatccaagtgatgatggagcagatacgcccttggcacagtcggatgaagaggaggaaaggggtgatggaggggcagagcctggagcctgcagctagcagtgggcccctgcctacagactgaccacgctggctattctccacatgagaccacaggcccagccagagcctgtcgggagaagaccagactctttacttgcagtaggcaccagaggtgggaaggatggtgggattgtgtacctttctaagaattaaccctctcctgctttactgctaattttttcctgctgcaaccctcccaccagtttttggcttactcctgagatatgatttgcaaatgaggagagagaagatgaggttggacaagatgccactgcttttcttagcactcttccctcccctaaaccatcccgtagtcttctaatacagtctctcagacaagtgtctctagatggatgtgaactccttaactcatcaagtaaggtggtactcaagccatgctgcctccttacatcctttttggaacagagcacggtataaataataaactaataataatatgccaacca

SEQ ID NO: 11467 - protein, 161 aa, Homo sapiens; identical to SEQ ID NO: 11403

SEQ ID NO: 11468 - DNA, 1102 bp, Homo sapiens
tgcgactcgagatgcagatgggacagaggaaagacaaactctgtctctggctgtaaaatgtcctcgaagaatttttgccgctcccgaaggcggagctgctggcgctccagggcggcccgaggatttgggtccatgtcagctcctgcgggtagaggagcaaaacaagtacagctgcaaagtcgaaagagaagacagaggggacctgggcttggggcgccccactgcagccagcatcccaacagtggggcccctggctccggcctggacacctctgcccttggtgacctctttccccttccctgaaaccaagtgtgtcccacaaaccaagtctcatgcagaggcggggcttgccctaagctccacaaaggggatgccagttccaggcaccacaagagagatactctgtattcagggaacacagccaatgcccaactctccatatcatgccctcctgagaggggttggagggattggttcagcacaaatggaggaggtacgttttccccttaattggccccgcttgcctcagaaggccagggacaggataggatagagacagagatctcagggtggagggttcccttcctccagtgctgcagcccaccccttcccatccttcaaaacccagacaaaggctaaagcaactcctcccgcgcccctccttttctctccacccacacaaacacgtacacacgcatgtgccatctaccccaaacccttgctctgaagtcacaggcctgacttccagactaggctctgcccctaaggaaatcacctttctggtcttagtctccccatctgaaaatggcataaccaacctacctgcctcaaatacaagaccctgcttgtgaagcgtatcccagaccctggccagctccacgggcgccacagaggtggagagggacccaaccccgactggccaaggcagggccacggaagtctggggagaccgtgcggccgcgggctggcggcggaggagcgaggcgctgacgccgattcccgggaaaggctcttagagctgccgcccaggtcacaacgctaaaaatacccagggcccctggagcctgtgctccagcagcgaggagggggagggagaggccaa

SEQ ID NO: 11469 - protein, 81 aa, Homo sapiens
MSSKNFCRSRRRSCWRSRAARGFGSMSAPAGRGAKQVQLQSRKRRQRGPGLGAPHCSQHPNSGAPGSGLDTSALGDLFPLP

SEQ ID NO: 11470 - DNA, 1257 bp, Homo sapiens
gtctgggttttgaaggatgggaaggggtgggctgcagcactggaggaagggaaccctccaccctgagatctctgtctctatcctatcctgtccctggccttctgaggcaagcggggccaattaaggggaaaacgtacctcctccatttgtgctgaaccaatccctccaacccctctcaggagggcatgatatggagagttgggcattggctgtgttccctgaatacagagtatctctcttgtggtgcctggaactggcatcccctttgtggagcttagggcaagccccgcctctgcatgagacttggtttgtgggacacacttggtttcagggaaggggaaagaggtcaccaagggcagaggtgtccaggccggagccaggggccccactgttgggatgctggctgcagtggggcgccccaagcccaggtcccctctgtcttctctttcgactttgcagctgtacttgttttgctcctctacccgcaggagctgacatggacccaaatcctcgggccgccctggagcgccagcagctccgccttcgggagcggcaaaaattcttcgaggacattttacagccagagacagagtttgtctttcctctgtcccatctgcatctcgagtcgcagagaccccccataggtagtatctcatccatggaagtgaatgtggacacactggagcaagtagaacttattgaccttggggacccggatgcagcagatgtgttcttgccttgcgaagatcctccaccaaccccccagtcgtctgggatggacaaccatttggaggagctgagcctgccgactgaccacgctggctattctccacatgagaccacaggcccagccagagcctgtcgggagaagaccagactctttacttgcagtaggcaccagaggtgggaaggatggtgggattgtgtacctttctaagaattaaccctctcctgctttactgctaattttttcctgctgcaaccctcccaccagtttttggcttactcctgagatatgatttgcaaatgaggagagagaagatgaggttggacaagatgccactgcttttcttagcactcttccctcccctaaaccatcccgtagtcttctaatacagtctctcagacaagtgtctctagatggatgtgaactccttaactcatcaagtaaggtggtactcaagccatgctgcctccttacatcctttttggaacagagcacggtataaataataaactaataataatatgccaacc

SEQ ID NO: 11471 - protein, 248 aa, Homo sapiens
MESWALAVFPEYRVSLLWCLELASPLWSLGQAPPLHETWFVGHTWFQGRGKRSPRAEVSRPEPGAPLLGCWLQWGAPSPGPLCLLFRLCSCTCFAPLPAGADMDPNPRAALERQQLRLRERQKFFEDILQPETEFVFPLSHLHLESQRPPIGSISSMEVNVDTLEQVELIDLGDPDAADVFLPCEDPPPTPQSSGMDNHLEELSLPTDHAGYSPHETTGPARACREKTRLFTCSRHQRWEGWWDCVPF

SEQ ID NO: 11472 - DNA, 1452 bp, Homo sapiens
gtctgggttttgaaggatgggaaggggtgggctgcagcactggaggaagggaaccctccaccctgagatctctgtctctatcctatcctgtccctggccttctgaggcaagcggggccaattaaggggaaaacgtacctcctccatttgtgctgaaccaatccctccaacccctctcaggagggcatgatatggagagttgggcattggctgtgttccctgaatacagagtatctctcttgtggtgcctggaactggcatcccctttgtggagcttagggcaagccccgcctctgcatgagacttggtttgtgggacacacttggtttcagggaaggggaaagaggtcaccaagggcagaggtgtccaggccggagccaggggccccactgttgggatgctggctgcagtggggcgccccaagcccaggtcccctctgtcttctctttcgactttgcagctgtacttgttttgctcctctacccgcaggagctgacatggacccaaatcctcgggccgccctggagcgccagcagctccgccttcgggagcggcaaaaattcttcgaggacattttacagccagagacagagtttgtctttcctctgtcccatctgcatctcgagtcgcagagaccccccataggtagtatctcatccatggaagtgaatgtggacacactggagcaagtagaacttattgaccttggggacccggatgcagcagatgtgttcttgccttgcgaagatcctccaccaaccccccagtcgtctgggatggacaaccatttggaggagctgagcctgccggtgcctacatcagacaggaccacatctaggacctcctcctcctcctcctccgactcctccaccaacctgcatagcccaaatccaagtgatgatggagcagatacgcccttggcacagtcggatgaagaggaggaaaggggtgatggaggggcagagcctggagcctgcagctagcagtgggcccctgcctacagactgaccacgctggctattctccacatgagaccacaggcccagccagagcctgtcgggagaagaccagactctttacttgcagtaggcaccagaggtgggaaggatggtgggattgtgtacctttctaagaattaaccctctcctgctttactgctaattttttcctgctgcaaccctcccaccagtttttggcttactcctgagatatgatttgcaaatgaggagagagaagatgaggttggacaagatgccactgcttttcttagcactcttccctcccctaaaccatcccgtagtcttctaatacagtctctcagacaagtgtctctagatggatgtgaactccttaactcatcaagtaaggtggtactcaagccatgctgcctccttacatcctttttggaacagagcacggtataaataataaactaataataatatgccaacca

SEQ ID NO: 11473 - protein, 263 aa, Homo sapiens
MESWALAVFPEYRVSLLWCLELASPLWSLGQAPPLHETWFVGHTWFQGRGKRSPRAEVSRPEPGAPLLGCWLQWGAPSPGPLCLLFRLCSCTCFAPLPAGADMDPNPRAALERQQLRLRERQKFFEDILQPETEFVFPLSHLHLESQRPPIGSISSMEVNVDTLEQVELIDLGDPDAADVFLPCEDPPPTPQSSGMDNHLEELSLPVPTSDRTTSRTSSSSSSDSSTNLHSPNPSDDGADTPLAQSDEEEERGDGGAEPGACS

SEQ ID NO: 11474 - DNA, 1550 bp, Homo sapiens
gtctgggttttgaaggatgggaaggggtgggctgcagcactggaggaagggaaccctccaccctgagatctctgtctctatcctatcctgtccctggccttctgaggcaagcggggccaattaaggggaaaacgtacctcctccatttgtgctgaaccaatccctccaacccctctcaggagggcatgatatggagagttgggcattggctgtgttccctgaatacagagtatctctcttgtggtgcctggaactggcatcccctttgtggagcttagggcaagccccgcctctgcatgagacttggtttgtgggacacacttggtttcagggaaggggaaagaggtcaccaagggcagaggtgtccaggccggagccaggggccccactgttgggatgctggctgcagtggggcgccccaagcccaggtcccctctgtcttctctttcgactttgcagctgtacttgttttgctcctctacccgcaggagctgacatggacccaaatcctcgggccgccctggagcgccagcagctccgccttcgggagcggcaaaaattcttcgaggacattttacagccagagacagagtttgtctttcctctgtcccatctgcatctcgagtcgcagagaccccccataggtagtatctcatccatggaagtgaatgtggacacactggagcaagtagaacttattgaccttggggacccggatgcagcagatgtgttcttgccttgcgaagatcctccaccaaccccccagtcgtctggtatgcccctctgctttggggacttcagtgccagtcagccagagccggatgtcaggctctgaaacgaggctacaaggctgggctggggaagtacacaaggatggacaaccatttggaggagctgagcctgccggtgcctacatcagacaggaccacatctaggacctcctcctcctcctcctccgactcctccaccaacctgcatagcccaaatccaagtgatgatggagcagatacgcccttggcacagtcggatgaagaggaggaaaggggtgatggaggggcagagcctggagcctgcagctagcagtgggcccctgcctacagactgaccacgctggctattctccacatgagaccacaggcccagccagagcctgtcgggagaagaccagactctttacttgcagtaggcaccagaggtgggaaggatggtgggattgtgtacctttctaagaattaaccctctcctgctttactgctaattttttcctgctgcaaccctcccaccagtttttggcttactcctgagatatgatttgcaaatgaggagagagaagatgaggttggacaagatgccactgcttttcttagcactcttccctcccctaaaccatcccgtagtcttctaatacagtctctcagacaagtgtctctagatggatgtgaactccttaactcatcaagtaaggtggtactcaagccatgctgcctccttacatcctttttggaacagagcacggtataaataataaactaataataatatgccaacca

SEQ ID NO: 11475 - protein, 214 aa, Homo sapiens
MESWALAVFPEYRVSLLWCLELASPLWSLGQAPPLHETWFVGHTWFQGRGKRSPRAEVSRPEPGAPLLGCWLQWGAPSPGPLCLLFRLCSCTCFAPLPAGADMDPNPRAALERQQLRLRERQKFFEDILQPETEFVFPLSHLHLESQRPPIGSISSMEVNVDTLEQVELIDLGDPDAADVFLPCEDPPPTPQSSGMPLCFGDFSASQPEPDVRL

SEQ ID NO: 11476 - DNA, 1033 bp, Homo sapiens
cttgtggtgcctggaactggcatcccctttgtggagcttagggcaagccccgcctctgcatgagacttggagctgacatggacccaaatcctcgggccgccctggagcgccagcagctccgccttcgggagcggcaaaaattcttcgaggacattttacagccagagacagagtttgtctttcctctgtcccatctgcatctcgagtcgcagagaccccccataggtagtatctcatccatggaagtgaatgtggacacactggagcaagtagaacttattgaccttggggacccggatgcagcagatgtgttcttgccttgcgaagatcctccaccaaccccccagtcgtctgggatggacaaccatttggaggagctgagcctgccggtgcctacatcagacaggaccacatctaggacctcctcctcctcctcctccgactcctccaccaacctgcatagcccaaatccaagtgatgatggagcagatacgcccttggcacagtcggatgaagaggaggaaaggggtgatggaggggcagagcctggagcctgcagctagcagtgggcccctgcctacagactgaccacgctggctattctccacatgagaccacaggcccagccagagcctgtcgggagaagaccagactctttacttgcagtaggcaccagaggtgggaaggatggtgggattgtgtacctttctaagaattaaccctctcctgctttactgctaattttttcctgctgcaaccctcccaccagtttttggcttactcctgagatatgatttgcaaatgaggagagagaagatgaggttggacaagatgccactgcttttcttagcactcttccctcccctaaaccatcccgtagtcttctaatacagtctctcagacaagtgtctctagatggatgtgaactccttaactcatcaagtaaggtggtactcaagccatgctgcctccttacatcctttttggaacagagcacggtataaataataaactaataataatatgccaacca

SEQ ID NO: 11477 - protein, 167 aa, Homo sapiens
MRLGADMDPNPRAALERQQLRLRERQKFFEDILQPETEFVFPLSHLHLESQRPPIGSISSMEVNVDTLEQVELIDLGDPDAADVFLPCEDPPPTPQSSGMDNHLEELSLPVPTSDRTTSRTSSSSSSDSSTNLHSPNPSDDGADTPLAQSDEEEERGDGGAEPGACS

SEQ ID NO: 11478 - DNA, 644 bp, Homo sapiens
acttctcacacgcctttcttattggataccggcttttcatggggccgagcgccgctgggtaggcggaagtagccgcaggcatggcggcggctatgccgcttgctctgctcgtcctgttgctcctggggcccggcggctggtgccttgcagaacccccacgcgacagcctgcgggaggaacttgtcatcaccccgctgccttccggggacgtagccgccacattccagttccgcacgcgctgggattcggagcttcagcgggaaggagtgtcccattacaggctctttcccaaagccctggggcagctgatctccaagtattctctacgggagctgcacctgtcattcacacaaggcttttggaggacccgatactgggggccacccttcctgcaggccccatcaggtgcagagctgtgggtctggttccaagacactgtcactgatgtggataaatcttggaaggagctcagtaatgtcctctcagggatcttctgcgcctctctcaacttcatcgactccaccaacacagtcactcccactgcctccttcaaacccctgggtctggccaatgacactgaccactactttctgcgctatgctgtgctgccgcgggaggtggtctgcaccgaaaacctcaccccc

SEQ ID NO: 11479 - protein, 187 aa, Homo sapiens
MAAAMPLALLVLLLLGPGGWCLAEPPRDSLREELVITPLPSGDVAATFQFRTRWDSELQREGVSHYRLFPKALGQLISKYSLRELHLSFTQGFWRTRYWGPPFLQAPSGAELWVWFQDTVTDVDKSWKELSNVLSGIFCASLNFIDSTNTVTPTASFKPLGLANDTDHYFLRYAVLPREVVCTENLT

SEQ ID NO: 11480 - DNA, 634 bp, Homo sapiens
acttctcacacgcctttcttattggataccggcttttcatggggccgagcgccgctgggtaggcggaagtagccgcaggcatggcggcggctatgccgcttgctctgctcgtcctgttgctcctggggcccggcggctggtgccttgcagaacccccacgcgacagcctgcgggaggaacttgtcatcaccccgctgccttccggggacgtagccgccacattccagttccgcacgcgctgggattcggagcttcagcgggaaggagtgtcccattacaggctctttcccaaagccctggggcagctgatctccaagtattctctacgggagctgcacctgtcattcacacaaggcttttggaggacccgatactgggggccacccttcctgcaggccccatcaggtgcagagctgtgggtctggttccaagacactgtcactgatgtggataaatcttggaaggagctcagtaatgtcctctcagggatcttctgcgcctctctcaacttcatcgactccaccaacacagtcactcccactgcctccttcaaacccctgggtctggccaatggaggtggtctgcaccgaaaacctcaccccctggaagaagctcttgccctgtagttccaagg

SEQ ID NO: 11481 - protein, 181 aa, Homo sapiens
MAAAMPLALLVLLLLGPGGWCLAEPPRDSLREELVITPLPSGDVAATFQFRTRWDSELQREGVSHYRLFPKALGQLISKYSLRELHLSFTQGFWRTRYWGPPFLQAPSGAELWVWFQDTVTDVDKSWKELSNVLSGIFCASLNFIDSTNTVTPTASFKPLGLANGGGLHRKPHPLEEALAL

SEQ ID NO: 11482 - DNA, 696 bp, Homo sapiens
acttctcacacgcctttcttattggataccggcttttcatggggccgagcgccgctgggtaggcggaagtagccgcaggcatggcggcggctatgccgcttgctctgctcgtcctgttgctcctggggcccggcggctggtgccttgcagaacccccacgcgacagcctgcgggaggaacttgtcatcaccccgctgccttccggggacgtagccgccacattccagttccgcacgcgctgggattcggagcttcagcgggaaggagtgtcccattacaggctctttcccaaagccctggggcagctgatctccaagtattctctacgggagctgcacctgtcattcacacaaggcttttggaggacccgatactgggggccacccttcctgcaggccccatcaggtgcagagctgtgggtctggttccaagacactgtcactgatgtggataaatcttggaaggagctcagtaatgtcctctcagggatcttctgcgcctctctcaacttcatcgactccaccaacacagtcactcccactgcctccttcaaacccctgggtctggccaatgacactgaccactactttctgcgctatgctgtgctgccgcgggaggtggtctgcaccgaaaacctcaccccctggaagaagctcttgccctgtagttccaaggcaggcctctctgtgctgctga

SEQ ID NO: 11483 - protein, 204 aa, Homo sapiens
MAAAMPLALLVLLLLGPGGWCLAEPPRDSLREELVITPLPSGDVAATFQFRTRWDSELQREGVSHYRLFPKALGQLISKYSLRELHLSFTQGFWRTRYWGPPFLQAPSGAELWVWFQDTVTDVDKSWKELSNVLSGIFCASLNFIDSTNTVTPTASFKPLGLANDTDHYFLRYAVLPREVVCTENLTPWKKLLPCSSKAGLSVL

SEQ ID NO: 11484 - DNA, 804 bp, Homo sapiens
acttctcacacgcctttcttattggataccggcttttcatggggccgagcgccgctgggtaggcggaagtagccgcaggcatggcggcggctatgccgcttgctctgctcgtcctgttgctcctggggcccggcggctggtgccttgcagaacccccacgcgacagcctgcgggaggaacttgtcatcaccccgctgccttccggggacgtagccgccacattccagttccgcacgcgctgggattcggagcttcagcgggaaggagtgtcccattacaggctctttcccaaagccctggggcagctgatctccaagtattctctacgggagctgcacctgtcattcacacaaggcttttggaggacccgatactgggggccacccttcctgcaggccccatcaggtgcagagctgtgggtctggttccaagacactgtcactgatgtggataaatcttggaaggagctcagtaatgtcctctcagggatcttctgcgcctctctcaacttcatcgactccaccaacacagtcactcccactgcctccttcaaacccctgggtctggccaatgacactgaccactactttctgcgctatgctgtgctgccgcgggaggtggtctgcaccgaaaacctcaccccctggaagaagctcttgccctgtagttccaaggcaggcctctctgtgctgctgaaggcagatcgcttgttccacaccagctaccactcccaggcagtgcatatccgccctgtttgcagaaatgcacgctgtactagcatctcctgggagctgaggcagaccc

SEQ ID NO: 11485 - protein, 240 aa, Homo sapiens
MAAAMPLALLVLLLLGPGGWCLAEPPRDSLREELVITPLPSGDVAATFQFRTRWDSELQREGVSHYRLFPKALGQLISKYSLRELHLSFTQGFWRTRYWGPPFLQAPSGAELWVWFQDTVTDVDKSWKELSNVLSGIFCASLNFIDSTNTVTPTASFKPLGLANDTDHYFLRYAVLPREVVCTENLTPWKKLLPCSSKAGLSVLLKADRLFHTSYHSQAVHIRPVCRNARCTSISWELRQ

SEQ ID NO: 11486 - DNA, 2034 bp, Homo sapiens
acttctcacacgcctttcttattggataccggcttttcatggggccgagcgccgctgggtaggcggaagtagccgcaggcatggcggcggctatgccgcttgctctgctcgtcctgttgctcctggggcccggcggctggtgccttgcagaacccccacgcgacagcctgcgggaggaacttgtcatcaccccgctgccttccggggacgtagccgccacattccagttccgcacgcgctgggattcggagcttcagcgggaaggagtgtcccattacaggctctttcccaaagccctggggcagctgatctccaagtattctctacgggagctgcacctgtcattcacacaaggcttttggaggacccgatactgggggccacccttcctgcaggccccatcaggtgcagagctgtgggtctggttccaagacactgtcactgatgtggataaatcttggaaggagctcagtaatgtcctctcagggatcttctgcgcctctctcaacttcatcgactccaccaacacagtcactcccactgcctccttcaaacccctgggtctggccaatgacactgaccactactttctgcgctatgctgtgctgccgcgggaggtggtctgcaccgaaaacctcaccccctggaagaagctcttgccctgtagttccaaggcaggcctctctgtgctgctgaaggcagatcgcttgttccacaccagctaccactcccaggcagtgcatatccgccctgtttgcagaaatgcacgctgtactagcatctcctgggagctgaggcagaccctgtcagttgtatttgatgccttcatcacggggcagggaaagaaagactggtccctcttccggatgttctcccgaaccctcacggagccctgccccctggcttcagagagccgagtctatgtggacatcaccacctacaaccaggacaacgagacattagaggtgcacccacccccgaccactacatatcaggacgtcatcctaggcactcggaagacctatgccatctatgacttgcttgacaccgccatgatcaacaactctcgaaacctcaacatccagctcaagtggaagagacccccagagaatggttacatccactaccagcctgcccaggaccggctgcaaccccacctcctggagatgctgattcagctgccggccaactcagtcaccaaggtttccatccagtttgagcgggcgctgctgaagtggaccgagtacacgccagatcctaaccatggcttctatgtcagcccatctgtcctcagcgcccttgtgcccagcatggtagcagccaagccagtggactgggaagagagtcccctcttcaacagcctgttcccagtctctgatggctctaactactttgtgcggctctacacggagccgctgctggtgaacctgccgacaccggacttcagcatgccctacaacgtgatctgcctcacgtgcactgtggtggccgtgtgctatggctccttctacaatctcctcacccgaaccttccacatcgaggagccccgcacaggtggcctggccaagcggctggccaaccttatccggcgcgcccgaggtgtccccccactctgattcttgccctttccagcagctgcagctgccgtttctctctggggaggggagcccaagggctgtttctgccacttgctctcctcagagttggcttttgaaccaaagtgccctggaccaggtcagggcctacagctgtgttgtccagtacaggagccacgagccaaatgtggcatttgaatttgaattaacttagaaattcatttcctcacctgtagtggccacctctatattgaggtgctcaataagcaaaagtggtcggtggctgctgtattggacagcacagaaaaagatttccatcaccacagaaaggtcggctggcagcactggccaaggtgatggggtgtgctacacagtgtatgtcactgtgtagtggatggagtttactgtttgtggaataaaaacggctgtttccgtggtt

SEQ ID NO: 11487 - protein, 511 aa, Homo sapiens
MAAAMPLALLVLLLLGPGGWCLAEPPRDSLREELVITPLPSGDVAATFQFRTRWDSELQREGVSHYRLFPKALGQLISKYSLRELHLSFTQGFWRTRYWGPPFLQAPSGAELWVWFQDTVTDVDKSWKELSNVLSGIFCASLNFIDSTNTVTPTASFKPLGLANDTDHYFLRYAVLPREVVCTENLTPWKKLLPCSSKAGLSVLLKADRLFHTSYHSQAVHIRPVCRNARCTSISWELRQTLSVVFDAFITGQGKKDWSLFRMFSRTLTEPCPLASESRVYVDITTYNQDNETLEVHPPPTTTYQDVILGTRKTYAIYDLLDTAMINNSRNLNIQLKWKRPPENGYIHYQPAQDRLQPHLLEMLIQLPANSVTKVSIQFERALLKWTEYTPDPNHGFYVSPSVLSALVPSMVAAKPVDWEESPLFNSLFPVSDGSNYFVRLYTEPLLVNLPTPDFSMPYNVICLTCTVVAVCYGSFYNLLTRTFHIEEPRTGGLAKRLANLIRRARGVPPL

SEQ ID NO: 11488 - DNA, 2235 bp, Homo sapiens
acttctcacacgcctttcttattggataccggcttttcatggggccgagcgccgctgggtaggcggaagtagccgcaggcatggcggcggctatgccgcttgctctgctcgtcctgttgctcctggggcccggcggctggtgccttgcagaacccccacgcgacagcctgcgggaggaacttgtcatcaccccgctgccttccggggacgtagccgccacattccagttccgcacgcgctgggattcggagcttcagcgggaaggagtgtcccattacaggctctttcccaaagccctggggcagctgatctccaagtattctctacgggagctgcacctgtcattcacacaaggcttttggaggacccgatactgggggccacccttcctgcaggccccatcaggtgcagagctgtgggtctggttccaagacactgtcactgatgtggataaatcttggaaggagctcagtaatgtcctctcagggatcttctgcgcctctctcaacttcatcgactccaccaacacagtcactcccactgcctccttcaaacccctgggtctggccaatgacactgaccactactttctgcgctatgctgtgctgccgcgggaggtggtctgcaccgaaaacctcaccccctggaagaagctcttgccctgtagttccaaggcaggcctctctgtgctgctgaaggcagatcgcttgttccacaccagctaccactcccaggcagtgcatatccgccctgtttgcagaaatgcacgctgtactagcatctcctgggagctgaggcagaccctgtcagttgtatttgatgccttcatcacggggcagggaaagaaagactggtccctcttccggatgttctcccgaaccctcacggagccctgccccctggcttcagagagccgagtctatgtggacatcaccacctacaaccaggacaacgagacattagaggtgcacccacccccgaccactacatatcaggacgtcatcctaggcactcggaagacctatgccatctatgacttgcttgacaccgccatgatcaacaactctcgaaacctcaacatccagctcaagtggaagagacccccagagaatgaggcccccccagtgcccttcctgcatgcccagcggtacgtgagtggctatgggctgcagaagggggagctgagcacactgctgtacaacacccacccataccgggccttcccggtgctgctgctggacaccgtaccctggtatctgcggctgtatgtgcacaccctcaccatcacctccaagggcaaggagaacaaaccaagttacatccactaccagcctgcccaggaccggctgcaaccccacctcctggagatgctgattcagctgccggccaactcagtcaccaaggtttccatccagtttgagcgggcgctgctgaagtggaccgagtacacgccagatcctaaccatggcttctatgtcagcccatctgtcctcagcgcccttgtgcccagcatggtagcagccaagccagtggactgggaagagagtcccctcttcaacagcctgttcccagtctctgatggctctaactactttgtgcggctctacacggagccgctgctggtgaacctgccgacaccggacttcagcatgccctacaacgtgatctgcctcacgtgcactgtggtggccgtgtgctatggctccttctacaatctcctcacccgaaccttccacatcgaggagccccgcacaggtggcctggccaagcggctggccaaccttatccggcgcgcccgaggtgtccccccactctgattcttgccctttccagcagctgcagctgccgtttctctctggggaggggagcccaagggctgtttctgccacttgctctcctcagagttggcttttgaaccaaagtgccctggaccaggtcagggcctacagctgtgttgtccagtacaggagccacgagccaaatgtggcatttgaatttgaattaacttagaaattcatttcctcacctgtagtggccacctctatattgaggtgctcaataagcaaaagtggtcggtggctgctgtattggacagcacagaaaaagatttccatcaccacagaaaggtcggctggcagcactggccaaggtgatggggtgtgctacacagtgtatgtcactgtgtagtggatggagtttactgtttgtggaataaaaacggctgtttccgtggtt

SEQ ID NO: 11489 - protein, 578 aa, Homo sapiens; identical to SEQ ID NO: 1903

SEQ ID NO: 11490 - DNA, 2130 bp, Homo sapiens
acttctcacacgcctttcttattggataccggcttttcatggggccgagcgccgctgggtaggcggaagtagccgcaggcatggcggcggctatgccgcttgctctgctcgtcctgttgctcctggggcccggcggctggtgccttgcagaacccccacgcgacagcctgcgggaggaacttgtcatcaccccgctgccttccggggacgtagccgccacattccagttccgcacgcgctgggattcggagcttcagcgggaaggagtgtcccattacaggctctttcccaaagccctggggcagctgatctccaagtattctctacgggagctgcacctgtcattcacacaaggcttttggaggacccgatactgggggccacccttcctgcaggccccatcaggtgcagagctgtgggtctggttccaagacactgtcactgatgtggataaatcttggaaggagctcagtaatgtcctctcagggatcttctgcgcctctctcaacttcatcgactccaccaacacagtcactcccactgcctccttcaaacccctgggtctggccaatggcctctctgtgctgctgaaggcagatcgcttgttccacaccagctaccactcccaggcagtgcatatccgccctgtttgcagaaatgcacgctgtactagcatctcctgggagctgaggcagaccctgtcagttgtatttgatgccttcatcacggggcagggaaagaaagactggtccctcttccggatgttctcccgaaccctcacggagccctgccccctggcttcagagagccgagtctatgtggacatcaccacctacaaccaggacaacgagacattagaggtgcacccacccccgaccactacatatcaggacgtcatcctaggcactcggaagacctatgccatctatgacttgcttgacaccgccatgatcaacaactctcgaaacctcaacatccagctcaagtggaagagacccccagagaatgaggcccccccagtgcccttcctgcatgcccagcggtacgtgagtggctatgggctgcagaagggggagctgagcacactgctgtacaacacccacccataccgggccttcccggtgctgctgctggacaccgtaccctggtatctgcggctgtatgtgcacaccctcaccatcacctccaagggcaaggagaacaaaccaagttacatccactaccagcctgcccaggaccggctgcaaccccacctcctggagatgctgattcagctgccggccaactcagtcaccaaggtttccatccagtttgagcgggcgctgctgaagtggaccgagtacacgccagatcctaaccatggcttctatgtcagcccatctgtcctcagcgcccttgtgcccagcatggtagcagccaagccagtggactgggaagagagtcccctcttcaacagcctgttcccagtctctgatggctctaactactttgtgcggctctacacggagccgctgctggtgaacctgccgacaccggacttcagcatgccctacaacgtgatctgcctcacgtgcactgtggtggccgtgtgctatggctccttctacaatctcctcacccgaaccttccacatcgaggagccccgcacaggtggcctggccaagcggctggccaaccttatccggcgcgcccgaggtgtccccccactctgattcttgccctttccagcagctgcagctgccgtttctctctggggaggggagcccaagggctgtttctgccacttgctctcctcagagttggcttttgaaccaaagtgccctggaccaggtcagggcctacagctgtgttgtccagtacaggagccacgagccaaatgtggcatttgaatttgaattaacttagaaattcatttcctcacctgtagtggccacctctatattgaggtgctcaataagcaaaagtggtcggtggctgctgtattggacagcacagaaaaagatttccatcaccacagaaaggtcggctggcagcactggccaaggtgatggggtgtgctacacagtgtatgtcactgtgtagtggatggagtttactgtttgtggaataaaaacggctgtttccgtggtt

SEQ ID NO: 11491 - protein, 543 aa, Homo sapiens
MAAAMPLALLVLLLLGPGGWCLAEPPRDSLREELVITPLPSGDVAATFQFRTRWDSELQREGVSHYRLFPKALGQLISKYSLRELHLSFTQGFWRTRYWGPPFLQAPSGAELWVWFQDTVTDVDKSWKELSNVLSGIFCASLNFIDSTNTVTPTASFKPLGLANGLSVLLKADRLFHTSYHSQAVHIRPVCRNARCTSISWELRQTLSVVFDAFITGQGKKDWSLFRMFSRTLTEPCPLASESRVYVDITTYNQDNETLEVHPPPTTTYQDVILGTRKTYAIYDLLDTAMINNSRNLNIQLKWKRPPENEAPPVPFLHAQRYVSGYGLQKGELSTLLYNTHPYRAFPVLLLDTVPWYLRLYVHTLTITSKGKENKPSYIHYQPAQDRLQPHLLEMLIQLPANSVTKVSIQFERALLKWTEYTPDPNHGFYVSPSVLSALVPSMVAAKPVDWEESPLFNSLFPVSDGSNYFVRLYTEPLLVNLPTPDFSMPYNVICLTCTVVAVCYGSFYNLLTRTFHIEEPRTGGLAKRLANLIRRARGVPPL

SEQ ID NO: 11492 - DNA, 616 bp, Homo sapiens
cttattggataccggcttttcatggggccgagcgccgctgggtaggcggaagtagccgcaggcatggcggcggctatgccgcttgctctgctcgtcctgttgctcctggggcccggcggctggtgccttgcagaacccccacgcgacagcctgcgggaggaacttgtcatcaccccgctgccttccggggacgtagccgccacattccagttccgcacgcgctgggattcggagcttcagcgggaaggagtgtcccattacaggctctttcccaaagccctggggcagctgatctccaagtattctctacgggagctgcacctgtcattcacacaaggcttttggaggacccgatactgggggccacccttcctgcaggccccatcagacactgaccactactttctgcgctatgctgtgctgccgcgggaggtggtctgcaccgaaaacctcaccccctggaagaagctcttgccctgtagttccaaggcaggcctctctgtgctgctgaaggcagatcgcttgttccacaccagctaccactcccaggcagtgcatatccgccctgtttgcagaaatgcacgctgtactagcatctcctgggagctgaggcaga

SEQ ID NO: 11493 - protein, 183 aa, Homo sapiens
MAAAMPLALLVLLLLGPGGWCLAEPPRDSLREELVITPLPSGDVAATFQFRTRWDSELQREGVSHYRLFPKALGQLISKYSLRELHLSFTQGFWRTRYWGPPFLQAPSDTDHYFLRYAVLPREVVCTENLTPWKKLLPCSSKAGLSVLLKADRLFHTSYHSQAVHIRPVCRNARCTSISWELR

SEQ ID NO: 11494 - DNA, 2818 bp, Homo sapiens
tgggtaggcggaagtagccgcaggcatggcggcggctatgccgcttgctctgctcgtcctgttgctcctggggcccggcggctggtgccttgcagaacccccacgcgacagcctgcgggaggaacttgtcatcaccccgctgccttccggggacgtagccgccacattccagttccgcacgcgctgggattcggagcttcagcgggaaggaggtgagggcgcgagatctgaccagggaaagatttccgtagtgcctgctggctggccggccgtgggatgaaggcaaactttgggggcggggcctaattcctgggtagagttcgggatcctgggtgtggaccccgacgaggtggggatcgtcactcacctgctcccgtttccccagtgtcccattacaggctctttcccaaagccctggggcagctgatctccaagtattctctacgggagctgcacctgtcattcacacaaggcttttggaggacccgatactgggggccacccttcctgcaggccccatcaggtgcagagctgtgggtctggttccaagacactgtcactgagtgagtgcacaccttgggccctgttgcaggccatggagggaatgtggctgggagagtgttgtcatcctgccactgctcttggggacagcacttccagtaggcagcgattccatgggggtagagctggcattggaagtaagaaatgttaccacagatgaataaacttcccaatcctaaaactttcagacctgaggtagcacatgcatatccctggagaggcaaatagcaaacaattaatgcttatttggagataagacttctcaccatgatagtagaatcaggacttacctttattcccagagtatacacagggtagtatgcattgttttgcccagcccagcacattcaaggaagatcagtgagctcatttcagctacccagcaagtgggctggctgggggcagcaatgttccagctccatcaactggcccgtctaatagttaagaatacagcctcctcctatcataggtttagcagccagctgtggactttgaaagagggagcagaggtagccccaggacagtgagtggatttgtgtctctatccagtgtggataaatcttggaaggagctcagtaatgtcctctcagggatcttctgcgcctctctcaacttcatcgactccaccaacacagtcactcccactgcctccttcaaacccctgggtctggccaatggtgagataacccctacagccctttccttcttcctcttacctcctgcccaaacctttgcctccttttccctcagtttcctgcttcctcagcctgggctagatcctaagtcccctgtgtgtgcaggcccccaatactgtgccatctctgcatgccttttcccaaggagagaagggagtcctactcccagttgggactgtccagactgtggtgctagaggtggtgtggggagcaggagggtcattcccatctctggaatgtggatcccgaggggtcagagcccaaggcccaccccagacagacctctgtctccctcagacactgaccactactttctgcgctatgctgtgctgccgcgggaggtggtctgcaccgaaaacctcaccccctggaagaagctcttgccctgtagttccaaggcaggcctctctgtgctgctgaaggcagatcgcttgttccacaccagctaccactcccaggcagtgcatatccgccctgtttgcagaaatgcacgctgtactagcatctcctgggagctgaggcagaccctgtcagttgtatttgatgccttcatcacggggcagggaaagaaagactggtccctcttccggatgttctcccgaaccctcacggagccctgccccctggcttcagagagccgagtctatgtggacatcaccacctacaaccaggacaacgagacattagaggtgcacccacccccgaccactacatatcaggacgtcatcctaggcactcggaagacctatgccatctatgacttgcttgacaccgccatgatcaacaactctcgaaacctcaacatccagctcaagtggaagagacccccagagaatggttacatccactaccagcctgcccaggaccggctgcaaccccacctcctggagatgctgattcagctgccggccaactcagtcaccaaggtttccatccagtttgagcgggcgctgctgaagtggaccgagtacacgccagatcctaaccatggcttctatgtcagcccatctgtcctcagcgcccttgtgcccagcatggtagcagccaagccagtggactgggaagagagtcccctcttcaacagcctgttcccagtctctgatggctctaactactttgtgcggctctacacggagccgctgctggtgaacctgccgacaccggacttcagcatgccctacaacgtgatctgcctcacgtgcactgtggtggccgtgtgctatggctccttctacaatctcctcacccgaaccttccacatcgaggagccccgcacaggtggcctggccaagcggctggccaaccttatccggcgcgcccgaggtgtccccccactctgattcttgccctttccagcagctgcagctgccgtttctctctggggaggggagcccaagggctgtttctgccacttgctctcctcagagttggcttttgaaccaaagtgccctggaccaggtcagggcctacaggccaaggtgatggggtgtgctacacagtgtatgtcactgtgtagtggatggagtttactgtttgtggaataaaaacggctgtttccgtgg

SEQ ID NO: 11495 - protein, 367 aa, Homo sapiens
MWIPRGQSPRPTPDRPLSPSDTDHYFLRYAVLPREVVCTENLTPWKKLLPCSSKAGLSVLLKADRLFHTSYHSQAVHIRPVCRNARCTSISWELRQTLSVVFDAFITGQGKKDWSLFRMFSRTLTEPCPLASESRVYVDITTYNQDNETLEVHPPPTTTYQDVILGTRKTYAIYDLLDTAMINNSRNLNIQLKWKRPPENGYIHYQPAQDRLQPHLLEMLIQLPANSVTKVSIQFERALLKWTEYTPDPNHGFYVSPSVLSALVPSMVAAKPVDWEESPLFNSLFPVSDGSNYFVRLYTEPLLVNLPTPDFSMPYNVICLTCTVVAVCYGSFYNLLTRTFHIEEPRTGGLAKRLANLIRRARGVPPL

SEQ ID NO: 11496 - DNA, 551 bp, Homo sapiens
ggaagtagccgcaggcatggcggcggctatgccgcttgctctgctcgtcctgttgctcctggggcccggcggctggtgccttgcagaacccccacgcgacagcctgcgggaggaacttgtcatcaccccgctgccttccggggacgtagccgccacattccagttccgcacgcgctgggattcggagcttcagcgggaaggagtgtggataaatcttggaaggagctcagtaatgtcctctcagggatcttctgcgcctctctcaacttcatcgactccaccaacacagtcactcccactgcctccttcaaacccctgggtctggccaatgacactgaccactactttctgcgctatgctgtgctgccgcgggaggtggtctgcaccgaaaacctcaccccctggaagaagctcttgccctgtagttccaaggcaggcctctctgtgctgctgaaggcagatcgcttgttccacaccagctaccactcccaggcagtgcatatccgccctgtttgcagaaatgcacgctgtactagcatctcctgggagct

SEQ ID NO: 11497 - protein, 145 aa, Homo sapiens
MAAAMPLALLVLLLLGPGGWCLAEPPRDSLREELVITPLPSGDVAATFQFRTRWDSELQREGVWINLGRSSVMSSQGSSAPLSTSSTPPTQSLPLPPSNPWVWPMTLTTTFCAMLCCRGRWSAPKTSPPGRSSCPVVPRQASLCC

SEQ ID NO: 11498 - DNA, 1123 bp, Homo sapiens
gaggcccccccagtgcccttcctgcatgcccagcggtacgtgagtggctatgggctgcagaagggggagctgagcacactgctgtacaacacccacccataccgggccttcccggtgctgctgctggacaccgtaccctggtatctgcggctgtatgtgcacaccctcaccatcacctccaagggcaaggagaacaaaccaagttacatccactaccagcctgcccaggaccggctgcaaccccacctcctggagatgctgattcagctgccggccaactcagtcaccaaggtttccatccagtttgagcgggcgctgctgaagtggaccgagtacacgccagatcctaaccatggcttctatgtcagcccatctgtcctcagcgcccttgtgcccagcatggtagcagccaagccagtggactgggaagagagtcccctcttcaacagcctgttcccagtctctgatggctctaactactttgtgcggctctacacggagccgctgctggtgaacctgccgacaccggacttcagcatgccctacaacgtgatctgcctcacgtgcactgtggtggccgtgtgctatggctccttctacaatctcctcacccgaaccttccacatcgaggagccccgcacaggtggcctggccaagcggctggccaaccttatccggcgcgcccgaggtgtccccccactctgattcttgccctttccagcagctgcagctgccgtttctctctggggaggggagcccaagggctgtttctgccacttgctctcctcagagttggcttttgaaccaaagtgccctggaccaggtcagggcctacagctgtgttgtccagtacaggagccacgagccaaatgtggcatttgaatttgaattaacttagaaattcatttcctcacctgtagtggccacctctatattgaggtgctcaataagcaaaagtggtcggtggctgctgtattggacagcacagaaaaagatttccatcaccacagaaaggtcggctggcagcactggccaaggtgatggggtgtgctacacagtgtatgtcactgtgtagtggatggagtttactgtttgtggaataaaaacggctgtttccgtggtt

SEQ ID NO: 11499 - protein, 149 aa, Homo sapiens
MLIQLPANSVTKVSIQFERALLKWTEYTPDPNHGFYVSPSVLSALVPSMVAAKPVDWEESPLFNSLFPVSDGSNYFVRLYTEPLLVNLPTPDFSMPYNVICLTCTVVAVCYGSFYNLLTRTFHIEEPRTGGLAKRLANLIRRARGVPPL

SEQ ID NO: 11500 - DNA, 2007 bp, Homo sapiens
tcttagctcactgcaacctccacctcccgggttcaagcgattctcctgcctccacctcccgagtagctgggactacaggcgcgtgccaccacgcctggctaattttttctgtttttagtagagatgcggtttcactgtgttagccagggtggtctcgatcttctgaccttgtgatctgcccgccttggcctcccaaagtgctgggattaaaataaattgtttttaattagctgggggtggtgttgcacgcctgtagtcccagctactcaagaggctgaggtgggaggatcacttgaacccaggaggtcaaggctatagtgagccatgatcatactattgcacttcagcatgggcgacagtgtgagaccctgtcacgaaaaaaaaaaaagtttctttttctttaaaattactagactattcttagagcagttttaggtttacagaaaaactgagcacaaagcacagagttcccatatactccctgtctccacacccagaatgtcccttattataaatgtcttgtctttggtgtggtactcttcagtctctcttcatctgtagcagtgcccatgccttttttttttttttttaatgtcatttatttgttgaagaaactgggtcatttgttgtgtagaatgttccacattctgggtttgtccttgtgctagtgtttaacacacccctcctctcctatatttcttgtgtgttggtggttagatttagaaacctgattagattcatgtcccacatttttggcaagaaaaattcccaggtggttctgtgaacttcttcttgcgtcacatcaggcacttggtgtctggtgccccagttgtagtgatgtgaagattgattagccatctgcagcactcctaacaacctctcttgatcgcatcctgggatcactgccctggaaacatcctctcccttttcttagcccctgctttcttcccttgcctgcctggcttctatgctcccaagcccatcttctaggcacccagattgaggctccatggcaagcagcagggacaggggcagcaggtagcctgaccccaggaaagagatgtgggtgaccttgcatgtctccaggttacatccactaccagcctgcccaggaccggctgcaaccccacctcctggagatgctgattcagctgccggccaactcagtcaccaaggtttccatccagtttgagcgggcgctgctgaagtggaccgagtacacgccagatcctaaccatggcttctatgtcagcccatctgtcctcagcgcccttgtgcccagcatggtagcagccaagccagtggactgggaagagagtcccctcttcaacagcctgttcccagtctctgatggctctaactactttgtgcggctctacacggagccgctgctggtgaacctgccgacaccggacttcagcatgccctacaacgtgatctgcctcacgtgcactgtggtggccgtgtgctatggctccttctacaatctcctcacccgaaccttccacatcgaggagccccgcacaggtggcctggccaagcggctggccaaccttatccggcgcgcccgaggtgtccccccactctgattcttgccctttccagcagctgcagctgccgtttctctctggggaggggagcccaagggctgtttctgccacttgctctcctcagagttggcttttgaaccaaagtgccctggaccaggtcagggcctacagctgtgttgtccagtacaggagccacgagccaaatgtggcatttgaatttgaattaacttagaaattcatttcctcacctgtagtggccacctctatattgaggtgctcaataagcaaaagtggtcggtggctgctgtattggacagcacagaaaaagatttccatcaccacagaaaggtcggctggcagcactggccaaggtgatggggtgtgctacacagtgtatgtcactgtgtagtggatggagtttactgtttgtggaataaaaacggctgtttccgtggtt

SEQ ID NO: 11501 - protein, 170 aa, Homo sapiens [sequence omitted]

SEQ ID NO: 11502 - DNA, 2465 bp, Homo sapiens
gcgcgctctgctcggctgcaggctcaggaagcggcgcggcggcacgtgctgggccagagccccgcgccctgcgtccagccgccgggtgtgtgcgcccgcgtagcccagcgtcgcgcctcggcgcccccacgcgcccacgcagcggcgcggggacccgggcgggggcagagggagggcccggcccagggaggagaaggggccggtcctcccggcgcaggcagcagccgcggcagcccaggaggcggaggcagcggcaacggcagagacagcaacgtgcccgccgcagtcagcccggcctcgtcggacccgcaccggcccgcccgcccgcccgcaccgcgtcggggcgccctctccactgcgcgcggtacaaggaaatggtagaactagtgatctcacccagcctcactgtaaacagcgattgtctggataaactgaagtttaaccgtgctgacgctgctgtgtggactctgagtgacagacaaggcatcaccaaatcggcccccctgagagtgtcccagctcttctccagatcttgcccacgtgtcctcccccgccagccttccacagccatggcagcctacggccagacgcagtacagtgcggggatccagcaggctaccccctatacagcttacccacctccagcacaagcctatggaatcccttcctacagcatcaagacagaagacagcttgaaccattcccctggccagagtggattcctcagctatggctccagcttcagcacctcacccactggacagagcccatacacctaccagatgcacggcacaacagggttctatcaaggaggaaatggactgggcaacgcagccggtttcgggagtgtgcaccaggactatccttcctaccccggcttcccccagagccagtacccccagtattacggctcatcctacaaccctccctacgtcccggccagcagcatctgcccttcgcccctctccacgtccacctacgtcctccaggaggcatctcacaacgtccccaaccagagttccgagtcacttgctggtgaatacaacacacacaatggaccttccacaccagcgaaagagggagacacagacaggccgcaccgggcctccgacgggaagctccgaggccggtctaagaggagcagtgacccgtccccggcaggggacaatgagattgagcgtgtgttcgtgtgggacttggatgagacaataattatttttcactccttactcacggggacatttgcatccagatacgggaaggacaccacgacgtccgtgcgcattggccttatgatggaagagatgatcttcaaccttgcagatacacatctgttcttcaatgacctggaggattgtgaccagatccacgttgatgacgtctcatcagatgacaatggccaagatttaagcacatacaacttctccgctgacggcttccacagttcggccccaggagccaacctgtgcctgggctctggcgtgcacggcggcgtggactggatgaggaagctggccttccgctaccggcgggtgaaggagatgtacaatacctacaagaacaacgttggtgggaaggagagctgcttcgagaggataatgcagagattcggcagaaaagctgtctacgtggtgatcggtgatggtgtggaagaggagcaaggagcgaaaaagcacaacatgcctttctggcggatatcctgccacgcagacctggaggcactgaggcacgccctggagctggagtatttatagcaggatcagcagcatctccacctgccatctcaccctcagaccccctcgccttccccacctccccaccgagaactccagagacccagatgttggacaccaggaaggggccccacagccgagacgacgtgtccagtgaccatctcagaagccgtccatcagtccaaatgggggttctgagaaggaaagtacccaacattggcttcggagtatttgactttggggaaaagggctggctcggagtctagactcttctgtaagactcacagaacaaaagcaaggaattgctgatttggggggtgcctggtgatgaggaggggatgggtttgtcttgtcttctttttaatttatggactagtctcattactccggaattatgctcttgtacctgtgtggctgggtttcttagtcgttggtttggtttggttttttgaactggtatgtggggtggttcacagttctaatgtaagcactctattctccaagttgtgctttgtggggacaatcattctttgaacattagagaggaaggcagttcaagctgttgaaaagactattgcttatttttgtttttaaagacctacttgacgtcatgtggacagtgcacgtgccttacgctacatcttgttttctaggaagagggggatgctgggaaggaatgggtgctttgtgatggataaaaggcattaaataaaaccacgtttacattttgaa

SEQ ID NO: 11503 - protein, 459 aa, Homo sapiens
MVELVISPSLTVNSDCLDKLKFNRADAAVWTLSDRQGITKSAPLRVSQLFSRSCPRVLPRQPSTAMAAYGQTQYSAGIQQATPYTAYPPPAQAYGIPSYSIKTEDSLNHSPGQSGFLSYGSSFSTSPTGQSPYTYQMHGTTGFYQGGNGLGNAAGFGSVHQDYPSYPGFPQSQYPQYYGSSYNPPYVPASSICPSPLSTSTYVLQEASHNVPNQSSESLAGEYNTHNGPSTPAKEGDTDRPHRASDGKLRGRSKRSSDPSPAGDNEIERVFVWDLDETIIIFHSLLTGTFASRYGKDTTTSVRIGLMMEEMIFNLADTHLFFNDLEDCDQIHVDDVSSDDNGQDLSTYNFSADGFHSSAPGANLCLGSGVHGGVDWMRKLAFRYRRVKEMYNTYKNNVGGKESCFERIMQRFGRKAVYVVIGDGVEEEQGAKKHNMPFWRISCHADLEALRHALELEYL

SEQ ID NO: 11504 - DNA, 2492 bp, Homo sapiens
aaataactcacaaacacctgtaaaaactgttacagtgactggtgtgtgtgatagagggccatgggcctgtgaaagctgcaggagggaaatcgcttactcagggagagcctggggaaatcctgccggaactgaggcctctgcagggtgagcagaggtacaaggaaatggtagaactagtgatctcacccagcctcactgtaaacagcgattgtctggataaactgaagtttaaccgtgctgacgctgctgtgtggactctgagtgacagacaaggcatcaccaaatcggcccccctgagagtgtcccagctcttctccagatcttgcccacgtgtcctcccccgccagccttccacagccatggcagcctacggccagacgcagtacagtgcggggatccagcaggctaccccctatacagcttacccacctccagcacaagcctatggaatcccttcctacagcatcaagacagaagacagcttgaaccattcccctggccagagtggattcctcagctatggctccagcttcagcacctcacccactggacagagcccatacacctaccagatgcacggcacaacagggttctatcaaggaggaaatggactgggcaacgcagccggtttcgggagtgtgcaccaggactatccttcctaccccggcttcccccagagccagtacccccagtattacggctcatcctacaaccctccctacgtcccggccagcagcatctgcccttcgcccctctccacgtccacctacgtcctccaggaggcatctcacaacgtccccaaccagagttccgagtcacttgctggtgaatacaacacacacaatggaccttccacaccagcgaaagagggagacacagacaggccgcaccgggcctccgacgggaagctccgaggccggtctaagaggagcagtgacccgtccccggcaggggacaatgagattgagcgtgtgttcgtgtgggacttggatgagacaataattatttttcactccttactcacggggacatttgcatccagatacgggaaggacaccacgacgtccgtgcgcattggccttatgatggaagagatgatcttcaaccttgcagatacacatctgttcttcaatgacctggaggattgtgaccagatccacgttgatgacgtctcatcagatgacaatggccaagatttaagcacatacaacttctccgctgacggcttccacagttcggccccaggagccaacctgtgcctgggctctggcgtgcacggcggcgtggactggatgaggaagctggccttccgctaccggcgggtgaaggagatgtacaatacctacaagaacaacgttggtgggttgataggcactcccaaaagggagacctggctacagctccgagctgagctggaagctctcacagacctctggctgacccactccctgaaggcactaaacctcatcaactcccggcccaactgtgtcaatgtgctggtcaccaccactcaactaattcctgccctggccaaagtcctgctatatggcctggggtctgtgtttcctattgagaacatctacagtgcaaccaagacagggaaggagagctgcttcgagaggataatgcagagattcggcagaaaagctgtctacgtggtgatcggtgatggtgtggaagaggagcaaggagcgaaaaagcacaacatgcctttctggcggatatcctgccacgcagacctggaggcactgaggcacgccctggagctggagtatttatagcaggatcagcagcatctccacctgccatctcaccctcagaccccctcgccttccccacctccccaccgagaactccagagacccagatgttggacaccaggaaggggccccacagccgagacgacgtgtccagtgaccatctcagaagccgtccatcagtccaaatgggggttctgagaaggaaagtacccaacattggcttcggagtatttgactttggggaaaagggctggctcggagtctagactcttctgtaagactcacagaacaaaagcaaggaattgctgatttggggggtgcctggtgatgaggaggggatgggtttgtcttgtcttctttttaatttatggactagtctcattactccggaattatgctcttgtacctgtgtggctgggtttcttagtcgttggtttggtttggttttttgaactggtatgtggggtggttcacagttctaatgtaagcactctattctccaagttgtgctttgtggggacaatcattctttgaacattagagaggaaggcagttcaagctgttgaaaagactattgcttatttttgtttttaaagacctacttgacgtcatgtggacagtgcacgtgccttacgctacatcttgttttctaggaagagggggatgctgggaaggaatgggtgctttgtgatggataaaaggcattaaataaaaccacgtttacattttgaa

SEQ ID NO: 11505 - protein, 538 aa, Homo sapiens; identical to SEQ ID NO: 1905

SEQ ID NO: 11506 - DNA, 2486 bp, Homo sapiens
taaatgaattccatgcttttccttcctttcccttccctgccttcgtgaaagggaagctaagtctttctcctaccccagattccttgaaggctgtctgagttctctcttccttcccctgcatagagaataagctggtctccaatttcaggtacaaggaaatggtagaactagtgatctcacccagcctcactgtaaacagcgattgtctggataaactgaagtttaaccgtgctgacgctgctgtgtggactctgagtgacagacaaggcatcaccaaatcggcccccctgagagtgtcccagctcttctccagatcttgcccacgtgtcctcccccgccagccttccacagccatggcagcctacggccagacgcagtacagtgcggggatccagcaggctaccccctatacagcttacccacctccagcacaagcctatggaatcccttcctacagcatcaagacagaagacagcttgaaccattcccctggccagagtggattcctcagctatggctccagcttcagcacctcacccactggacagagcccatacacctaccagatgcacggcacaacagggttctatcaaggaggaaatggactgggcaacgcagccggtttcgggagtgtgcaccaggactatccttcctaccccggcttcccccagagccagtacccccagtattacggctcatcctacaaccctccctacgtcccggccagcagcatctgcccttcgcccctctccacgtccacctacgtcctccaggaggcatctcacaacgtccccaaccagagttccgagtcacttgctggtgaatacaacacacacaatggaccttccacaccagcgaaagagggagacacagacaggccgcaccgggcctccgacgggaagctccgaggccggtctaagaggagcagtgacccgtccccggcaggggacaatgagattgagcgtgtgttcgtgtgggacttggatgagacaataattatttttcactccttactcacggggacatttgcatccagatacgggaaggacaccacgacgtccgtgcgcattggccttatgatggaagagatgatcttcaaccttgcagatacacatctgttcttcaatgacctggaggattgtgaccagatccacgttgatgacgtctcatcagatgacaatggccaagatttaagcacatacaacttctccgctgacggcttccacagttcggccccaggagccaacctgtgcctgggctctggcgtgcacggcggcgtggactggatgaggaagctggccttccgctaccggcgggtgaaggagatgtacaatacctacaagaacaacgttggtgggttgataggcactcccaaaagggagacctggctacagctccgagctgagctggaagctctcacagacctctggctgacccactccctgaaggcactaaacctcatcaactcccggcccaactgtgtcaatgtgctggtcaccaccactcaactaattcctgccctggccaaagtcctgctatatggcctggggtctgtgtttcctattgagaacatctacagtgcaaccaagacagggaaggagagctgcttcgagaggataatgcagagattcggcagaaaagctgtctacgtggtgatcggtgatggtgtggaagaggagcaaggagcgaaaaagcacaacatgcctttctggcggatatcctgccacgcagacctggaggcactgaggcacgccctggagctggagtatttatagcaggatcagcagcatctccacctgccatctcaccctcagaccccctcgccttccccacctccccaccgagaactccagagacccagatgttggacaccaggaaggggccccacagccgagacgacgtgtccagtgaccatctcagaagccgtccatcagtccaaatgggggttctgagaaggaaagtacccaacattggcttcggagtatttgactttggggaaaagggctggctcggagtctagactcttctgtaagactcacagaacaaaagcaaggaattgctgatttggggggtgcctggtgatgaggaggggatgggtttgtcttgtcttctttttaatttatggactagtctcattactccggaattatgctcttgtacctgtgtggctgggtttcttagtcgttggtttggtttggttttttgaactggtatgtggggtggttcacagttctaatgtaagcactctattctccaagttgtgctttgtggggacaatcattctttgaacattagagaggaaggcagttcaagctgttgaaaagactattgcttatttttgtttttaaagacctacttgacgtcatgtggacagtgcacgtgccttacgctacatcttgttttctaggaagagggggatgctgggaaggaatgggtgctttgtgatggataaaaggcattaaataaaaccacgtttacattttgaa

SEQ ID NO: 11507 - protein, 538 aa, Homo sapiens; identical to SEQ ID NO: 1905

SEQ ID NO: 11508 - DNA, 2436 bp, Homo sapiens
gcagagctcaactctgcccctcaaaccacaataggaaccagtggtttccgggtgatcctgatgacagtttccagtgtctacctggaatgaaacgaatggtacaaggaaatggtagaactagtgatctcacccagcctcactgtaaacagcgattgtctggataaactgaagtttaaccgtgctgacgctgctgtgtggactctgagtgacagacaaggcatcaccaaatcggcccccctgagagtgtcccagctcttctccagatcttgcccacgtgtcctcccccgccagccttccacagccatggcagcctacggccagacgcagtacagtgcggggatccagcaggctaccccctatacagcttacccacctccagcacaagcctatggaatcccttcctacagcatcaagacagaagacagcttgaaccattcccctggccagagtggattcctcagctatggctccagcttcagcacctcacccactggacagagcccatacacctaccagatgcacggcacaacagggttctatcaaggaggaaatggactgggcaacgcagccggtttcgggagtgtgcaccaggactatccttcctaccccggcttcccccagagccagtacccccagtattacggctcatcctacaaccctccctacgtcccggccagcagcatctgcccttcgcccctctccacgtccacctacgtcctccaggaggcatctcacaacgtccccaaccagagttccgagtcacttgctggtgaatacaacacacacaatggaccttccacaccagcgaaagagggagacacagacaggccgcaccgggcctccgacgggaagctccgaggccggtctaagaggagcagtgacccgtccccggcaggggacaatgagattgagcgtgtgttcgtgtgggacttggatgagacaataattatttttcactccttactcacggggacatttgcatccagatacgggaaggacaccacgacgtccgtgcgcattggccttatgatggaagagatgatcttcaaccttgcagatacacatctgttcttcaatgacctggaggattgtgaccagatccacgttgatgacgtctcatcagatgacaatggccaagatttaagcacatacaacttctccgctgacggcttccacagttcggccccaggagccaacctgtgcctgggctctggcgtgcacggcggcgtggactggatgaggaagctggccttccgctaccggcgggtgaaggagatgtacaatacctacaagaacaacgttggtgggttgataggcactcccaaaagggagacctggctacagctccgagctgagctggaagctctcacagacctctggctgacccactccctgaaggcactaaacctcatcaactcccggcccaactgtgtcaatgtgctggtcaccaccactcaactaattcctgccctggccaaagtcctgctatatggcctggggtctgtgtttcctattgagaacatctacagtgcaaccaagacagggaaggagagctgcttcgagaggataatgcagagattcggcagaaaagctgtctacgtggtgatcggtgatggtgtggaagaggagcaaggagcgaaaaagcacaacatgcctttctggcggatatcctgccacgcagacctggaggcactgaggcacgccctggagctggagtatttatagcaggatcagcagcatctccacctgccatctcaccctcagaccccctcgccttccccacctccccaccgagaactccagagacccagatgttggacaccaggaaggggccccacagccgagacgacgtgtccagtgaccatctcagaagccgtccatcagtccaaatgggggttctgagaaggaaagtacccaacattggcttcggagtatttgactttggggaaaagggctggctcggagtctagactcttctgtaagactcacagaacaaaagcaaggaattgctgatttggggggtgcctggtgatgaggaggggatgggtttgtcttgtcttctttttaatttatggactagtctcattactccggaattatgctcttgtacctgtgtggctgggtttcttagtcgttggtttggtttggttttttgaactggtatgtggggtggttcacagttctaatgtaagcactctattctccaagttgtgctttgtggggacaatcattctttgaacattagagaggaaggcagttcaagctgttgaaaagactattgcttatttttgtttttaaagacctacttgacgtcatgtggacagtgcacgtgccttacgctacatcttgttttctaggaagagggggatgctgggaaggaatgggtgctttgtgatggataaaaggcattaaataaaaccacgtttacattttgaa

SEQ ID NO: 11509 - protein, 538 aa, Homo sapiens; identical to SEQ ID NO: 1905

SEQ ID NO: 11510 - DNA, 2249 bp, Homo sapiens
ggtacaaggaaatggtagaactagtgatctcacccagcctcactgtaaacagcgattgtctggataaactgaagtttaaccgtgctgacgctgctgtgtggactctgagtgacagacaaggcatcaccaaatcggcccccctgagagtgtcccagctcttctccagatcttgcccacgtgtcctcccccgccagccttccacagccatggcagcctacggccagacgcagtacagtgcggggatccagcaggctaccccctatacagcttacccacctccagcacaagcctatggaatcccttcctacagcatcaagacagaagacagcttgaaccattcccctggccagagtggattcctcagctatggctccagcttcagcacctcacccactggacagagcccatacacctaccagatgcacggcacaacagggttctatcaaggaggaaatggactgggcaacgcagccggtttcgggagtgtgcaccaggactatccttcctaccccggcttcccccagagccagtacccccagtattacggctcatcctacaaccctccctacgtcccggccagcagcatctgcccttcgcccctctccacgtccacctacgtcctccaggaggcatctcacaacgtccccaaccagagttccgagtcacttgctggtgaatacaacacacacaatggaccttccacaccagcgaaagagggagacacagacaggccgcaccgggcctccgacgggaagctccgaggccggtctaagaggagcagtgacccgtccccggcaggggacaatgagattgagcgtgtgttcgtgtgggacttggatgagacaataattatttttcactccttactcacggggacatttgcatccagatacgggaaggattgtgaccagatccacgttgatgacgtctcatcagatgacaatggccaagatttaagcacatacaacttctccgctgacggcttccacagttcggccccaggagccaacctgtgcctgggctctggcgtgcacggcggcgtggactggatgaggaagctggccttccgctaccggcgggtgaaggagatgtacaatacctacaagaacaacgttggtgggttgataggcactcccaaaagggagacctggctacagctccgagctgagctggaagctctcacagacctctggctgacccactccctgaaggcactaaacctcatcaactcccggcccaactgtgtcaatgtgctggtcaccaccactcaactaattcctgccctggccaaagtcctgctatatggcctggggtctgtgtttcctattgagaacatctacagtgcaaccaagacagggaaggagagctgcttcgagaggataatgcagagattcggcagaaaagctgtctacgtggtgatcggtgatggtgtggaagaggagcaaggagcgaaaaagcacaacatgcctttctggcggatatcctgccacgcagacctggaggcactgaggcacgccctggagctggagtatttatagcaggatcagcagcatctccacctgccatctcaccctcagaccccctcgccttccccacctccccaccgagaactccagagacccagatgttggacaccaggaaggggccccacagccgagacgacgtgtccagtgaccatctcagaagccgtccatcagtccaaatgggggttctgagaaggaaagtacccaacattggcttcggagtatttgactttggggaaaagggctggctcggagtctagactcttctgtaagactcacagaacaaaagcaaggaattgctgatttggggggtgcctggtgatgaggaggggatgggtttgtcttgtcttctttttaatttatggactagtctcattactccggaattatgctcttgtacctgtgtggctgggtttcttagtcgttggtttggtttggttttttgaactggtatgtggggtggttcacagttctaatgtaagcactctattctccaagttgtgctttgtggggacaatcattctttgaacattagagaggaaggcagttcaagctgttgaaaagactattgcttatttttgtttttaaagacctacttgacgtcatgtggacagtgcacgtgccttacgctacatcttgttttctaggaagagggggatgctgggaaggaatgggtgctttgtgatggataaaaggcattaaataaaaccacgtttacattttgaa

SEQ ID NO: 11511 - protein, 508 aa, Homo sapiens
MVELVISPSLTVNSDCLDKLKFNRADAAVWTLSDRQGITKSAPLRVSQLFSRSCPRVLPRQPSTAMAAYGQTQYSAGIQQATPYTAYPPPAQAYGIPSYSIKTEDSLNHSPGQSGFLSYGSSFSTSPTGQSPYTYQMHGTTGFYQGGNGLGNAAGFGSVHQDYPSYPGFPQSQYPQYYGSSYNPPYVPASSICPSPLSTSTYVLQEASHNVPNQSSESLAGEYNTHNGPSTPAKEGDTDRPHRASDGKLRGRSKRSSDPSPAGDNEIERVFVWDLDETIIIFHSLLTGTFASRYGKDCDQIHVDDVSSDDNGQDLSTYNFSADGFHSSAPGANLCLGSGVHGGVDWMRKLAFRYRRVKEMYNTYKNNVGGLIGTPKRETWLQLRAELEALTDLWLTHSLKALNLINSRPNCVNVLVTTTQLIPALAKVLLYGLGSVFPIENIYSATKTGKESCFERIMQRFGRKAVYVVIGDGVEEEQGAKKHNMPFWRISCHADLEALRHALELEYL

SEQ ID NO: 11512 - DNA, 2266 bp, Homo sapiens
ggtacaaggaaatggtagaactagtgatctcacccagcctcactgtaaacagcgattgtctggataaactgaagtttaaccgtgctgacgctgctgtgtggactctgagtgacagacaaggcatcaccaaatcggcccccctgagagtgtcccagctcttctccagatcttgcccacgtgtcctcccccgccagccttccacagccatggcagcctacggccagacgcagtacagtgcggggatccagcaggctaccccctatacagcttacccacctccagcacaagcctatggaatcccttcctacacacctcacccactggacagagcccatacacctaccagatgcacggcacaacagggttctatcaaggaggaaatggactgggcaacgcagccggtttcgggagtgtgcaccaggactatccttcctaccccggcttcccccagagccagtacccccagtattacggctcatcctacaaccctccctacgtcccggccagcagcatctgcccttcgcccctctccacgtccacctacgtcctccaggaggcatctcacaacgtccccaaccagagttccgagtcacttgctggtgaatacaacacacacaatggaccttccacaccagcgaaagagggagacacagacaggccgcaccgggcctccgacgggaagctccgaggccggtctaagaggagcagtgacccgtccccggcaggggacaatgagattgagcgtgtgttcgtgtgggacttggatgagacaataattatttttcactccttactcacggggacatttgcatccagatacgggaaggacaccacgacgtccgtgcgcattggccttatgatggaagagatgatcttcaaccttgcagatacacatctgttcttcaatgacctggaggattgtgaccagatccacgttgatgacgtctcatcagatgacaatggccaagatttaagcacatacaacttctccgctgacggcttccacagttcggccccaggagccaacctgtgcctgggctctggcgtgcacggcggcgtggactggatgaggaagctggccttccgctaccggcgggtgaaggagatgtacaatacctacaagaacaacgttggtgggttgataggcactcccaaaagggagacctggctacagctccgagctgagctggaagctctcacagacctctggctgacccactccctgaaggcactaaacctcatcaactcccggcccaactgtgtcaatgtgctggtcaccaccactcaactaattcctgccctggccaaagtcctgctatatggcctggggtctgtgtttcctattgagaacatctacagtgcaaccaagacagggaaggagagctgcttcgagaggataatgcagagattcggcagaaaagctgtctacgtggtgatcggtgatggtgtggaagaggagcaaggagcgaaaaagcacaacatgcctttctggcggatatcctgccacgcagacctggaggcactgaggcacgccctggagctggagtatttatagcaggatcagcagcatctccacctgccatctcaccctcagaccccctcgccttccccacctccccaccgagaactccagagacccagatgttggacaccaggaaggggccccacagccgagacgacgtgtccagtgaccatctcagaagccgtccatcagtccaaatgggggttctgagaaggaaagtacccaacattggcttcggagtatttgactttggggaaaagggctggctcggagtctagactcttctgtaagactcacagaacaaaagcaaggaattgctgatttggggggtgcctggtgatgaggaggggatgggtttgtcttgtcttctttttaatttatggactagtctcattactccggaattatgctcttgtacctgtgtggctgggtttcttagtcgttggtttggtttggttttttgaactggtatgtggggtggttcacagttctaatgtaagcactctattctccaagttgtgctttgtggggacaatcattctttgaacattagagaggaaggcagttcaagctgttgaaaagactattgcttatttttgtttttaaagacctacttgacgtcatgtggacagtgcacgtgccttacgctacatcttgttttctaggaagagggggatgctgggaaggaatgggtgctttgtgatggataaaaggcattaaataaaaccacgtttacattttgaa

SEQ ID NO: 11513 - protein, 402 aa, Homo sapiens [sequence omitted]

SEQ ID NO: 11514 - DNA, 1854 bp, Homo sapiens
taagcccacattctgaggttctggggaggcatgaattttgggagggacactatctttcccagaacagcttctattattttgtgtgtgtgtgctcagtgcttcgtagacttgactttatcccctcctcctagccaccttatgaggaagggacaatggctaccttgcctcacatgaggaggcgaggcacagagacttggaacctctcaggatacacgatcatctttgcccttgcttggaattcatctgattttcaaagaggcggcctgcagcagagcctcccaacctgacttttctctccaaatggcagtccctgcacgacaatgaacaaggagaagctgggctccacagtgccctgtgttcacaggctccacagtgagacgaaatgtcctggtttaaaacggacattgatcagacctgctgggaaggcaagcgggaggcagaaaggcacggctgcttccaagtttctgttggcagagagggcagagctgacaactcccagtgaaagatgttttcaccgtggcgcaagagcagagacagggccagcgcggcaccccagccccgctcacagctctaggttgatgcttctcagagggaagagctctttctctctcaagagtttcaataatcgtatcctaacttggcacagaacctcacccttcctgggaacacaggaatgtttgctacttgatgtcaataaaatccaactccttaaggtctctcctggggtccatggggtggagttcattccacaccattctgagacagagtcagaggaatttgctgggtcttctctggctcggaataagtccaccaggcatctctaccttatccagaagagagtcatttattttcacaagtgcatagcggccgacaccaccagcactaaccagagtggattcttgcttcactctcggggccctcattcaaggctggtctcttcccgcaggccttctgacaagtgccacattttgttcctctaacttgggtgaagccccctcaaacactagtctcaaagatcccttgctacaaaggtgggtgctcgggcctcaaattcaaagaccctgactcagtagatccaggttggggtcccaggactgtaatataggtggtcctggcaccacacttggccaaatgctgtgtagcttgcaagaaagctccagaagcaatctagagctttatatcatcactcaaaagtaaagatttgtaggaaaggtttaaaccagtgtcttcccaagtttccagcttcttcaaccaaactgctggttgaggggaaggtgatttgagattttagggcatcgatttatacagtgtgaaaattattcccctgtggttagatcaaaggaaaattcttcatctggcactaagagtctttagcacctcctgacacttctaagctcccttttgaacaaagagagagaggcctcaggcttgaagccatcagcaggcagcagtatctggctggaatttagcaatgctcgtttgtggtcaagtgcttaggagctggggctaaggcaacttttgtcatcaaaaagaaggcccagatcttggagagaagcagagcatcctgagtgtctgccaagcgccaactttgcagccacaggttcaagttcttccctaatcccggcagatctgccttcttggtcctattggtctccatgtgtggttggcgcgatctctgggctttgctgatgtgaagccatggggaggtggagttttaagagcggtgttctcagcgggaagagctctttctttctcaaacatttcggtaatctcatcccaacctggcatagaacctcacccttcctggggacacaggaatatttgctactttacatcaataaaatccaactcctt

SEQ ID NO: 11515 - protein, 219 aa, Homo sapiens [sequence omitted]

SEQ ID NO: 11516 - DNA, 3337 bp, Homo sapiens
ggcggggcctcggcggggcggccgcggcttcacctgcagctccgagcgcgcggaacagaggcgcgggcggctgcgaggccggcggacgcaccggcccgagggaacgcgccgccggccggacttggcctggctcccggagccggggcggcgagcgcggcgggcgcagcggggctggaggctccgggcaggcgcgggggagcggcggcggcggcggcgatcggagcggcggcggtggtctcggcggcggcggcggcggcggcggcagggagcgggctcccggtgccgggcaccgggcgggcggcggggaagatgaccgcgggcgccggcgtgctccttctgctgctctcgctctccggcgcgctccgggcccataatgaggatcttacaactagagagacctgcaaggctgggttctctgaagatgattacacggcattaatctcccaaaatattctagaaggggaaaagctacttcaagtcaagttcagcagctgtgtggggaccaaggggacacaatatgagaccaacagcatggacttcaaagttggggcagatgggacagtcttcgccacccgggagctgcaggtcccctccgagcaggtggcgttcacggtgactgcatgggacagccagacagcagagaaatgggacgccgtggtgcggttgctggtggcccagacctcgtccccgcactctggacacaagccgcagaaaggaaagaaggtcgtggctctggacccctctccgcctccgaaggacaccctgctgccgtggccccagcaccagaacgccaacgggctgaggcggcgcaaacgggactgggtcatcccgcccatcaacgtgcccgagaactcgcgcgggcccttcccgcagcagctcgtgaggatccggtccgacaaagacaatgacatccccatccggtacagcatcacgggagtgggcgccgaccagccccccatggaggtcttcagcattgactccatgtccggccggatgtacgtcacaaggcccatggaccgggaggagcacgcctcttaccacctccgagcccacgctgtggacatgaatggcaacaaggtggagaaccccatcgacctgtacatctacgtcatcgacatgaatgacaaccgccctgagttcatcaaccaggtctacaacggctccgtggacgagggctccaagccaggcacctacgtgatgaccgtcacggccaacgatgctgacgacagcaccacggccaacgggatggtgcggtaccggatcgtgacccagaccccacagagcccgtcccagaatatgttcaccatcaacagcgagactggagatatcgtcacagtggcggctggcctggaccgagagaaagttcagcagtacacagtcatcgttcaggccacagatatggaaggaaatctcaactatggcctctcaaacacagccacagccatcatcacggtgacagatgtgaatgacaacccgccagaatttaccgccagcacgtttgcaggggaggtccccgaaaaccgcgtggagaccgtggtcgcaaacctcacggtgatggaccgagatcagccccactctccaaactggaatgccgtttaccgcatcatcagtggggatccatccgggcacttcagcgtccgcacagaccccgtaaccaacgagggcatggtcaccgtggtgaaggcagtcgactacgagctcaacagagctttcatgctgacagtgatggtgtccaaccaggcgcccctggccagcggaatccagatgtccttccagtccacggcaggggtgaccatctccatcatggacatcaacgaggctccctacttcccctcaaaccacaagctgatccgcctggaggagggcgtgccccccggcaccgtgctgaccacgttttcagctgtggaccctgaccggttcatgcagcaggctgtgagatactcaaagctgtcagacccagcgagctggctgcacatcaatgccaccaacggccagatcaccacggcggcagtgctggaccgtgagtccctctacaccaaaaacaacgtctacgaggccaccttcctggcagctgacaatgggatacccccggccagcggcaccgggaccctccagatctatctcattgacatcaacgacaacgcccctgagctgctgcccaaggaggcgcagatctgcgagaagcccaacctgaacgccatcaacatcacggcggccgacgctgacgtcgaccccaacatcggcccctacgtcttcgagctgccctttgtcccggcggccgtgcggaagaactggaccatcacccgcctgaacggtgactatgcccaactcagcttgcgcatcctgtacctggaggccgggatgtatgacgtccccatcatcgtcacagactctggaaaccctcccctgtccaacacgtccatcatcaaagtcaaggtgtgcccatgtgatgacaacggggactgcaccaccattggcgcagtggcagcggctggtctgggcaccggtgccatcgtggccatcctcatctgcatcctcatcctgctgaccatggtcctgctgtttgtcatgtggatgaagcggcgagagaaggagcgccacacgaagcagctgctcattgaccccgaggacgacgtccgcgacaacatcctcaagtatgacgaggaaggcggtggcgaggaggaccaggactacgacctcagccagctgcagcagccggaagccatggggcacgtgccaagcaaagcccctggcgtgcgtcgcgtggatgagcggccggtgggcgctgagccccagtacccgatcaggcccatggtgccgcacccaggcgacatcggtgacttcatcaatgagggactccgcgctgctgacaacgaccccacggcacccccctatgactccctgctggtcttcgactacgaggggagcggctccaccgcaggctccgtcagctccctgaactcatccagttccggggaccaagactacgattacctcaacgactgggggcccagattcaagaagctggcggacatgtatggaggtggtgaagaggattgactgacctcgcatcttcggaccgaagtgagagccgtgctcggacgccggaggagcaggactgagcagaggcggccggtcttcccgactccctgcggctgtgtccttagtgctgttaggaggccccccaatccccacgttgagctgtctagcatgagcacccacccccacagcgccctgcacccggccgctgcccagcaccgcgctggctggcactgaaggacagcaagaggcactctgtcttcacttgaatttcctagaacagaagcactgtttttaa

SEQ ID NO: 11517 - protein, 916 aa, Homo sapiens; identical to SEQ ID NO: 1915

SEQ ID NO: 11518 - DNA, 637 bp, Homo sapiens
cgtttttgctgcgtcacagggagacagaagatgggctgctatttcgtcggctaaatgctatcattttaagcaccgttccaaagaaaacagggatcttgccagaggaaaataacatataccataaaggaaaaagaaatgtgcatcaaggcaaataaacagctctctactaagggcctaggatcttgctagacgagtcatttctctggttgaaaagcagttgagaaaggcaagacaaggggggcgggggcccagcagggcacctctgagcccttcctgctgctcttcaaagacagacgcattttcctttctacggtctccttgcaagtcttctgtaggccctgccaccttcaggctgactgactgcctccttcaaatatcagcatttggggccccatgaaggcaggcagcccagggaggaatgactggacggtgacattgtgcagggggtctggaagttgccagcgcaggggttagcagctgcagcctggcctggtcctgtctgcctggctgtcaaacccagaagaccgtggtttctggtggcctctgtgtgacagcggaggaggtggggcgaggcctggaagtgaagcatctcgtgagccacttaagtgtttatgaagctcgctaatgtgcttaaatg

SEQ ID NO: 11519 - protein, 72 aa, Homo sapiens
DLARRVISLVEKQLRKARQGGRGPSRAPLSPSCCSSKTDAFSFLRSPCKSSVGPATFRLTDCLLQISAFGAP

SEQ ID NO: 11520 - DNA, 663 bp, Homo sapiens
gattacaactgctcttaggatgaagtgactggagcccagataccttatttagcaatcagtgctcggcacaaggacttgctgtgccaacgaaaaggaagcgaggcattttggctagtcaccgcgtttttgctgcgtcacagggagacagaagatgggctgctatttcgtcggctaaatgctatcattttaagcaccgttccaaagaaaacagggatcttgccagaggaaaataacatataccataaaggaaaaagaaatgtgcatcaaggcaaataaacagctctctactaagggcctaggatcttgctagacgagtcatttctctggttgaaaagcagttgagaaaggcaagacaaggggggcgggggcccagcagggcacctctgagcccttcctgctgctcttcaaagacagacgcattttcctttctacggtctccttgcaagtcttctgtaggccctgccaccttcaggctgactgactgcctccttcaaatatcagcatttggaagggtactggggagtcgacaccctcatgtctgtgagctgactgcaggacgtctcctgtccaggtgctggcacctcatctaacatttgaaggtaaaagcagctctggcctcctgcaggtgcaaggacccgggagccgctctgtgggctgggctca

SEQ ID NO: 11521 - protein, 96 aa, Homo sapiens
DLARRVISLVEKQLRKARQGGRGPSRAPLSPSCCSSKTDAFSFLRSPCKSSVGPATFRLTDCLLQISAFGRVLGSRHPHVCELTAGRLLSRCWHLI

SEQ ID NO: 11522 - DNA, 608 bp, Homo sapiens
aactgctcttaggatgaagtgactggagcccagataccttatttagcaatcagtgctcggcacaaggacttgctgtgccaacgaaaaggaagcgaggcattttggctagtcaccgcgtttttgctgcgtcacagggagacagaagatgggctgctatttcgtcggctaaatgctatcattttaagcaccgttccaaagaaaacagggatcttgccagaggaaaataacatataccataaaggaaaaagaaatgtgcatcaaggcaaataaacagctctctactaagggcctaggatcttgctagacgagtcatttctctggttgaaaagcagttgagaaaggcaagacaaggggggcgggggcccagcagggcacctctgagcccttcctgctgctcttcaaagacagacgcattttcctttctacggtctccttgcaagtcttctgtaggccctgccaccttcaggctgactgactgcctccttcaaatatcagcatttgatggatgtgctggaaggagacccctgctgacccctgctgactccatgacagagggatggaaattctgcccctcccagacctcaccctatgcgttctgtttcctttat

SEQ ID NO: 11523 - protein, 85 aa, Homo sapiens
DEVTGAQIPYLAISARHKDLLCQRKGSEAFWLVTAFLLRHRETEDGLLFRRLNAIILSTVPKKTGILPEENNIYHKGKRNVHQGK

SEQ ID NO: 11524 - DNA, 3368 bp, Homo sapiens
cagtcccggctggaacaggcattctgcaccctgagccaccagaagccccctccccatggagcagaccagctgaggcacattcgcgctccagtggcagagccgtcccccccacccccacccctcccgaaacctctgtcgcagagaacagcactctgtcccctggccggaaggtgggagggaggattcctggcagcctcccctctccttaacccacagtcccaagctccagatctccactcatggccgagctctcggctgtccaccttcctcagcctcatggctgtctcgtggctcagggctgtgctggcgtcagtgggatggcctggggatctggagtggctggtcttaccgtgccttctccttgtccgcctgaccatgtcttccggagtctcttagggttcagtccaggcaccgccttcccgccttgtcgcctgtcttcccgacctttattccacactggcctctgtttctgaaacaggatctggccctcttgctctgggctcccttttgtctgactgtagactctgggcaccctggccgcttgcaggggtgagcacagctgtcatctgctcctgaaggcgcggatgccctgactgtgtggatcctgtctgtgtggcccctggcacgctgtgacctcctgcagcaccgcacttgcagtgctggctttgataatggagttacttttaggctgatctgcctggatggaaaaatagaagcagaagatttcacaagcaggttataccgagaacttaattcttcacctcaaccttaccttgtgcctttcctgaagaggagcttacccgccttgagacagctgacccccgactccgcggccttcatccagcagagccagcagcagccgccaccgcccacctcgcaggccaccactgcgctcacggccgtggtgctgagtagctcggtccagcgcacggccgggaagacggcggccaccgtgaccagtgccctccagccccctgtgctcagcctcacgcagcccacgcaggtcggcgtcggcaagcaggggcaacccacaccgctggtcatccagcagcctccgaagccaggagccctgatccggcccccgcaggtgacgttgacgcagacacccatggtcgccctgcggcagcctcacaaccggatcatgctcaccacgcctcagcagatccagctgaacccactgcagccagtccctgtggtgaaacccgccgtgttacctggaaccaaagccctttctgctgtctcggcacaagcagctgctgcacagaaaaataaactcaaggagcctgggggaggttcgtttcgggacgatgatgacattaatgatgttgcatcgatggctggagtaaacttgtcagaagaaagtgcaagaatattagccacgaactctgaattggtgggcacgctaacgcggtcctgtaaagatgaaaccttcctcctccaagcgcctttgcagagaagaatattagaaataggtaaaaaacatggtataacggaattacatccagatgtagtaagttatgtatcacatgccacgcaacaaaggctacagaatcttgtagagaaaatatcagaaacagctcagcagaagaacttttcttacaaggatgacgacagatatgagcaggcgagtgacgtccgggcacagctcaagttttttgaacagcttgatcaaatcgaaaagcagaggaaggatgagcaggagcgggagatcctgatgagggcagcaaagtctcggtcaagacaagaagatccagaacagttaaggctgaaacagaaggcaaaggagatgcagcaacaggaactggcacaaatgagacagcgggacgccaacctcacagcactagcagcgatcgggcccaggaaaaagaggaaagtggactgtccggggccgggctcaggagcagaggggtcgggccccggctcagtggtcccaggcagctcgggtgtcggaacccccagacagttcacgcgacaaagaatcacgcgggtcaacctcagggacctcatattttgtttagaaaatgaacgtgagacaagccattcactgctgctctacaaagcattccttaagtgacacaggaggacgcctggggactttttatatatttgcagattacgcctttttgtaacgagcaaatgggatattgtttaaaaaacagccacctctttacaatggaacagttttatattcctgtttctaaatcagctcttcagtgtgaaagaaaacacgtttctgtaacagagagaacacaaaggcctgtggatactcttaaaggacaattaaatcttaactcatcttgattgagtggccttcctgccaaacaagccatatataaagactgatggaatcgttagcaaataattagctgccctctgtcaactcatagcagtttctgcattatttgtgcattttggtttagttctacctaacttactatgtaggtgtatgtctacagccgatgacctcatttcgtttattttatttttgtaatagtcagttggcaaagcaaactgattttttagactatttatgctgagaatcctggaggaatacacaattcatcgttgcacccccacctcagagtgtaatcgcatttctgcttggtagaggccgagcccagcaaaggtggctccttctgaatgtgtggtcagcatctgtacaaatgcattttatttgctatagtttgtaaagctgtaaagttaaaagagatgaaaaccttttcagcataaatatattttacttgcactgtgttttttagctaaaagtgaaaacctagattaaataaaatcaaagttgagaagaatcatcaaaagactgtttctcggtgtgaatcaagtgttgaaaaatggttggtgtattttgtcagtaattgtacataacttttggcacatgacatagaaatggctatgtaaactataattattttgctaagagactgtatgcaagccttgggccgactttacagacgtccagagcaaagccccttctttgtacctatttttttattacaaatatactaattggttctttctattttcagaggttattgtatgaaattgtctattgatagtacttttatgactgtaaatactctggctttctccgtgtgaattctcacattagactttaattcgagcgcgtgtgaactgaacgctgatcagtattttttatcaacacctgagaactgttacaccttttattttgtcttttaggaaatccctgtctttccattttttcatgtaaattttgcacagttacttgttcatatgtaaatattttactttcagaaatgaagtttttaattgctattgttttatataggattgaaagaaaattaactcctttattaaaaacaaatttatctgta

SEQ ID NO: 11525 - protein, 321 aa, Homo sapiens [sequence omitted]

SEQ ID NO: 11526 - DNA, 3818 bp, Homo sapiens
ggacgaggtcttcttcaacagcgaggtggacgagaaagtggtgagcgacctggtgggctcgctggactgaggccgccgcccgagggcagcgcggggaaactttgaatgggagcgccgcgctgctgaactcgcaccacgccgccgcacctgctgtcagcctggtcaacaacgggcccgccgcgctgctgccgctgcccaagcccgccgcccccgactctggcccgggggccccgcgggggtcagcggccaacccgggcccggcgcggcggctgcggcgccggcgccgggggtcaaggccgagtcgcccaagagggtggtgcaggcggcgcccccggcggcgcagaccctggcggccagcggcccggccagcacggcggccagcatggtcatcgggccaactatgcaaggggcgctgcccagcccggccgccgtcccgccgcccgcccccgggacccccaccgggctgcccaaaggcgcggccggcgcagtgacccagagcctgtcccggacgcccacggccaccaccagcgggattcgggccaccctgacgcccaccgtgctggccccccgcttgccgcagccgcctcagaacccgaccaacatccagaacttccagctgcccccaggaatggtcctcgtccgaagtgagaatgggcagttgttaatgattcctcagcaggccttggcccagatgcaggcgcaggcccatgcccagcctcagaccaccatggcgcctcgccctgccacccccacaagtgcccctcccgtccagatctccaccgtacaggcacctggaacacctatcattgcacggcaggtgaccccaactaccataattaagcaagtgtctcaggcccagacaacggtgcagcccagtgcaaccctgcagcgctcgcccggcgtccagcctcagctcgttctgggtggcgctgcccagacggcttcacttgggacggcgacggctgttcagacggggactcctcagcgcacggtaccaggggcgaccaccacttcctcagctgccacggaaactatggaaaacgtgaagaaatgtaaaaatttcctatctacgttaataaaactggcttcatctggcaagcagtctacagagacagcagctaatgtgaaagagctcgtgcagaatttactggatggaaaaatagaagcagaagatttcacaagcaggttataccgagaacttaattcttcacctcaaccttaccttgtgcctttcctgaagaggagcttacccgccttgagacagctgacccccgactccgcggccttcatccagcagagccagcagcagccgccaccgcccacctcgcaggccaccactgcgctcacggccgtggtgctgagtagctcggtccagcgcacggccgggaagacggcggccaccgtgaccagtgccctccagccccctgtgctcagcctcacgcagcccacgcaggtcggcgtcggcaagcaggggcaacccacaccgctggtcatccagcagcctccgaagccaggagccctgatccggcccccgcaggtgacgttgacgcagacacccatggtcgccctgcggcagcctcacaaccggatcatgctcaccacgcctcagcagatccagctgaacccactgcagccagtccctgtggtgaaacccgccgtgttacctggaaccaaagccctttctgctgtctcggcacaagcagctgctgcacagaaaaataaactcaaggagcctgggggaggttcgtttcgggacgatgatgacattaatgatgttgcatcgatggctggagtaaacttgtcagaagaaagtgcaagaatattagccacgaactctgaattggtgggcacgctaacgcggtcctgtaaagatgaaaccttcctcctccaagcgcctttgcagagaagaatattagaaataggtaaaaaacatggtataacggaattacatccagatgtagtaagttatgtatcacatgccacgcaacaaaggctacagaatcttgtagagaaaatatcagaaacagctcagcagaagaacttttcttacaaggatgacgacagatatgagcaggcgagtgacgtccgggcacagctcaagttttttgaacagcttgatcaaatcgaaaagcagaggaaggatgagcaggagcgggagatcctgatgagggcagcaaagtctcggtcaagacaagaagatccagaacagttaaggctgaaacagaaggcaaaggagatgcagcaacaggaactggcacaaatgagacagcgggacgccaacctcacagcactagcagcgatcgggcccaggaaaaagaggaaagtggactgtccggggccgggctcaggagcagaggggtcgggccccggctcagtggtcccaggcagctcgggtgtcggaacccccagacagttcacgcgacaaagaatcacgcgggtcaacctcagggacctcatattttgtttagaaaatgaacgtgagacaagccattcactgctgctctacaaagcattccttaagtgacacaggaggacgcctggggactttttatatatttgcagattacgcctttttgtaacgagcaaatgggatattgtttaaaaaacagccacctctttacaatggaacagttttatattcctgtttctaaatcagctcttcagtgtgaaagaaaacacgtttctgtaacagagagaacacaaaggcctgtggatactcttaaaggacaattaaatcttaactcatcttgattgagtggccttcctgccaaacaagccatatataaagactgatggaatcgttagcaaataattagctgccctctgtcaactcatagcagtttctgcattatttgtgcattttggtttagttctacctaacttactatgtaggtgtatgtctacagccgatgacctcatttcgtttattttatttttgtaatagtcagttggcaaagcaaactgattttttagactatttatgctgagaatcctggaggaatacacaattcatcgttgcacccccacctcagagtgtaatcgcatttctgcttggtagaggccgagcccagcaaaggtggctccttctgaatgtgtggtcagcatctgtacaaatgcattttatttgctatagtttgtaaagctgtaaagttaaaagagatgaaaaccttttcagcataaatatattttacttgcactgtgttttttagctaaaagtgaaaacctagattaaataaaatcaaagttgagaagaatcatcaaaagactgtttctcggtgtgaatcaagtgttgaaaaatggttggtgtattttgtcagtaattgtacataacttttggcacatgacatagaaatggctatgtaaactataattattttgctaagagactgtatgcaagccttgggccgactttacagacgtccagagcaaagccccttctttgtacctatttttttattacaaatatactaattggttctttctattttcagaggttattgtatgaaattgtctattgatagtacttttatgactgtaaatactctggctttctccgtgtgaattctcacattagactttaattcgagcgcgtgtgaactgaacgctgatcagtattttttatcaacacctgagaactgttacaccttttattttgtcttttaggaaatccctgtctttccattttttcatgtaaattttgcacagttacttgttcatatgtaaatattttactttcagaaatgaagtttttaattgctattgttttatataggattgaaagaaaattaactcctttattaaaaacaaatttatctgta

SEQ ID NO: 11527 - protein, 713 aa, Homo sapiens
MVIGPTMQGALPSPAAVPPPAPGTPTGLPKGAAGAVTQSLSRTPTATTSGIRATLTPTVLAPRLPQPPQNPTNIQNFQLPPGMVLVRSENGQLLMIPQQALAQMQAQAHAQPQTTMAPRPATPTSAPPVQISTVQAPGTPIIARQVTPTTIIKQVSQAQTTVQPSATLQRSPGVQPQLVLGGAAQTASLGTATAVQTGTPQRTVPGATTTSSAATETMENVKKCKNFLSTLIKLASSGKQSTETAANVKELVQNLLDGKIEAEDFTSRLYRELNSSPQPYLVPFLKRSLPALRQLTPDSAAFIQQSQQQPPPPTSQATTALTAVVLSSSVQRTAGKTAATVTSALQPPVLSLTQPTQVGVGKQGQPTPLVIQQPPKPGALIRPPQVTLTQTPMVALRQPHNRIMLTTPQQIQLNPLQPVPVVKPAVLPGTKALSAVSAQAAAAQKNKLKEPGGGSFRDDDDINDVASMAGVNLSEESARILATNSELVGTLTRSCKDETFLLQAPLQRRILEIGKKHGITELHPDVVSYVSHATQQRLQNLVEKISETAQQKNFSYKDDDRYEQASDVRAQLKFFEQLDQIEKQRKDEQEREILMRAAKSRSRQEDPEQLRLKQKAKEMQQQELAQMRQRDANLTALAAIGPRKKRKVDCPGPGSGAEGSGPGSVVPGSSGVGTPRQFTRQRITRVNLRDLIFCLENERETSHSLLLYKAFLK

SEQ ID NO: 11528 - DNA, 3973 bp, Homo sapiens
atggcggcgggctcggatctgctggacgaggtcttcttcaacagcgaggtggacgagaaagtggtgagcgacctggtgggctcgctggagtcgcagctggcggccagcgcggcccaccaccaccacctcgcgccgcgcacgcccgaggtgcgggccgcggccgccggcgcgctcgggaaccatgttgtgagcggcaaagctgaggccgccgcccgagggcagcgcggggaaactttgaatgggagcgccgcgctgctgaactcgcaccacgccgccgcacctgctgtcagcctggtcaacaacgggcccgccgcgctgctgccgctgcccaagcccgccgcccccggcactgtcatccagacgccccccttcgtgggcgggggccccgcgggggtcagcggccaacccgggcccggcgcggcggctgcggcgccggcgccgggggtcaaggccgagtcgcccaagagggtggtgcaggcggcgcccccggcggcgcagaccctggcggccagcggcccggccagcacggcggccagcatggtcatcgggccaactatgcaaggggcgctgcccagcccggccgccgtcccgccgcccgcccccgggacccccaccgggctgcccaaaggcgcggccggcgcagtgacccagagcctgtcccggacgcccacggccaccaccagcgggattcgggccaccctgacgcccaccgtgctggccccccgcttgccgcagccgcctcagaacccgaccaacatccagaacttccagctgcccccaggaatggtcctcgtccgaagtgagaatgggcagttgttaatgattcctcagcaggccttggcccagatgcaggcgcaggcccatgcccagcctcagaccaccatggcgcctcgccctgccacccccacaagtgcccctcccgtccagatctccaccgtacaggcacctggaacacctatcattgcacggcaggtgaccccaactaccataattaagcaagtgtctcaggcccagacaacggtgcagcccagtgcaaccctgcagcgctcgcccggcgtccagcctcagctcgttctgggtggcgctgcccagacggcttcacttgggacggcgacggctgttcagacggggactcctcagcgcacggtaccaggggcgaccaccacttcctcagctgccacggaaactatggaaaacgtgaagaaatgtaaaaatttcctatctacgttaataaaactggcttcatctggcaagcagtctacagagacagcagctaatgtgaaagagctcgtgcagaatttactggatggaaaaatagaagcagaagatttcacaagcaggttataccgagaacttaattcttcacctcaaccttaccttgtgcctttcctgaagaggagcttacccgccttgagacagctgacccccgactccgcggccttcatccagcagagccagcagcagccgccaccgcccacctcgcaggccaccactgcgctcacggccgtggtgctgagtagctcggtccagcgcacggccgggaagacggcggccaccgtgaccagtgccctccagccccctgtgctcagcctcacgcagcccacgcaggtcggcgtcggcaagcaggggcaacccacaccgctggtcatccagcagcctccgaagccaggagccctgatccggcccccgcaggtgacgttgacgcagacacccatggtcgccctgcggcagcctcacaaccggatcatgctcaccacgcctcagcagatccagctgaacccactgcagccagtccctgtggtgaaacccgccgtgttacctggaaccaaagccctttctgctgtctcggcacaagcagctgctgcacagaaaaataaactcaaggagcctgggggaggttcgtttcgggacgatgatgacattaatgatgttgcatcgatggctggagtaaacttgtcagaagaaagtgcaagaatattagccacgaactctgaattggtgggcacgctaacgcggtcctgtaaagatgaaaccttcctcctccaagcgcctttgcagagaagaatattagaaataggtaaaaaacatggtataacggaattacatccagatgtagtaagttatgtatcacatgccacgcaacaaaggctacagaatcttgtagagaaaatatcagaaacagctcagcagaagaacttttcttacaaggatgacgacagatatgagcaggcgagtgacgtccgggcacagctcaagttttttgaacagcttgatcaaatcgaaaagcagaggaaggatgagcaggagcgggagatcctgatgagggcagcaaagtctcggtcaagacaagaagatccagaacagttaaggctgaaacagaaggcaaaggagatgcagcaacaggaactggcacaaatgagacagcgggacgccaacctcacagcactagcagcgatcgggcccaggaaaaagaggaaagtggactgtccggggccgggctcaggagcagaggggtcgggccccggctcagtggtcccaggcagctcgggtgtcggaacccccagacagttcacgcgacaaagaatcacgcgggtcaacctcagggacctcatattttgtttagaaaatgaacgtgagacaagccattcactgctgctctacaaagcattccttaagtgacacaggaggacgcctggggactttttatatatttgcagattacgcctttttgtaacgagcaaatgggatattgtttaaaaaacagccacctctttacaatggaacagttttatattcctgtttctaaatcagctcttcagtgtgaaagaaaacacgtttctgtaacagagagaacacaaaggcctgtggatactcttaaaggacaattaaatcttaactcatcttgattgagtggccttcctgccaaacaagccatatataaagactgatggaatcgttagcaaataattagctgccctctgtcaactcatagcagtttctgcattatttgtgcattttggtttagttctacctaacttactatgtaggtgtatgtctacagccgatgacctcatttcgtttattttatttttgtaatagtcagttggcaaagcaaactgattttttagactatttatgctgagaatcctggaggaatacacaattcatcgttgcacccccacctcagagtgtaatcgcatttctgcttggtagaggccgagcccagcaaaggtggctccttctgaatgtgtggtcagcatctgtacaaatgcattttatttgctatagtttgtaaagctgtaaagttaaaagagatgaaaaccttttcagcataaatatattttacttgcactgtgttttttagctaaaagtgaaaacctagattaaataaaatcaaagttgagaagaatcatcaaaagactgtttctcggtgtgaatcaagtgttgaaaaatggttggtgtattttgtcagtaattgtacataacttttggcacatgacatagaaatggctatgtaaactataattattttgctaagagactgtatgcaagccttgggccgactttacagacgtccagagcaaagccccttctttgtacctatttttttattacaaatatactaattggttctttctattttcagaggttattgtatgaaattgtctattgatagtacttttatgactgtaaatactctggctttctccgtgtgaattctcacattagactttaattcgagcgcgtgtgaactgaacgctgatcagtattttttatcaacacctgagaactgttacaccttttattttgtcttttaggaaatccctgtctttccattttttcatgtaaattttgcacagttacttgttcatatgtaaatattttactttcagaaatgaagtttttaattgctattgttttatataggattgaaagaaaattaactcctttattaaaaacaaatttatctgta

SEQ ID NO: 11529 - protein, 892 aa, Homo sapiens
MAAGSDLLDEVFFNSEVDEKVVSDLVGSLESQLAASAAHHHHLAPRTPEVRAAAAGALGNHVVSGKAEAAARGQRGETLNGSAALLNSHHAAAPAVSLVNNGPAALLPLPKPAAPGTVIQTPPFVGGGPAGVSGQPGPGAAAAAPAPGVKAESPKRVVQAAPPAAQTLAASGPASTAASMVIGPTMQGALPSPAAVPPPAPGTPTGLPKGAAGAVTQSLSRTPTATTSGIRATLTPTVLAPRLPQPPQNPTNIQNFQLPPGMVLVRSENGQLLMIPQQALAQMQAQAHAQPQTTMAPRPATPTSAPPVQISTVQAPGTPIIARQVTPTTIIKQVSQAQTTVQPSATLQRSPGVQPQLVLGGAAQTASLGTATAVQTGTPQRTVPGATTTSSAATETMENVKKCKNFLSTLIKLASSGKQSTETAANVKELVQNLLDGKIEAEDFTSRLYRELNSSPQPYLVPFLKRSLPALRQLTPDSAAFIQQSQQQPPPPTSQATTALTAVVLSSSVQRTAGKTAATVTSALQPPVLSLTQPTQVGVGKQGQPTPLVIQQPPKPGALIRPPQVTLTQTPMVALRQPHNRIMLTTPQQIQLNPLQPVPVVKPAVLPGTKALSAVSAQAAAAQKNKLKEPGGGSFRDDDDINDVASMAGVNLSEESARILATNSELVGTLTRSCKDETFLLQAPLQRRILEIGKKHGITELHPDVVSYVSHATQQRLQNLVEKISETAQQKNFSYKDDDRYEQASDVRAQLKFFEQLDQIEKQRKDEQEREILMRAAKSRSRQEDPEQLRLKQKAKEMQQQELAQMRQRDANLTALAAIGPRKKRKVDCPGPGSGAEGSGPGSVVPGSSGVGTPRQFTRQRITRVNLRDLIFCLENERETSHSLLLYKAFLK

SEQ ID NO: 11530 - DNA, 4628 bp, Homo sapiens
atggcggcgggctcggatctgctggacgaggtcttcttcaacagcgaggtggacgagaaagtggtgagcgacctggtgggctcgctggagtcgcagctggcggccagcgcggcccaccaccaccacctcgcgccgcgcacgcccgaggtgcgggccgcggccgccggcgcgctcgggaaccatgttgtgagcggcagcccggccggagccgcgggcgcagggccggccgcccccgccgagggcgcgcccggagcggcgccggagccgccccccgcaggtagagcgcggccggggggcggggggccgcagcgcccgggccccccctcaccgcgccgcccccttgtccccgcagggcccgcgccgcccgccgcgaagctgaggccgccgcccgagggcagcgcggggtcctgcgccccggtgcccgccgccgccgccgtcgccgcggggcccgagcccgcccccgccggccccgccaagcccgccggccccgccgcgctggccgcccgcgccggccccggccccgggcccggccccggccccggccccggccctggccctggcaagcccgccggccccggcgccgcgcaaactttgaatgggagcgccgcgctgctgaactcgcaccacgccgccgcacctgctgtcagcctggtcaacaacgggcccgccgcgctgctgccgctgcccaagcccgccgcccccggcactgtcatccagacgccccccttcgtgggcgccgccgcgccccccgcgcccgccgcgccctcgccccccgccgcccccgcgcccgccgcccccgccgccgccccgcccccgccaccccccgcgcccgccactctggcccggccgcccggccaccccgccggacccccgaccgccgcgcccgccgtgccgccccccgccgccgcccagaacgggggcagcgccggggcagcccccgcccccgccccggccgccgggggccccgcgggggtcagcggccaacccgggcccggcgcggcggctgcggcgccggcgccgggggtcaaggccgagtcgcccaagagggtggtgcaggcggcgcccccggcggcgcagaccctggcggccagcggcccggccagcacggcggccagcatggtcatcgggccaactatgcaaggggcgctgcccagcccggccgccgtcccgccgcccgcccccgggacccccaccgggctgcccaaaggcgcggccggcgcagtgacccagagcctgtcccggacgcccacggccaccaccagcgggattcgggccaccctgacgcccaccgtgctggccccccgcttgccgcagccgcctcagaacccgaccaacatccagaacttccagctgcccccaggaatggtcctcgtccgaagtgagaatgggcagttgttaatgattcctcagcaggccttggcccagatgcaggcgcaggcccatgcccagcctcagaccaccatggcgcctcgccctgccacccccacaagtgcccctcccgtccagatctccaccgtacaggcacctggaacacctatcattgcacggcaggtgaccccaactaccataattaagcaagtgtctcaggcccagacaacggtgcagcccagtgcaaccctgcagcgctcgcccggcgtccagcctcagctcgttctgggtggcgctgcccagacggcttcacttgggacggcgacggctgttcagacggggactcctcagcgcacggtaccaggggcgaccaccacttcctcagctgccacggaaactatggaaaacgtgaagaaatgtaaaaatttcctatctacgttaataaaactggcttcatctggcaagcagtctacagagacagcagctaatgtgaaagagctcgtgcagaatttactggatggaaaaatagaagcagaagatttcacaagcaggttataccgagaacttaattcttcacctcaaccttaccttgtgcctttcctgaagaggagcttacccgccttgagacagctgacccccgactccgcggccttcatccagcagagccagcagcagccgccaccgcccacctcgcaggccaccactgcgctcacggccgtggtgctgagtagctcggtccagcgcacggccgggaagacggcggccaccgtgaccagtgccctccagccccctgtgctcagcctcacgcagcccacgcaggtcggcgtcggcaagcaggggcaacccacaccgctggtcatccagcagcctccgaagccaggagccctgatccggcccccgcaggtgacgttgacgcagacacccatggtcgccctgcggcagcctcacaaccggatcatgctcaccacgcctcagcagatccagctgaacccactgcagccagtccctgtggtgaaacccgccgtgttacctggaaccaaagccctttctgctgtctcggcacaagcagctgctgcacagaaaaataaactcaaggagcctgggggaggttcgtttcgggacgatgatgacattaatgatgttgcatcgatggctggagtaaacttgtcagaagaaagtgcaagaatattagccacgaactctgaattggtgggcacgctaacgcggtcctgtaaagatgaaaccttcctcctccaagcgcctttgcagagaagaatattagaaataggtaaaaaacatggtataacggaattacatccagatgtagtaagttatgtatcacatgccacgcaacaaaggctacagaatcttgtagagaaaatatcagaaacagctcagcagaagaacttttcttacaaggatgacgacagatatgagcaggcgagtgacgtccgggcacagctcaagttttttgaacagcttgatcaaatcgaaaagcagaggaaggatgagcaggagcgggagatcctgatgagggcagcaaagtctcggtcaagacaagaagatccagaacagttaaggctgaaacagaaggcaaaggagatgcagcaacaggaactggcacaaatgagacagcgggacgccaacctcacagcactagcagcgatcgggcccaggaaaaagaggaaagtggactgtccggggccgggctcaggagcagaggggtcgggccccggctcagtggtcccaggcagctcgggtgtcggaacccccagacagttcacgcgacaaagaatcacgcgggtcaacctcagggacctcatattttgtttagaaaatgaacgtgagacaagccattcactgctgctctacaaagcattccttaagtgacacaggaggacgcctggggactttttatatatttgcagattacgcctttttgtaacgagcaaatgggatattgtttaaaaaacagccacctctttacaatggaacagttttatattcctgtttctaaatcagctcttcagtgtgaaagaaaacacgtttctgtaacagagagaacacaaaggcctgtggatactcttaaaggacaattaaatcttaactcatcttgattgagtggccttcctgccaaacaagccatatataaagactgatggaatcgttagcaaataattagctgccctctgtcaactcatagcagtttctgcattatttgtgcattttggtttagttctacctaacttactatgtaggtgtatgtctacagccgatgacctcatttcgtttattttatttttgtaatagtcagttggcaaagcaaactgattttttagactatttatcttccttcccttcccctcccaccccgctctcctctctgccccctgccctcccctcccctcccttcccctccactccgctgagaatcctggaggaatacacaattcatcgttgcacccccacctcagagtgtaatcgcatttctgcttggtagaggccgagcccagcaaaggtggctccttctgaatgtgtggtcagcatctgtacaaatgcattttatttgctatagtttgtaaagctgtaaagttaaaagagatgaaaaccttttcagcataaatatattttacttgcactgtgttttttagctaaaagtgaaaacctagattaaataaaatcaaagttgagaagaatcatcaaaagactgtttctcggtgtgaatcaagtgttgaaaaatggttggtgtattttgtcagtaattgtacataacttttggcacatgacatagaaatggctatgtaaactataattattttgctaagagactgtatgcaagccttgggccgactttacagacgtccagagcaaagccccttctttgtacctatttttttattacaaatatactaattggttctttctattttcagaggttattgtatgaaattgtctattgatagtacttttatgactgtaaatactctggctttctccgtgtgaattctcacattagactttaattcgagcgcgtgtgaactgaacgctgatcagtattttttatcaacacctgagaactgttacaccttttattttgtcttttaggaaatccctgtctttccattttttcatgtaaattttgcacagttacttgttcatatgtaaatattttactttcagaaatgaagtttttaattgctattgttttatataggattgaaagaaaattaactcctttattaaaaacaaatttatctgta

SEQ ID NO: 11531 - protein, 1085 aa, Homo sapiens; identical to SEQ ID NO: 1917

SEQ ID NO: 11532 - DNA, 294 bp, Homo sapiens
aagtgcactccccgtcttctctgggtgatgaagacaaagaaactctggaccacccgctgcctcaacaacctcagagattctgactctaaagagcccccctcctgtaagtcctccagcggccacagccggttacgagcacccacaggcggctgtcaccaaaagatctcatcagatggcaaaaccagatgcttccccagatgccgttccgcaagatggagctctctggagtgctggttacttctgcgcccaagccagtgggctgtctctcctggatgccaaattagggtaagaagc

SEQ ID NO: 11533 - protein, 88 aa, Homo sapiens [sequence omitted]

SEQ ID NO: 11534 - DNA, 439 bp, Homo sapiens
tgcagggcagaaatagggtcttgctgccacccctgcgtgcagtagtccaatcacagctcattgcagcctccaactcctgggctcaagtgatcctcccgcctctgcctccacctccccaggagctggaactacaagacccaatattggtccgtgatctgatgatgttcacggtcaagacggaagcaaaaaaagcacacaccgcgcgccctcggtcactaatcacgcggagtatacgcgaggagggcccgcagctaagcgacggcgggcggccgagcttcctccacggccggggaggtgggcaaggcctccgggccgcagccccgggtacgagcggaggctccgaggcccccggtagccagtcagaatttattttaagggaaatggaaagctgcggcaggctttgggaggaggggcaggattaaaagagaaagtgtgctca

SEQ ID NO: 11535 - protein, 87 aa, Homo sapiens [sequence omitted]

SEQ ID NO: 11536 - DNA, 796 bp, Homo sapiens
ccgcgctcctctcagagccccagtcgcgcgccccttcttggttcgctcggtgcccgcgcaggcccctcgggcggtggcgaggaggcgcccaggcggaggcggcggcgggcggaggagcgcaggagcgggcggccaggccaccgcgcggcggcggagcgggccgcggcccggcgctccttccccaccgcggcccgacgcaccccggccgccgccatgagcggctcctcaggcaccccgtatctgggcagcaagatcagcctcatctccaaggcgcagatccgctacgagggcattctctacaccatcgacaccgacaactccaccgtggcgctcgccaaagtgaggtcctttggcactgaagaccgtcccacagataggcctgcgccccccagagaggagatttatgagtacatcattttccgaggaagtgacatcaaggatatcactgtgtgtgaacctccgaaagctcagcacacactcccgcaggatcccgccattgttcagtcttccctgggttctgcctccgcctcgcccttccagccgcacgtgccttacagccctttccgagggatggcgccctacggcccgctggcggccagctccctgctcagccagcagtatgccgcctccctgggtctaggtgagtgacctgtttctgtctggtaaactacccttgcgtgtaactgtcactgagtggagcgatggagcctgagggtggggatatgcattcctgtcatgctcagcttgtagactgttttgttgcacacttagtaaattacccagtgcaacttccgct

SEQ ID NO: 11537 - protein, 144 aa, Homo sapiens
MSGSSGTPYLGSKISLISKAQIRYEGILYTIDTDNSTVALAKVRSFGTEDRPTDRPAPPREEIYEYIIFRGSDIKDITVCEPPKAQHTLPQDPAIVQSSLGSASASPFQPHVPYSPFRGMAPYGPLAASSLLSQQYAASLGLGE

SEQ ID NO: 11538 - DNA, 2636 bp, Homo sapiens
ccgcgctcctctcagagccccagtcgcgcgccccttcttggttcgctcggtgcccgcgcaggcccctcgggcggtggcgaggaggcgcccaggcggaggcggcggcgggcggaggagcgcaggagcgggcggccaggccaccgcgcggcggcggagcgggccgcggcccggcgctccttccccaccgcggcccgacgcaccccggccgccgccatgagcggctcctcaggcaccccgtatctgggcagcaagatcagcctcatctccaaggcgcagatccgctacgagggcattctctacaccatcgacaccgacaactccaccgtggcgctcgccaaagtgaggtcctttggcactgaagaccgtcccacagataggcctgcgccccccagagaggagatttatgagtacatcattttccgaggaagtgacatcaaggatatcactgtgtgtgaacctccgaaagctcagcacacactcccgcaggatcccgccattgttcagtcttccctgggttctgcctccgcctcgcccttccagccgcacgtgccttacagccctttccgagggatggcgccctacggcccgctggcggccagctccctgctcagccagcagtatgccgcctccctgggtctagagaagttggtaagccctccagcctcagccgctgcttccagccctagctcttctccatctccacagcccgtttcagagcttgacttgtcctcagagccacagcagctcactgccaagggtaacagcagtttgggagaactgcatgctgtcttgcaaaccattctgagagcgaggggtaaagcagcagacagaatgacagtagctgtagcagatcatttgccaagcccatgcagccgctgagctgcttgttttgcttcagcatgtagtcctgattgatgaactctcagtgttaaagaagggattacgaagaatcagcggagtagtttgttctctctccctgggtccaggttctctgttgacctgtaccatgactaccacatacgggaaacttcactgttcacagaaagtcatttccctggggtttttgctgggtcctaaatgtgttccagagtgctgcaggggggactccccaaagcacctgacatgcctgttttgctctttgatccgtgtggttcatagatcactcattgaggggattcaaaattaggggcttgggtgacagtcgccaactgtttggccaggtggacagtatcagcctgatggccagctggccagtgtacaccacctgtctctgtgctgtggtggtggcggcacctgtggggtttctagatcttttctcacgttctactcatttcccctgaagttctaaaattcatattgacgatcttgctgtatgtttgtgttacacatagcaccctgacaagctgaaccatcgccattacccggccctggtccaggttgatgcctgggctttccttatggcacacagctgctgtcagtctgtcattctgcaggtgctgctttccaaatcctgcatgcactctgtgtatctgagttacagagtagtctttttttttcccccacttaaaaatgacacagatacttctattgctcttaggatcagttacctaaacctgctcatagggcaagactttgtttgaactagttggttgtgtaaaaagcagacaagccccttatccatgcccctgcagtcacagtatgatcagcaggcaggcagtgctgtgtttgtctcccggacatgctgagtgagacaatcagtgagaaagtggcccgggtgcattcccgccagaggacactttccagacctctatgcagagtcgttccaacctgccctttgagagcttctcttgatctggttacaaggaatttttctacagtcaattttttttttcatttctattccgtaaaagcagtaagatgagatgcccagtcttcatgtgtattgggctgttcgtctaataataattaccctgtggttagggtgccttttctgtttcagatctctgttcacttacacccagtcccacattgtcctgtttagagtccctacaggtcctggaaccttggaaagggaggagatggagagaggtgggtggtgcttcccattttcctcctgattcagagggcctggtttctgagggttcatcccctgtgcgtgggcctcggactgcagtttcataggcatagccccttgccaaaggctacctaggagccctttgtgtcttcatgatgagcctttgcccttgagagaagtgtaggctgctacgtctcggaagtcagctcctgcttcatcatttttagttttattgtgccttaagtggaaatgacagtgttgtagaatttaacttcagaatttgttcactgcattttctagaaaatcccaggctgggctggttcttctccagtgtggaccagaatgaaacaaattctcagatcctgaattcatcaggatcttggggctgctgagctcctttgggattggagcttgtgtggttttaagaaagctgtttccacacttctggggaggtgcctgtttgtaggcacggtgtttttcctgtccttgaggttccctaacttgggaagctcagggctttgggagtggggagtccaaagatgaactggccttggtgctgccc

SEQ ID NO: 11539 - protein, 221 aa, Homo sapiens
MSGSSGTPYLGSKISLISKAQIRYEGILYTIDTDNSTVALAKVRSFGTEDRPTDRPAPPREEIYEYIIFRGSDIKDITVCEPPKAQHTLPQDPAIVQSSLGSASASPFQPHVPYSPFRGMAPYGPLAASSLLSQQYAASLGLEKLVSPPASAAASSPSSSPSPQPVSELDLSSEPQQLTAKGNSSLGELHAVLQTILRARGKAADRMTVAVADHLPSPCSR

SEQ ID NO: 11540 - DNA, 959 bp, Homo sapiens
ccgcgctcctctcagagccccagtcgcgcgccccttcttggttcgctcggtgcccgcgcaggcccctcgggcggtggcgaggaggcgcccaggcggaggcggcggcgggcggaggagcgcaggagcgggcggccaggccaccgcgcggcggcggagcgggccgcggcccggcgctccttccccaccgcggcccgacgcaccccggccgccgccatgagcggctcctcaggcaccccgtatctgggcagcaagatcagcctcatctccaaggcgcagatccgctacgagggcattctctacaccatcgacaccgacaactccaccgtggcgctcgccaaagtgaggtcctttggcactgaagaccgtcccacagataggcctgcgccccccagagaggagatttatgagtacatcattttccgaggaagtgacatcaaggatatcactgtgtgtgaacctccgaaagctcagcacacactcccgcaggatcccgccattgttcagtcttccctgggttctgcctccgcctcgcccttccagccgcacgtgccttacagccctttccgagggatggcgccctacggcccgctggcggccagctccctgctcagccagcagtatgccgcctccctgggtctaggagctggttttccatccatcccagtcggcaagagccccatggtggagcaggctgtgcagactggttctgctgacaacctgaatgctaaaaagctgttacctggcaagggcaccacagggacgcagctcaacggtcgtcaggcccagccgagcagcaagacggccagcgatgtagtccagccggcagctgtgcaagctcaagggcaggtgaatgacgagaacagaagacctcagaggaggcgatcaggaaacaggcgaacaaggaatcgctccagagggcaaaaccgtccaactaacgttaaggaaaacacaatcaaatt

SEQ ID NO: 11541 - protein, 247 aa, Homo sapiens
MSGSSGTPYLGSKISLISKAQIRYEGILYTIDTDNSTVALAKVRSFGTEDRPTDRPAPPREEIYEYIIFRGSDIKDITVCEPPKAQHTLPQDPAIVQSSLGSASASPFQPHVPYSPFRGMAPYGPLAASSLLSQQYAASLGLGAGFPSIPVGKSPMVEQAVQTGSADNLNAKKLLPGKGTTGTQLNGRQAQPSSKTASDVVQPAAVQAQGQVNDENRRPQRRRSGNRRTRNRSRGQNRPTNVKENTI

SEQ ID NO: 11542 - DNA, 925 bp, Homo sapiens
ccgcgctcctctcagagccccagtcgcgcgccccttcttggttcgctcggtgcccgcgcaggcccctcgggcggtggcgaggaggcgcccaggcggaggcggcggcgggcggaggagcgcaggagcgggcggccaggccaccgcgcggcggcggagcgggccgcggcccggcgctccttccccaccgcggcccgacgcaccccggccgccgccatgagcggctcctcaggcaccccgtatctgggcagcaagatcagcctcatctccaaggcgcagatccgctacgagggcattctctacaccatcgacaccgacaactccaccgtggcgctcgccaaagtgaggtcctttggcactgaagaccgtcccacagataggcctgcgccccccagagaggagatttatgagtacatcattttccgaggaagtgacatcaaggatatcactgtgtgtgaacctccgaaagctcagcacacactcccgcaggatcccgccattgttcagtcttccctgggttctgcctccgcctcgcccttccagccgcacgtgccttacagccctttccgagggatggcgccctacggcccgctggcggccagctccctgctcagccagcagtatgccgcctccctgggtctaggagctggttttccatccatcccagtcggcaagagccccatggtggagcaggctgtgcagactggttctgctgacaacctgaatgctaaaaagctgttacctggcaagggcaccacagggacgcagctcaacggtcgtcaggcccagccgagcagcaagacggccagcggaaacaggcgaacaaggaatcgctccagagggcaaaaccgtccaactaacgttaaggaaaacacaatcaaatttgagggtgactttgatttcgagagtgcaaatgcccagttcaacc

SEQ ID NO: 11543 - protein, 236 aa, Homo sapiens
MSGSSGTPYLGSKISLISKAQIRYEGILYTIDTDNSTVALAKVRSFGTEDRPTDRPAPPREEIYEYIIFRGSDIKDITVCEPPKAQHTLPQDPAIVQSSLGSASASPFQPHVPYSPFRGMAPYGPLAASSLLSQQYAASLGLGAGFPSIPVGKSPMVEQAVQTGSADNLNAKKLLPGKGTTGTQLNGRQAQPSSKTASGNRRTRNRSRGQNRPTNVKENTIKFEGDFDFESANAQF

SEQ ID NO: 11544 - DNA, 1095 bp, Homo sapiens
ccgcgctcctctcagagccccagtcgcgcgccccttcttggttcgctcggtgcccgcgcaggcccctcgggcggtggcgaggaggcgcccaggcggaggcggcggcgggcggaggagcgcaggagcgggcggccaggccaccgcgcggcggcggagcgggccgcggcccggcgctccttccccaccgcggcccgacgcaccccggccgccgccatgagcggctcctcaggcaccccgtatctgggcagcaagatcagcctcatctccaaggcgcagatccgctacgagggcattctctacaccatcgacaccgacaactccaccgtggcgctcgccaaagtgaggtcctttggcactgaagaccgtcccacagataggcctgcgccccccagagaggagatttatgagtacatcattttccgaggaagtgacatcaaggatatcactgtgtgtgaacctccgaaagctcagcacacactcccgcaggatcccgccattgttcagctgaacaagcgccctgatgaaggcgtgcggggtgatgggatggccttcgccgttctcacccgatgtctcgttgttcagtcttccctgggttctgcctccgcctcgcccttccagccgcacgtgccttacagccctttccgagggatggcgccctacggcccgctggcggccagctccctgctcagccagcagtatgccgcctccctgggtctaggagctggttttccatccatcccagtcggcaagagccccatggtggagcaggctgtgcagactggttctgctgacaacctgaatgctaaaaagctgttacctggcaagggcaccacagggacgcagctcaacggtcgtcaggcccagccgagcagcaagacggccagcgatgtagtccagccggcagctgtgcaagctcaagggcaggtgaatgacgagaacagaagacctcagaggaggcgatcaggaaacaggcgaacaaggaatcgctccagagggcaaaaccgtccaactaacgttaaggaaaacacaatcaaatttgagggtgactttgatttcgagagtgcaaatgcccagttcaaccgagaggagcttgac

SEQ ID NO: 11545 - protein, 293 aa, Homo sapiens
MSGSSGTPYLGSKISLISKAQIRYEGILYTIDTDNSTVALAKVRSFGTEDRPTDRPAPPREEIYEYIIFRGSDIKDITVCEPPKAQHTLPQDPAIVQLNKRPDEGVRGDGMAFAVLTRCLVVQSSLGSASASPFQPHVPYSPFRGMAPYGPLAASSLLSQQYAASLGLGAGFPSIPVGKSPMVEQAVQTGSADNLNAKKLLPGKGTTGTQLNGRQAQPSSKTASDVVQPAAVQAQGQVNDENRRPQRRRSGNRRTRNRSRGQNRPTNVKENTIKFEGDFDFESANAQFNREEL

SEQ ID NO: 11546 - DNA, 2115 bp, Homo sapiens
aggtgccagctccgaggagcagggcggctcccgtcagcgggcctcctccccgccagcctggggggatccctgcgggggagcctcgagtgaggtcctttggcactgaagaccgtcccacagataggcctgcgccccccagagaggagatttatgagtacatcattttccgaggaagtgacatcaaggatatcactgtgtgtgaacctccgaaagctcagcacacactcccgcaggatcccgccattgttcagtcttccctgggttctgcctccgcctcgcccttccagccgcacgtgccttacagccctttccgagggatggcgccctacggcccgctggcggccagctccctgctcagccagcagtatgccgcctccctgggtctagagaagttggtaagccctccagcctcagccgctgcttccagccctagctcttctccatctccacagcccgtttcagagcttgacttgtcctcagagccacagcagctcactgccaaggggtgccttttctgtttcagatctctgttcacttacacccagtcccacattgtcctgtttagagtccctacaggtcctggaaccttggaaagggaggagatggagagaggagctggttttccatccatcccagtcggcaagagccccatggtggagcaggctgtgcagactggttctgctgacaacctgaatgctaaaaagctgttacctggcaagggcaccacagggacgcagctcaacggtcgtcaggcccagccgagcagcaagacggccagcgatgtagtccagccggcagctgtgcaagctcaagggcaggtgaatgacgagaacagaagacctcagaggaggcgatcaggaaacaggcgaacaaggaatcgctccagagggcaaaaccgtccaactaacgttaaggaaaacacaatcaaatttgagggtgactttgatttcgagagtgcaaatgcccagttcaaccgagaggagcttgacaaagaatttaagaaagacccatactgctacttgtgttttggacttaactgaacttggacatggtctgagttagaaccacttgttttggggaagtattcatgggtaacctctttgaggtctctttatctgtgtttcctttttagttgcgcatagcctaattctaaggttttggtattttgcaaaaaggtttctatagtgaaagctgaatccttactttgtgacttttttttttttttttaatgacaagctttgacttttaaaagtggaaccaaatctgttggcagaggtggcagccaagtacatctctgtaacccagctggcccctggtgctgttggcctggcaccccactgccaagggtggggtctcaggagtcaggcagggccagcacagggtggcgtggggggcaggggtgggtgggtggagggcacggaaggggttttcccatggatcatgttgtataagtgaaccagaccaccctgatggcatccacagtgatgtcaaggttggggctggccaggggtgggtggactagaagcatttgggagtagtggccaggggccctggacgctagccacggagctgctgcacagagcctggtgtccacaagcttccaggttggggttggagcctgggatgagccccggcagcgccttggcccttctgtggtccctgccagcctctgacctgggccggtcagtcattgctggactctggccacacactggcgttctcatccacttggaaacaagccagtcttttctgcaaggtcagttgaccaagagcatatttcccctctgttgtacatcgttgttttgtgtttgtgttgtaacagtgggtggagggagggtggggtctacatttgttgcatgagtcgatgggtcagaactttagtatacgcatgcgtcctctgagtgacagggcattttgtcgaaaataagcaccttggtaactaaacccctctaatagctataaaggctttagttctgtattgattaagttactgtaaaagcttgggtttatttttgtaggacttaatggctaagaattagaacatagcaagggggctcctctgttggagtaatgtaaattgtaattataaataaacatgcaaacctttaaaatttt

SEQ ID NO: 11547 - protein, 240 aa, Homo sapiens
MAPYGPLAASSLLSQQYAASLGLEKLVSPPASAAASSPSSSPSPQPVSELDLSSEPQQLTAKGCLFCFRSLFTYTQSHIVLFRVPTGPGTLEREEMERGAGFPSIPVGKSPMVEQAVQTGSADNLNAKKLLPGKGTTGTQLNGRQAQPSSKTASDVVQPAAVQAQGQVNDENRRPQRRRSGNRRTRNRSRGQNRPTNVKENTIKFEGDFDFESANAQFNREELDKEFKKDPYCYLCFGLN

SEQ ID NO: 11548 - DNA, 545 bp, Homo sapiens
gagcagggcggctcccgtcagcgggcctcctccccgccagcctggggggatccctgcgggggagcctcgaggtcgggtggcggggccagtgtcccggcgtctcccgaaggctgggggtggggtcacaacacgcgaatcctgcaagcctttctggaacttattagacagctggggccttgatcctgaacaaataccgcgtcctaatgcggcctcctgccaaggcagaagcatccgttggcagccagatgccccggtttaaacggttctcctgctctatcctgaccttcccactgtggggcttaccttttggtgacagccgccttgaggtcctttggcactgaagaccgtcccacagataggcctgcgccccccagagaggagatttatgagtacatcattttccgaggaagtgacatcaaggatatcactgtgtgtgaacctccgaaagctcagcacacactcccgcaggatcccgccattgttcagagaagttggtaagccctccagcctcagccgctgcttccagccctagctcttctccatct

SEQ ID NO: 11549 - protein, 48 aa, Homo sapiens
MSTSFSEEVTSRISLCVNLRKLSTHSRRIPPLFREVGKPSSLSRCFQP

SEQ ID NO: 11550 - DNA, 657 bp, Homo sapiens
gcctcttgatagcgcagtaaaacatacaatcgtataaccccattctcggtaagaatcagcatcaactctaaagagctctttgcaaaaggaagccacgaggcagggcctgtgtccacagctgctgtccagcactccagcttgcctcctgccactgccactggctgggcggcccatgtagggcagctgtgttccagggctggccctgggttgtcatgccctatgccacgtgagaacatacgtgtctgttttaggccaatgccataggtcggggtgccaagtcagtgcgcgagttcctggagaagaactatactgacgaagccattgaaacagatgatctgaccattaagctggtgatcaaggcactcctggaagtggttcagtcaggtggcaaaaacattgaacttgctgtcatgaggcgagatcaatccctcaagattttaaatcctgaagaaattgagaagtatgttgctgaaattgaaaaagaaaaagaagaaaacgaaaagaagaaacaaaagaaagcatcatgatgaataaaatgtctttgcttgtaatttttaaattcatatcaatcatggatgagtctcgatgtgtaggcctttccattccatttattcacactgagtgtcctacaataaacttccgtatttttaacctgtt

SEQ ID NO: 11551 - protein, 38 aa, Homo sapiens
MRRDQSLKILNPEEIEKYVAEIEKEKEENEKKKQKKAS

SEQ ID NO: 11552 - DNA, 460 bp, Homo sapiens
gggcgcaggccgtttggcatctctgccccctcgggcacataccatgcctggaaggccaatgccataggtcggggtgccaagtcagtgcgcgagttcctggagaagaactatactgacgaagccattgaaacagatgatctgaccattaagctggtgatcaaggcactcctggaagtggttcagtcaggtggcaaaaacattgaacttgctgtcatgaggcgagatcaatccctcaagattttaaatcctgaagaaattgagaagtatgttgctgaaattgaaaaagaaaaagaagaaaacgaaaagaagaaacaaaagaaagcatcatgatgaataaaatgtctttgcttgtaatttttaaattcatatcaatcatggatgagtctcgatgtgtaggcctttccattccatttattcacactgagtgtcctacaataaacttccgtatttttaacctgtt

SEQ ID NO: 11553 - protein, 38 aa, Homo sapiens; identical to SEQ ID NO: 11551

SEQ ID NO: 11554 - DNA, 1069 bp, Homo sapiens
agtcacggctccgccatggagggtcctgccatgtcacttcaggtgaatcagaaaactgatttattctggggcgtgatcctaatcttgacttgcacaagtgtaacttgacctagctcaccaatttcagtaacattgttctgttctcagttcctggcatgggatattccaaattcctgtgtctggagggaaatgatagcttttgtcttgccatcctgagtgaccagtcacaaagcagttgaagggggctggaagccaccctatgaggacacgccattagtatgtaagcagaatgtgtgtctacctgtcaaagtaatttccagtaacctgagttcacaattctggtcctaggtgagtttttctaggagtgaaaatgcagaaaaggatgttgaaagctattggctaatgtatcatttgaactgctgataacctgagaaggggctcaggcatggtttaaaatgttcgtatcttcactaagtacggttctttcctcacatgcagtttcttaattggatggcactgacctgtttcttttcttgctagcgttatacgcagagcaatgggcgcaggccgtttggcatctctgccctcatcgtgggtttcgactttgatggcactcctaggctctatcagactgacccctcgggcacataccatgcctggaaggccaatgccataggtcggggtgccaagtcagtgcgcgagttcctggagaagaactatactgacgaagccattgaaacagatgatctgaccattaagctggtgatcaaggcactcctggaagtggttcagtcaggtggcaaaaacattgaacttgctgtcatgaggcgagatcaatccctcaagattttaaatcctgaagaaattgagaagtatgttgctgaaattgaaaaagaaaaagaagaaaacgaaaagaagaaacaaaagaaagcatcatgatgaataaaatgtctttgcttgtaatttttaaattcatatcaatcatggatgagtctcgatgtgtaggcctttccattccatttattcacactgagtgtcctacaataaacttccgtatttttaacctgtt

SEQ ID NO: 11555 - protein, 39 aa, Homo sapiens
MGAGRLASLPSSWVSTLMALLGSIRLTPRAHTMPGRPMP

SEQ ID NO: 11556 - DNA, 3885 bp, Homo sapiens
tatttgaaaggcccaggttgggcacctaggtgagcacgcctgggctagctctaccagcagtagatgaatacccctgggtttgcaggatgtggtgccagccacagtgacagacaagtagaggagaaaggggtgtgggtgaacgcaccttccagtgggagctgctacccggagtacgtaccccccaggacccaggttcagatctgctcctactgctcgctgcctggcagtagaaccatgtatcacttttttgggaggatagggtggggtgaggggacagggtcttgctgtctctgtctcccagccgtcatggctcactgcagcctccaccttccaggctctagcgatcctcccaccagcccccacagtagctgggactacaggcttcagccaccacacctggctaatttttgtactttttgtagagacagggttttcccatgttgtccggctggtcttgaactcttgaatttaagtcatccacccacctcagcctcccaaagtgctggaattaacaggcatgagccactgcacccagcactcatatcactttcttacgtggtttgtggatcttaattaaaggttggtgttcgaggaagagacattgttgttcttggtgtggagaagaagtcagtggccaaactgcaggatgaaagaacagtgcggaagatctgtgctttggatgacaacgtctgcatggcctttgcaggcctcaccgccgatgcaaggatagtcatcaacagggcccgggtggagtgccagagccaccggctgactgtggaggacccggtcactgtggagtacatcacccgctacatcgccagtctgaagcaggtgggtgcctgcccgcttgcatgctcacctctggcagcagggcagtcacggctccgccatggagggtcctgccatgtcacttcaggtgaatcagaaaactgatttattctggggcgtgatcctaatcttgacttgcacaagtgtaacttgacctagctcaccaatttcagtaacattgttctgttctcagttcctggcatgggatattccaaattcctgtgtctggagggaaatgatagcttttgtcttgccatcctgagtgaccagtcacaaagcagttgaagggggctggaagccaccctatgaggacacgccattagtatgtaagcagaatgtgtgtctacctgtcaaagtaatttccagtaacctgagttcacaattctggtcctaggtgagtttttctaggagtgaaaatgcagaaaaggatgttgaaagctattggctaatgtatcatttgaactgctgataacctgagaaggggctcaggcatggtttaaaatgttcgtatcttcactaagtacggttctttcctcacatgcagtttcttaattggatggcactgacctgtttcttttcttgctagcgttatacgcagagcaatgggcgcaggccgtttggcatctctgccctcatcgtgggtttcgactttgatggcactcctaggctctatcagactgacccctcgggcacataccatgcctggaaggtgagttcgtgacaaaggggctttggacagtcttgccagaaaaaggctttgaggggtgggaggtcctgggcttcctgctgtaggccctgtatcagtgaatgagtcagtttaagttaacctagtcctatgagagcaagaaaatgattaaacattgctgtttggaagaaaatcaaagggcagcaaggtgtaagcgtagtccacataaattaaaattcttgggtgggcgtggtgactcacgcctgtaatcccagcactttgggaggccgaggcagttggatcacctgaggtcaggtgttcgagaccagcctggccaacatggcagaaccctgtctccactaaaaatacaaaaaaaatttgctgggcatggtggcacatgcctgtaatcccagctactcaggaggctgaggcaggaaaatcgcttgaacccgagaggcataggttgcagtgagccgagatcacaccactgcactccaggctgggcaacaagagcaaaactctacctcaaaaaaaaaaaaaaaaaaaaatctcccattgcctcttgatagcgcagtaaaacatacaatcgtataaccccattctcggtaagaatcagcatcaactctaaagagctctttgcaaaaggaagccacgaggcagggcctgtgtccacagctgctgtccagcactccagcttgcctcctgccactgccactggctgggcggcccatgtagggcagctgtgttccagggctggccctgggttgtcatgccctatgccacgtgagaacatacgtgtctgttttaggccaatgccataggtcggggtgccaagtcagtgcgcgagttcctggagaagaactatactgacgaagccattgaaacagatgatctgaccattaagctggtgatcaaggcactcctggaagtaagtttgcatttggaatccaggcaaggtggtgaagataccacgttttggtggtgagtggtaggtagatgagcaggaaggaaggtggcaaggatccagcagtaatgcttaatgactgctgtgttccaggcactgctctggtctatggtgtatcctaactgctgtgttccttgaaatagccatgcaagatgtgatcattagtgtctttatccagccggggcagctgagggttgtgcagggacacacagcatgagaaccagaggcaggatgtgaacccagctgtccagctgtggaatctgttctcgagccatcactaggccttccagaggcttgaactgttgctaaagtcaggggattagagaactggagatatggttgggctttgtcaagaccttgaagtgctagcaggtaaaaccagagagggactagctggaaggccaggcgggagcgtaggcatcaggattcctggttgtaaccactgtgtcaagaggagggcctggagcagcgctactgtgcaggagagaggagtcccagtgctgggaggcggaggggtgtgcaggcatcccaaacagacttcacaaatggccatgagtttaggacaaagacacaggttttgggggctgggacctctgttcctgggacggtgctgggtttgggtacacacctatttaaggtactcctgagagctgcttttgtcttgaatagggaaaggtggttaatgctcctgtcttctgtcccttcaaggtggttcagtcaggtggcaaaaacattgaacttgctgtcatgaggcgagatcaatccctcaaggtaatcaccaagtttgtctgctttctttacctgtcagttttctcccatgatcagggctgagcagtaccagttccgaaggaaacatcatagggccattctgtggttttaacattaggaaaatgtctttctgaggctccccatacgtcaaagagaagattcccatcttcctctgattagatggtccacgcgtgttctctgggcatgctgagcggctgccagtcagatctgctgctgctgctactgctgcttaatacttgtctaggtcaggccagcatcctcttgtttttcttgaggttcctctccaaagaggctgtatgagcagcagtgccaaagcctggccgccctccccagaagagggcgctggttccttggcaccttgtgtggcttaggtaaccatgaagtttttttctatagattttaaatcctgaagaaattgagaagtatgttgctgaaattgaaaaagaaaaagaagaaaacgaaaagaagaaacaaaagaaagcatcatgatgaataaaatgtctttgcttgtaatttttaaattcatatcaatcatggatgagtctcgatgtgtaggcctttccattccatttattcacactgagtgtcctacaataaacttccgtatttttaacctgtt

SEQ ID NO: 11557 - protein, 79 aa, Homo sapiens
MAFAGLTADARIVINRARVECQSHRLTVEDPVTVEYITRYIASLKQVGACPLACSPLAAGQSRLRHGGSCHVTSGESEN

SEQ ID NO: 11558 - DNA, 473 bp, Homo sapiens
gggcgcgggcgtagtggcgccgggagtcgcgggtgcgcgcgggccgtttggcatctctgccctcatcgccaatgccataggtcggggtgccaagtcagtgcgcgagttcctggagaagaactatactgacgaagccattgaaacagatgatctgaccattaagctggtgatcaaggcactcctggaagtggttcagtcaggtggcaaaaacattgaacttgctgtcatgaggcgagatcaatccctcaagattttaaatcctgaagaaattgagaagtatgttgctgaaattgaaaaagaaaaagaagaaaacgaaaagaagaaacaaaagaaagcatcatgatgaataaaatgtctttgcttgtaatttttaaattcatatcaatcatggatgagtctcgatgtgtaggcctttccattccatttattcacactgagtgtcctacaataaacttccgtatttttaacctgtt

SEQ ID NO: 11559 - protein, 38 aa, Homo sapiens; identical to SEQ ID NO: 11551

SEQ ID NO: 11560 - DNA, 914 bp, Homo sapiens
gcccgtcgccggcagcgcaggacacggcgccgagggtggggcgcgggcgtagtggcgccgggagtcgcgggtgcgcgcgggccgtgagtgtgcgcttttgagagtcgcggcggaaggagcccggccgccgcccgccggcatgagctacgaccgcgccatcaccgtcttctcgcccgacggccacctcttccaagtggagtacgcgcaggaggccgtcaagaagggctcgaccgcggttggtgttcgaggaagagacattgttgttcttggtgtggagaagaagtcagtggccaaactgcaggatgaaagaacaagccaccggctgactgtggaggacccggtcactgtggagtacatcacccgctacatcgccagtctgaagcagcgttatacgcagagcaatgggcgcaggccgtttggcatctctgccctcatcgtgggtttcgactttgatggcactcctaggctctatcagactgacccctcgggcacataccatgcctggaaggccaatgccataggtcggggtgccaagtcagtgcgcgagttcctggagaagaactatactgacgaagccattgaaacagatgatctgaccattaagctggtgatcaaggcactcctggaagtggttcagtcaggtggcaaaaacattgaacttgctgtcatgaggcgagatcaatccctcaagattttaaatcctgaagaaattgagaagtatgttgctgaaattgaaaaagaaaaagaagaaaacgaaaagaagaaacaaaagaaagcatcatgatgaataaaatgtctttgcttgtaatttttaaattcatatcaatcatggatgagtctcgatgtgtaggcctttccattccatttattcacactgagtgtcctacaataaacttccgtatttttaacctgtt

SEQ ID NO: 11561 - protein, 214 aa, Homo sapiens
MSYDRAITVFSPDGHLFQVEYAQEAVKKGSTAVGVRGRDIVVLGVEKKSVAKLQDERTSHRLTVEDPVTVEYITRYIASLKQRYTQSNGRRPFGISALIVGFDFDGTPRLYQTDPSGTYHAWKANAIGRGAKSVREFLEKNYTDEAIETDDLTIKLVIKALLEVVQSGGKNIELAVMRRDQSLKILNPEEIEKYVAEIEKEKEENEKKKQKKAS

SEQ ID NO: 11562 - DNA, 1101 bp, Homo sapiens
gcccgtcgccggcagcgcaggacacggcgccgagggtggggcgcgggcgtagtggcgccgggagtcgcgggtgcgcgcgggccgtgagtgtgcgcttttgagagtcgcggcggaaggagcccggccgccgcccgccggcatgagctacgaccgcgccatcaccgtcttctcgcccgacggccacctcttccaagtggagtacgcgcaggaggccgtcaagaagggctcgaccgcggttggtgttcgaggaagagacattgttgttcttggtgtggagaagaagtcagtggccaaactgcaggatgaaagaacagtgcggaagatctgtgctttggatgacaacgtctgcatggcctttgcaggcctcaccgccgatgcaaggatagtcatcaacagggcccgggtggagtgccagagccaccggctgactgtggaggacccggtcactgtggagtacatcacccgctacatcgccagtctgaagcaggtgggtgcctgcccgcttgcatgctcacctctggcagcagggcagtcacggctccgccatggagggtcctgccatgtcacttcagcgttatacgcagagcaatgggcgcaggccgtttggcatctctgccctcatcgtgggtttcgactttgatggcactcctaggctctatcagactgacccctcgggcacataccatgcctggaaggccaatgccataggtcggggtgccaagtcagtgcgcgagttcctggagaagaactatactgacgaagccattgaaacagatgatctgaccattaagctggtgatcaaggcactcctggaagtggttcagtcaggtggcaaaaacattgaacttgctgtcatgaggcgagatcaatccctcaagattttaaatcctgaagaaattgagaagtatgttgctgaaattgaaaaagaaaaagaagaaaacgaaaagaagaaacaaaagaaagcatcatgatgaataaaatgtctttgcttgtaatttttaaattcatatcaatcatggatgagtctcgatgtgtaggcctttccattccatttattcacactgagtgtcctacaataaacttccgtatttttaacctgtt

SEQ ID NO: 11563 - protein, 166 aa, Homo sapiens
MSYDRAITVFSPDGHLFQVEYAQEAVKKGSTAVGVRGRDIVVLGVEKKSVAKLQDERTVRKICALDDNVCMAFAGLTADARIVINRARVECQSHRLTVEDPVTVEYITRYIASLKQVGACPLACSPLAAGQSRLRHGGSCHVTSALYAEQWAQAVWHLCPHRGFRL

SEQ ID NO: 11564 - DNA, 3541 bp, Homo sapiens
gcccgtcgccggcagcgcaggacacggcgccgagggtggggcgcgggcgtagtggcgccgggagtcgcgggtgcgcgcgggccgtgagtgtgcgcttttgagagtcgcggcggaaggagcccggccgccgcccgccggcatgagctacgaccgcgccatcaccgtcttctcgcccgacggccacctcttccaagtggagtacgcgcaggaggccgtcaagaagggctcgaccgcggttggtgttcgaggaagagacattgttgttcttggtgtggagaagaagtcagtggccaaactgcaggatgaaagaacagtgcggaagatctgtgctttggatgacaacgtctgcatggcctttgcaggcctcaccgccgatgcaaggatagtcatcaacagggcccgggtggagtgccagagccaccggctgactgtggaggacccggtcactgtggagtacatcacccgctacatcgccagtctgaagcaggtgggtgcctgcccgcttgcatgctcacctctggcagcagggcagtcacggctccgccatggagggtcctgccatgtcacttcaggtgaatcagaaaactgatttattctggggcgtgatcctaatcttgacttgcacaagtgtaacttgacctagctcaccaatttcagtaacattgttctgttctcagttcctggcatgggatattccaaattcctgtgtctggagggaaatgatagcttttgtcttgccatcctgagtgaccagtcacaaagcagttgaagggggctggaagccaccctatgaggacacgccattagtatgtaagcagaatgtgtgtctacctgtcaaagtaatttccagtaacctgagttcacaattctggtcctaggtgagtttttctaggagtgaaaatgcagaaaaggatgttgaaagctattggctaatgtatcatttgaactgctgataacctgagaaggggctcaggcatggtttaaaatgttcgtatcttcactaagtacggttctttcctcacatgcagtttcttaattggatggcactgacctgtttcttttcttgctagcgttatacgcagagcaatgggcgcaggccgtttggcatctctgccctcatcgtgggtttcgactttgatggcactcctaggctctatcagactgacccctcgggcacataccatgcctggaaggtgagttcgtgacaaaggggctttggacagtcttgccagaaaaaggctttgaggggtgggaggtcctgggcttcctgctgtaggccctgtatcagtgaatgagtcagtttaagttaacctagtcctatgagagcaagaaaatgattaaacattgctgtttggaagaaaatcaaagggcagcaaggtgtaagcgtagtccacataaattaaaattcttgggtgggcgtggtgactcacgcctgtaatcccagcactttgggaggccgaggcagttggatcacctgaggtcaggtgttcgagaccagcctggccaacatggcagaaccctgtctccactaaaaatacaaaaaaaatttgctgggcatggtggcacatgcctgtaatcccagctactcaggaggctgaggcaggaaaatcgcttgaacccgagaggcataggttgcagtgagccgagatcacaccactgcactccaggctgggcaacaagagcaaaactctacctcaaaaaaaaaaaaaaaaaaaaatctcccattgcctcttgatagcgcagtaaaacatacaatcgtataaccccattctcggtaagaatcagcatcaactctaaagagctctttgcaaaaggaagccacgaggcagggcctgtgtccacagctgctgtccagcactccagcttgcctcctgccactgccactggctgggcggcccatgtagggcagctgtgttccagggctggccctgggttgtcatgccctatgccacgtgagaacatacgtgtctgttttaggccaatgccataggtcggggtgccaagtcagtgcgcgagttcctggagaagaactatactgacgaagccattgaaacagatgatctgaccattaagctggtgatcaaggcactcctggaagtaagtttgcatttggaatccaggcaaggtggtgaagataccacgttttggtggtgagtggtaggtagatgagcaggaaggaaggtggcaaggatccagcagtaatgcttaatgactgctgtgttccaggcactgctctggtctatggtgtatcctaactgctgtgttccttgaaatagccatgcaagatgtgatcattagtgtctttatccagccggggcagctgagggttgtgcagggacacacagcatgagaaccagaggcaggatgtgaacccagctgtccagctgtggaatctgttctcgagccatcactaggccttccagaggcttgaactgttgctaaagtcaggggattagagaactggagatatggttgggctttgtcaagaccttgaagtgctagcaggtaaaaccagagagggactagctggaaggccaggcgggagcgtaggcatcaggattcctggttgtaaccactgtgtcaagaggagggcctggagcagcgctactgtgcaggagagaggagtcccagtgctgggaggcggaggggtgtgcaggcatcccaaacagacttcacaaatggccatgagtttaggacaaagacacaggttttgggggctgggacctctgttcctgggacggtgctgggtttgggtacacacctatttaaggtactcctgagagctgcttttgtcttgaatagggaaaggtggttaatgctcctgtcttctgtcccttcaaggtggttcagtcaggtggcaaaaacattgaacttgctgtcatgaggcgagatcaatccctcaaggtaatcaccaagtttgtctgctttctttacctgtcagttttctcccatgatcagggctgagcagtaccagttccgaaggaaacatcatagggccattctgtggttttaacattaggaaaatgtctttctgaggctccccatacgtcaaagagaagattcccatcttcctctgattagatggtccacgcgtgttctctgggcatgctgagcggctgccagtcagatctgctgctgctgctactgctgcttaatacttgtctaggtcaggccagcatcctcttgtttttcttgaggttcctctccaaagaggctgtatgagcagcagtgccaaagcctggccgccctccccagaagagggcgctggttccttggcaccttgtgtggcttaggtaaccatgaagtttttttctatagattttaaatcctgaagaaattgagaagtatgttgctgaaattgaaaaagaaaaagaagaaaacgaaaagaagaaacaaaagaaagcatcatgatgaataaaatgtctttgcttgtaatttttaaattcatatcaatcatggatgagtctcgatgtgtaggcctttccattccatttattcacactgagtgtcctacaataaacttccgtatttttaacctgtt

SEQ ID NO: 11565 - protein, 149 aa, Homo sapiens
MSYDRAITVFSPDGHLFQVEYAQEAVKKGSTAVGVRGRDIVVLGVEKKSVAKLQDERTVRKICALDDNVCMAFAGLTADARIVINRARVECQSHRLTVEDPVTVEYITRYIASLKQVGACPLACSPLAAGQSRLRHGGSCHVTSGESEN

SEQ ID NO: 11566 - DNA, 1028 bp, Homo sapiens
ccgcctgacgccgcccgtcgccggcagcgcaggacacggcgccgagggtggggcgcgggcgtagtggcgccgggagtcgcgggtgcgcgcgggccgtgagtgtgcgcttttgagagtcgcggcggaaggagcccggccgccgcccgccggcatgagctacgaccgcgccatcaccgtcttctcgcccgacggccacctcttccaagtggagtacgcgcaggaggccgtcaagaagggctcgaccgcggttggtgttcgaggaagagacattgttgttcttggtgtggagaagaagtcagtggccaaactgcaggatgaaagaacagtgcggaagatctgtgctttggatgacaacgtctgcatggcctttgcaggcctcaccgccgatgcaaggatagtcatcaacagggcccgggtggagtgccagagccaccggctgactgtggaggacccggtcactgtggagtacatcacccgctacatcgccagtctgaagcagcgttatacgcagagcaatgggcgcaggccgtttggcatctctgccctcatcgtgggtttcgactttgatggcactcctaggctctatcagactgacccctcgggcacataccatgcctggaaggccaatgccataggtcggggtgccaagtcagtgcgcgagttcctggagaagaactatactgacgaagccattgaaacagatgatctgaccattaagctggtgatcaaggcactcctggaagtggttcagtcaggtggcaaaaacattgaacttgctgtcatgaggcgagatcaatccctcaagattttaaatcctgaagaaattgagaagtatgttgctgaaattgaaaaagaaaaagaagaaaacgaaaagaagaaacaaaagaaagcatcatgatgaataaaatgtctttgcttgtaatttttaaattcatatcaatcatggatgagtctcgatgtgtaggcctttccattccatttattcacactgagtgtcctacaataaacttccgtatttttaacctgtt

SEQ ID NO: 11567 - protein, 248 aa, Homo sapiens; identical to SEQ ID NO: 1921

SEQ ID NO: 11568 - DNA, 656 bp, Homo sapiens
gcccgtcgccggcagcgcaggacacggcgccgagggtggggcgcgggcgtagtggcgccgggagtcgcgggtgcgcgcgggccgtgagtgtgcgcttttgagagtcgcggcggaaggagcccggccgccgcccgccggcatgagctacgaccgcgccatcaccgtcttctcgcccgacggccacctcttccaagtggagtacgcgcaggaggccgtcaagaagggctcgaccgcggttggtgttcgaggaagagacattgttgttcttggtgtggagaagaagtcagtggccaaactgcaggatgaaagaacagtgcggaagatctgtgctttggatgacaacgtctgcatggcctttgcaggtatgagtcggtggggagcgctgtcttactctctagagtctcagcgaagaatagggctttggagattaacttgggtgtgtgggctattgtgagccatataaactgagtaaatgaaaatcatttaaaagaattggatttggacttttaagttggctagtttctttggtggcctctctctgccatagcaggtgaaacaaatggctaaatggatgaaaacacttctggctgctgcgcaatttgacctccactgttatttttctgtatcaatcagttacaatctagagaaaggctgga

SEQ ID NO: 11569 - protein, 104 aa, Homo sapiens
MSYDRAITVFSPDGHLFQVEYAQEAVKKGSTAVGVRGRDIVVLGVEKKSVAKLQDERTVRKICALDDNVCMAFAGMSRWGALSYSLESQRRIGLWRLTWVCGLL

SEQ ID NO: 11570 - DNA, 4647 bp, Homo sapiens
aatgagcgcctcgggccgcccagcgcagccggagtatccacctcgatgaccacgggctgagccccgcgccgccaccatgtccgtggccttcgcgtctgcccggccaagaggcaaaggggaggttacgcagcaaaccatccagaagtttttgaagaatgccggccagtcatcgagtgcccttggtttgggtacaaggtgcgttttcctaacttgcgggtctgaaagtgcgtccattcccccttcacgcctggttgcggtttcggcggactagaatttctacgcagaagtctccctcaggatcagaccgtagcccttccggaaacctccatgatgctggacgagaaccaccacctgatccagtgcatcctggagtaccagagcaagggcaagacggccgagtgcacgcagtaccagcagatcctgcaccggaacctggtatacctggccacgatcgcagactccaaccagaacatgcagtccctgcttcctgcctgacgccatcagcacgggcctgccaccctcctccctcctgcagggccagattggcaacgggccgagccacgtgtccatgcagcagacggcgcctaacacgctgcccaccacctccatgagcatctctgggcccggctacagccacgcgggacccgcctcgcagggcgtccccatgcaggggcaaggcaccatcggcaactacgtgtctcggaccaacatcaacatgcagtccaacccagtctccatgatgcagcagcaggcggccacgtcgcactacagctcggcgcagggcggcagccagcactaccagggccagtcgtccatcgccatgatggggcagggcagccaggggagcagcatgatggggcagcggcccatggcgccctaccggccctcccagcaaggctcttcccagcagtacctgggccaggaggagtactatggcgagcagtacagccacagccagggcgccgcggagcccatgggccagcagtactaccccgacggccatggcgattacgcctaccagcagtcatcctacacggagcagagctacgaccggtccttcgaggagtccacgcagcactactatgaggggggaaactcccagtacagccagcagcaggccgggtaccagcagggtgccgcgcagcagcagacgtactcccagcagcagtaccccagccagcagagctaccccgggcagcagcagggctacgggtctgcccagggagccccgtcacagtaccccggctaccagcaaggccaaggccagcagtacggaagctaccgagcaccgcagacagcgccgtctgcccagcagcagcggccctacggctatgaacagggccagtatggaaattaccagcagtaagggacacacattctggctggagcccttgtggtagcgtgttcatccaggggccggatgggctggcggcagctctggtgaattgtgacatgttggttacctgttcgcccagtgccacgtctgcatgtgaagcgtgctcatttcatgctgggtatgacgccgagcgcacaccactggcgtgagacagcgcttggtggtgtgatacttttggtgctgtgtatagtattgtatgtcggtacacggagaggtatcctttttttgtcccccgcccccttctcaatgtttctagctagctttgggggtcattttgtcatcagagcattctgtgcccagggacaggacagatctcgaggacaccacagtccacctgttcccgtcaacagacgttaggtctcattttcctcctcatgcagtgttgtagtgtgggttgtcaacttttctttaactggctacgccacagctggacacacatgcagcccctggagggcagcctcttcctgtgcctcgatggggtgggtgggagggcatcttctgtgcgttgggtcagtttctgttacgtaacgaaaaggataaacatctcccacgggagaggccacagatggccacttccagagcttgcccattgcctgtctctcgccaattccgtttatccaaaaaggtacatgtttttgtattaaaaagtaaacagggatcagtgactgtattccaaataaatatgaatccctaagggccgtggacaaattgcctaacccagggccagcggtattgctgaaggaaaggggcagctctctgggaagtgggccctcagagattactctggctttgacccttgtttagctgatggtcatttctgggattggaatatttaataagcccaattctaagttgataggtaattttaaatattcaaaccaaatcttcccaacagttggcaagttgtttattttatattatttcttccaggacctacttgctcagatctccaagcaagcatttcttttcttttagggatgtctgaaagtcacatccagttacattactgtgttctttctaatgaaaagtaaaggttttatatagagaaacttgagtaatttttacatttctaagacattaaatcccatttaaattctgtgtgaacattaaagacagcacacttgcaaaagtatggtcaaaggaaaaaaatcccacatttcaattaacaagtagcatggacatttgatcaacctttagttggaataataatattcatatttgctatgaatccttttaaaaaaatctttggataaatgctgacagatttccaagaactaccaagaaaatacaagagatatccaatgcttgatatatgaggcctagtaataacgatatttctctttaattgatgttttgttttaaaagttaaaagtaattcttggcgtggtggttcacgcctgtaatcccagcactttgggaggccgaagcgggcggatcacctgaggtcgggagttcgagaccagcctgaccaacatggagaaaccccgtccctactaaaaatacaaaattagccaggtatggtggtgcatacctgtaatcccagctactcgggaacctgaggcaggagaatggcttgaacccaggagacagaggttgtggtggggcaagatcgcaccattgcacccgagcctaggcaacaagagtgaaattccgtctcaaaaaaataaataaataaataaataaataagttaaaattaattctttatccagagtcgggtgctttagaatttataagtcacttatgtgttttgcttgaattaattctgacagcccctatgaggaaatctggaggcaggtaacagttcccattttagagatgaagaactgaggcacagattaaaggacttgcctgtgttgaataccagtcctgttctaggacattctcccctctcctaggagacggatgtcacgcacaaatggggagagaagtgtttattttgtaggcactaagggtttctaaaacccttaacactggtaagggctcaaaaataaacgtatgtgttcatattcgatcaccgaaatgagagttcttaattgctaattgacaaacgcgttagcaatttcagttagggagtcatctcccttgattgtgttcttttcctgtcaattttcatagacctaatttgcaaactcaatcggggactaaaatttcccactgaaaatgttaaacattttagataactgtgaagatagtttatttttattccttgccaatctgggaatatgccttttttgtgtgtttgtgtgtttttttaagtgctgtattaataatactttctgaaagaaaaggacacttaccccaaaacttcaatctgaaatgtcttacattaagaatatcttgaatgttgtgtatatattttaaaaagcactttgcaaaatagtttgtacatttatttcctaatttatacatgatttttggtgttaatatatttaatgattaataacagaatgtttatttaatgtgctgtccatttttatgtaatattatggggaaagtgatgccagcagttccttttcattattctatcttctgtcatatgaatgttgagcaaagcttaggccaacatgaattgtttgtgaagtgtggttgatggtgctttgtttttttctgactacttctatggaaggccagtgaagaagcaaaggaagacatgaaaattgacgctcattcttcttcctattgttccctgacatccagcaaattgtgaatttgaaaaatgatggccagttttcagaagtgctgacaaattcatattggtatgcaaaagctcatcacccattaaggtttgttgttgaatcaacagtactcagcatattaaaacagtacatcagaactcatgccaacagtctttatgatgggattaaggtggacaagatctcctaagatctgtgaatgggattaaggtggacaagatctcctaagatctgaaaagaaaccttaatacgctcatatggttggagtgttaagtgaacctctgattttgtcagggtttttctacgtgtaggcgtgaatagggggcaccccttcaaaactgtacaaagaagacgactgttttccatttccatttaaacatttttagccacttcatttctatttattgaacaggtcaaatttgtcttgttatttgtgagtacagtacatttaaaaaacatccttatcggttatttttttttcagtcggagtttgacgtataaattgtttatgcttttggtgtaatctcttaataaactggttcttcaaaaatcatcct

SEQ ID NO: 11571 - protein, 265 aa, Homo sapiens
MQQTAPNTLPTTSMSISGPGYSHAGPASQGVPMQGQGTIGNYVSRTNINMQSNPVSMMQQQAATSHYSSAQGGSQHYQGQSSIAMMGQGSQGSSMMGQRPMAPYRPSQQGSSQQYLGQEEYYGEQYSHSQGAAEPMGQQYYPDGHGDYAYQQSSYTEQSYDRSFEESTQHYYEGGNSQYSQQQAGYQQGAAQQQTYSQQQYPSQQSYPGQQQGYGSAQGAPSQYPGYQQGQGQQYGSYRAPQTAPSAQQQRPYGYEQGQYGNYQQ

SEQ ID NO: 11572 - DNA, 3730 bp, Homo sapiens
atgagcgcctcgggccgcccagcgcagccggagtatccacctcgatgaccacgggctgagccccgcgccgccaccatgtccgtggccttcgcgtctgcccggccaagaggcaaaggggaggttacgcagcaaaccatccagaagatgctggacgagaaccaccacctgatccagtgcatcctggagtaccagagcaagggcaagacggccgagtgcacgcagtaccagcagatcctgcaccggaacctggtatacctggccacgatcgcagactccaaccagaacatgcagtccctgcttcctgccccgcccacgcagaacatgaacctgggccctggagccctgactcagagcggctccagccagggcctgcactctcagggcagcctgagtgacgccatcagcacgggcctgccaccctcctccctcctgcagggccagattggcaacgggccgagccacgtgtccatgcagcagacggcgcctaacacgctgcccaccacctccatgagcatctctgggcccggctacagccacgcgggacccgcctcgcagggcgtccccatgcaggggcaaggcaccatcggcaactacgtgtctcggaccaacatcaacatgcagtccaacccagtctccatgatgcagcagcaggcggccacgtcgcactacagctcggcgcagggcggcagccagcactaccagggccagtcgtccatcgccatgatggggcagggcagccaggggagcagcatgatggggcagcggcccatggcgccctaccggccctcccagcaaggctcttcccagcagtacctgggccaggaggagtactatggcgagcagtacagccacagccagggcgccgcggagcccatgggccagcagtactaccccgacggccatggcgattacgcctaccagcagtcatcctacacggagcagagctacgaccggtccttcgaggagtccacgcagcactactatgaggggggaaactcccagtacagccagcagcaggccgggtaccagcagggtgccgcgcagcagcagacgtactcccagcagcagtaccccagccagcagagctaccccgggcagcagcagggctacgggtctgcccagggagccccgtcacagtaccccggctaccagcaaggccaaggccagcagtacggaagctaccgagcaccgcagacagcgccgtctgcccagcagcagcggccctacggctatgaacagggccagtatggaaattaccagcagtaagggacacacattctggctggagcccttgtggtagcgtgttcatccaggggccggatgggctggcggcagctctggtgaattgtgacatgttggttacctgttcgcccagtgccacgtctgcatgtgaagcgtgctcatttcatgctgggacctacttgctcagatctccaagcaagcatttcttttcttttagggatgtctgaaagtcacatccagttacattactgtgttctttctaatgaaaagtaaaggttttatatagagaaacttgagtaatttttacatttctaagacattaaatcccatttaaattctgtgtgaacattaaagacagcacacttgcaaaagtatggtcaaaggaaaaaaatcccacatttcaattaacaagtagcatggacatttgatcaacctttagttggaataataatattcatatttgctatgaatccttttaaaaaaatctttggataaatgctgacagatttccaagaactaccaagaaaatacaagagatatccaatgcttgatatatgaggcctagtaataacgatatttctctttaattgatgttttgttttaaaagttaaaagtaattcttggcgtggtggttcacgcctgtaatcccagcactttgggaggccgaagcgggcggatcacctgaggtcgggagttcgagaccagcctgaccaacatggagaaaccccgtccctactaaaaatacaaaattagccaggtatggtggtgcatacctgtaatcccagctactcgggaacctgaggcaggagaatggcttgaacccaggagacagaggttgtggtggggcaagatcgcaccattgcacccgagcctaggcaacaagagtgaaattccgtctcaaaaaaataaataaataaataaataaataagttaaaattaattctttatccagagtcgggtgctttagaatttataagtcacttatgtgttttgcttgaattaattctgacagcccctatgaggaaatctggaggcaggtaacagttcccattttagagatgaagaactgaggcacagattaaaggacttgcctgtgttgaataccagtcctgttctaggacattctcccctctcctaggagacggatgtcacgcacaaatggggagagaagtgtttattttgtaggcactaagggtttctaaaacccttaacactggtaagggctcaaaaataaacgtatgtgttcatattcgatcaccgaaatgagagttcttaattgctaattgacaaacgcgttagcaatttcagttagggagtcatctcccttgattgtgttcttttcctgtcaattttcatagacctaatttgcaaactcaatcggggactaaaatttcccactgaaaatgttaaacattttagataactgtgaagatagtttatttttattccttgccaatctgggaatatgccttttttgtgtgtttgtgtgtttttttaagtgctgtattaataatactttctgaaagaaaaggacacttaccccaaaacttcaatctgaaatgtcttacattaagaatatcttgaatgttgtgtatatattttaaaaagcactttgcaaaatagtttgtacatttatttcctaatttatacatgatttttggtgttaatatatttaatgattaataacagaatgtttatttaatgtgctgtccatttttatgtaatattatggggaaagtgatgccagcagttccttttcattattctatcttctgtcatatgaatgttgagcaaagcttaggccaacatgaattgtttgtgaagtgtggttgatggtgctttgtttttttctgactacttctatggaaggccagtgaagaagcaaaggaagacatgaaaattgacgctcattcttcttcctattgttccctgacatccagcaaattgtgaatttgaaaaatgatggccagttttcagaagtgctgacaaattcatattggtatgcaaaagctcatcacccattaaggtttgttgttgaatcaacagtactcagcatattaaaacagtacatcagaactcatgccaacagtctttatgatgggattaaggtggacaagatctcctaagatctgtgaatgggattaaggtggacaagatctcctaagatctgaaaagaaaccttaatacgctcatatggttggagtgttaagtgaacctctgattttgtcagggtttttctacgtgtaggcgtgaatagggggcaccccttcaaaactgtacaaagaagacgactgttttccatttccatttaaacatttttagccacttcatttctatttattgaacaggtcaaatttgtcttgttatttgtgagtacagtacatttaaaaaacatccttatcggttatttttttttcagtcggagtttgacgtataaattgtttatgcttttggtgtaatctcttaataaactggttcttcaaaaatc

SEQ ID NO: 11573 - protein, 396 aa, Homo sapiens; identical to SEQ ID NO: 1923

SEQ ID NO: 11574 - DNA, 4542 bp, Homo sapiens
atgagcgcctcgggccgcccagcgcagccggagtatccacctcgatgaccacgggctgagccccgcgccgccaccatgtccgtggccttcgcgtctgcccggccaagaggcaaaggggaggttacgcagcaaaccatccagaagatgctggacgagaaccaccacctgatccagtgcatcctggagtaccagagcaagggcaagacggccgagtgcacgcagtaccagcagatcctgcaccggaacctggtatacctggccacgatcgcagactccaaccagaacatgcagtccctgcttcctgccccgcccacgcagaacatgaacctgggccctggagccctgactcagagcggctccagccagggcctgcactctcagggcagcctgagtgacgccatcagcacgggcctgccaccctcctccctcctgcagggccagattggcaacgggccgagccacgtgtccatgcagcagacggcgcctaacacgctgcccaccacctccatgagcatctctgggcccggctacagccacgcgggacccgcctcgcagggcgtccccatgcaggggcaaggcaccatcggcaactacgtgtctcggaccaacatcaacatgcagtccaacccagtctccatgatgcagcagcaggcggccacgtcgcactacagctcggcgcagggcggcagccagcactaccagggccagtcgtccatcgccatgatggggcagggcagccaggggagcagcatgatggggcagcggcccatggcgccctaccggccctcccagcaaggctcttcccagcagtacctgggccaggaggagtactatggcgagcagtacagccacagccagggcgccgcggagcccatgggccagcagtactaccccgacggccatggcgattacgcctaccagcagtcatcctacacggagcagagctacgaccggtccttcgaggagtccacgcagcactactatgaggggggaaactcccagtacagccagcagcaggccgggtaccagcagggtgccgcgcagcagcagacgtactcccagcagcagtaccccagccagcagagctaccccgggcagcagcagggctacgggtctgcccagggagccccgtcacagtaccccggctaccagcaaggccaaggccagcagtacggaagctaccgagcaccgcagacagcgccgtctgcccagcagcagcggccctacggctatgaacagggccagtatggaaattaccagcagtaagggacacacattctggctggagcccttgtggtagcgtgttcatccaggggccggatgggctggcggcagctctggtgaattgtgacatgttggttacctgttcgcccagtgccacgtctgcatgtgaagcgtgctcatttcatgctgggtatgacgccgagcgcacaccactggcgtgagacagcgcttggtggtgtgatacttttggtgctgtgtatagtattgtatgtcggtacacggagaggtatcctttttttgtcccccgcccccttctcaatgtttctagctagctttgggggtcattttgtcatcagagcattctgtgcccagggacaggacagatctcgaggacaccacagtccacctgttcccgtcaacagacgttaggtctcattttcctcctcatgcagtgttgtagtgtgggttgtcaacttttctttaactggctacgccacagctggacacacatgcagcccctggagggcagcctcttcctgtgcctcgatggggtgggtgggagggcatcttctgtgcgttgggtcagtttctgttacgtaacgaaaaggataaacatctcccacgggagaggccacagatggccacttccagagcttgcccattgcctgtctctcgccaattccgtttatccaaaaaggtacatgtttttgtattaaaaagtaaacagggatcagtgactgtattccaaataaatatgaatccctaagggccgtggacaaattgcctaacccagggccagcggtattgctgaaggaaaggggcagctctctgggaagtgggccctcagagattactctggctttgacccttgtttagctgatggtcatttctgggattggaatatttaataagcccaattctaagttgataggtaattttaaatattcaaaccaaatcttcccaacagttggcaagttgtttattttatattatttcttccaggacctacttgctcagatctccaagcaagcatttcttttcttttagggatgtctgaaagtcacatccagttacattactgtgttctttctaatgaaaagtaaaggttttatatagagaaacttgagtaatttttacatttctaagacattaaatcccatttaaattctgtgtgaacattaaagacagcacacttgcaaaagtatggtcaaaggaaaaaaatcccacatttcaattaacaagtagcatggacatttgatcaacctttagttggaataataatattcatatttgctatgaatccttttaaaaaaatctttggataaatgctgacagatttccaagaactaccaagaaaatacaagagatatccaatgcttgatatatgaggcctagtaataacgatatttctctttaattgatgttttgttttaaaagttaaaagtaattcttggcgtggtggttcacgcctgtaatcccagcactttgggaggccgaagcgggcggatcacctgaggtcgggagttcgagaccagcctgaccaacatggagaaaccccgtccctactaaaaatacaaaattagccaggtatggtggtgcatacctgtaatcccagctactcgggaacctgaggcaggagaatggcttgaacccaggagacagaggttgtggtggggcaagatcgcaccattgcacccgagcctaggcaacaagagtgaaattccgtctcaaaaaaataaataaataaataaataaataagttaaaattaattctttatccagagtcgggtgctttagaatttataagtcacttatgtgttttgcttgaattaattctgacagcccctatgaggaaatctggaggcaggtaacagttcccattttagagatgaagaactgaggcacagattaaaggacttgcctgtgttgaataccagtcctgttctaggacattctcccctctcctaggagacggatgtcacgcacaaatggggagagaagtgtttattttgtaggcactaagggtttctaaaacccttaacactggtaagggctcaaaaataaacgtatgtgttcatattcgatcaccgaaatgagagttcttaattgctaattgacaaacgcgttagcaatttcagttagggagtcatctcccttgattgtgttcttttcctgtcaattttcatagacctaatttgcaaactcaatcggggactaaaatttcccactgaaaatgttaaacattttagataactgtgaagatagtttatttttattccttgccaatctgggaatatgccttttttgtgtgtttgtgtgtttttttaagtgctgtattaataatactttctgaaagaaaaggacacttaccccaaaacttcaatctgaaatgtcttacattaagaatatcttgaatgttgtgtatatattttaaaaagcactttgcaaaatagtttgtacatttatttcctaatttatacatgatttttggtgttaatatatttaatgattaataacagaatgtttatttaatgtgctgtccatttttatgtaatattatggggaaagtgatgccagcagttccttttcattattctatcttctgtcatatgaatgttgagcaaagcttaggccaacatgaattgtttgtgaagtgtggttgatggtgctttgtttttttctgactacttctatggaaggccagtgaagaagcaaaggaagacatgaaaattgacgctcattcttcttcctattgttccctgacatccagcaaattgtgaatttgaaaaatgatggccagttttcagaagtgctgacaaattcatattggtatgcaaaagctcatcacccattaaggtttgttgttgaatcaacagtactcagcatattaaaacagtacatcagaactcatgccaacagtctttatgatgggattaaggtggacaagatctcctaagatctgtgaatgggattaaggtggacaagatctcctaagatctgaaaagaaaccttaatacgctcatatggttggagtgttaagtgaacctctgattttgtcagggtttttctacgtgtaggcgtgaatagggggcaccccttcaaaactgtacaaagaagacgactgttttccatttccatttaaacatttttagccacttcatttctatttattgaacaggtcaaatttgtcttgttatttgtgagtacagtacatttaaaaaacatccttatcggttatttttttttcagtcggagtttgacgtataaattgtttatgcttttggtgtaatctcttaataaactggttcttcaaaaatc

SEQ ID NO: 11575 - protein, 396 aa, Homo sapiens; identical to SEQ ID NO: 1923

SEQ ID NO: 11576 - DNA, 3756 bp, Homo sapiens
atgagcgcctcgggccgcccagcgcagccggagtatccacctcgatgaccacgggctgagccccgcgccgccaccatgtccgtggccttcgcgtctgcccggccaagaggcaaaggggaggttacgcagcaaaccatccagaagatgctggacgagaaccaccacctgatccagtgcatcctggagtaccagagcaagggcaagacggccgagtgcacgcagtaccagcagatcctgcaccggaacctggtatacctggccacgatcgcagactccaaccagaacatgcagtccctgcttcctgccccgcccacgcagaacatgaacctgggccctggagccctgactcagagcggctccagccagggcctgcactctcagggcagcctgagtgacgccatcagcacgggcctgccaccctcctccctcctgcagggccagattggcaacgggccgagccacgtgtccatgcagcagacggcgcctaacacgctgcccaccacctccatgagcatctctgggcccggctacagccacgcgggacccgcctcgcagggcgtccccatgcaggggcaaggcaccatcggcaactacgtgtctcggaccaacatcaacatgcagtccaacccagtctccatgatgcagcagcaggcggccacgtcgcactacagctcggcgcagggcggcagccagcactaccagggccagtcgtccatcgccatgatggggcagggcagccaggggagcagcatgatggggcagcggcccatggcgccctaccggccctcccagcaaggctcttcccagcagtacctgggccaggaggagtactatggcgagcagtacagccacagccagggcgccgcggagcccatgggccagcagtactaccccgacggccatggcgattacgcctaccagcagtcatcctacacggagcagagctacgaccggtccttcgaggagtccacgcagcactactatgaggggggaaactcccagtacagccagcagcaggccgggtaccagcagggtgccgcgcagcagcagacgtactcccagcagcagtaccccagccagcagagctaccccgggcagcagcagggctacgggtctgcccagggagccccgtcacagtaccccggctaccagcaaggccaaggccagcagtacggaagctaccgagcaccgcagacagcgccgtctgcccagcagcagcggccctacggctatgaacagggccagtatggaaattaccagcagtaagggacacacattctggctggagcccttgtggtagcgtgttcatccaggggccggatgggctggcggcagctctggtgaattgtgacatgttggttacctgttcgcccagtgccacgtctgcatgtgaagcgtgctcatttcatgctgggacctacttgctcagatctccaagcaagcatttcttttcttttagggatgtctgaaagtcacatccagttacattactgtgttctttctaatgaaaagtaaaggttttatatagagaaacttgagtaatttttacatttctaagacattaaatcccatttaaattctgtgtgaacattaaagacagcacacttgcaaaagtatggtcaaaggaaaaaaatcccacatttcaattaacaagtagcatggacatttgatcaacctttagttggaataataatattcatatttgctatgaatccttttaaaaaaatctttggataaatgctgacagatttccaagaactaccaagaaaatacaagagatatccaatgcttgatatatgaggcctagtaataacgatatttctctttaattgatgttttgttttaaaagttaaaagtaattcttggcgtggtggttcacgcctgtaatcccagcactttgggaggccgaagcgggcggatcacctgaggtcgggagttcgagaccagcctgaccaacatggagaaaccccgtccctactaaaaatacaaaattagccaggtatggtggtgcatacctgtaatcccagctactcgggaacctgaggcaggagaatggcttgaacccaggagacagaggttgtggtggggcaagatcgcaccattgcacccgagcctaggcaacaagagtgaaattccgtctcaaaaaaataaataaataaataaataaataagttaaaattaattctttatccagagtcgggtgctttagaatttataagtcacttatgtgttttgcttgaattaattctgacagcccctatgaggaaatctggaggcaggtaacagttcccattttagagatgaagaactgaggcacagattaaaggacttgcctgtgttgaataccagtcctgttctaggacattctcccctctcctaggagacggatgtcacgcacaaatggggagagaagtgtttattttgtaggcactaagggtttctaaaacccttaacactggtaagggctcaaaaataaacgtatgtgttcatattcgatcaccgaaatgagagttcttaattgctaattgacaaacgcgttagcaatttcagttagggagtcatctcccttgattgtgttcttttcctgtcaattttcatagacctaatttgcaaactcaatcggggactaaaatttcccactgaaaatgttaaacattttagataactgtgaagatagtttatttttattccttgccaatctgggaatatgccttttttgtgtgtttgtgtgtttttttaagtgctgtattaataatactttctgaaagaaaaggacacttaccccaaaacttcaatctgaaatgtcttacattaagaatatcttgaatgttgtgtatatattttaaaaagcactttgcaaaatagtttgtacatttatttcctaatttatacatgatttttggtgttaatatatttaatgattaataacagaatgtttatttaatgtgctgtccatttttatgtaatattatggggaaagtgatgccagcagttccttttcattattctatcttctgtcatatgaatgttgagcaaagcttaggccaacatgaattgtttgtgaagtgtggttgatggtgctttgtttttttctgactacttctatggaaggccagtgaagaagcaaaggaagacatgaaaattgacgctcattcttcttcctattgttccctgacatccagcaaattgtgaatttgaaaaatgatggccagttttcagaagtgctgacaaattcatattggtatgcaaaagctcatcacccattaaggtttgttgttgaatcaacagtactcagcatattaaaacagtacatcagaactcatgccaacagtctttatgatgggattaaggtggacaagatctcctaagatctgtgaatgggattaaggtggacaagatctcctaagatctgaaaagaaaccttaatacgctcatatggttggagtgttaagtgaacctctgattttgtcagggtttttctacgtgtaggcgtgaatagggggcaccccttcaaaactgtacaaagaagacgactgttttccatttccatttaaacatttttagccacttcatttctatttattgaacaggtcaaatttgtcttgttatttgtgagtacagtacatttaaaaaacatccttatcggttatttttttttcagtcggagtttgacgtataaattgtttatgcttttggtgtaatctcttaataaactggttcttcaaaaatcatcctataaagtgagttttcatgaag

SEQ ID NO: 11577 - protein, 396 aa, Homo sapiens; identical to SEQ ID NO: 1923

SEQ ID NO: 11578 - DNA, 4568 bp, Homo sapiens
atgagcgcctcgggccgcccagcgcagccggagtatccacctcgatgaccacgggctgagccccgcgccgccaccatgtccgtggccttcgcgtctgcccggccaagaggcaaaggggaggttacgcagcaaaccatccagaagatgctggacgagaaccaccacctgatccagtgcatcctggagtaccagagcaagggcaagacggccgagtgcacgcagtaccagcagatcctgcaccggaacctggtatacctggccacgatcgcagactccaaccagaacatgcagtccctgcttcctgccccgcccacgcagaacatgaacctgggccctggagccctgactcagagcggctccagccagggcctgcactctcagggcagcctgagtgacgccatcagcacgggcctgccaccctcctccctcctgcagggccagattggcaacgggccgagccacgtgtccatgcagcagacggcgcctaacacgctgcccaccacctccatgagcatctctgggcccggctacagccacgcgggacccgcctcgcagggcgtccccatgcaggggcaaggcaccatcggcaactacgtgtctcggaccaacatcaacatgcagtccaacccagtctccatgatgcagcagcaggcggccacgtcgcactacagctcggcgcagggcggcagccagcactaccagggccagtcgtccatcgccatgatggggcagggcagccaggggagcagcatgatggggcagcggcccatggcgccctaccggccctcccagcaaggctcttcccagcagtacctgggccaggaggagtactatggcgagcagtacagccacagccagggcgccgcggagcccatgggccagcagtactaccccgacggccatggcgattacgcctaccagcagtcatcctacacggagcagagctacgaccggtccttcgaggagtccacgcagcactactatgaggggggaaactcccagtacagccagcagcaggccgggtaccagcagggtgccgcgcagcagcagacgtactcccagcagcagtaccccagccagcagagctaccccgggcagcagcagggctacgggtctgcccagggagccccgtcacagtaccccggctaccagcaaggccaaggccagcagtacggaagctaccgagcaccgcagacagcgccgtctgcccagcagcagcggccctacggctatgaacagggccagtatggaaattaccagcagtaagggacacacattctggctggagcccttgtggtagcgtgttcatccaggggccggatgggctggcggcagctctggtgaattgtgacatgttggttacctgttcgcccagtgccacgtctgcatgtgaagcgtgctcatttcatgctgggtatgacgccgagcgcacaccactggcgtgagacagcgcttggtggtgtgatacttttggtgctgtgtatagtattgtatgtcggtacacggagaggtatcctttttttgtcccccgcccccttctcaatgtttctagctagctttgggggtcattttgtcatcagagcattctgtgcccagggacaggacagatctcgaggacaccacagtccacctgttcccgtcaacagacgttaggtctcattttcctcctcatgcagtgttgtagtgtgggttgtcaacttttctttaactggctacgccacagctggacacacatgcagcccctggagggcagcctcttcctgtgcctcgatggggtgggtgggagggcatcttctgtgcgttgggtcagtttctgttacgtaacgaaaaggataaacatctcccacgggagaggccacagatggccacttccagagcttgcccattgcctgtctctcgccaattccgtttatccaaaaaggtacatgtttttgtattaaaaagtaaacagggatcagtgactgtattccaaataaatatgaatccctaagggccgtggacaaattgcctaacccagggccagcggtattgctgaaggaaaggggcagctctctgggaagtgggccctcagagattactctggctttgacccttgtttagctgatggtcatttctgggattggaatatttaataagcccaattctaagttgataggtaattttaaatattcaaaccaaatcttcccaacagttggcaagttgtttattttatattatttcttccaggacctacttgctcagatctccaagcaagcatttcttttcttttagggatgtctgaaagtcacatccagttacattactgtgttctttctaatgaaaagtaaaggttttatatagagaaacttgagtaatttttacatttctaagacattaaatcccatttaaattctgtgtgaacattaaagacagcacacttgcaaaagtatggtcaaaggaaaaaaatcccacatttcaattaacaagtagcatggacatttgatcaacctttagttggaataataatattcatatttgctatgaatccttttaaaaaaatctttggataaatgctgacagatttccaagaactaccaagaaaatacaagagatatccaatgcttgatatatgaggcctagtaataacgatatttctctttaattgatgttttgttttaaaagttaaaagtaattcttggcgtggtggttcacgcctgtaatcccagcactttgggaggccgaagcgggcggatcacctgaggtcgggagttcgagaccagcctgaccaacatggagaaaccccgtccctactaaaaatacaaaattagccaggtatggtggtgcatacctgtaatcccagctactcgggaacctgaggcaggagaatggcttgaacccaggagacagaggttgtggtggggcaagatcgcaccattgcacccgagcctaggcaacaagagtgaaattccgtctcaaaaaaataaataaataaataaataaataagttaaaattaattctttatccagagtcgggtgctttagaatttataagtcacttatgtgttttgcttgaattaattctgacagcccctatgaggaaatctggaggcaggtaacagttcccattttagagatgaagaactgaggcacagattaaaggacttgcctgtgttgaataccagtcctgttctaggacattctcccctctcctaggagacggatgtcacgcacaaatggggagagaagtgtttattttgtaggcactaagggtttctaaaacccttaacactggtaagggctcaaaaataaacgtatgtgttcatattcgatcaccgaaatgagagttcttaattgctaattgacaaacgcgttagcaatttcagttagggagtcatctcccttgattgtgttcttttcctgtcaattttcatagacctaatttgcaaactcaatcggggactaaaatttcccactgaaaatgttaaacattttagataactgtgaagatagtttatttttattccttgccaatctgggaatatgccttttttgtgtgtttgtgtgtttttttaagtgctgtattaataatactttctgaaagaaaaggacacttaccccaaaacttcaatctgaaatgtcttacattaagaatatcttgaatgttgtgtatatattttaaaaagcactttgcaaaatagtttgtacatttatttcctaatttatacatgatttttggtgttaatatatttaatgattaataacagaatgtttatttaatgtgctgtccatttttatgtaatattatggggaaagtgatgccagcagttccttttcattattctatcttctgtcatatgaatgttgagcaaagcttaggccaacatgaattgtttgtgaagtgtggttgatggtgctttgtttttttctgactacttctatggaaggccagtgaagaagcaaaggaagacatgaaaattgacgctcattcttcttcctattgttccctgacatccagcaaattgtgaatttgaaaaatgatggccagttttcagaagtgctgacaaattcatattggtatgcaaaagctcatcacccattaaggtttgttgttgaatcaacagtactcagcatattaaaacagtacatcagaactcatgccaacagtctttatgatgggattaaggtggacaagatctcctaagatctgtgaatgggattaaggtggacaagatctcctaagatctgaaaagaaaccttaatacgctcatatggttggagtgttaagtgaacctctgattttgtcagggtttttctacgtgtaggcgtgaatagggggcaccccttcaaaactgtacaaagaagacgactgttttccatttccatttaaacatttttagccacttcatttctatttattgaacaggtcaaatttgtcttgttatttgtgagtacagtacatttaaaaaacatccttatcggttatttttttttcagtcggagtttgacgtataaattgtttatgcttttggtgtaatctcttaataaactggttcttcaaaaatcatcctataaagtgagttttcatgaag

SEQ ID NO: 11579 - protein, 396 aa, Homo sapiens; identical to SEQ ID NO: 1923

SEQ ID NO: 11580 - DNA, 3621 bp, Homo sapiens
agcgcagccggagtatccacctcgatgaccacgggctgagccccgcgccgccaccatgtccgtggccttcgcgtctgcccggccaagaggcaaaggggaggttacgcagcaaaccatccagaagtttttgaagaatgccggccagtcatcgagtgcccttggtttgggtacaaggtgcgttttcctaacttgcgggtctgaaagtgcgtccattcccccttcacgcctggttgcggtttcggcggactagaatttctacgcagaagtctccctcaggatcagaccgtagcccttccggaaacctccatgatgctggacgagaaccaccacctgatccagtgcatcctggagtaccagagcaagggcaagacggccgagtgcacgcagtaccagcagatcctgcaccggaacctggtatacctggccacgatcgcagactccaaccagaacatgcagtccctgcttcctgccccgcccacgcagaacatgaacctgggccctggagccctgactcagagcggctccagccagggcctgcactctcagggcagcctgagtgacgccatcagcacgggcctgccaccctcctccctcctgcagggccagattggcaacgggccgagccacgtgtccatgcagcagacggcgcctaacacgctgcccaccacctccatgagcatctctgggcccggctacagccacgcgggacccgcctcgcagggcgtccccatgcaggggcaaggcaccatcggcaactacgtgtctcggaccaacatcaacatgcagtccaacccagtctccatgatgcagcagcaggcggccacgtcgcactacagctcggcgcagggcggcagccagcactaccagggccagtcgtccatcgccatgatggggcagggcagccaggggagcagcatgatggggcagcggcccatggcgccctaccggccctcccagcaaggctcttcccagcagtacctgggccaggaggagtactatggcgagcagtacagccacagccagggcgccgcggagcccatgggccagcagtactaccccgacggccatggcgattacgcctaccagcagtcatcctacacggagcagagctacgaccggtccttcgaggagtccacgcagcactactatgaggggggaaactcccagtacagccagcagcaggccgggtaccagcagggtgccgcgcagcagcagacgtactcccagcagcagtaccccagccagcagagctaccccgggcagcagcagggctacgggtctgcccagggagccccgtcacagtaccccggctaccagcaaggccaaggccagcagtacggaagctaccgagcaccgcagacagcgccgtctgcccagcagcagcggccctacggctatgaacagggccagtatggaaattaccagcagtaagggacacacattctggctggagcccttgtggtagcgtgttcatccaggggccggatgggctggcggcagctctggtgaattgtgacatgttggttacctgttcgcccagtgccacgtctgcatgtgaagcgtgctcatttcatgctgggtatgacgccgagcgcacaccactggcgtgagacagcgcttggtggtgtgatacttttggtgctgtgtatagtattgtatgtcggtacacggagaggtatcctttttttgtcccccgcccccttctcaatgtttctagctagctttgggggtcattttgtcatcagagcattctgtgcccagggacaggacagatctcgaggacaccacagtccacctgttcccgtcaacagacgttaggtctcattttcctcctcatgcagtgttgtagtgtgggttgtcaacttttctttaactggctacgccacagctggacacacatgcagcccctggagggcagcctcttcctgtgcctcgatggggtgggtgggagggcatcttctgtgcgttgggtcagtttctgttacgtaacgaaaaggataaacatctcccacgggagaggccacagatggccacttccagagcttgcccattgcctgtctctcgccaattccgtttatccaaaaaggtacatgtttttgtattaaaaagtaaacagggatcagtgactgtattccaaataaatatgaatccctaagggccgtggacaaattgcctaacccagggccagcggtattgctgaaggaaaggggcagctctctgggaagtgggccctcagagattactctggctttgacccttgtttagctgatggtcatttctgggattggaatatttaataagcccaattctaagttgataggtaattttaaatattcaaaccaaatcttcccaacagttggcaagttgtttattttatattatttcttccaggacctacttgctcagatctccaagcaagcatttcttttcttttagggatgtctgaaagtcacatccagttacattactgtgttctttctaatgaaaagtaaaggttttatatagagaaacttgagtaatttttacatttctaagacattaaatcccatttaaattctgtgtgaacattaaagacagcacacttgcaaaagtatggtcaaaggaaaaaaatcccacatttcaattaacaagtagcatggacatttgatcaacctttagttggaataataatattcatatttgctatgaatccttttaaaaaaatctttggataaatgctgacagatttccaagaactaccaagaaaatacaagagatatccaatgcttgatatatgaggcctagtaataacgatatttctctttaattgatgttttgttttaaaagttaaaagtaattcttggcgtggtggttcacgcctgtaatcccagcactttgggaggccgaagcgggcggatcacctgaggtcgggagttcgagaccagcctgaccaacatggagaaaccccgtccctactaaaaatacaaaattagccaggccagtgaagaagcaaaggaagacatgaaaattgacgctcattcttcttcctattgttccctgacatccagcaaattgtgaatttgaaaaatgatggccagttttcagaagtgctgacaaattcatattggtatgcaaaagctcatcacccattaaggtttgttgttgaatcaacagtactcagcatattaaaacagtacatcagaactcatgccaacagtctttatgatgggattaaggtggacaagatctcctaagatctgtgaatgggattaaggtggacaagatctcctaagatctgaaaagaaaccttaatacgctcatatggttggagtgttaagtgaacctctgattttgtcagggtttttctacgtgtaggcgtgaatagggggcaccccttcaaaactgtacaaagaagacgactgttttccatttccatttaaacatttttagccacttcatttctatttattgaacaggtcaaatttgtcttgttatttgtgagtacagtacatttaaaaaacatccttatcggttatttttttttcagtcggagtttgacgtataaattgtttatgcttttggtgtaatctcttaataaactggttcttcaaaaatcatcctataaagtgagttttcatgaag

SEQ ID NO: 11581 - protein, 374 aa, Homo sapiens
MMLDENHHLIQCILEYQSKGKTAECTQYQQILHRNLVYLATIADSNQNMQSLLPAPPTQNMNLGPGALTQSGSSQGLHSQGSLSDAISTGLPPSSLLQGQIGNGPSHVSMQQTAPNTLPTTSMSISGPGYSHAGPASQGVPMQGQGTIGNYVSRTNINMQSNPVSMMQQQAATSHYSSAQGGSQHYQGQSSIAMMGQGSQGSSMMGQRPMAPYRPSQQGSSQQYLGQEEYYGEQYSHSQGAAEPMGQQYYPDGHGDYAYQQSSYTEQSYDRSFEESTQHYYEGGNSQYSQQQAGYQQGAAQQQTYSQQQYPSQQSYPGQQQGYGSAQGAPSQYPGYQQGQGQQYGSYRAPQTAPSAQQQRPYGYEQGQYGNYQQ

SEQ ID NO: 11582 - DNA, 1886 bp, Homo sapiens
gcagccggagtatccacctcgatgaccacgggctgagccccgcgccgccaccatgtccgtggccttcgcgtctgcccggccaagaggcaaaggggaggttacgcagcaaaccatccagaagtttttgaagaatgccggccagtcatcgagtgcccttggtttgggtacaaggtgcgttttcctaacttgcgggtctgaaagtgcgtccattcccccttcacgcctggttgcggtttcggcggactagaatttctacgcagaagtctccctcaggatcagaccgtagcccttccggaaacctccatgatgctggacgagaaccaccacctgatccagtgcatcctggagtaccagagcaagggcaagacggccgagtgcacgcagtgagtgcccgccatacaccggaacacttggagggtgtcatgcagagtctaagcacagaggccagatacgtcccaagagtcccccagcacagagatcagataagtcccaggagtccccagcacggaggccagatatgtcccaggagtcccctgcacagaggccagatatgtcccaggagtcccccagcacggaggtaccagcagatcctgcaccggaacctggtatacctggccacgatcgcagactccaaccagaacatgcagtccctgcttcctgccccgcccacgcagaacatgaacctgggccctggagccctgactcagagcggctccagccagggcctgcactctcagggcagcctgagtgacgccatcagcacgggcctgccaccctcctccctcctgcagggccagattggcaacgggccgagccacgtgtccatgcagcagacggcgcctaacacgctgcccaccacctccatgagcatctctgggcccggctacagccacgcgggacccgcctcgcagggcgtccccatgcaggggcaaggcaccatcggcaactacgtgtctcggaccaacatcaacatgcagtccaacccagtctccatgatgcagcagcaggcggccacgtcgcactacagctcggcgcagggcggcagccagcactaccagggccagtcgtccatcgccatgatggggcagggcagccaggggagcagcatgatggggcagcggcccatggcgccctaccggccctcccagcaaggctcttcccagcagtacctgggccaggaggagtactatggcgagcagtacagccacagccagggcgccgcggagcccatgggccagcagtactaccccgacggccatggcgattacgcctaccagcagtcatcctacacggagcagagctacgaccggtccttcgaggagtccacgcagcactactatgaggggggaaactcccagtacagccagcagcaggccgggtaccagcagggtgccgcgcagcagcagacgtactcccagcagcagtaccccagccagcagagctaccccgggcagcagcagggctacgggtctgcccagggagccccgtcacagtaccccggctaccagcaaggccaaggccagcagtacggaagctaccgagcaccgcagacagcgccgtctgcccagcagcagcggccctacggctatgaacagggccagtatggaaattaccagcagtaagggacacacattctggctggagcccttgtggtagcgtgttcatccaggggccggatgggctggcggcagctctggtgaattgtgacatgttggttacctgttcgcccagtgccacgtctgcatgtgaagcgtgctcatttcatgctgggacctacttgctcagatctccaagcaagcatttcttttcttttagggatgtctgaaagtcacatccagttacattactgtgttctttctaatgaaaagtaaaggttttatatagag

SEQ ID NO: 11583 - protein, 399 aa, Homo sapiens
MQSLSTEARYVPRVPQHRDQISPRSPQHGGQICPRSPLHRGQICPRSPPARRYQQILHRNLVYLATIADSNQNMQSLLPAPPTQNMNLGPGALTQSGSSQGLHSQGSLSDAISTGLPPSSLLQGQIGNGPSHVSMQQTAPNTLPTTSMSISGPGYSHAGPASQGVPMQGQGTIGNYVSRTNINMQSNPVSMMQQQAATSHYSSAQGGSQHYQGQSSIAMMGQGSQGSSMMGQRPMAPYRPSQQGSSQQYLGQEEYYGEQYSHSQGAAEPMGQQYYPDGHGDYAYQQSSYTEQSYDRSFEESTQHYYEGGNSQYSQQQAGYQQGAAQQQTYSQQQYPSQQSYPGQQQGYGSAQGAPSQYPGYQQGQGQQYGSYRAPQTAPSAQQQRPYGYEQGQYGNYQQ

SEQ ID NO: 11584 - DNA, 575 bp, Homo sapiens
aagggcacccctgaaggaccatatccactgtggacccccttgggatcagccgagagagctgcagccgatgccggccggtgacttgggacttggatgcttaacaggaggctccccctctcttgggaggtagagagcagtgaggaaggggactcagcctccatgcctcccgccagcccagctgcgcccgaatcacctccctcctgaaaggatgtcagcctctgcttggacaccgtggagacagggccctccttgtgcttcagaagcatcaacgtgtcagaaaatcatcttcacgccaagtctggaaaaaatggctttgaggttgtgcacacaaaggaaggagggagagccccaggtgtcgcggaggaccatgcggctgacagagccagcagggcggtggcgtgtgagccgtgctctggatatataaggatctgacgctgctggcaatgtctgagctctatgctcgcccatctgtcggctgctatcatcaccgggtgggattagcggagatccactctttcatatttaaatcttcacaagagaatgaatcacttttataataaaagaaaaagaccgtc

SEQ ID NO: 11585 - protein, 36 aa, Homo sapiens
MLNRRLPLSWEVESSEEGDSASMPPASPAAPESPPS

SEQ ID NO: 11586 - DNA, 771 bp, Homo sapiens
agttggtgactgctcgaaggggtgggaggaacagtataaagtcctgtccccttcctgccttcaagggcacccctgaaggaccatatccactgtggacccccttgggatcagccgagcttttcacactctctgttgcccttgtccttgggcatctcagtgactcgaaggaattgggtcttgagacacagccgagcctgtgagcgctgacctgtgtaaagaagacaccagaatgagatgtctccacacacagagagctgcagccgatgccggccggtgacttgggacttggatgcttaacaggaggctccccctctcttgggaggtagagagcagtgaggaaggggactcagcctccatgcctcccgccagcccagctgcgcccgaatcacctccctcctgaaaggatgtcagcctctgcttggacaccgtggagacagggccctccttgtgcttcagaagcatcaacgtgtcagaaaatcatcttcacgccaagtctggaaaaaatggctttgaggttgtgcacacaaaggaaggagggagagccccaggtgtcgcggaggaccatgcggctgacagagccagcagggcggtggcgtgtgagccgtgctctggatatataaggatctgacgctgctggcaatgtctgagctctatgctcgcccatctgtcggctgctatcatcaccgggtgggattagcggagatccactctttcatatttaaatcttcacaagagaatgaatcacttttataataaaagaaaaagaccgtc

SEQ ID NO: 11587 - protein, 36 aa, Homo sapiens; identical to SEQ ID NO: 11585

SEQ ID NO: 11588 - DNA, 1682 bp, Homo sapiens
ggcgcgtgagcccgagcgcgtacccggcggagcgcgcgcccgcccccgagtgcgcctgcgcggagctcgtggccgcgcctgctcccgccgggggctccttgctcggccgggccgcggccatgggagaggccgaggtgggcggcgggggcgccgcaggcgacaagggcccgggggaggcggccaccagcccggcggaggagacagtggtgtggagccccgaggtggaggtgtgcctcttccacgccatgctgggccacaagcccgtcggtgtgaaccgacacttccacatgatttgtattcgggacaagttcagccagaacatcgggcggcaggtcccatccaaggtcatctgggaccatctgagcaccatgtacgacatgcaggcgctgcatgagtctgagattcttccattcccgaatccagagaggaacttcgtccttccagaagagatcattcaggaggtccgagaaggaaaagtgatgatagaagaggagatgaaagaggagatgaaggaagacgtggacccccacaatggggctgacgatgttttttcatcttcagggagtttggggaaagcatcagaaaaatccagcaaagacaaagagaagaactcctcagacttggggtgcaaagaaggcgcagacaagcggaagcgcagccgggtcaccgacaaagtcctgaccgcaaacagcaacccttccagtcccagtgctgccaagcggcgccgcacgtagaccctcagccctggtggcggcagagaagcgggcgaggcactgtggtcgctgagggggttggctgggtctgagtgccaccccccaggccacagtgataccatcccagtgccatgagcccacactgcccgccctcaggctctcaggtgaacgtggccgtcagcggggaaacgtgtgtgtcagttggaccatgtgggaccctgatggacctgaaagaccaggatcggtccagctcagatattgagggctctgaagcctagttctgtcttctctggagcagctgtggcttccccgtggctgcttggtgacatggattagcgctacgtgggctgcagcatttgggatccaggctacctagaggggcatcgggccagggaaaacctcggattagcaagcaataaaaacatgacctcactcttcctcaaaggagcccctggtcttccctgtgtgactcagttctttccatctgtttgtcccgctgcaagcctctttctgcgctgactgtgacattggaacgtggccttcctgtcaccccctccgtgccacgcactgaaggccacccccacccacctgggaaactaagaactggatattttgcctcattcacttgtactgtaacaatgtatataatttggttggtatttcactatttaatttttaagaagcctattttactagtgttttatatgaacaaagtactgcagaagttaaacctgtgttgtattttttctgagatgttttgctttaagagatactttttgctcagtttttatatgccagatacagagaatttgtagcggttatttttgtatgatctagtaacttgcaaacagaccaaatggatgagaggcggggaccgtgcagctgtcggctgatgaggaggcggccgccccagtgctgatggagatgccactttcgtgtgactgcgaacattaaagcacaaaaaaatcc

SEQ ID NO: 11589 - protein, 204 aa, Homo sapiens; identical to SEQ ID NO: 1925

SEQ ID NO: 11590 - DNA, 2827 bp, Homo sapiens
ggcgcgtgagcccgagcgcgtacccggcggagcgcgcgcccgcccccgagtgcgcctgcgcggagctcgtggccgcgcctgctcccgccgggggctccttgctcggccgggccgcggccatgggagaggccgaggtgggcggcgggggcgccgcaggcgacaagggcccgggggaggcggccaccagcccggcggaggagacagtggtgtggagccccgaggtggaggtgtgcctcttccacgccatgctgggccacaagcccgtcggtgtgaaccgacacttccacatgatttgtattcgggacaagttcagccagaacatcgggcggcaggtcccatccaaggtcatctgggaccatctgagcaccatgtacgacatgcaggcgctgcatgagtctgagattcttccattcccgaatccagagaggaacttcgtccttccagaagagatcattcaggaggtccgagaaggaaaagtgatgatagaagaggagatgaaagaggagatgaaggaagacgtggacccccacaatggggctgacgatgttttttcatcttcagggagtttggggaaagcatcagaaaaatccagcaaagacaaagagaagaactcctcagacttggggtgcaaagaaggcgcagacaagcggaagcgcagccgggtcaccgacaaagtcctgaccgcaaacagcaacccttccagtcccagtgctgccaagcggcgccgcacgtagaccctcagccctggtggcggcagagaagcgggcgaggcactgtggtcgctgagggggttggctgggtctgagtgccaccccccaggccacagtgataccatcccagtgccatgagcccacactgcccgccctcaggctctcaggtgaacgtggccgtcagcggggaaacgtgtgtgtcagttggaccatgtgggaccctgatggacctgaaagaccaggatcggtccagctcagatattgagggctctgaagcctagttctgtcttctctggagcagctgtggcttccccgtggctgcttggtgacatggattagcgctacgtgggctgcagcatttgggatccaggctacctagaggggcatcgggccagggaaaacctcggattagcaagcaataaaaacatgacctcactcttcctcaaaggagcccctggtcttccctgtgtgactcagttctttccatctgtttgtcccgctgcaagcctctttctgcgctgactgtgacattggaacgtggccttcctgtcaccccctccgtgccacgcactgaaggccacccccacccacctgggaaactaagaactggatattttgcctcattcacttgtactgtaacaatgtatataatttggttggtatttcactatttaatttttaagaagcctattttactagtgttttatatgaacaaagtactgcagaagttaaacctgtgttgtattttttctgagatgttttgctttaagagatactttttgctcagtttttatatgccagatacagagaatttgtagcggttatttttgtatgatctagtaacttgcaaacagaccaaatggatgagaggcggggaccgtgcagctgtcggctgatgaggaggcggccgccccagtgctgatggagatgccactttcgtgtgactgcgaacattaaagcacaaaaaaatccaacctggagttgtgtgattttgataccaaagtaagttcacttttcctccaaaaggaagtttttatttttccaagatttataactaaagcatacacttagatgacttattaacattcacttgatacaacatataaacaaaatagtaacagattctgagtggttattttgtggactgtgacaagcacttcaaatacaaaatgttaggagggcaaaacggtgcgggccctcgtaggtcaggcaggcaccagtgggctccttcctgctgaaagctgcggctgtgagatgagaccgctggctgggtcacagagtgaaatccagcgttccgtgtgcggacgaggagacaagctgtcctggccagccatcgcaccccaatgtcttcagcttgacgttgcttctctgccagtggagcctcctccaccacctgggaacatccctggccatctgtccctgaagtcctcctcaccatgacgcagatcacaaggcacccactaaaggggcaaagccaggaatcccgtgccatgtgatcgccccgtgtggcacctgccactcgtctgcaccaaacgcactgccagttctggggaagaacagcccagggaagctgctggtctacggcctgcctgagctgtattccaagggtagagcagctgcctggggggaccctgtgggtcccttttctatagagccgggacaaatccacagccctgcagtaacagcctgccacaaagagcaggcatctggagggccccacacacatagaccaaaggactgagcccgcctggcattcctccactcacagcacaaatactcagccctgcagccagggaagggtggggtctccctttgctgcccaagtgtgcccccttgcccgtctgatctctcctgttaggtcagcctcattcagggctttgtgccaggtcctgtcctggagtctcagtccgggacagcagcctggctcttaggcagtccagaagcagcagggcaaaggggggcaaatactaacacggggtgtcacgggatggccaggaggagtcctgctcgccacccaggctcactgtcctaaacctccatctgaaaccgcatctcgggtgacctcagattgtgctaggaaagcctagttaataaatctgcctcatctcgattactgt

SEQ ID NO: 11591 - protein, 204 aa, Homo sapiens; identical to SEQ ID NO: 1925

SEQ ID NO: 11592 - DNA, 1504 bp, Homo sapiens
cgcgcgcccgcccccgagtgcgcctgcgcggagctcgtggccgcgcctgctcccgccgggggctccttgctcggccgggccgcggccatgggagaggccgaggtgggcggcgggggcgccgcaggcgacaagggcccgggggaggcggccaccagcccggcggaggagacagtggtgtggagccccgaggtggaggtgtgcctcttccacgccatgctgggccacaagcccgtcggtgtgaaccgacacttccacatgatttgtattcgggacaagttcagccagaacatcgggcggcaggtcccatccaaggtcatctgggaccatctgagcaccatgtacgacatgcaggcgctggtgagcccaaccgccctccctgtgccgcccgatgggggcacgaacccgcacaccgctctctgagagtcagcctgagctgggcagaggcccctccatgtctgctggggtctgctgggcagagtagaggcccctccatgcctgctggggtctgcagtgagctctcagggtcagcctgagctgggcagaggcccctccgtgcctgctggggtcccctgggcagagacccctgcagtgaggctcgtccttaaggaggacatcccggggctccagagcctgtcatggaaagcacaaacacagtgctagcagctggctagcttttcaggggctctgctttagactgggtgctgggccagagtctccagctgagaccctggggagggagggaaggatgcagagtcccgggcccttaggccattgtcagcctcctgggaggcccccgaagtgctttaggcagagggtgaccctatctgagtcacaccaaggtgaatttggtgacttctgtgggagtcagacaagtagagttccagtcctcgcagagcttggagctggcactgtgtgacgggcgagcgggttaactaggtaagcagggtggccagaagagacaggtgggtgttccaggccctgtggcagcaggaggtggtgggtccaggagctcaaagaaggtggtgtacttggagagtggggtgggggtcaggggtcaggtgaccaggaggagtggggacctgtgctggtggagagtctgtgccagccacgttggactcagggccacaccggccatcagtatgacataggtctctccctctggtctgtgcgacctcaggagggcagtgcctggcaagcactctcttcttctttgcctggttctgtgcctgtggcgctcccaaccgacaccctcggtgtccatgggctcctgccacgtggatgagaactcgaggtgcctgcggcctttccccagggctgtcactgtgccctctgcatgccgccttggggaacgcagtctcatggtgagactgcaggccgtgctgggcaggcggagcccacaggtgtgtgtcaccagggctgcccggtcctcagggcccgccttagtgatgctggccccggtgggtcttcctgactcctgcatctgctgccgctggttctgccctcc

SEQ ID NO: 11593 - protein, 110 aa, Homo sapiens
MGEAEVGGGGAAGDKGPGEAATSPAEETVVWSPEVEVCLFHAMLGHKPVGVNRHFHMICIRDKFSQNIGRQVPSKVIWDHLSTMYDMQALVSPTALPVPPDGGTNPHTAL

SEQ ID NO: 11594 - DNA, 1941 bp, Homo sapiens
gagtgcgcctgcgcggagctcgtggccgcgcctgctcccgccgggggctccttgctcggccgggccgcggccatgggagaggccgaggtgggcggcgggggcgccgcaggcgacaagggcccgggggaggcggccaccagcccggcggaggagacagtggtgtggagccccgaggtggaggtgtgcctcttccacgccatgctgggccacaagcccgtcggtgtgaaccgacacttccacatgatttgtattcgggacaagttcagccagaacatcgggcggcaggtcccatccaaggtcatctgggaccatctgagcaccatgtacgacatgcaggcgctgcatgagtctgagattcttccattcccgaatccagagaggaacttcgtccttccagaagagatcattcaggaggtccgagaaggtgaggctcgggaaaggttgggcttgggattcagaaaaggccagaccctggccaagggcagggaggtgagggtgaggaccccgggcctccagggaggtgtgagggtccagcgcagaccccgccctacctgtgcttgggtggtcttggaacctccgggattggagaggactttgtttgagagcagtggctggacggaagctgaggcctgtgtgggcagcaagcgtcggagcagtccctggcctgaccatcccccagcgtcggccaccaccgtgggttttcggtgagcgtcagctgtctcctccacaggaaaagtgatgatagaagaggagatgaaagaggagatgaaggaagacgtggacccccacaatggggctgacgatgttttttcatcttcagggagtttggggaaagcatcagaaaaatccagcaaagacaaagagaagaactcctcagacttggggtgcaaagaaggcgcagacaagcggaagcgcagccgggtcaccgacaaagtcctgaccgcaaacagcaacccttccagtcccagtgctgccaagcggcgccgcacgtagaccctcagccctggtggcggcagagaagcgggcgaggcactgtggtcgctgagggggttggctgggtctgagtgccaccccccaggccacagtgataccatcccagtgccatgagcccacactgcccgccctcaggctctcaggtgaacgtggccgtcagcggggaaacgtgtgtgtcagttggaccatgtgggaccctgatggacctgaaagaccaggatcggtccagctcagatattgagggctctgaagcctagttctgtcttctctggagcagctgtggcttccccgtggctgcttggtgacatggattagcgctacgtgggctgcagcatttgggatccaggctacctagaggggcatcgggccagggaaaacctcggattagcaagcaataaaaacatgacctcactcttcctcaaaggagcccctggtcttccctgtgtgactcagttctttccatctgtttgtcccgctgcaagcctctttctgcgctgactgtgacattggaacgtggccttcctgtcaccccctccgtgccacgcactgaaggccacccccacccacctgggaaactaagaactggatattttgcctcattcacttgtactgtaacaatgtatataatttggttggtatttcactatttaatttttaagaagcctattttactagtgttttatatgaacaaagtactgcagaagttaaacctgtgttgtattttttctgagatgttttgctttaagagatactttttgctcagtttttatatgccagatacagagaatttgtagcggttatttttgtatgatctagtaacttgcaaacagaccaaatggatgagaggcggggaccgtgcagctgtcggctgatgaggaggcggccgccccagtgctgatggagatgccactttcgtgtgactgcgaacattaaagcacaaaaaaatcc

SEQ ID NO: 11595 - protein, 211 aa, Homo sapiens
MGEAEVGGGGAAGDKGPGEAATSPAEETVVWSPEVEVCLFHAMLGHKPVGVNRHFHMICIRDKFSQNIGRQVPSKVIWDHLSTMYDMQALHESEILPFPNPERNFVLPEEIIQEVREGEARERLGLGFRKGQTLAKGREVRVRTPGLQGGVRVQRRPRPTCAWVVLEPPGLERTLFESSGWTEAEACVGSKRRSSPWPDHPPASATTVGFR

SEQ ID NO: 11596 - DNA, 3086 bp, Homo sapiens
gagtgcgcctgcgcggagctcgtggccgcgcctgctcccgccgggggctccttgctcggccgggccgcggccatgggagaggccgaggtgggcggcgggggcgccgcaggcgacaagggcccgggggaggcggccaccagcccggcggaggagacagtggtgtggagccccgaggtggaggtgtgcctcttccacgccatgctgggccacaagcccgtcggtgtgaaccgacacttccacatgatttgtattcgggacaagttcagccagaacatcgggcggcaggtcccatccaaggtcatctgggaccatctgagcaccatgtacgacatgcaggcgctgcatgagtctgagattcttccattcccgaatccagagaggaacttcgtccttccagaagagatcattcaggaggtccgagaaggtgaggctcgggaaaggttgggcttgggattcagaaaaggccagaccctggccaagggcagggaggtgagggtgaggaccccgggcctccagggaggtgtgagggtccagcgcagaccccgccctacctgtgcttgggtggtcttggaacctccgggattggagaggactttgtttgagagcagtggctggacggaagctgaggcctgtgtgggcagcaagcgtcggagcagtccctggcctgaccatcccccagcgtcggccaccaccgtgggttttcggtgagcgtcagctgtctcctccacaggaaaagtgatgatagaagaggagatgaaagaggagatgaaggaagacgtggacccccacaatggggctgacgatgttttttcatcttcagggagtttggggaaagcatcagaaaaatccagcaaagacaaagagaagaactcctcagacttggggtgcaaagaaggcgcagacaagcggaagcgcagccgggtcaccgacaaagtcctgaccgcaaacagcaacccttccagtcccagtgctgccaagcggcgccgcacgtagaccctcagccctggtggcggcagagaagcgggcgaggcactgtggtcgctgagggggttggctgggtctgagtgccaccccccaggccacagtgataccatcccagtgccatgagcccacactgcccgccctcaggctctcaggtgaacgtggccgtcagcggggaaacgtgtgtgtcagttggaccatgtgggaccctgatggacctgaaagaccaggatcggtccagctcagatattgagggctctgaagcctagttctgtcttctctggagcagctgtggcttccccgtggctgcttggtgacatggattagcgctacgtgggctgcagcatttgggatccaggctacctagaggggcatcgggccagggaaaacctcggattagcaagcaataaaaacatgacctcactcttcctcaaaggagcccctggtcttccctgtgtgactcagttctttccatctgtttgtcccgctgcaagcctctttctgcgctgactgtgacattggaacgtggccttcctgtcaccccctccgtgccacgcactgaaggccacccccacccacctgggaaactaagaactggatattttgcctcattcacttgtactgtaacaatgtatataatttggttggtatttcactatttaatttttaagaagcctattttactagtgttttatatgaacaaagtactgcagaagttaaacctgtgttgtattttttctgagatgttttgctttaagagatactttttgctcagtttttatatgccagatacagagaatttgtagcggttatttttgtatgatctagtaacttgcaaacagaccaaatggatgagaggcggggaccgtgcagctgtcggctgatgaggaggcggccgccccagtgctgatggagatgccactttcgtgtgactgcgaacattaaagcacaaaaaaatccaacctggagttgtgtgattttgataccaaagtaagttcacttttcctccaaaaggaagtttttatttttccaagatttataactaaagcatacacttagatgacttattaacattcacttgatacaacatataaacaaaatagtaacagattctgagtggttattttgtggactgtgacaagcacttcaaatacaaaatgttaggagggcaaaacggtgcgggccctcgtaggtcaggcaggcaccagtgggctccttcctgctgaaagctgcggctgtgagatgagaccgctggctgggtcacagagtgaaatccagcgttccgtgtgcggacgaggagacaagctgtcctggccagccatcgcaccccaatgtcttcagcttgacgttgcttctctgccagtggagcctcctccaccacctgggaacatccctggccatctgtccctgaagtcctcctcaccatgacgcagatcacaaggcacccactaaaggggcaaagccaggaatcccgtgccatgtgatcgccccgtgtggcacctgccactcgtctgcaccaaacgcactgccagttctggggaagaacagcccagggaagctgctggtctacggcctgcctgagctgtattccaagggtagagcagctgcctggggggaccctgtgggtcccttttctatagagccgggacaaatccacagccctgcagtaacagcctgccacaaagagcaggcatctggagggccccacacacatagaccaaaggactgagcccgcctggcattcctccactcacagcacaaatactcagccctgcagccagggaagggtggggtctccctttgctgcccaagtgtgcccccttgcccgtctgatctctcctgttaggtcagcctcattcagggctttgtgccaggtcctgtcctggagtctcagtccgggacagcagcctggctcttaggcagtccagaagcagcagggcaaaggggggcaaatactaacacggggtgtcacgggatggccaggaggagtcctgctcgccacccaggctcactgtcctaaacctccatctgaaaccgcatctcgggtgacctcagattgtgctaggaaagcctagttaataaatctgcctcatctcgattactgt

SEQ ID NO: 11597 - protein, 211 aa, Homo sapiens; identical to SEQ ID NO: 11595

SEQ ID NO: 11598 - DNA, 1736 bp, Homo sapiens
gtggccgcgcctgctcccgccgggggctccttgctcggccgggccgcggccatgggagaggccgaggtgggcggcgggggcgccgcaggcgacaagggcccgggggaggcggccaccagcccggcggaggagacagtggtgtggagccccgaggtggaggtgtgcctcttccacgccatgctgggccacaagcccgtcggtgtgaaccgacacttccacatgatttgtattcgggacaagttcagccagaacatcgggcggcaggtcccatccaaggtcatctgggaccatctgagcaccatgtacgacatgcaggcgctgcatgagtctgagattcttccattcccgaatccagagaggaacttcgtccttccagaagagatcattcaggaggtccgagaagtggctggacggaagctgaggcctgtgtgggcagcaagcgtcggagcagtccctggcctgaccatcccccagcgtcggccaccaccgtgggttttcggtgagcgtcagctgtctcctccacaggaaaagtgatgatagaagaggagatgaaagaggagatgaaggaagacgtggacccccacaatggggctgacgatgttttttcatcttcagggagtttggggaaagcatcagaaaaatccagcaaagacaaagagaagaactcctcagacttggggtgcaaagaaggcgcagacaagcggaagcgcagccgggtcaccgacaaagtcctgaccgcaaacagcaacccttccagtcccagtgctgccaagcggcgccgcacgtagaccctcagccctggtggcggcagagaagcgggcgaggcactgtggtcgctgagggggttggctgggtctgagtgccaccccccaggccacagtgataccatcccagtgccatgagcccacactgcccgccctcaggctctcaggtgaacgtggccgtcagcggggaaacgtgtgtgtcagttggaccatgtgggaccctgatggacctgaaagaccaggatcggtccagctcagatattgagggctctgaagcctagttctgtcttctctggagcagctgtggcttccccgtggctgcttggtgacatggattagcgctacgtgggctgcagcatttgggatccaggctacctagaggggcatcgggccagggaaaacctcggattagcaagcaataaaaacatgacctcactcttcctcaaaggagcccctggtcttccctgtgtgactcagttctttccatctgtttgtcccgctgcaagcctctttctgcgctgactgtgacattggaacgtggccttcctgtcaccccctccgtgccacgcactgaaggccacccccacccacctgggaaactaagaactggatattttgcctcattcacttgtactgtaacaatgtatataatttggttggtatttcactatttaatttttaagaagcctattttactagtgttttatatgaacaaagtactgcagaagttaaacctgtgttgtattttttctgagatgttttgctttaagagatactttttgctcagtttttatatgccagatacagagaatttgtagcggttatttttgtatgatctagtaacttgcaaacagaccaaatggatgagaggcggggaccgtgcagctgtcggctgatgaggaggcggccgccccagtgctgatggagatgccactttcgtgtgactgcgaacattaaagcacaaaaaaatcc

SEQ ID NO: 11599 - protein, 160 aa, Homo sapiens
MGEAEVGGGGAAGDKGPGEAATSPAEETVVWSPEVEVCLFHAMLGHKPVGVNRHFHMICIRDKFSQNIGRQVPSKVIWDHLSTMYDMQALHESEILPFPNPERNFVLPEEIIQEVREVAGRKLRPVWAASVGAVPGLTIPQRRPPPWVFGERQLSPPQEK

SEQ ID NO: 11600 - DNA, 2881 bp, Homo sapiens
gtggccgcgcctgctcccgccgggggctccttgctcggccgggccgcggccatgggagaggccgaggtgggcggcgggggcgccgcaggcgacaagggcccgggggaggcggccaccagcccggcggaggagacagtggtgtggagccccgaggtggaggtgtgcctcttccacgccatgctgggccacaagcccgtcggtgtgaaccgacacttccacatgatttgtattcgggacaagttcagccagaacatcgggcggcaggtcccatccaaggtcatctgggaccatctgagcaccatgtacgacatgcaggcgctgcatgagtctgagattcttccattcccgaatccagagaggaacttcgtccttccagaagagatcattcaggaggtccgagaagtggctggacggaagctgaggcctgtgtgggcagcaagcgtcggagcagtccctggcctgaccatcccccagcgtcggccaccaccgtgggttttcggtgagcgtcagctgtctcctccacaggaaaagtgatgatagaagaggagatgaaagaggagatgaaggaagacgtggacccccacaatggggctgacgatgttttttcatcttcagggagtttggggaaagcatcagaaaaatccagcaaagacaaagagaagaactcctcagacttggggtgcaaagaaggcgcagacaagcggaagcgcagccgggtcaccgacaaagtcctgaccgcaaacagcaacccttccagtcccagtgctgccaagcggcgccgcacgtagaccctcagccctggtggcggcagagaagcgggcgaggcactgtggtcgctgagggggttggctgggtctgagtgccaccccccaggccacagtgataccatcccagtgccatgagcccacactgcccgccctcaggctctcaggtgaacgtggccgtcagcggggaaacgtgtgtgtcagttggaccatgtgggaccctgatggacctgaaagaccaggatcggtccagctcagatattgagggctctgaagcctagttctgtcttctctggagcagctgtggcttccccgtggctgcttggtgacatggattagcgctacgtgggctgcagcatttgggatccaggctacctagaggggcatcgggccagggaaaacctcggattagcaagcaataaaaacatgacctcactcttcctcaaaggagcccctggtcttccctgtgtgactcagttctttccatctgtttgtcccgctgcaagcctctttctgcgctgactgtgacattggaacgtggccttcctgtcaccccctccgtgccacgcactgaaggccacccccacccacctgggaaactaagaactggatattttgcctcattcacttgtactgtaacaatgtatataatttggttggtatttcactatttaatttttaagaagcctattttactagtgttttatatgaacaaagtactgcagaagttaaacctgtgttgtattttttctgagatgttttgctttaagagatactttttgctcagtttttatatgccagatacagagaatttgtagcggttatttttgtatgatctagtaacttgcaaacagaccaaatggatgagaggcggggaccgtgcagctgtcggctgatgaggaggcggccgccccagtgctgatggagatgccactttcgtgtgactgcgaacattaaagcacaaaaaaatccaacctggagttgtgtgattttgataccaaagtaagttcacttttcctccaaaaggaagtttttatttttccaagatttataactaaagcatacacttagatgacttattaacattcacttgatacaacatataaacaaaatagtaacagattctgagtggttattttgtggactgtgacaagcacttcaaatacaaaatgttaggagggcaaaacggtgcgggccctcgtaggtcaggcaggcaccagtgggctccttcctgctgaaagctgcggctgtgagatgagaccgctggctgggtcacagagtgaaatccagcgttccgtgtgcggacgaggagacaagctgtcctggccagccatcgcaccccaatgtcttcagcttgacgttgcttctctgccagtggagcctcctccaccacctgggaacatccctggccatctgtccctgaagtcctcctcaccatgacgcagatcacaaggcacccactaaaggggcaaagccaggaatcccgtgccatgtgatcgccccgtgtggcacctgccactcgtctgcaccaaacgcactgccagttctggggaagaacagcccagggaagctgctggtctacggcctgcctgagctgtattccaagggtagagcagctgcctggggggaccctgtgggtcccttttctatagagccgggacaaatccacagccctgcagtaacagcctgccacaaagagcaggcatctggagggccccacacacatagaccaaaggactgagcccgcctggcattcctccactcacagcacaaatactcagccctgcagccagggaagggtggggtctccctttgctgcccaagtgtgcccccttgcccgtctgatctctcctgttaggtcagcctcattcagggctttgtgccaggtcctgtcctggagtctcagtccgggacagcagcctggctcttaggcagtccagaagcagcagggcaaaggggggcaaatactaacacggggtgtcacgggatggccaggaggagtcctgctcgccacccaggctcactgtcctaaacctccatctgaaaccgcatctcgggtgacctcagattgtgctaggaaagcctagttaataaatctgcctcatctcgattactgt

SEQ ID NO: 11601 - protein, 160 aa, Homo sapiens; identical to SEQ ID NO: 11599

SEQ ID NO: 11602 - DNA, 1564 bp, Homo sapiens
ctgctcccgccgggggctccttgctcggccgggccgcggccatgggagaggccgaggtgggcggcgggggcgccgcaggcgacaagggcccgggggaggcggccaccagcccggcggaggagacagtggtgtggagccccgaggtggaggtgtgaaccgacacttccacatgatttgtattcgggacaagttcagccagaacatcgggcggcaggtcccatccaaggtcatctgggaccatctgagcaccatgtacgacatgcaggcgctgcatgagtctgagattcttccattcccgaatccagagaggaacttcgtccttccagaagagatcattcaggaggtccgagaaggaaaagtgatgatagaagaggagatgaaagaggagatgaaggaagacgtggacccccacaatggggctgacgatgttttttcatcttcagggagtttggggaaagcatcagaaaaatccagcaaagacaaagagaagaactcctcagacttggggtgcaaagaaggcgcagacaagcggaagcgcagccgggtcaccgacaaagtcctgaccgcaaacagcaacccttccagtcccagtgctgccaagcggcgccgcacgtagaccctcagccctggtggcggcagagaagcgggcgaggcactgtggtcgctgagggggttggctgggtctgagtgccaccccccaggccacagtgataccatcccagtgccatgagcccacactgcccgccctcaggctctcaggtgaacgtggccgtcagcggggaaacgtgtgtgtcagttggaccatgtgggaccctgatggacctgaaagaccaggatcggtccagctcagatattgagggctctgaagcctagttctgtcttctctggagcagctgtggcttccccgtggctgcttggtgacatggattagcgctacgtgggctgcagcatttgggatccaggctacctagaggggcatcgggccagggaaaacctcggattagcaagcaataaaaacatgacctcactcttcctcaaaggagcccctggtcttccctgtgtgactcagttctttccatctgtttgtcccgctgcaagcctctttctgcgctgactgtgacattggaacgtggccttcctgtcaccccctccgtgccacgcactgaaggccacccccacccacctgggaaactaagaactggatattttgcctcattcacttgtactgtaacaatgtatataatttggttggtatttcactatttaatttttaagaagcctattttactagtgttttatatgaacaaagtactgcagaagttaaacctgtgttgtattttttctgagatgttttgctttaagagatactttttgctcagtttttatatgccagatacagagaatttgtagcggttatttttgtatgatctagtaacttgcaaacagaccaaatggatgagaggcggggaccgtgcagctgtcggctgatgaggaggcggccgccccagtgctgatggagatgccactttcgtgtgactgcgaacattaaagcacaaaaaaatcc

SEQ ID NO: 11603 - protein, 148 aa, Homo sapiens [sequence omitted]

SEQ ID NO: 11604 - DNA, 2709 bp, Homo sapiens
ctgctcccgccgggggctccttgctcggccgggccgcggccatgggagaggccgaggtgggcggcgggggcgccgcaggcgacaagggcccgggggaggcggccaccagcccggcggaggagacagtggtgtggagccccgaggtggaggtgtgaaccgacacttccacatgatttgtattcgggacaagttcagccagaacatcgggcggcaggtcccatccaaggtcatctgggaccatctgagcaccatgtacgacatgcaggcgctgcatgagtctgagattcttccattcccgaatccagagaggaacttcgtccttccagaagagatcattcaggaggtccgagaaggaaaagtgatgatagaagaggagatgaaagaggagatgaaggaagacgtggacccccacaatggggctgacgatgttttttcatcttcagggagtttggggaaagcatcagaaaaatccagcaaagacaaagagaagaactcctcagacttggggtgcaaagaaggcgcagacaagcggaagcgcagccgggtcaccgacaaagtcctgaccgcaaacagcaacccttccagtcccagtgctgccaagcggcgccgcacgtagaccctcagccctggtggcggcagagaagcgggcgaggcactgtggtcgctgagggggttggctgggtctgagtgccaccccccaggccacagtgataccatcccagtgccatgagcccacactgcccgccctcaggctctcaggtgaacgtggccgtcagcggggaaacgtgtgtgtcagttggaccatgtgggaccctgatggacctgaaagaccaggatcggtccagctcagatattgagggctctgaagcctagttctgtcttctctggagcagctgtggcttccccgtggctgcttggtgacatggattagcgctacgtgggctgcagcatttgggatccaggctacctagaggggcatcgggccagggaaaacctcggattagcaagcaataaaaacatgacctcactcttcctcaaaggagcccctggtcttccctgtgtgactcagttctttccatctgtttgtcccgctgcaagcctctttctgcgctgactgtgacattggaacgtggccttcctgtcaccccctccgtgccacgcactgaaggccacccccacccacctgggaaactaagaactggatattttgcctcattcacttgtactgtaacaatgtatataatttggttggtatttcactatttaatttttaagaagcctattttactagtgttttatatgaacaaagtactgcagaagttaaacctgtgttgtattttttctgagatgttttgctttaagagatactttttgctcagtttttatatgccagatacagagaatttgtagcggttatttttgtatgatctagtaacttgcaaacagaccaaatggatgagaggcggggaccgtgcagctgtcggctgatgaggaggcggccgccccagtgctgatggagatgccactttcgtgtgactgcgaacattaaagcacaaaaaaatccaacctggagttgtgtgattttgataccaaagtaagttcacttttcctccaaaaggaagtttttatttttccaagatttataactaaagcatacacttagatgacttattaacattcacttgatacaacatataaacaaaatagtaacagattctgagtggttattttgtggactgtgacaagcacttcaaatacaaaatgttaggagggcaaaacggtgcgggccctcgtaggtcaggcaggcaccagtgggctccttcctgctgaaagctgcggctgtgagatgagaccgctggctgggtcacagagtgaaatccagcgttccgtgtgcggacgaggagacaagctgtcctggccagccatcgcaccccaatgtcttcagcttgacgttgcttctctgccagtggagcctcctccaccacctgggaacatccctggccatctgtccctgaagtcctcctcaccatgacgcagatcacaaggcacccactaaaggggcaaagccaggaatcccgtgccatgtgatcgccccgtgtggcacctgccactcgtctgcaccaaacgcactgccagttctggggaagaacagcccagggaagctgctggtctacggcctgcctgagctgtattccaagggtagagcagctgcctggggggaccctgtgggtcccttttctatagagccgggacaaatccacagccctgcagtaacagcctgccacaaagagcaggcatctggagggccccacacacatagaccaaaggactgagcccgcctggcattcctccactcacagcacaaatactcagccctgcagccagggaagggtggggtctccctttgctgcccaagtgtgcccccttgcccgtctgatctctcctgttaggtcagcctcattcagggctttgtgccaggtcctgtcctggagtctcagtccgggacagcagcctggctcttaggcagtccagaagcagcagggcaaaggggggcaaatactaacacggggtgtcacgggatggccaggaggagtcctgctcgccacccaggctcactgtcctaaacctccatctgaaaccgcatctcgggtgacctcagattgtgctaggaaagcctagttaataaatctgcctcatctcgattactgt

SEQ ID NO: 11605 - protein, 148 aa, Homo sapiens [sequence omitted]

SEQ ID NO: 11606 - DNA, 785 bp, Homo sapiens
ccgggccgcggccatgggagaggccgaggtgggcggcgggggcgccgcaggcgacaagggcccgggggaggcggccaccagcccggcggaggagacagtggtgtggagccccgaggtggaggtgtgcctcttccacgccatgctgggccacaagcccgtcggtgtgaaccgacacttccacatgatttgtattcgggacaagttcagccagaacatcgggcggcaggtcccatccaaggtcatctgggaccatctgagcaccatgtacgacatgcaggcgctgcatgagtctgagattcttccattcccgaatccagagaggaacttcgtccttccagaagagatcattcaggaggtccgagaaggtgaggctcgggaaaggttgggcttgggattcagaaaaggccagaccctggccaagggcagggaggtgagggtgaggaccccgggcctccagggaggtgtgagggtccagcgcagaccccgccctacctgtgcttgggtggtcttggaacctccgggattggagaggactttgtttgagagcagtggctggacggaagctgaggcctgtgtgggcagcaagcgtcggagcagtccctggcctgaccatcccccagcgtcggccaccaccgtgggttttcggtgagcgtcagctgtctcctccacaggaaaagtgatgatagaagaggagatgaaagaggagatgaaggaagacgtggacccccacaatggggctgacgatggtgagtgtggagctcaccctgccctgatgccctttgggg

SEQ ID NO: 11607 - protein, 211 aa, Homo sapiens; identical to SEQ ID NO: 11595

SEQ ID NO: 11608 - DNA, 1497 bp, Homo sapiens
gccgcggccatgggagaggccgaggtgggcggcgggggcgccgcaggcgacaagggcccgggggaggcggccaccagcccggcggaggagacagtggtgtggagccccgaggtggaggtgtgcctcttccacgccatgctgggccacaagcccgtcggtgtgaaccgacacttccacatgatttgtattcgggacaagttcagccagaacatcgggcggcaggtcccatccaaggtcatctgggaccatctgagcaccatgtacgacatgcaggcgctgcatgagtctgagattcttccattcccgaatccagagaggaacttcgtccttccagaagagatcattcaggaggtccgagaagttttttcatcttcagggagtttggggaaagcatcagaaaaatccagcaaagacaaagagaagaactcctcagacttggggtgcaaagaaggcgcagacaagcggaagcgcagccgggtcaccgacaaagtcctgaccgcaaacagcaacccttccagtcccagtgctgccaagcggcgccgcacgtagaccctcagccctggtggcggcagagaagcgggcgaggcactgtggtcgctgagggggttggctgggtctgagtgccaccccccaggccacagtgataccatcccagtgccatgagcccacactgcccgccctcaggctctcaggtgaacgtggccgtcagcggggaaacgtgtgtgtcagttggaccatgtgggaccctgatggacctgaaagaccaggatcggtccagctcagatattgagggctctgaagcctagttctgtcttctctggagcagctgtggcttccccgtggctgcttggtgacatggattagcgctacgtgggctgcagcatttgggatccaggctacctagaggggcatcgggccagggaaaacctcggattagcaagcaataaaaacatgacctcactcttcctcaaaggagcccctggtcttccctgtgtgactcagttctttccatctgtttgtcccgctgcaagcctctttctgcgctgactgtgacattggaacgtggccttcctgtcaccccctccgtgccacgcactgaaggccacccccacccacctgggaaactaagaactggatattttgcctcattcacttgtactgtaacaatgtatataatttggttggtatttcactatttaatttttaagaagcctattttactagtgttttatatgaacaaagtactgcagaagttaaacctgtgttgtattttttctgagatgttttgctttaagagatactttttgctcagtttttatatgccagatacagagaatttgtagcggttatttttgtatgatctagtaacttgcaaacagaccaaatggatgagaggcggggaccgtgcagctgtcggctgatgaggaggcggccgccccagtgctgatggagatgccactttcgtgtgactgcgaacattaaagcacaaaaaaatcc

SEQ ID NO: 11609 - protein, 179 aa, Homo sapiens
MGEAEVGGGGAAGDKGPGEAATSPAEETVVWSPEVEVCLFHAMLGHKPVGVNRHFHMICIRDKFSQNIGRQVPSKVIWDHLSTMYDMQALHESEILPFPNPERNFVLPEEIIQEVREVFSSSGSLGKASEKSSKDKEKNSSDLGCKEGADKRKRSRVTDKVLTANSNPSSPSAAKRRRT

SEQ ID NO: 11610 - DNA, 2642 bp, Homo sapiens
gccgcggccatgggagaggccgaggtgggcggcgggggcgccgcaggcgacaagggcccgggggaggcggccaccagcccggcggaggagacagtggtgtggagccccgaggtggaggtgtgcctcttccacgccatgctgggccacaagcccgtcggtgtgaaccgacacttccacatgatttgtattcgggacaagttcagccagaacatcgggcggcaggtcccatccaaggtcatctgggaccatctgagcaccatgtacgacatgcaggcgctgcatgagtctgagattcttccattcccgaatccagagaggaacttcgtccttccagaagagatcattcaggaggtccgagaagttttttcatcttcagggagtttggggaaagcatcagaaaaatccagcaaagacaaagagaagaactcctcagacttggggtgcaaagaaggcgcagacaagcggaagcgcagccgggtcaccgacaaagtcctgaccgcaaacagcaacccttccagtcccagtgctgccaagcggcgccgcacgtagaccctcagccctggtggcggcagagaagcgggcgaggcactgtggtcgctgagggggttggctgggtctgagtgccaccccccaggccacagtgataccatcccagtgccatgagcccacactgcccgccctcaggctctcaggtgaacgtggccgtcagcggggaaacgtgtgtgtcagttggaccatgtgggaccctgatggacctgaaagaccaggatcggtccagctcagatattgagggctctgaagcctagttctgtcttctctggagcagctgtggcttccccgtggctgcttggtgacatggattagcgctacgtgggctgcagcatttgggatccaggctacctagaggggcatcgggccagggaaaacctcggattagcaagcaataaaaacatgacctcactcttcctcaaaggagcccctggtcttccctgtgtgactcagttctttccatctgtttgtcccgctgcaagcctctttctgcgctgactgtgacattggaacgtggccttcctgtcaccccctccgtgccacgcactgaaggccacccccacccacctgggaaactaagaactggatattttgcctcattcacttgtactgtaacaatgtatataatttggttggtatttcactatttaatttttaagaagcctattttactagtgttttatatgaacaaagtactgcagaagttaaacctgtgttgtattttttctgagatgttttgctttaagagatactttttgctcagtttttatatgccagatacagagaatttgtagcggttatttttgtatgatctagtaacttgcaaacagaccaaatggatgagaggcggggaccgtgcagctgtcggctgatgaggaggcggccgccccagtgctgatggagatgccactttcgtgtgactgcgaacattaaagcacaaaaaaatccaacctggagttgtgtgattttgataccaaagtaagttcacttttcctccaaaaggaagtttttatttttccaagatttataactaaagcatacacttagatgacttattaacattcacttgatacaacatataaacaaaatagtaacagattctgagtggttattttgtggactgtgacaagcacttcaaatacaaaatgttaggagggcaaaacggtgcgggccctcgtaggtcaggcaggcaccagtgggctccttcctgctgaaagctgcggctgtgagatgagaccgctggctgggtcacagagtgaaatccagcgttccgtgtgcggacgaggagacaagctgtcctggccagccatcgcaccccaatgtcttcagcttgacgttgcttctctgccagtggagcctcctccaccacctgggaacatccctggccatctgtccctgaagtcctcctcaccatgacgcagatcacaaggcacccactaaaggggcaaagccaggaatcccgtgccatgtgatcgccccgtgtggcacctgccactcgtctgcaccaaacgcactgccagttctggggaagaacagcccagggaagctgctggtctacggcctgcctgagctgtattccaagggtagagcagctgcctggggggaccctgtgggtcccttttctatagagccgggacaaatccacagccctgcagtaacagcctgccacaaagagcaggcatctggagggccccacacacatagaccaaaggactgagcccgcctggcattcctccactcacagcacaaatactcagccctgcagccagggaagggtggggtctccctttgctgcccaagtgtgcccccttgcccgtctgatctctcctgttaggtcagcctcattcagggctttgtgccaggtcctgtcctggagtctcagtccgggacagcagcctggctcttaggcagtccagaagcagcagggcaaaggggggcaaatactaacacggggtgtcacgggatggccaggaggagtcctgctcgccacccaggctcactgtcctaaacctccatctgaaaccgcatctcgggtgacctcagattgtgctaggaaagcctagttaataaatctgcctcatctcgattactgt

SEQ ID NO: 11611 - protein, 179 aa, Homo sapiens; identical to SEQ ID NO: 11609

SEQ ID NO: 11612 - DNA, 1652 bp, Homo sapiens
catgggagaggccgaggtgggcggcgggggcgccgcaggcgacaagggcccgggggaggcggccaccagcccggcggaggagacagtggtgtggagccccgaggtggaggtgtgcctcttccacgccatgctgggccacaagcccgtcggtgtgaaccgacacttccacatgatttgtattcgggacaagttcagccagaacatcgggcggcaggtcccatccaaggtcatctgggaccatctgagcaccatgtacgacatgcaggcgctgagaggaacttcgtccttccagaagagatcattcaggaggtccgagaagtggctggacggaagctgaggcctgtgtgggcagcaagcgtcggagcagtccctggcctgaccatcccccagcgtcggccaccaccgtgggttttcggtgagcgtcagctgtctcctccacaggaaaagtgatgatagaagaggagatgaaagaggagatgaaggaagacgtggacccccacaatggggctgacgatgttttttcatcttcagggagtttggggaaagcatcagaaaaatccagcaaagacaaagagaagaactcctcagacttggggtgcaaagaaggcgcagacaagcggaagcgcagccgggtcaccgacaaagtcctgaccgcaaacagcaacccttccagtcccagtgctgccaagcggcgccgcacgtagaccctcagccctggtggcggcagagaagcgggcgaggcactgtggtcgctgagggggttggctgggtctgagtgccaccccccaggccacagtgataccatcccagtgccatgagcccacactgcccgccctcaggctctcaggtgaacgtggccgtcagcggggaaacgtgtgtgtcagttggaccatgtgggaccctgatggacctgaaagaccaggatcggtccagctcagatattgagggctctgaagcctagttctgtcttctctggagcagctgtggcttccccgtggctgcttggtgacatggattagcgctacgtgggctgcagcatttgggatccaggctacctagaggggcatcgggccagggaaaacctcggattagcaagcaataaaaacatgacctcactcttcctcaaaggagcccctggtcttccctgtgtgactcagttctttccatctgtttgtcccgctgcaagcctctttctgcgctgactgtgacattggaacgtggccttcctgtcaccccctccgtgccacgcactgaaggccacccccacccacctgggaaactaagaactggatattttgcctcattcacttgtactgtaacaatgtatataatttggttggtatttcactatttaatttttaagaagcctattttactagtgttttatatgaacaaagtactgcagaagttaaacctgtgttgtattttttctgagatgttttgctttaagagatactttttgctcagtttttatatgccagatacagagaatttgtagcggttatttttgtatgatctagtaacttgcaaacagaccaaatggatgagaggcggggaccgtgcagctgtcggctgatgaggaggcggccgccccagtgctgatggagatgccactttcgtgtgactgcgaacattaaagcacaaaaaaatcc

SEQ ID NO: 11613 - protein, 111 aa, Homo sapiens
MGEAEVGGGGAAGDKGPGEAATSPAEETVVWSPEVEVCLFHAMLGHKPVGVNRHFHMICIRDKFSQNIGRQVPSKVIWDHLSTMYDMQALRGTSSFQKRSFRRSEKWLDGS

SEQ ID NO: 11614 - DNA, 2797 bp, Homo sapiens
catgggagaggccgaggtgggcggcgggggcgccgcaggcgacaagggcccgggggaggcggccaccagcccggcggaggagacagtggtgtggagccccgaggtggaggtgtgcctcttccacgccatgctgggccacaagcccgtcggtgtgaaccgacacttccacatgatttgtattcgggacaagttcagccagaacatcgggcggcaggtcccatccaaggtcatctgggaccatctgagcaccatgtacgacatgcaggcgctgagaggaacttcgtccttccagaagagatcattcaggaggtccgagaagtggctggacggaagctgaggcctgtgtgggcagcaagcgtcggagcagtccctggcctgaccatcccccagcgtcggccaccaccgtgggttttcggtgagcgtcagctgtctcctccacaggaaaagtgatgatagaagaggagatgaaagaggagatgaaggaagacgtggacccccacaatggggctgacgatgttttttcatcttcagggagtttggggaaagcatcagaaaaatccagcaaagacaaagagaagaactcctcagacttggggtgcaaagaaggcgcagacaagcggaagcgcagccgggtcaccgacaaagtcctgaccgcaaacagcaacccttccagtcccagtgctgccaagcggcgccgcacgtagaccctcagccctggtggcggcagagaagcgggcgaggcactgtggtcgctgagggggttggctgggtctgagtgccaccccccaggccacagtgataccatcccagtgccatgagcccacactgcccgccctcaggctctcaggtgaacgtggccgtcagcggggaaacgtgtgtgtcagttggaccatgtgggaccctgatggacctgaaagaccaggatcggtccagctcagatattgagggctctgaagcctagttctgtcttctctggagcagctgtggcttccccgtggctgcttggtgacatggattagcgctacgtgggctgcagcatttgggatccaggctacctagaggggcatcgggccagggaaaacctcggattagcaagcaataaaaacatgacctcactcttcctcaaaggagcccctggtcttccctgtgtgactcagttctttccatctgtttgtcccgctgcaagcctctttctgcgctgactgtgacattggaacgtggccttcctgtcaccccctccgtgccacgcactgaaggccacccccacccacctgggaaactaagaactggatattttgcctcattcacttgtactgtaacaatgtatataatttggttggtatttcactatttaatttttaagaagcctattttactagtgttttatatgaacaaagtactgcagaagttaaacctgtgttgtattttttctgagatgttttgctttaagagatactttttgctcagtttttatatgccagatacagagaatttgtagcggttatttttgtatgatctagtaacttgcaaacagaccaaatggatgagaggcggggaccgtgcagctgtcggctgatgaggaggcggccgccccagtgctgatggagatgccactttcgtgtgactgcgaacattaaagcacaaaaaaatccaacctggagttgtgtgattttgataccaaagtaagttcacttttcctccaaaaggaagtttttatttttccaagatttataactaaagcatacacttagatgacttattaacattcacttgatacaacatataaacaaaatagtaacagattctgagtggttattttgtggactgtgacaagcacttcaaatacaaaatgttaggagggcaaaacggtgcgggccctcgtaggtcaggcaggcaccagtgggctccttcctgctgaaagctgcggctgtgagatgagaccgctggctgggtcacagagtgaaatccagcgttccgtgtgcggacgaggagacaagctgtcctggccagccatcgcaccccaatgtcttcagcttgacgttgcttctctgccagtggagcctcctccaccacctgggaacatccctggccatctgtccctgaagtcctcctcaccatgacgcagatcacaaggcacccactaaaggggcaaagccaggaatcccgtgccatgtgatcgccccgtgtggcacctgccactcgtctgcaccaaacgcactgccagttctggggaagaacagcccagggaagctgctggtctacggcctgcctgagctgtattccaagggtagagcagctgcctggggggaccctgtgggtcccttttctatagagccgggacaaatccacagccctgcagtaacagcctgccacaaagagcaggcatctggagggccccacacacatagaccaaaggactgagcccgcctggcattcctccactcacagcacaaatactcagccctgcagccagggaagggtggggtctccctttgctgcccaagtgtgcccccttgcccgtctgatctctcctgttaggtcagcctcattcagggctttgtgccaggtcctgtcctggagtctcagtccgggacagcagcctggctcttaggcagtccagaagcagcagggcaaaggggggcaaatactaacacggggtgtcacgggatggccaggaggagtcctgctcgccacccaggctcactgtcctaaacctccatctgaaaccgcatctcgggtgacctcagattgtgctaggaaagcctagttaataaatctgcctcatctcgattactgt

SEQ ID NO: 11615 - protein, 111 aa, Homo sapiens; identical to SEQ ID NO: 11613

SEQ ID NO: 11616 - DNA, 1510 bp, Homo sapiens
ccgtgacaccgccgccacacccgtcccgggacccccgccccctcccacgcgcccttcggaccccgccccggaccccgcccacgacccctacccccgtgtgaaccgacacttccacatgatttgtattcgggacaagttcagccagaacatcgggcggcaggtcccatccaaggtcatctgggaccatctgagcaccatgtacgacatgcaggcgctgcatgagtctgagattcttccattcccgaatccagagaggaacttcgtccttccagaagagatcattcaggaggtccgagaaggaaaagtgatgatagaagaggagatgaaagaggagatgaaggaagacgtggacccccacaatggggctgacgatgttttttcatcttcagggagtttggggaaagcatcagaaaaatccagcaaagacaaagagaagaactcctcagacttggggtgcaaagaaggcgcagacaagcggaagcgcagccgggtcaccgacaaagtcctgaccgcaaacagcaacccttccagtcccagtgctgccaagcggcgccgcacgtagaccctcagccctggtggcggcagagaagcgggcgaggcactgtggtcgctgagggggttggctgggtctgagtgccaccccccaggccacagtgataccatcccagtgccatgagcccacactgcccgccctcaggctctcaggtgaacgtggccgtcagcggggaaacgtgtgtgtcagttggaccatgtgggaccctgatggacctgaaagaccaggatcggtccagctcagatattgagggctctgaagcctagttctgtcttctctggagcagctgtggcttccccgtggctgcttggtgacatggattagcgctacgtgggctgcagcatttgggatccaggctacctagaggggcatcgggccagggaaaacctcggattagcaagcaataaaaacatgacctcactcttcctcaaaggagcccctggtcttccctgtgtgactcagttctttccatctgtttgtcccgctgcaagcctctttctgcgctgactgtgacattggaacgtggccttcctgtcaccccctccgtgccacgcactgaaggccacccccacccacctgggaaactaagaactggatattttgcctcattcacttgtactgtaacaatgtatataatttggttggtatttcactatttaatttttaagaagcctattttactagtgttttatatgaacaaagtactgcagaagttaaacctgtgttgtattttttctgagatgttttgctttaagagatactttttgctcagtttttatatgccagatacagagaatttgtagcggttatttttgtatgatctagtaacttgcaaacagaccaaatggatgagaggcggggaccgtgcagctgtcggctgatgaggaggcggccgccccagtgctgatggagatgccactttcgtgtgactgcgaacattaaagcacaaaaaaatcc

SEQ ID NO: 11617 - protein, 148 aa, Homo sapiens [sequence omitted]

SEQ ID NO: 11618 - DNA, 2655 bp, Homo sapiens
ccgtgacaccgccgccacacccgtcccgggacccccgccccctcccacgcgcccttcggaccccgccccggaccccgcccacgacccctacccccgtgtgaaccgacacttccacatgatttgtattcgggacaagttcagccagaacatcgggcggcaggtcccatccaaggtcatctgggaccatctgagcaccatgtacgacatgcaggcgctgcatgagtctgagattcttccattcccgaatccagagaggaacttcgtccttccagaagagatcattcaggaggtccgagaaggaaaagtgatgatagaagaggagatgaaagaggagatgaaggaagacgtggacccccacaatggggctgacgatgttttttcatcttcagggagtttggggaaagcatcagaaaaatccagcaaagacaaagagaagaactcctcagacttggggtgcaaagaaggcgcagacaagcggaagcgcagccgggtcaccgacaaagtcctgaccgcaaacagcaacccttccagtcccagtgctgccaagcggcgccgcacgtagaccctcagccctggtggcggcagagaagcgggcgaggcactgtggtcgctgagggggttggctgggtctgagtgccaccccccaggccacagtgataccatcccagtgccatgagcccacactgcccgccctcaggctctcaggtgaacgtggccgtcagcggggaaacgtgtgtgtcagttggaccatgtgggaccctgatggacctgaaagaccaggatcggtccagctcagatattgagggctctgaagcctagttctgtcttctctggagcagctgtggcttccccgtggctgcttggtgacatggattagcgctacgtgggctgcagcatttgggatccaggctacctagaggggcatcgggccagggaaaacctcggattagcaagcaataaaaacatgacctcactcttcctcaaaggagcccctggtcttccctgtgtgactcagttctttccatctgtttgtcccgctgcaagcctctttctgcgctgactgtgacattggaacgtggccttcctgtcaccccctccgtgccacgcactgaaggccacccccacccacctgggaaactaagaactggatattttgcctcattcacttgtactgtaacaatgtatataatttggttggtatttcactatttaatttttaagaagcctattttactagtgttttatatgaacaaagtactgcagaagttaaacctgtgttgtattttttctgagatgttttgctttaagagatactttttgctcagtttttatatgccagatacagagaatttgtagcggttatttttgtatgatctagtaacttgcaaacagaccaaatggatgagaggcggggaccgtgcagctgtcggctgatgaggaggcggccgccccagtgctgatggagatgccactttcgtgtgactgcgaacattaaagcacaaaaaaatccaacctggagttgtgtgattttgataccaaagtaagttcacttttcctccaaaaggaagtttttatttttccaagatttataactaaagcatacacttagatgacttattaacattcacttgatacaacatataaacaaaatagtaacagattctgagtggttattttgtggactgtgacaagcacttcaaatacaaaatgttaggagggcaaaacggtgcgggccctcgtaggtcaggcaggcaccagtgggctccttcctgctgaaagctgcggctgtgagatgagaccgctggctgggtcacagagtgaaatccagcgttccgtgtgcggacgaggagacaagctgtcctggccagccatcgcaccccaatgtcttcagcttgacgttgcttctctgccagtggagcctcctccaccacctgggaacatccctggccatctgtccctgaagtcctcctcaccatgacgcagatcacaaggcacccactaaaggggcaaagccaggaatcccgtgccatgtgatcgccccgtgtggcacctgccactcgtctgcaccaaacgcactgccagttctggggaagaacagcccagggaagctgctggtctacggcctgcctgagctgtattccaagggtagagcagctgcctggggggaccctgtgggtcccttttctatagagccgggacaaatccacagccctgcagtaacagcctgccacaaagagcaggcatctggagggccccacacacatagaccaaaggactgagcccgcctggcattcctccactcacagcacaaatactcagccctgcagccagggaagggtggggtctccctttgctgcccaagtgtgcccccttgcccgtctgatctctcctgttaggtcagcctcattcagggctttgtgccaggtcctgtcctggagtctcagtccgggacagcagcctggctcttaggcagtccagaagcagcagggcaaaggggggcaaatactaacacggggtgtcacgggatggccaggaggagtcctgctcgccacccaggctcactgtcctaaacctccatctgaaaccgcatctcgggtgacctcagattgtgctaggaaagcctagttaataaatctgcctcatctcgattactgt

SEQ ID NO: 11619 - protein, 148 aa, Homo sapiens [sequence omitted]

SEQ ID NO: 11620 - DNA, 1256 bp, Homo sapiens
ggaacttcgtccttccagaagagatcattcaggaggtccgagaaggaaaagtgatgatagaagaggagatgaaagaggagatgaaggaagacgtggacccccacaatggggctgacgatgttttttcatcttcagggagtttggggaaagcatcagaaaaatccagcaaagacaaagagaagaactcctcagacttggggtgcaaagaaggcgcagacaagcggaagcgcagccgggtcaccgacaaagtcctgaccgcaaacagcaacccttccagtcccagtgctgccaagcggcgccgcacgtagaccctcagccctggtggcggcagagaagcgggcgaggcactgtggtcgctgagggggttggctgggtctgagtgccaccccccaggccacagtgataccatcccagtgccatgagcccacactgcccgccctcaggctctcaggtgaacgtggccgtcagcggggaaacgtgtgtgtcagttggaccatgtgggaccctgatggacctgaaagaccaggatcggtccagctcagatattgagggctctgaagcctagttctgtcttctctggagcagctgtggcttccccgtggctgcttggtgacatggattagcgctacgtgggctgcagcatttgggatccaggctacctagaggggcatcgggccagggaaaacctcggattagcaagcaataaaaacatgacctcactcttcctcaaaggagcccctggtcttccctgtgtgactcagttctttccatctgtttgtcccgctgcaagcctctttctgcgctgactgtgacattggaacgtggccttcctgtcaccccctccgtgccacgcactgaaggccacccccacccacctgggaaactaagaactggatattttgcctcattcacttgtactgtaacaatgtatataatttggttggtatttcactatttaatttttaagaagcctattttactagtgttttatatgaacaaagtactgcagaagttaaacctgtgttgtattttttctgagatgttttgctttaagagatactttttgctcagtttttatatgccagatacagagaatttgtagcggttatttttgtatgatctagtaacttgcaaacagaccaaatggatgagaggcggggaccgtgcagctgtcggctgatgaggaggcggccgccccagtgctgatggagatgccactttcgtgtgactgcgaacattaaagcacaaaaaaatcc

SEQ ID NO: 11621 - protein, 84 aa, Homo sapiens [sequence omitted]

SEQ ID NO: 11622 - DNA, 2401 bp, Homo sapiens
ggaacttcgtccttccagaagagatcattcaggaggtccgagaaggaaaagtgatgatagaagaggagatgaaagaggagatgaaggaagacgtggacccccacaatggggctgacgatgttttttcatcttcagggagtttggggaaagcatcagaaaaatccagcaaagacaaagagaagaactcctcagacttggggtgcaaagaaggcgcagacaagcggaagcgcagccgggtcaccgacaaagtcctgaccgcaaacagcaacccttccagtcccagtgctgccaagcggcgccgcacgtagaccctcagccctggtggcggcagagaagcgggcgaggcactgtggtcgctgagggggttggctgggtctgagtgccaccccccaggccacagtgataccatcccagtgccatgagcccacactgcccgccctcaggctctcaggtgaacgtggccgtcagcggggaaacgtgtgtgtcagttggaccatgtgggaccctgatggacctgaaagaccaggatcggtccagctcagatattgagggctctgaagcctagttctgtcttctctggagcagctgtggcttccccgtggctgcttggtgacatggattagcgctacgtgggctgcagcatttgggatccaggctacctagaggggcatcgggccagggaaaacctcggattagcaagcaataaaaacatgacctcactcttcctcaaaggagcccctggtcttccctgtgtgactcagttctttccatctgtttgtcccgctgcaagcctctttctgcgctgactgtgacattggaacgtggccttcctgtcaccccctccgtgccacgcactgaaggccacccccacccacctgggaaactaagaactggatattttgcctcattcacttgtactgtaacaatgtatataatttggttggtatttcactatttaatttttaagaagcctattttactagtgttttatatgaacaaagtactgcagaagttaaacctgtgttgtattttttctgagatgttttgctttaagagatactttttgctcagtttttatatgccagatacagagaatttgtagcggttatttttgtatgatctagtaacttgcaaacagaccaaatggatgagaggcggggaccgtgcagctgtcggctgatgaggaggcggccgccccagtgctgatggagatgccactttcgtgtgactgcgaacattaaagcacaaaaaaatccaacctggagttgtgtgattttgataccaaagtaagttcacttttcctccaaaaggaagtttttatttttccaagatttataactaaagcatacacttagatgacttattaacattcacttgatacaacatataaacaaaatagtaacagattctgagtggttattttgtggactgtgacaagcacttcaaatacaaaatgttaggagggcaaaacggtgcgggccctcgtaggtcaggcaggcaccagtgggctccttcctgctgaaagctgcggctgtgagatgagaccgctggctgggtcacagagtgaaatccagcgttccgtgtgcggacgaggagacaagctgtcctggccagccatcgcaccccaatgtcttcagcttgacgttgcttctctgccagtggagcctcctccaccacctgggaacatccctggccatctgtccctgaagtcctcctcaccatgacgcagatcacaaggcacccactaaaggggcaaagccaggaatcccgtgccatgtgatcgccccgtgtggcacctgccactcgtctgcaccaaacgcactgccagttctggggaagaacagcccagggaagctgctggtctacggcctgcctgagctgtattccaagggtagagcagctgcctggggggaccctgtgggtcccttttctatagagccgggacaaatccacagccctgcagtaacagcctgccacaaagagcaggcatctggagggccccacacacatagaccaaaggactgagcccgcctggcattcctccactcacagcacaaatactcagccctgcagccagggaagggtggggtctccctttgctgcccaagtgtgcccccttgcccgtctgatctctcctgttaggtcagcctcattcagggctttgtgccaggtcctgtcctggagtctcagtccgggacagcagcctggctcttaggcagtccagaagcagcagggcaaaggggggcaaatactaacacggggtgtcacgggatggccaggaggagtcctgctcgccacccaggctcactgtcctaaacctccatctgaaaccgcatctcgggtgacctcagattgtgctaggaaagcctagttaataaatctgcctcatctcgattactgt

SEQ ID NO: 11623 - protein, 84 aa, Homo sapiens [sequence omitted]

SEQ ID NO: 11624 - DNA, 1120 bp, Homo sapiens
gtccttccagaagagatcattcaggaggtccgagaaggaaaagtgatgatagaagaggagatgaaagaggagatgaaggaagacgtggacccccacaatggggctgacgatgttttttcatcttcagggagtttggggaaagcatcagaaaaatccagcaaagacaaagagaagaactcctcagacttggggtgcaaagaaggcgcagacaagcggaagcgcagccgggtcaccgacaaagtcctgaccgcaaacagcaacccttccagtcccagtgctgccaagcggcgccgcacgtagaccctcagctctcaggtgaacgtggccgtcagcggggaaacgtgtgtgtcagttggaccatgtgggaccctgatggacctgaaagaccaggatcggtccagctcagatattgagggctctgaagcctagttctgtcttctctggagcagctgtggcttccccgtggctgcttggtgacatggattagcgctacgtgggctgcagcatttgggatccaggctacctagaggggcatcgggccagggaaaacctcggattagcaagcaataaaaacatgacctcactcttcctcaaaggagcccctggtcttccctgtgtgactcagttctttccatctgtttgtcccgctgcaagcctctttctgcgctgactgtgacattggaacgtggccttcctgtcaccccctccgtgccacgcactgaaggccacccccacccacctgggaaactaagaactggatattttgcctcattcacttgtactgtaacaatgtatataatttggttggtatttcactatttaatttttaagaagcctattttactagtgttttatatgaacaaagtactgcagaagttaaacctgtgttgtattttttctgagatgttttgctttaagagatactttttgctcagtttttatatgccagatacagagaatttgtagcggttatttttgtatgatctagtaacttgcaaacagaccaaatggatgagaggcggggaccgtgcagctgtcggctgatgaggaggcggccgccccagtgctgatggagatgccactttcgtgtgactgcgaacattaaagcacaaaaaaatcc

SEQ ID NO: 11625 - protein, 84 aa, Homo sapiens [sequence omitted]

SEQ ID NO: 11626 - DNA, 2265 bp, Homo sapiens
gtccttccagaagagatcattcaggaggtccgagaaggaaaagtgatgatagaagaggagatgaaagaggagatgaaggaagacgtggacccccacaatggggctgacgatgttttttcatcttcagggagtttggggaaagcatcagaaaaatccagcaaagacaaagagaagaactcctcagacttggggtgcaaagaaggcgcagacaagcggaagcgcagccgggtcaccgacaaagtcctgaccgcaaacagcaacccttccagtcccagtgctgccaagcggcgccgcacgtagaccctcagctctcaggtgaacgtggccgtcagcggggaaacgtgtgtgtcagttggaccatgtgggaccctgatggacctgaaagaccaggatcggtccagctcagatattgagggctctgaagcctagttctgtcttctctggagcagctgtggcttccccgtggctgcttggtgacatggattagcgctacgtgggctgcagcatttgggatccaggctacctagaggggcatcgggccagggaaaacctcggattagcaagcaataaaaacatgacctcactcttcctcaaaggagcccctggtcttccctgtgtgactcagttctttccatctgtttgtcccgctgcaagcctctttctgcgctgactgtgacattggaacgtggccttcctgtcaccccctccgtgccacgcactgaaggccacccccacccacctgggaaactaagaactggatattttgcctcattcacttgtactgtaacaatgtatataatttggttggtatttcactatttaatttttaagaagcctattttactagtgttttatatgaacaaagtactgcagaagttaaacctgtgttgtattttttctgagatgttttgctttaagagatactttttgctcagtttttatatgccagatacagagaatttgtagcggttatttttgtatgatctagtaacttgcaaacagaccaaatggatgagaggcggggaccgtgcagctgtcggctgatgaggaggcggccgccccagtgctgatggagatgccactttcgtgtgactgcgaacattaaagcacaaaaaaatccaacctggagttgtgtgattttgataccaaagtaagttcacttttcctccaaaaggaagtttttatttttccaagatttataactaaagcatacacttagatgacttattaacattcacttgatacaacatataaacaaaatagtaacagattctgagtggttattttgtggactgtgacaagcacttcaaatacaaaatgttaggagggcaaaacggtgcgggccctcgtaggtcaggcaggcaccagtgggctccttcctgctgaaagctgcggctgtgagatgagaccgctggctgggtcacagagtgaaatccagcgttccgtgtgcggacgaggagacaagctgtcctggccagccatcgcaccccaatgtcttcagcttgacgttgcttctctgccagtggagcctcctccaccacctgggaacatccctggccatctgtccctgaagtcctcctcaccatgacgcagatcacaaggcacccactaaaggggcaaagccaggaatcccgtgccatgtgatcgccccgtgtggcacctgccactcgtctgcaccaaacgcactgccagttctggggaagaacagcccagggaagctgctggtctacggcctgcctgagctgtattccaagggtagagcagctgcctggggggaccctgtgggtcccttttctatagagccgggacaaatccacagccctgcagtaacagcctgccacaaagagcaggcatctggagggccccacacacatagaccaaaggactgagcccgcctggcattcctccactcacagcacaaatactcagccctgcagccagggaagggtggggtctccctttgctgcccaagtgtgcccccttgcccgtctgatctctcctgttaggtcagcctcattcagggctttgtgccaggtcctgtcctggagtctcagtccgggacagcagcctggctcttaggcagtccagaagcagcagggcaaaggggggcaaatactaacacggggtgtcacgggatggccaggaggagtcctgctcgccacccaggctcactgtcctaaacctccatctgaaaccgcatctcgggtgacctcagattgtgctaggaaagcctagttaataaatctgcctcatctcgattactgt

SEQ ID NO: 11627 - protein, 84 aa, Homo sapiens [sequence omitted]

SEQ ID NO: 11628 - DNA, 1833 bp, Homo sapiens
ggactgcgacagtgtggcgttcccagcgcggcaacaaaagtaaccccggcgatgacaggcgcccggcggtaacaaaagtaacaagcggaggccccgtcggcccgccccgggctcccgcagattggggttcagtcggcaccttctacatgacatggtggagtgtgcattacataaagcccccaggttacagacaggacccctggggccaggagaggtgggtgccttgtgatctgcgtcatggtgaggaggacttcagggacagatggccagggatgttcccaggtggtggaggaggctccactggcagagaagcaacgtcaagctgaagacattggggtgcgatggctggccaggacagcttgtctcctcgtccgcacacggaacgctggatttcactctgtgacccagccagcggtctcatctcacagccgcagctttcagcaggaaggagcccactggtgcctgcctgacctacgagggcccgcaccgttttgccctcctaacattttgtatttgaagtgcttgtcacagtccacaaaataaccactcagaatctgttactattttgtttatatgttgtatcaagtgaatgttaataagtcatctaagtgtatgctttagttataaatcttggaaaaataaaaacttccttttggaggaaaagtgaacttactttggtatcaaaatcacacaactccaggttggatttttttgtgctttaatgttcgcagtcacacgaaagtggcatctccatcagcactggggcggccgcctcctcatcagccgacagctgcacggtccccgcctctcatccatttggtctgtttgcaagttactagatcatacaaaaataaccgctacaaattctctgtatctggcatataaaaactgagcaaaaagtatctcttaaagcaaaacatctcagaaaaaatacaacacaggtttaacttctgcagtactttgttcatataaaacactagtaaaataggcttcttaaaaattaaatagtgaaataccaaccaaattatatacattgttacagtacaagtgaatgaggcaaaatatccagttcttagtttcccaggtgggtgggggtggccttcagtgcgtggcacggagggggtgacaggaaggccacgttccaatgtcacagtcagcgcagaaagaggcttgcagcgggacaaacagatggaaagaactgagtcacacagggaagaccaggggctcctttgaggaagagtgaggtcatgtttttattgcttgctaatccgaggttttccctggcccgatgcccctctaggtagcctggatcccaaatgctgcagcccacgtagcgctaatccatgtcaccaagcagccacggggaagccacagctgctccagagaagacagaactaggcttcagagccctcaatatctgagctggaccgatcctggtctttcaggtccatcagggtcccacatggtccaactgacacacacgtttccccgctgacggccacgttcacctgagagcctgagggcgggcagtgtgggctcatggcactgggatggtatcactgtggcctggggggtggcactcagacccagccaaccccctcagcgaccacagtgcctcgcccgcttctctgccgccaccagggctgagggtctacgtgcggcgccgcttggcagcactgggactggaagggttgctgtttgcggtcaggactttgtcggtgacccggctgcgcttccgcttgtctgcgccttctttgcaccccaagtctgaggagttcttctctttgtctttgctggatttttctgatgctttccccaaactccctgaagatg

SEQ ID NO: 11629 - protein, 59 aa, Homo sapiens
MTWWSVHYIKPPGYRQDPWGQERWVPCDLRHGEEDFRDRWPGMFPGGGGGSTGREATSS

SEQ ID NO: 11630 - DNA, 2077 bp, Homo sapiens
aagtttgaaggattcagagcagagaattgcaccctggcatgatgcctatgccagctggactgtgtgatttttgttctttagtagaaggataacatgacatagcaggaataatactgccttttctttctggcatggatcaagagaaaagaaaatacaagaaaacagacagaagatcctatctgcgacaattaagagcactctaagaggaaaacacatcccaccacacaaggcaaggtacttctatggaagggtgagccctcacagatggagcaatggggcgcgcacacctgaacaagggaggggaaggagttcttatccctgatgcatgtgacccctgctgctgtgtccttcccctattggctaaggcttctgacagctttggagattgtgacattggaataaaggaaaaacgtacaggactcatgaagcgctgaaatgttcacaaatatcaagcaaaagtcaatgaaatttattttgagctatttacatcatttaataattgagcaaggtatactcctatgaacaaaatttggagcatgtttgtctctctctgcctggcgtcttcagaatttggaaactagttatggtttataatcagctatagaattttaacacgtgctctcaaatgcaagtttctgataactttggagattgtgacattggaataaaggaagagctggaatgttcatgaatatcaagcaaaagtcatggaaatttattttgagctatttacagcatttaataattgagcaaggtatactcctatgaacaaaatttggagcatgtttgtctctctctgtctgcctggcatctacagaatttggaaactagtttcgttcccagatttcctaaactttccagagaaaatggtcttctccctggctcagcaagaagatgaactttaaacactgagaaactggtcatctccctggctcaaccagaagatgaactttaaacactactctcaatgacttgatgttcccatcactactcctgtcataaagggaggggactcagatattgagaattttatgatagtgtgaactgtctggtatgtcatttaagtaagcccgttgctgaaatattttccatgttattagaaagagctgaagagagggattgagatggcttctttattttttgtcttttgggaattaaaggaacctggttcaacaagggcctacacctaagtctcttgttgtaccagagtacaatttaggactgctcctgaggaaggaattagctagaaatctagagagtaagggtaacagatttacatagaataacagcctcagtatttttggttcctctccagtaaagatcacaaagaatattgctaaatcgctaaaacacctttgcaataacgtaagggcttacaactatataccaatgtagctcagttactaaactggagtaaactaatttctcttgtgtagaaaaattggttggctgtggttttatagcagatctgcaattattaatagttatgccaataatcgtttaacagtgcatatgttaatatatatggaaagacaatgtgtatagacagatgtgtaaaattgaaaaataaacatataacaagagagaaacatctatcgaacagacaatatacatacacatcaaacacaacagcagttttagtgaccataatatttatttctcatttttacattgcttactttagtgacaactgaaaatgacagttggcaatgcagctaacagtttcaataaaagtataaaacaaaagactgtgtacaaagcacctgtctttccgcttttgtaatcttccgttggaaaaaatttacacacctaagtaaccatctgttttcttcaagaaaaaatcattcttatttctctctctcatcttgaaaacagctgtcagccaggagggcagagctgaaatttattgccacatcacatgaagcatagaacagactccactactccttgagattcaaaactttgcctctcacaaagttaccttttattttcctcttgtttgtcactcatctcccctagtgtgctctttttatttcttttactattaataataaaatctgtggatgactgtattatt

SEQ ID NO: 11631 - protein, 53 aa, Homo sapiens
MGRAHLNKGGEGVLIPDACDPCCCVLPLLAKASDSFGDCDIGIKEKRTGLMKR

SEQ ID NO: 11632 - DNA, 1957 bp, Homo sapiens
aagtttgaaggattcagagcagagaattgcaccctggcatgatgcctatgccagctggactgtgtgatttttgttctttagtagaaggataacatgacatagcaggaataatactgccttttctttctggcatggatcaagagaaaagaaaatacaagaaaacagacagaagatcctatctgcgacaattaagagcactctaagaggaaaacacatcccaccacacaaggcaaggtacttctatggaagggtgagccctcacagatggagcaatggggcgcgcacacctgaacaagggaggggaaggagttcttatccctgatgcatgtgacccctgctgctgtgtccttcccctattggctaaggcttctgacagctttggagattgtgacattggaataaaggaaaaacgtacaggactcatgaagcgctgaaatgttcacaaatatcaagcaaaagtcaatgaaatttattttgagctatttacatcatttaataattgagcaaggtatactcctatgaacaaaatttggagcatgtttgtctctctctgcctggcgtcttcagaatttggaaactagttagtcatggaaatttattttgagctatttacagcatttaataattgagcaaggtatactcctatgaacaaaatttggagcatgtttgtctctctctgtctgcctggcatctacagaatttggaaactagtttcgttcccagatttcctaaactttccagagaaaatggtcttctccctggctcagcaagaagatgaactttaaacactgagaaactggtcatctccctggctcaaccagaagatgaactttaaacactactctcaatgacttgatgttcccatcactactcctgtcataaagggaggggactcagatattgagaattttatgatagtgtgaactgtctggtatgtcatttaagtaagcccgttgctgaaatattttccatgttattagaaagagctgaagagagggattgagatggcttctttattttttgtcttttgggaattaaaggaacctggttcaacaagggcctacacctaagtctcttgttgtaccagagtacaatttaggactgctcctgaggaaggaattagctagaaatctagagagtaagggtaacagatttacatagaataacagcctcagtatttttggttcctctccagtaaagatcacaaagaatattgctaaatcgctaaaacacctttgcaataacgtaagggcttacaactatataccaatgtagctcagttactaaactggagtaaactaatttctcttgtgtagaaaaattggttggctgtggttttatagcagatctgcaattattaatagttatgccaataatcgtttaacagtgcatatgttaatatatatggaaagacaatgtgtatagacagatgtgtaaaattgaaaaataaacatataacaagagagaaacatctatcgaacagacaatatacatacacatcaaacacaacagcagttttagtgaccataatatttatttctcatttttacattgcttactttagtgacaactgaaaatgacagttggcaatgcagctaacagtttcaataaaagtataaaacaaaagactgtgtacaaagcacctgtctttccgcttttgtaatcttccgttggaaaaaatttacacacctaagtaaccatctgttttcttcaagaaaaaatcattcttatttctctctctcatcttgaaaacagctgtcagccaggagggcagagctgaaatttattgccacatcacatgaagcatagaacagactccactactccttgagattcaaaactttgcctctcacaaagttaccttttattttcctcttgtttgtcactcatctcccctagtgtgctctttttatttcttttactattaataataaaatctgtggatgactgtattatt

SEQ ID NO: 11633 - protein, 53 aa, Homo sapiens; identical to SEQ ID NO: 11631

SEQ ID NO: 11634 - DNA, 2024 bp, Homo sapiens
aagtttgaaggattcagagcagagaattgcaccctggcatgatgcctatgccagctggactgtgtgatttttgttctttagtagaaggataacatgacatagcaggaataatactgccttttctttctggcatggatcaagagaaaagaaaatacaagaaaacagacagaagcaaggcaaggtacttctatggaagggtgagccctcacagatggagcaatggggcgcgcacacctgaacaagggaggggaaggagttcttatccctgatgcatgtgacccctgctgctgtgtccttcccctattggctaaggcttctgacagctttggagattgtgacattggaataaaggaaaaacgtacaggactcatgaagcgctgaaatgttcacaaatatcaagcaaaagtcaatgaaatttattttgagctatttacatcatttaataattgagcaaggtatactcctatgaacaaaatttggagcatgtttgtctctctctgcctggcgtcttcagaatttggaaactagttatggtttataatcagctatagaattttaacacgtgctctcaaatgcaagtttctgataactttggagattgtgacattggaataaaggaagagctggaatgttcatgaatatcaagcaaaagtcatggaaatttattttgagctatttacagcatttaataattgagcaaggtatactcctatgaacaaaatttggagcatgtttgtctctctctgtctgcctggcatctacagaatttggaaactagtttcgttcccagatttcctaaactttccagagaaaatggtcttctccctggctcagcaagaagatgaactttaaacactgagaaactggtcatctccctggctcaaccagaagatgaactttaaacactactctcaatgacttgatgttcccatcactactcctgtcataaagggaggggactcagatattgagaattttatgatagtgtgaactgtctggtatgtcatttaagtaagcccgttgctgaaatattttccatgttattagaaagagctgaagagagggattgagatggcttctttattttttgtcttttgggaattaaaggaacctggttcaacaagggcctacacctaagtctcttgttgtaccagagtacaatttaggactgctcctgaggaaggaattagctagaaatctagagagtaagggtaacagatttacatagaataacagcctcagtatttttggttcctctccagtaaagatcacaaagaatattgctaaatcgctaaaacacctttgcaataacgtaagggcttacaactatataccaatgtagctcagttactaaactggagtaaactaatttctcttgtgtagaaaaattggttggctgtggttttatagcagatctgcaattattaatagttatgccaataatcgtttaacagtgcatatgttaatatatatggaaagacaatgtgtatagacagatgtgtaaaattgaaaaataaacatataacaagagagaaacatctatcgaacagacaatatacatacacatcaaacacaacagcagttttagtgaccataatatttatttctcatttttacattgcttactttagtgacaactgaaaatgacagttggcaatgcagctaacagtttcaataaaagtataaaacaaaagactgtgtacaaagcacctgtctttccgcttttgtaatcttccgttggaaaaaatttacacacctaagtaaccatctgttttcttcaagaaaaaatcattcttatttctctctctcatcttgaaaacagctgtcagccaggagggcagagctgaaatttattgccacatcacatgaagcatagaacagactccactactccttgagattcaaaactttgcctctcacaaagttaccttttattttcctcttgtttgtcactcatctcccctagtgtgctctttttatttcttttactattaataataaaatctgtggatgactgtattatt

SEQ ID NO: 11635 - protein, 53 aa, Homo sapiens; identical to SEQ ID NO: 11631

SEQ ID NO: 11636 - DNA, 1737 bp, Homo sapiens
aagtttgaaggattcagagcagagaattgcaccctggcatgatgcctatgccagctggactgtgtgatttttgttctttagtagaaggataacatgacatagcaggaataatactgccttttctttctggcatggatcaagagaaaagaaaatacaagaaaacagacagaagatcctatctgcgacaattaagagcactctaagaggaaaacacatcccaccacacaaggcaaggtacttctatggaagggtgagccctcacagatggagcaatggggcgcgcacacctgaacaagggaggggaaggagttcttatccctgatgcatgtgacccctgctgctgtgtccttcccctattggctaaggcttctgacagctttggagattgtgacattggaataaaggaaaaacgtacaggactcatgaagcgctgaaatgttcacaaatatcaagcaaaagtcaatgaaatttattttgagctatttacatcatttaataattgagcaaggtatactcctatgaacaaaatttggagcatgtttgtctctctctgcctggcgtcttcagaatttggaaactagttatggtttataatcagctatagaattttaacacgtgctctcaaatgcaagtttctgataactttggagattgtgacattggaataaaggaagagctggaatgttcatgaatatcaagcaaaagtcatggaaatttattttgagctatttacagcatttaataattgagcaaggtatactcctatgaacaaaatttggagcatgtttgtctctctctgtctgcctggcatctacagaatttggaaactagtttcgttcccagatttcctaaactttccagagaaaatggtcttctccctggctcagcaagaagatgaactttaaacactgagaaactggtcatctccctggctcaaccagaagatgaactttaaacactactctcaatgacttgatgttcccatcactactcctgtcataaagggaggggactcagatattgagaattttatgatagtgtgaactgtctggtatgtcatttaagtaagcccgttgctgaaatattttccatgttattagaaagagctgaagagagggattgagatggcttctttattttttgtcttttgggaattaaaggaacctggttcaacaagggcctacacctaagtctcttgttgtaccagagtacaatttaggactgctcctgaggaaggaattagctagaaatctagagagtaagggtaacagatttacatagaataacagcctcagtatttttggttcctctccagtaaagatcacaaagaatattgctaaatcgctaaaacacctttgcaataacgtaagggcttacaactatataccaatgtagctcagttactaaactggagtaaactaatttctcttgtgtagaaaaattggttggctgtggttttatagcagatctgcaattattaatagttatgccaataatcgtttaacagtgcatatgttaatatatatggaaagacaatgtgtatagacagatgtgtaaaattgaaaaataaacatataacaagagagaaacatctatcgaacagacaatatacatacacatcaaacacaacagcagttttagtgaccataatatttatttctcatttttacattgcttactttagtgacaactgaaaatgacagttggcaatgcagctaacagtttcaataaaagtat

SEQ ID NO: 11637 - protein, 53 aa, Homo sapiens; identical to SEQ ID NO: 11631

SEQ ID NO: 11638 - DNA, 2452 bp, Homo sapiens
gatgctttttttctcttagaccaaagcaggagcagtgattagtttaggttcagggaaatcggaccatctgcaacatccctattacacagatattcccccttgtctgtggctaaaactctcaggcaagctttggcatgagaatctatttcattttgctataaccatattttctttttttaatttgctaattagtctactacctaaatttccacttaattatcatgaaaataatgtggaataacttgtagaatattttgtataggcttctcatagtcttctcaatttcaactattttaagattttaattattctgattttaaaataatttgcagttatttgtgtgattacttgtgtaatttttaaaagttacttacaccagaaaaatataagcactgttgttattttgatgtttttctaatattaatatgcatatatcataggaagtatttaaatgaattttaatttcccttttcaatcatctcccattgaaagctgaatcatgaggataccatctccaagcaggtggagtatttgatccctttagcaaggcagtgattttgaaattcgggtttagacaaaaagatatttcaagctcctgaagaacaagtttgaaggattcagagcagagaattgcaccctggcatgatgcctatgccagctggactgtgtgatttttgttctttagtagaaggataacatgacatagcaggaataatactgccttttctttctggcatggatcaagagaaaagaaaatacaagaaaacagacagaagcaaggcaaggtacttctatggaagggtgagccctcacagatggagcaatggggcgcgcacacctgaacaagggaggggaaggagttcttatccctgatgcatgtgacccctgctgctgtgtccttcccctattggctaaggttagaccacacagcctaaactaattccgattggctaattcaaagagagcgacgggggcttctgacagctttggagattgtgacattggaataaaggaaaaacgtacaggactcatgaagcgctgaaatgttcacaaatatcaagcaaaagtcaatgaaatttattttgagctatttacatcatttaataattgagcaaggtatactcctatgaacaaaatttggagcatgtttgtctctctctgcctggcgtcttcagaatttggaaactagttatggtttataatcagctatagaattttaacacgtgctctcaaatgcaagtttctgataactttggagattgtgacattggaataaaggaagagctggaatgttcatgaatatcaagcaaaagtcatggaaatttattttgagctatttacagcatttaataattgagcaaggtatactcctatgaacaaaatttggagcatgtttgtctctctctgtctgcctggcatctacagaatttggaaactagttgtgctgtactgcatgagaatgcctgcatttagtatgcgaactggaattggcaaaggacgatggctgctctcccgctaactttaaataagtcatgtcacaaattgcattcgttcccagatttcctaaactttccagagaaaatggtcttctccctggctcagcaagaagatgaactttaaacactgagaaactggtcatctccctggctcaaccagaagatgaactttaaacactactctcaatgacttgatgttcccatcactactcctgtcataaagggaggggactcagatattgagaattttatgatagtgtgaactgtctggtatgtcatttaagtaagcccgttgctgaaatattttccatgttattagaaagagctgaagagagggattgagatggcttctttattttttgtcttttgggaattaaaggaacctggttcaacaagggcctacacctaagtctcttgttgtaccagagtacaatttaggactgctcctgaggaaggaattagctagaaatctagagagtaagggtaacagatttacatagaataacagcctcagtatttttggttcctctccagtaaagatcacaaagaatattgctaaatcgctaaaacacctttgcaataacgtaagggcttacaactatataccaatgtagctcagttactaaactggagtaaactaatttctcttgtgtagaaaaattggttggctgtggttttatagcagatctgcaattattaatagttatgccaataatcgtttaacagtgcatatgttaatatatatggaaagacaatgtgtatagacagatgtgtaaaattgaaaaataaacatataacaagagagaaacatctatcgaacagacaatatacatacacatcaaacacaacagcagttttagtgaccataatatttatttctcatttttacattgcttactttagtgacaactgaaaatgacagttggcaatgcagctaacagtttcaataaaagtat

SEQ ID NO: 11639 - protein, 48 aa, Homo sapiens
MNKIWSMFVSLCLPGIYRIWKLVVLYCMRMPAFSMRTGIGKGRWLLSR

SEQ ID NO: 11640 - DNA, 2278 bp, Homo sapiens
gatgctttttttctcttagaccaaagcaggagcagtgattagtttaggttcagggaaatcggaccatctgcaacatccctattacacagatattcccccttgtctgtggctaaaactctcaggcaagctttggcatgagaatctatttcattttgctataaccatattttctttttttaatttgctaattagtctactacctaaatttccacttaattatcatgaaaataatgtggaataacttgtagaatattttgtataggcttctcatagtcttctcaatttcaactattttaagattttaattattctgattttaaaataatttgcagttatttgtgtgattacttgtgtaatttttaaaagttacttacaccagaaaaatataagcactgttgttattttgatgtttttctaatattaatatgcatatatcataggaagtatttaaatgaattttaatttcccttttcaatcatctcccattgaaagctgaatcatgaggataccatctccaagcaggtggagtatttgatccctttagcaaggcagtgattttgaaattcgggtttagacaaaaagatatttcaagctcctgaagaacaagtttgaaggattcagagcagagaattgcaccctggcatgatgcctatgccagctggactgtgtgatttttgttctttagtagaaggataacatgacatagcaggaataatactgccttttctttctggcatggatcaagagaaaagaaaatacaagaaaacagacagaagatcctatctgcgacaattaagagcactctaagaggaaaacacatcccaccacacaaggcaaggtacttctatggaagggtgagccctcacagatggagcaatggggcgcgcacacctgaacaagggaggggaaggagttcttatccctgatgcatgtgacccctgctgctgtgtccttcccctattggctaaggttagaccacacagcctaaactaattccgattggctaattcaaagagagcgacgggggcttctgacagctttggagattgtgacattggaataaaggaaaaacgtacaggactcatgaagcgctgaaatgttcacaaatatcaagcaaaagtcaatgaaatttattttgagctatttacatcatttaataattgagcaaggtatactcctatgaacaaaatttggagcatgtttgtctctctctgcctggcgtcttcagaatttggaaactagttagtcatggaaatttattttgagctatttacagcatttaataattgagcaaggtatactcctatgaacaaaatttggagcatgtttgtctctctctgtctgcctggcatctacagaatttggaaactagtttcgttcccagatttcctaaactttccagagaaaatggtcttctccctggctcagcaagaagatgaactttaaacactgagaaactggtcatctccctggctcaaccagaagatgaactttaaacactactctcaatgacttgatgttcccatcactactcctgtcataaagggaggggactcagatattgagaattttatgatagtgtgaactgtctggtatgtcatttaagtaagcccgttgctgaaatattttccatgttattagaaagagctgaagagagggattgagatggcttctttattttttgtcttttgggaattaaaggaacctggttcaacaagggcctacacctaagtctcttgttgtaccagagtacaatttaggactgctcctgaggaaggaattagctagaaatctagagagtaagggtaacagatttacatagaataacagcctcagtatttttggttcctctccagtaaagatcacaaagaatattgctaaatcgctaaaacacctttgcaataacgtaagggcttacaactatataccaatgtagctcagttactaaactggagtaaactaatttctcttgtgtagaaaaattggttggctgtggttttatagcagatctgcaattattaatagttatgccaataatcgtttaacagtgcatatgttaatatatatggaaagacaatgtgtatagacagatgtgtaaaattgaaaaataaacatataacaagagagaaacatctatcgaacagacaatatacatacacatcaaacacaacagcagttttagtgaccataatatttatttctcatttttacattgcttactttagtgacaactgaaaatgacagttggcaatgcagctaacagtttcaataaaagtat

SEQ ID NO: 11641 - protein, 46 aa, Homo sapiens
MNKIWSMFVSLCLPGIYRIWKLVSFPDFLNFPEKMVFSLAQQEDEL

SEQ ID NO: 11642 - DNA, 978 bp, Homo sapiens
aagtttgaaggattcagagcagagaattgcaccctggcatgatgcctatgccagctggactgtgtgatttttgttctttagtagaaggataacatgacatagcaggaataatactgccttttctttctggcatggatcaagagaaaagaaaatacaagaaaacagacagaagcaaggcaaggtacttctatggaagggtgagccctcacagatggagcaatggggcgcgcacacctgaacaagggaggggaaggagttcttatccctgatgcatgtgacccctgctgctgtgtccttcccctattggctaaggcttctgacagctttggagattgtgacattggaataaaggaaaaacgtacaggactcatgaagcgctgaaatgttcacaaatatcaagcaaaagtcaatgaaatttattttgagctatttacatcatttaataattgagcaaggtatactcctatgaacaaaatttggagcatgtttgtctctctctgcctggcgtcttcagaatttggaaactagttagtcatggaaatttattttgagctatttacagcatttaataattgagcaaggtatactcctatgaacaaaatttggagcatgtttgtctctctctgtctgcctggcatctacagaatttggaaactagttgatgcaattggagaaactggttgttttaccaaggctttgactggaaggatatgcttccctttaagaaaccaagctcaacttacagagctgataaaacccctttgggaaaactggcctcataccttgtctacacagtccccatgcagggttcctaacgtgtgtcgttcccagatttcctaaactttccagagaaaatggtcttctccctggctcagcaagaagatgaactttaaacactgagaaactggtcatctccctggctcaaccagaagatgaactttaaacactactctcaatgacttgatgttcccatcacta

SEQ ID NO: 11643 - protein, 82 aa, Homo sapiens
MNKIWSMFVSLCLPGIYRIWKLVDAIGETGCFTKALTGRICFPLRNQAQLTELIKPLWENWPHTLSTQSPCRVPNVCRSQIS

SEQ ID NO: 11644 - DNA, 903 bp, Homo sapiens
aagtttgaaggattcagagcagagaattgcaccctggcatgatgcctatgccagctggactgtgtgatttttgttctttagtagaaggataacatgacatagcaggaataatactgccttttctttctggcatggatcaagagaaaagaaaatacaagaaaacagacagaagcaaggcaaggtacttctatggaagggtgagccctcacagatggagcaatggggcgcgcacacctgaacaagggaggggaaggagttcttatccctgatgcatgtgacccctgctgctgtgtccttcccctattggctaaggcttctgacagctttggagattgtgacattggaataaaggaaaaacgtacaggactcatgaagcgctgaaatgttcacaaatatcaagcaaaagtcaatgaaatttattttgagctatttacatcatttaataattgagcaaggtatactcctatgaacaaaatttggagcatgtttgtctctctctgcctggcgtcttcagaatttggaaactagttaaaattgttgtcttattttcatcctctttaaaagatggtttataatcagctatagaattttaacacgtgctctcaaatgcaagtttctgataactttggagattgtgacattggaataaaggaagagctggaatgttcatgaatatcaagcaaaagtcatggaaatttattttgagctatttacagcatttaataattgagcaaggtatactcctatgaacaaaatttggagcatgtttgtctctctctgtctgcctggcatctacagaatttggaaactagtttcgttcccagatttcctaaactttccagagaaaatggtcttctccctggctcagcaagaagatgaactttaaacactgagaaactggtc

SEQ ID NO: 11645 - protein, 53 aa, Homo sapiens; identical to SEQ ID NO: 11631

SEQ ID NO: 11646 - DNA, 526 bp, Homo sapiens
aataatactgccttttctttctggcatggatcaagagaaaagaaaatacaagaaaacagacagaagatcctatctgcgacaattaagagcactctaagaggaaaacacatcccaccacacaaggcaaggtacttctatggaagggtgagccctcacagatggagcaatggggcgcgcacacctgaacaagggaggggaaggagttcttatccctgatgcatgtgacccctgctgctgtgtccttcccctattggctaaggcttctgacagctttggagattgtgacattggaataaaggaaaaacgtacaggactcatgaagcgctgaaatgttcacaaatatcaagcaaaagtcaatgaaatttattttgagctatttacatcatttaataattgagcaaggtatactcctatgaacaaaatttggagcatgtttgtctctctctgcctggcgtcttcagaatttggaaactagttgtaagtattcctaacttacggcagtatagtcatttgcatcagtacaata

SEQ ID NO: 11647 - protein, 53 aa, Homo sapiens; identical to SEQ ID NO: 11631

SEQ ID NO: 11648 - DNA, 1045 bp, Homo sapiens
ttggtgaaggcttctatttggtcaacttgctctgtctttatagccaatttatattgataagagtttctctctagataccatttgcggtattcctgagtcagaagagaggaaaggtgatactgccaccccctgtatgtatttccttttagatgtgggatgtggtaggcagcatgttccctccccagacttctctccgagagctgtctatgccctaatccctgcaacctgtgaatatgttatgttagttggcaaaggggactttgcagatgtaattaaagttactgaccatataatgaggagattattctggattatccaagtaggcccaatctaattacataaagccttcaaagcagagagctttctccaactggaggcagaagagatgcagcagcagcagcagcagcgagaacaattcaaagtacagggactcaatgggaactttctggtttgatgttggagggagcagcatgatgaggaatttgcacagccttaagaggctgagggaggctcctggctaacagctagccaggaaatatgatccttagccttgcagtcatgaaaactgaattcttccaacaacttgaatgagttatccctcagagccttcagataagagtccagtttgccagcaatttgatttcagtctgtgaaacctggaccagaggaaccagctgaattcaccagacttctgacccacagaactatgagataatacattgaatacattgaagttgtttaaaggagctcaatttgcagtaatttgttatggcaacaatagaaaactgacatatggaggtattgatatagtcatgattttgatgactaactagtttgtgatctggatatgaagtgtcaccatgctacagtgcctgagtctgcttcagattcttctacttcttggccatctttattgggaaaataagtatgtgaaataagtatagtctattgccctttttgagtaccactggttaattaattttgttattttcaagtgtatgtgctttaattcacatggcattaaaagaatcggtagtatagtttc

SEQ ID NO: 11649 - protein, 66 aa, Homo sapiens
MYFLLDVGCGRQHVPSPDFSPRAVYALIPATCEYVMLVGKGDFADVIKVTDHIMRRLFWIIQVGPI

SEQ ID NO: 11650 - DNA, 2445 bp, Homo sapiens
ccaagtgatagaggtgcccagtccaagtgaagggcaagagtctacataccactttcctctattcaagctatttatgcctactaggtttagaatactgattatgaaagtggacccccgaagagggtcatggctgagattcaaggaagtctctagcctgctaacatcgaatgcaaattggtgtgtgaggatacacattaacaaaaattttctgggaagagcatataaaatttccattagattctcaaggaggtaggaataaaggattttagtaactattactctaaaatgaaagaattcctttaaattgaatggcagatcttagtcatgacctgaaaagctgataaaaaaaaacttttcaaaagttaaaacctagggctttttggggtagattttttgatttatagaggactggtaagatgaggtatttaaagatgagggttacaaattttccatgttggcatatggaaagtaaagaatggcaaaatttgtagcacattctaattagttcaaatatctatgttaccaaaattgaaatgatatcaaattgcacagcaatgtcctgatggcctttcctctaactttctgggtttgtaagggtagggttgtgcctatcctgctcacctttgtctctccagtgtctagcatagcgtccagcacaggcagactatgatgcctgttttttttttgttgttgtttttttttttttttttttggtaaagaccagtgaattacactttttacacatgactaggttaaaacaaaagtagacatttgtgcaaacaccactgttctcccttgaagtggttgtaggtctcagacagtgctaatttttctctttcttaatgtgtgtggttaggaagctgggtcctgtggccagagtgagctgacccactatgtgaggaaacttacttatcacagcctaataaggagtagtccttgcagcagaagtaattactaaatgtgctttggtcatttgacagaaatcagggaggcagcaaggagtcatggaaatgagcccaaactgagagtcaaaaccctgtggtctgccgacacccccatcccacatccgtacctaaaagcaggctgtgcactagggacctagtgaccttactagaaaaaactcaaattctctgagccacaagtcctcatgggcaaaatgtagataccaccacctaaccctgccaatttcctatcattgtgactatcaaattaaaccacaggcaggaagttgccttgaaaactttttatagtgtatattactgttcacatagataagcaattaactttacatatacccgtttttaaaagatcagtcctgtgattaaaagtctggctgccctaattcacttcgattatacattaggttaaagccatataaaagaggcactacgtcttcggagagatgaatggatattacaagcagtaattttggctttggaatatacacataatgtccacttgacctcatctatttgacacaaaatgtaaactaaattatgagcatcattagataccttggccttttcaaatcacacagggtcctagatctgctgtgtgatgctggaaaagtaacttcacttctgtgggcctcagctccttaatttttaacatactttggattcttatatctttgtcagctgtcaacttcagtgttttcaggttaaattctatccatagtcatcccaatatacctgctttagatgatacaaacttcaaaagatccggctctccctcgtaaaacgtggaggacagacatcaagggggttttgtgagtaaagaaaggcaaccgctcggcaaaaacgcaccctggcacaacaggagcgaataaatacagacgctgattgagcgtttgctccatcttcacttctgttaaatgaagacattgatatctaaaatgctatgagtctaactttgtaaaattaaaatagatttgtagttatttttcaaaatgaaatcgaaaagatacaagttttgaaggcagtctctttttccaccctgcccctctagtgtgttttacacacttctctggccactccaacagggaagctggtccagggccattatacaggtacgtccccaaccatccaaggaaactttgcaaagaagctcaagtattaggtttcgaacacccctccttccccctgcctctgcccgcgggaatccatccagcgcaattttgggaggctgaggtgactggatcatgaggtcaggagattgagaccatcctggctagaatggtgaaaccctgaatctactaaaaatacaaaaaagaaaaaaaaattagccgggcatgatggcgggcacctgtagtcccagctactctggaggctgaggcaggagaatggcatgaatgcgggaggcggagtttgcggtgagccaagatcgcgccactgcattccagcctggaatgcgagcgagactgtctcaaaaaaaaaaaaaaagaaa

SEQ ID NO: 11651 - protein, 59 aa, Homo sapiens
MPTRFRILIMKVDPRRGSWLRFKEVSSLLTSNANWCVRIHINKNFLGRAYKISIRFSRR

SEQ ID NO: 11652 - DNA, 1597 bp, Homo sapiens
tacacacacgcaatgacccacgagaaagggaaaggggaaaacaccaactacccgggcgctgggctttttcgacttttcctttaaaaagaaaaaagtttttcaagctgcgcgggcttcctgtgcgcggccgagcccgggcccagcgccgcctgcagcctcgggaagggagcggatagcggagccccgagccgcccgcagagcaagcgcggggaaccaaggagacgctcctggcactgcagataacttgtctgcatttcaagaacaacctaccagagaccttacctgtcaccttggctctcccacccaatggagatggctctaatggtggcacaaaccaggaaggggaaatctgtggtttaaattctttatgcctcatcctctgagtgctgaaggcttgctgtaggctgtatgctgttaatgctaatcgtgataggggtttttgcctccaactgactcctacatattagcattaacagtgtatgatgcctgttactagcattcacatggaacaaattgctgccgtgggaggatgacaaagaagcatgagtcaccctgctggataaacttagacttcaggctttatcatttttcaatctgttaatcataatctggtcactgggatgttcaaccttaaactaagttttgaaagtaaggttatttaaaagatttatcagtagtatcctaaatgcaaacattttcatttaaatgtcaagcccatgtttgtttttatcattaacagaaaatatattcatgtcattcttaattgcaggttttggcttgttcattataatgttcataaacacctttgattcaactgttagaaatgtgggctaaacacaaatttctataatatttttgtagttaaaaattagaaggactactaacctccagttatatcatggattgtctggcaacgttttttaaaagatttagaaactggtactttcccccaggtaacgattttctgttcaggcaacttcagtttaaaattaatacttttatttgactcttaaagggaaactgaaaggctatgaagctgaatttttttaatgaaatatttttaacagttagcagggtaaataacatctgacagctaatgagatattttttccatacaagataaaaagatttaatcaaaaaatttcatatttgaaatgaagtcccaaatctaggttcaagttcaatagcttagccacataatacggttgtgcgagcagagaatctacctttccacttctaagcctgtttcttcctccatatggggataatactttacaaggttgttgtgaggcttagatgagatagagaattattccataagataatcaagtgctacattaatgttatagttagattaatccaagaactagtcaccctactttattagagaagagaaaagctaatgatttgatttgcagaatatttaaggtttggatttctatgcagtttttctaaataaccatcacttacaaatatgtaaccaaacgtaattgttagtatatttaatgtaaacttgttttaacaactcttctcaacattttgtccaggttattcactgtaaccaaataaatctcatgagtctttagttgatttaaaa

SEQ ID NO: 11653 - protein, 42 aa, Homo sapiens
MSSPCLFLSLTENIFMSFLIAGFGLFIIMFINTFDSTVRNVG

SEQ ID NO: 11654 - DNA, 13132 bp, Homo sapiens
aaatcaactaaagactcatgagatttatttggttacagtgaataacctggacaaaatgttgagaagagttgttaaaacaagtttacattaaatatactaacaattacgtttggttacatatttgtaagtgatggttatttagaaaaactgcatagaaatccaaaccttaaatattctgcaaatcaaatcattagcttttctcttctctaataaagtagggtgactagttcttggattaatctaactataacattaatgtagcacttgattatcttatggaataattctctatctcatctaagcctcacaacaaccttgtaaagtattatccccatatggaggaagaaacaggcttagaagtggaaaggtagattctctgctcgcacaaccgtattatgtggctaagctattgaacttgaacctagatttgggacttcatttcaaatatgaaattttttgattaaatctttttatcttgtatggaaaaaatatctcattagctgtcagatgttatttaccctgctaactgttaaaaatatttcattaaaaaaattcagcttcatagcctttcagtttccctttaagagtcaaataaaagtattaattttaaactgaagttgcctgaacagaaaatcgttacctgggggaaagtaccagtttctaaatcttttaaaaaacgttgccagacaatccatgatataactggaggttagtagtccttctaatttttaactacaaaaatattatagaaatttgtgtttagcccacatttctaacagttgaatcaaaggtgtttatgaacattataatgaacaagccaaaacctgcaattaagaatgacatgaatatattttctgttaatgataaaaacaaacatgggcttgacatttaaatgaaaatgtttgcatttaggatactactgataaatcttttaaataaccttactttcaaaacttagtttaaggttgaacatcccagtgaccagattatgattaacagattgaaaaatgataaagcctgaagtctaagtttatccagcagggtgactcatgcttctttgtcatcctcccacggcagcaatttgttccatgtgaatgctagtaacaggcatcatacactgttaatgctaatatgtaggagtcagttggaggcaaaaacccctatcacgattagcattaacagcatacagcctacagcaagccttcagcactcagaggatgaggcataaagaatttaaaccacagatttccccttcctggtttgtgccacctgcaagagagaaagaaatgtttgtgtatgcacatgcggttataaagctggagtgacagcatatagtaaatctgaaaggaaaatagtccattttctgttgaaaggaaggagctcattaaatccttggaagtaattttttgaaagtggtagagaaattggcaattaaaagatgacattgttacctttaggcatatttgaagactttgaaaattatgttttaaattctattctctagttttgaatcgggtacacatatgtatcatcttctttaaataaaaaacaaaaaccgctcttcggagttttcaaatgccaaaatgcaaagaggaaagcttgcattctgacacagtacagttttttttttttctgatttgtacttcatctaggagctagacaattaaaggcccaaatgttcaaaatagtcctttatgatttatgaaaattaaaacccaattaacctgttttataagggtagggttcaggctgaatttttctttctgtaatacatagttgaagttttacctttattctttcaggaaatgtgatacaagcaatggaggtttgcctacaaacgaatctatctgaaaatgtccccgtctactatttagagattcctttggggaaagcactacccagtggctttggttttgactacataaaggaagtatgacttaaagagtcctctgtgtttcaaactacttgtcttaggcagagggttgattaaaaaaaagaacaagatgaatttgctacttccttttagagtctgattttactctctcagataaagtgacatttctcccacaggtttctgatttcagtgttactataacagaacctagaagttagagtatcattcaagtatgtggtctcctgcagtacaagaggggaatcaccttttcttttatttaataatgaaaccagctagatataaaaatgtgactaagttcaaaagaaacgtatgaagtaaaaaattccccagtgaatatattttgacagggcagaatatcgtggtttggaaatttccaaaccaaggaaatatattattcttactgatagtatttttttttaaactttactgttttctgagatgaattagttgatgatgaaaaaatttgggttaaatgatgtcacttcaggaattcaattcattttacagaatttcagtcaataaagattgtaaaaacaaggactttttttcccccttacagggtcctggacacagtaaatgctcaataaatacatattaataatgtagtgttagtgccaccccagccaatataactcgcccttttcttaaaagatgtgtttaatttgtattgaaggtaaattgctggcatactattctacccataaattttattcctgttctttaaagataacatatgagcacaggtattaaaataaatatatttagtatactaattagctttttccctctttttaaatatacatacgaattgcctgattagagcactcagaaaagtgacagtgtttttgataatgtgttatatatattaaaaattctaatagctttttttatttgttcaaactctaaatgtatattgaaataaaacatgtcacacaggtccccttttgttctcaaacacaaccttgtcatacaggcatgatgaattccgaacactgcagagaaatgagaagtttgtctaaatatactatagaaccttaggtcatatttaaaacacaatgatagatgaaaaacattaatgaacagaagaaaggagaaatatcccagaaaaaaaaaaaaatatatatatatatatatatattctacaatttaaaaatagtagacttttaaggacattagaatgactagaaggtcattcattcatcagtgtggagtctatgtccacttccagtgtttttgactgggctaagcaaccaacaacagaattgctatatgcctgagtgggaattagtggtcatagacaacaaaggccagtctattagccaaggcactgggcagagggtgctttcatgaggtaataagaaataaagtagttctttctggaatcggtgtggccaccagctggtaaagtggcaggggaagaattatacacaattataggcctgacaatcagtagtgacagtgctaaccaagtaagaatgtgacaagcataatgtttaatgtatagcaatgcaagagtaatttatatgaattatatattagaaattagactggggtctttgactaggtagttctgcagatatacttccagtcccctcactccacaatacttcttaggcctaccacatgaaatatccattgtcagtataagttttactgtgtagcataggttccaagttaaatgttcttaacaaattactacacactgtctgagtatcaaaatcattccttctcacagtaggtaaaaatctaccaagaggaagcactatgtatactagattaatgataacaccaaggatctttcattatatgacaggcaattcttcctctggtgctaagaatgaagctgaaggtggcactttgggaaatttttccttaaattatgctttcctgaaggacaatttttttggggggggtggagtgtgagcataagatttaagaatatctggctgggtgtggtgtctcatgcctgtaatcctagcattttgggaggccgaggtgggcggatcatgaggtcaggagtttgagaccagcgtgaccaacatggtaaaaccccgtctctactaaaaatacaaaaaaattagctaggcgtggtggcgcacgcctataatcccagctactcaggaggctgaggcaggaggatcacttgaacctgggaggcagaaggtagtagtgagccgagattgtgccactgcactccagcctgggcaacagagcaagactctgtctccaaagaaaaaaaaagatttcagaatatccttttattcttaccttgttgatttgccaggaaagacgttatcaaaactatatattcagagcataatatgtcctaagtttgtcattaaagttctggttttccttcaaaaattttttattgtggtgaaatatgtaatgtaaacataatgtaagtttaacatcttcaccatttttaagtgtacaggtccgctatattaaacacttagtcataatgttctacaactatcattatcatccatctccataactctttatcttgtaaggatctcattttatgtctaaatcataggttatattcttctacaattatatatatttctatattgctgcttattctcagcaccaaccatttaatatttgcataccaaaggaactgcacaccataaagttttctttaaaaaaagttacagtggtcgaatttcataaccaaagcgattgtgggatagctctaattttatttaccttgaaatatacaaataatttaaaactattaatttgttgttacaaatcaactgtacatctatttttactgaaagtcatcttatattgatgtagcaatacaaattctaggtccaaagccattttagtaggtgaaatggaatgtaattatgttgttgaaaattaaagtgatttagtttaggtaactttctctgcatattttcccactttaacatttatgtgtaccaatcaaaaacataatcattaagatggaataatgttgattcctatttggatcagtttgctaaaagcaattagcatatacttgtatatgtggaaacagtatctgccttttctatcagaatttattctgattctctatattctgccgctgcagttttggtttacatcatggaagtaagcagtgattaatgcaagtgtataaaaatcaggattctgtgaaactttggacttgtcataatctttagaataacaacgatttcttggttaccttttgaggtagaatcaaaagttgaaagcggctgccaacttggtgccccaatgacctgcctttataaaaactgcatctgtcagcgtgtttcccttcccttttacttaagatagaattccttaccattagagccatctccattgggtgggagagccaaggtgacaggtaaggtctctggtaggttgttcttgaaatgcagacaagttatctggggaaaaagggttggggttgaagttgacacatcaccttagatgtgtttattaggttagttagtcatctttgaaagcagaggtgaagggctgaggagagaggacccgggataggtggattttaatgggaataaagagtaatttagaggaaagataaggatgtaccccaaatagtttgatagctcaatagttttttatttataatttaagctcacacttttcatgtccagcataaagcagcaacaaattaagtatttagactatcatctgagttttagttctctgagtttcaacctctctacatgctgtaaaatgtcatataaagtgtttaatttctcagaaattcttcaggaagacttgcaatgttctctgacaaaaagaaaatccaaatgactgcctttctaaagtgtattcatttgtgtaaagtttatcacatattttctgtagaatatgattctgtgttacatctcaataactgacattaaagatgagtcaacttctctgctaccagggaatgaggtaaagagtattatgtttcctcttgacttcacatgagttccatcattaacaagggattgatggtgtgacttactactgattgagatggtggccaactggcgtcacatcttctgaagtacacaaactcatctttaaaggtaaaaatggattgttctgtaggaataacttatatcctgaaatcttggtgaatgataagattaccacttttcagatcattaactttacatataagaaaaattccctgagtaagccattgctgggggaaaaattataaacttttcatgtcatgatactttatttatttccataaaaacttaacatcacttcttgatattttctaattgagagctctttattgaaaaatagcaactttctaaattaagagctccttattgaaaatagcagtttgtgcacacaatagcataacattcttttctgtattttgagaattaagaaaataaatgtttttaaagatatatgccaatagtgatatttaacacataaaggtgtgatgtatttttgaagtgtcttagaagaaagccaatgtggatattgcagggtcactgtggaaatgtgtatcagtgaccgtttagttgtaaatgcacaaaagagaaagaatgtcagccttagaggattatcctgcttttcccaattttagaaccaggaagtttttactgaaatggctttgtggaacttacttacaagctaagtaaccttcccagtagttttattatggacagtaattagtgctttcgcttttctgatgaagatgtgtaaaaaaaaacaggttaggaatttcctctcccccaccagactcattctgtggaataagcagaagcaggacgacagccagctggagtctgactgcagggactcgcttcctcaacaccctgacctcacactggctcagcggaaggtctgaactgtgctgaaatgttatagaacaaatgtgaataaagctgtgggtagggaggggagagctagtgggagagatacattctgttgctttaagtgatggccattctttcttatttcttgtttccacaaaacgttttccatttgcctaacaaacttcttaatatatttccataagagaattttaatacttttttaaatttataatttgattttgatgtcttttctccctactcccagggaacagaaaatagggtagctgttattgctctggagtgttttgtcacccttccatgacgcctcctctgtgcatttgagttcactgtttatgctcaacactgaatttcaacaaaatgcctcatttggaacttattatgtgttacctgtttgttttttgtatccgtttgcctctatcataggaaaaaattgcttttctatttctgtaagctacagtttatctttttctacttccacacaccataatggccccaagcaaggaagaatttgtgtactaagaactatttaaggcaaatgatgtaaacaaaaggtttggttttgcctttttaaaaattcattgtcttacacggatgggataccctgtgttataaggcaaagaccatttacctgttacattcccgtggcatttgacccaatgctttaacaaaccaaatgagggtcatgttcactgctccacaagatgtcaccatacacactcttaggcactagatacacctacttcaagttgttcaagtatggacccgtcctctttgccttccttctcttgccctctcagatagcgcactcctggaggctggcttctcatctcctggtgggaccctgcttctctgtcttccccaaggtgactagtcctcactccatcctctgtcagagcacttatcacactggatggtaattatttcatgtgtctcttcttagtgctgaggtgtatgtgatggcagagactgagtcttccctcagtgctggatatacagctgacagatactcactaaatacctttgaataaatgtttgagagtcaccaaaagcatttctatctgcacagtgggcttttatttggcactggagcatttcaggacttaactgatatgcaggttcttggagaatttagtagaagcttacaaatgtggagatatattaataagatttgttggcattccagattggcagtggaccctttttagaagattccaggcttggagctcagtctgtcaagtataagaaacagagtaaagctggagaatactggtagaaatcatcgtctggacttgtgggtaaaaattaagtttcatccttgatttttaaaatcactcttggatgccataatcatgtcttttcattgcatagaaccatgtacttgttcttaggagatccgtgctcaagcatttagaagttagatgccaggtttgcatatagatatagacagagagagagagagatgggtagggatacagagagataagccagtgtggcaaatattaacaattagcaaatcgaattgaaaagtaggagtgttcattgttctgtcgttttcagcttgcctgggttccattccagaccccaccagtgttactagctgtgtggtatttggcaagttaataaacctctttagggcttagttgcttctctgaaaatggagataaagaataacctattcaaaaagtctttgtgaagatgaagtgacaatgcaaaacatttagttgggtgccagcctcataatcagggctcagtgaatgttagccatgatactaatgacatcagtcatcaatgcttggtgagtactttgtaagtaccctacatctatcacatgttacacttgctattttaaaagaacaagcccagatacatttaccactgtataattgaaccattatataaattagaggttatctacaagcaggtaaaagccaagttaaaataattattttgttcatcctaatctttaagtcataaagtaactgctaaaaggtacaccaaaatgttttcttggaaataattttcagaagtattttagtagtttttcttttggttaaggagaaggatatgcattctgaaacaaaaattctaaaaaccaaacaactttttaccatgtcagtgtggtctctgaaaattcatgacacagtaaaatgtctttaaaacgtctttactttctcagactgcatttgtatctcaccttccaaattgatttcttataatacacaagatcatctagtgaaacaaaataatagcaaacacttacacaggctccctctgtgccaagcacctaagtgtttgacgtatactaactcagttattcctcctcacaaccttaggaatgagtattcacaccctccccattgaaacacaggggccttgaggcacaggcaggtgaaataacttgcgcaaggttaatcagtggctaaggagcatgctgctgggatgcctacctgggcaatctggcacctgtttcccatgcttggaaccattatttgtgtgagcatataaaggaccatagcattttgttaagacagccaggaacttataatttgtgtagaacactcttgtttatggagaactggcataaatgtcattgtagggcactgtttcaccttatccaaacatcggcctcacaatttcattaaatcagctatttgatattcctcactaatctttccttctgccagtgccttaaccctgtctacccacacaaggtagcaatatctgtgctaatctgtcctaacaattagcacagatattagtgatctgtgctaattggttaatatgtctgctaattgtttctcagaattagcacagatattcacaatctgttttaaactacagccacttaagctatgttaagcctcactttctggtgagtgtgtcactgtgtgtaagggtggtaattttaggaatcacatcttcttccacattgctgagagccttggacttgtgagtgaggatgctgaactgctcagacatatgatgtgcctatttgaggatagatgtgcttttgcactggttttgcttgaggctctgcatattgtaaacccaaatacattgattgatggacagaacaagtgtttcagggcagatgagaattacacagcagtgatcatattaaaagcattgcatttccttaagagtctgagataagaaaatttttttcatatatatgtgaaactcgtatatgaaagttgtagctactgagaggtgggataaaaagaggcttttaaaattgtaatatttttccttgaaaagtagtgtttcacaatttttttattctatctaatttaaggaaacatgtaacagttttgagtccagtaagatcagtgaaagacaaaaatacattctatagtgaattatagtggtacttactttgacttactttggacatagaggatataaattcactaagaccagctgtgtctcaggaggtatatgaaagtgagcttggtagttacactggaatcacagaatttcatcagtgtaagggattttagaaatggttcagtccctgccacccatcaaccacccatcttagagatgagcaaaatgaggcacagaaatctgcagagttggtcctagaaacaaaccatggttctcaggccggtgctccttccccagtattagacttctgcagagtggcagcctgatatcaaaacaataaggctgttaaaatcaatagcttcagctaagcaatagccaatgactatcaaaaatggagacaccagctagttaagggcactagctggtgcccagtccaagtgatagaggtgcccagtccaagtgaagggcaagagtctacataccactttcctctattcaagctatttatgcctactaggtttagaatactgattatgaaagtggacccccgaagagggtcatggctgagattcaaggaagtctctagcctgctaacatcgaatgcaaattggtgtgtgaggatacacattaacaaaaattttctgggaagagcatataaaatttccattagattctcaaggaggtaggaataaaggattttagtaactattactctaaaatgaaagaattcctttaaattgaatggcagatcttagtcatgacctgaaaagctgataaaaaaaaacttttcaaaagttaaaacctagggctttttggggtagattttttgatttatagaggactggtaagatgaggtatttaaagatgagggttacaaattttccatgttggcatatggaaagtaaagaatggcaaaatttgtagcacattctaattagttcaaatatctatgttaccaaaattgaaatgatatcaaattgcacagcaatgtcctgatggcctttcctctaactttctgggtttgtaagggtagggttgtgcctatcctgctcacctttgtctctccagtgtctagcatagcgtccagcacaggcagactatgatgcctgttttttttttgttgttgtttttttttttttttttttggtaaagaccagtgaattacactttttacacatgactaggttaaaacaaaagtagacatttgtgcaaacaccactgttctcccttgaagtggttgtaggtctcagacagtgctaatttttctctttcttaatgtgtgtggttaggaagctgggtcctgtggccagagtgagctgacccactatgtgaggaaacttacttatcacagcctaataaggagtagtccttgcagcagaagtaattactaaatgtgctttggtcatttgacagaaatcagggaggcagcaaggagtcatggaaatgagcccaaactgagagtcaaaaccctgtggtctgccgacacccccatcccacatccgtacctaaaagcaggctgtgcactagggacctagtgaccttactagaaaaaactcaaattctctgagccacaagtcctcatgggcaaaatgtagataccaccacctaaccctgccaatttcctatcattgtgactatcaaattaaaccacaggcaggaagttgccttgaaaactttttatagtgtatattactgttcacatagataagcaattaactttacatatacccgtttttaaaagatcagtcctgtgattaaaagtctggctgccctaattcacttcgattatacattaggttaaagccatataaaagaggcactacgtcttcggagagatgaatggatattacaagcagtaattttggctttggaatatacacataatgtccacttgacctcatctatttgacacaaaatgtaaactaaattatgagcatcattagataccttggccttttcaaatcacacagggtcctagatctgctgtgtgatgctggaaaagtaacttcacttctgtgggcctcagctccttaatttttaacatactttggattcttatatctttgtcagctgtcaacttcagtgttttcaggttaaattctatccatagtcatcccaatatacctgctttagatgatacaaacttcaaaagatccggctctccctcgtaaaacgtggaggacagacatcaagggggttttgtgagtaaagaaaggcaaccgctcggcaaaaacgcaccctggcacaacaggagcgaataaatacagacgctgattgagcgtttgctccatcttcacttctgttaaatgaagacattgatatctaaaatgctatgagtctaactttgtaaaattaaaatagatttgtagttatttttcaaaatgaaatcgaaaagatacaagttttgaaggcagtctctttttccaccctgcccctctagtgtgttttacacacttctctggccactccaacagggaagctggtccagggccattatacaggtacgtccccaaccatccaaggaaactttgcaaagaagctcaagtattaggtttcgaacacccctccttccccctgcctctgcccgcgggaatccatccagcgcaatctctggtcccgggcgaggcgacaccactgagtccccagggggcacccgcaggcgcgcgcgggaccaggccgggctccacggccacgtgcgcgctgcccccgccttgcctcgccagttaacccggcggtgaccctcgcaccgaagtcccccggcgtccctgccacgttcaagagaggaaaggcgggcgggagcgcgagactgaagtcggcgtacctgcagtgccaggagcgtctccttggttccccgcgcttgctctgcgggcggctcggggctccgctatccgctcccttcccgaggctgcaggcggcgctgggcccgggctcggccgcgcacaggaagcccgcgcctgcgaacgtgcgacccttttataactcacttgtgactcataaccgaccaggcgccttttctgcaacccccccccccttctcccccctcctgcct

SEQ ID NO: 11655 - protein, 71 aa, Homo sapiens
MSPYTLLGTRYTYFKLFKYGPVLFAFLLLPSQIAHSWRLASHLLVGPCFSVFPKVTSPHSILCQSTYHTGW

SEQ ID NO: 11656 - DNA, 513 bp, Homo sapiens
atagatttctggcagtggaattactgtcaggtgctaccagatgctggcttcccaaaggttttgccaagtgttactcccaataactgtctaagagtgcctgtttccccacaccttgagtaagccttggttatcagtcttacaaaaatattttgccaaaaatagtatgagatacattttgttgaacggagcagtgatgtggttttcaaggcagcagtggcagaggtcccatgtaatggtgcaaggtgtggaggctttgcttagcagtttttcccccgcagctgctccaaggtataaaaatgggcatttttgggggctccgtagtcctgacctccacgcctgtgacttgtgagccattttattctgtttgtttaaactagctagtgtagatcctgttgtttgtaaccaagagtgttgacatacagccactatttaattgtaaccactgtcaacctttttccttatttccttcagatccttttgtgtttaaataaaggaaaagctgcacatccattg

SEQ ID NO: 11657 - protein, 61 aa, Homo sapiens
MRYILLNGAVMWFSRQQWQRSHVMVQGVEALLSSFSPAAAPRYKNGHFWGLRSPDLHACDL

SEQ ID NO: 11658 - DNA, 1110 bp, Homo sapiens
agggcggagaaggacttgcgcgcgacggttctcaccgctgctatggaggcgctggccatgggttcccgggcgctgcggctctggctggtcgcacccggtggcgggatcaaatggagatttatagcaacatcgtcagcttctcagctgtcaccgacagaattgacagaaatgcggaatgatctctttaataaagagaaagccaggcagttatcattaactccccgaactgagaagatagaagttaagcatgttgggaaaactgaccccggtactgtcttcgtgatgaataaaaacatttcaactccctacagttgtgccatgcatttaagcgagtggtattgcaggaagtccattctggctctggtggatggacagccttgggacatgtataagcctttaacaaagtcctgtgaaattaaatttcttactttcaaagattgtgatccaggagaagtgaataaggcatattggcgttcctgtgctatgatgatgggctgtgtgatagagagggcattcaaagatgaatatatggtcaatttggtcagagctccagaagttcctgtaatttctggtgccttctgttatgacgtagttttggatagcaaacttgatgagtggatgccaacaaaagagaacttacgttccttcacaaaagatgctcatgctttaatttataaagatcttccatttgaaactctggaagttgaagcaaaagtggcattggaaatatttcaacacagcaagtacaaagtagatttcatagaagagaaggcatctcagaaccctgagagaatagtcaagctacacagaataggtgacttcattgatgtgagtgagggccctcttattccaagaacaagtatttgtttccagtatgaagtatcagcagttcacaatcttcaacccacccagccaagtctcatacgaagattccagggcgtgtctttacctgttcacttaagagcacattttacaatatgggataagctattggaaagatctcggaaaatggtaactgaagatcaaagtaaagcaacagaggaatgtacatctacctaataactttctaaaatttaaatatgtataataaaataaatgttttaaatataa

SEQ ID NO: 11659 - protein, 338 aa, Homo sapiens [sequence omitted]

SEQ ID NO: 11660 - DNA, 1197 bp, Homo sapiens
agggcggagaaggacttgcgcgcgacggttctcaccgctgctatggaggcgctggccatgggttcccgggcgctgcggctctggctggtcgcacccggtggcgggatcaaatggagatttatagcaacatcgtcagcttctcagctgtcaccgacagaattgacagaaatgcggaatgatctctttaataaagagaaagccaggcagttatcattaactccccgaactgagaagatagaagttaagcatgttgggaaaactgaccccggtactgtcttcgtgatgaataaaaacatttcaactccctacagttgtgccatgcatttaagcgagtggtattgcaggaagtccattctggctctggtggatggacagccttgggacatgtataagcctttaacaaagtcctgtgaaattaaatttcttactttcaaagattgtgatccaggagaagtgaataaggcatattggcgttcctgtgctatgatgatgggctgtgtgatagagagggcattcaaagatgaatatatggtcaatttggtcagagctccagaagttcctgtaatttctggtgccttctgttatgacgtagttttggatagcaaacttgatgagtggatgccaacaaaagagaacttacgttccttcacaaaagatgctcatgctttaatttataaagatcttccatttgaaactctggaagttgaagcaaaagtggcattggaaatatttcaacacagcaagtacaaagtagatttcatagaagagaaggcatctcagaaccctgagagaatagtcaagctacacagaataggtgacttcattgatgtgagtgagggccctcttattccaagaacaagtatttgtttccagtatgaagtatcagcagttcacaatcttcaacccacccagccaagtctcatacgaagattccagggcgtgtctttacctgttcacttaagagcacattttacaatatgggataagctattggaaagatctcggaaaatgactccatttcccattctccttctatttactacgcagtcattcttcactacctcgcctgagtcgtacctcctccatggaacagtctcagagtaactgaagatcaaagtaaagcaacagaggaatgtacatctacctaataactttctaaaatttaaatatgtataataaaataaatgttttaaatat

SEQ ID NO: 11661 - protein, 353 aa, Homo sapiens
MEALAMGSRALRLWLVAPGGGIKWRFIATSSASQLSPTELTEMRNDLFNKEKARQLSLTPRTEKIEVKHVGKTDPGTVFVMNKNISTPYSCAMHLSEWYCRKSILALVDGQPWDMYKPLTKSCEIKFLTFKDCDPGEVNKAYWRSCAMMMGCVIERAFKDEYMVNLVRAPEVPVISGAFCYDVVLDSKLDEWMPTKENLRSFTKDAHALIYKDLPFETLEVEAKVALEIFQHSKYKVDFIEEKASQNPERIVKLHRIGDFIDVSEGPLIPRTSICFQYEVSAVHNLQPTQPSLIRRFQGVSLPVHLRAHFTIWDKLLERSRKMTPFPILLLFTTQSFFTTSPESYLLHGTVSE

SEQ ID NO: 11662 - DNA, 1698 bp, Homo sapiens
agccaacgaggggaagaaaggagttggggcaaaacaggaggcgtttccctacccgcatacatccccgtccccgagacacccaatccccccacccccagcctgcccgcgcctcccgcccccagctcctcgccctggggacagctggcagccccgcgcggaccagacacaaagccgatcaatcccggaggcgtgggggcggagggacgacccgccggggctttcccgggcgctgctctcctcctgctgccccctcgctaggacccggcggacgcctcgtctggttttcacgccctctagcccctacccccacacccccaaaacagaacagacccccatccctgggctggaggacccgcctcttggcagccagctgagaaggcgccccggggagggggaaactgacatcccatctagagccgtccctcctcttcctcccctcccgactctctgctcctttcccgccccagaagttcaagggcccccggcctcctgcgctcctgccgccgggaccctcgacctcctcagagcagccggctgccgccccgggaagatggcgaggaggagccgccaccgcctcctcctgctgctgctgcgctacctggtggtcgccctgggctatcataaggcctatgggttttctgccccaaaagaccaacaagtagtcacagcagtagagtaccaagaggctattttagcctgcaaaaccccaaagaagactgtttcctccagattagagtggaagaaactgggtcggagtgtctcctttgtctactatcaacagactcttcaaggtgattttaaaaatcgagctgagatgatagatttcaatatccggatcaaaaatgtgacaagaagtgatgcggggaaatatcgttgtgaagttagtgccccatctgagcaaggccaaaacctggaagaggatacagtcactctggaagtattagtggctccagcagttccatcatgtgaagtaccctcttctgctctgagtggaactgtggtagagctacgatgtcaagacaaagaagggaatccagctcctgaatacacatggtttaaggatggcatccgtttgctagaaaatcccagacttggctcccaaagcaccaacagctcatacacaatgaatacaaaaactggaactctgcaatttaatactgtttccaaactggacactggagaatattcctgtgaagcccgcaattctgttggatatcgcaggtgtcctgggaaacgaatgcaagtagatgatctcaacataagtggcatcatagcagccgtagtagttgtggccttagtgatttccgtttgtggccttggtgtatgctatgctcagaggaaaggctacttttcaaaagaaacctccttccagaagagtaattcttcatctaaagccacgacaatgagtgaaaatgatttcaagcacacaaaatcctttataatttaaagactccactttagagatacaccaaagccaccgttgttacacaagttattaaactattataaaactctgctttgtccgacatttgcaaagaggtacacgaggaaatggaattggtatttcattttaattttcatgactactaactcacctgaacttgctattttaaacaaatagttctgtcgacacctaaaatataatctggcttcttgtgtctggactaagttaaaagaattaaaatactttgtaatgtc

SEQ ID NO: 11663 - protein, 298 aa, Homo sapiens; identical to SEQ ID NO: 1932

SEQ ID NO: 11664 - DNA, 1682 bp, Homo sapiens
agccaacgaggggaagaaaggagttggggcaaaacaggaggcgtttccctacccgcatacatccccgtccccgagacacccaatccccccacccccagcctgcccgcgcctcccgcccccagctcctcgccctggggacagctggcagccccgcgcggaccagacacaaagccgatcaatcccggaggcgtgggggcggagggacgacccgccggggctttcccgggcgctgctctcctcctgctgccccctcgctaggacccggcggacgcctcgtctggttttcacgccctctagcccctacccccacacccccaaaacagaacagacccccatccctgggctggaggacccgcctcttggcagccagctgagaaggcgccccggggagggggaaactgacatcccatctagagccgtccctcctcttcctcccctcccgactctctgctcctttcccgccccagaagttcaagggcccccggcctcctgcgctcctgccgccgggaccctcgacctcctcagagcagccggctgccgccccgggaagatggcgaggaggagccgccaccgcctcctcctgctgctgctgcgctacctggtggtcgccctgggctatcataaggcctatgggttttctgccccaaaagaccaacaagtagtcacagcagtagagtaccaagaggctattttagcctgcaaaaccccaaagaagactgtttcctccagattagagtggaagaaactgggtcggagtgtctcctttgtctactatcaacagactcttcaaggtgattttaaaaatcgagctgagatgatagatttcaatatccggatcaaaaatgtgacaagaagtgatgcggggaaatatcgttgtgaagttagtgccccatctgagcaaggccaaaacctggaagaggatacagtcactctggaagtattagtggctccagcagttccatcatgtgaagtaccctcttctgctctgagtggaactgtggtagagctacgatgtcaagacaaagaagggaatccagctcctgaatacacatggtttaaggatggcatccgtttgctagaaaatcccagacttggctcccaaagcaccaacagctcatacacaatgaatacaaaaactggaactctgcaatttaatactgtttccaaactggacactggagaatattcctgtgaagcccgcaattctgttggatatcgcaggtgtcctgggaaacgaatgcaagtagatgatctcaacataagtggcatcatagcagccgtagtagttgtggccttagtgatttccgtttgtggccttggtgtatgctatgctcagaggaaaggctacttttcaagaagagtaattcttcatctaaagccacgacaatgagtgaaaatgatttcaagcacacaaaatcctttataatttaaagactccactttagagatacaccaaagccaccgttgttacacaagttattaaactattataaaactctgctttgtccgacatttgcaaagaggtacacgaggaaatggaattggtatttcattttaattttcatgactactaactcacctgaacttgctattttaaacaaatagttctgtcgacacctaaaatataatctggcttcttgtgtctggactaagttaaaagaattaaaatactttgtaatgtc

SEQ ID NO: 11665 - protein, 279 aa, Homo sapiens
MARRSRHRLLLLLLRYLVVALGYHKAYGFSAPKDQQVVTAVEYQEAILACKTPKKTVSSRLEWKKLGRSVSFVYYQQTLQGDFKNRAEMIDFNIRIKNVTRSDAGKYRCEVSAPSEQGQNLEEDTVTLEVLVAPAVPSCEVPSSALSGTVVELRCQDKEGNPAPEYTWFKDGIRLLENPRLGSQSTNSSYTMNTKTGTLQFNTVSKLDTGEYSCEARNSVGYRRCPGKRMQVDDLNISGIIAAVVVVALVISVCGLGVCYAQRKGYFSRRVILHLKPRQ

SEQ ID NO: 11666 - DNA, 4005 bp, Homo sapiens
agccaacgaggggaagaaaggagttggggcaaaacaggaggcgtttccctacccgcatacatccccgtccccgagacacccaatccccccacccccagcctgcccgcgcctcccgcccccagctcctcgccctggggacagctggcagccccgcgcggaccagacacaaagccgatcaatcccggaggcgtgggggcggagggacgacccgccggggctttcccgggcgctgctctcctcctgctgccccctcgctaggacccggcggacgcctcgtctggttttcacgccctctagcccctacccccacacccccaaaacagaacagacccccatccctgggctggaggacccgcctcttggcagccagctgagaaggcgccccggggagggggaaactgacatcccatctagagccgtccctcctcttcctcccctcccgactctctgctcctttcccgccccagaagttcaagggcccccggcctcctgcgctcctgccgccgggaccctcgacctcctcagagcagccggctgccgccccgggaagatggcgaggaggagccgccaccgcctcctcctgctgctgctgcgctacctggtggtcgccctgggctatcataaggcctatgggttttctgccccaaaagaccaacaagtagtcacagcagtagagtaccaagaggctattttagcctgcaaaaccccaaagaagactgtttcctccagattagagtggaagaaactgggtcggagtgtctcctttgtctactatcaacagactcttcaaggtgattttaaaaatcgagctgagatgatagatttcaatatccggatcaaaaatgtgacaagaagtgatgcggggaaatatcgttgtgaagttagtgccccatctgagcaaggccaaaacctggaagaggatacagtcactctggaagtattagtggctccagcagttccatcatgtgaagtaccctcttctgctctgagtggaactgtggtagagctacgatgtcaagacaaagaagggaatccagctcctgaatacacatggtttaaggatggcatccgtttgctagaaaatcccagacttggctcccaaagcaccaacagctcatacacaatgaatacaaaaactggaactctgcaatttaatactgtttccaaactggacactggagaatattcctgtgaagcccgcaattctgttggatatcgcaggtgtcctgggaaacgaatgcaagtagatgatctcaacataagtggcatcatagcagccgtagtagttgtggccttagtgatttccgtttgtggccttggtgtatgctatgctcagaggaaaggctacttttcaaaagaaacctccttccagaagagtaattcttcatctaaagccacgacaatgagtgaaaatgatttcaagcacacaaaatcctttataatttaaagactccactttagagatacaccaaagccaccgttgttacacaagttattaaactattataaaactctgctttgtccgacatttgcaaagaggtacacgaggaaatggaattggtatttcattttaattttcatgactactaactcacctgaacttgctattttaaacaaatagttctgtcgacacctaaaatataatctggcttcttgtgtctggactaagttaaaagaattaaaatactttgtaatgtcctgggctttgggaaatgttaaccacgtcctaacttctagagaacgttactaaaatataacatactgattgtgaagtcaatccacaggtcatgaaaatataaatcagactctgcacgagagtctgatttagggggtccaacaaatactctgacagatgcaaaaggaacctctggtctcatttctgccagaatcctcttttctcccctaatatcatccttattctgatgctcgttcatcactaacacacccacagaaaggaggaagcgggatgggtcttatgcccaaggatttgcactttgtgtttacttccattcctgggaactaaaagcaacatcaaaagaaatgcctaatggctggagcccacaggtgtgcaccacaggatttgcctggtgtgtgtcactgatttcttcattaaacgtaatttagatggtcaaacacaaacccaagtggcttatttcacccctactgctgcttgccactgcttccttcttgtaagatttctttgaagaggatcagtgactttgacatcagaactcaccactggagcctacacaagtttgcagatacctttccctgcaggagtggtgacttcacatctttctgtctctaaaaattgtgcagtgacattccgggccaagtcccttagtcaggggttgacaattctgcttttggacaaggagggatgtggagggaagaagtaatagtctaccaggaaaatgagacgaaaaagctcagtatgactccctgcatctggtacccctcttgaaacacagtgggcacatgagcaatggctcaaacgaaaagtggatctaatgtgggtttctcaaccgatgaaccacaaaagcttccagctactattacaatgtgaaaattccaatgatccgtttaccagagcaattagactatgttaaaaattcatatcatttgtaacttcttttaattactgaattgatattaaaaacaaaatatggctagggcatgtcctattcttctgggcaaatgtggatgaaaaggtcacttgctacctttgacaactatgaacatgatggttaatcttctttctttttttttttttttttttgagacggagtctcactctgtcgcccaggctggagtacagtggcacaatcttggctcactgcaacctccgcctcccctccgcctcccagattcaagcacttctcctgcctcagcctcccaagtagctgagattataggcgtgtaccaccacacctggctaatttttgtattttagtagagaagggtttcaccatgttggccaggctggtctcaaacctctgacctcaaatgatccacccccatcagcctcccaaagtgctgggattataggcatgagccactgcactgggcaggttaatcttctttcaaaagagtctgctctttctacccaattggcgaagcaaatccccaggattcaccgaacaaatggattaagcacccactgagtgcctagcatgtgcctggacaccaggccaccgggaagatgctccccctttgacttgtctatgacatgctatgtctctcaccagatcccttcctggaggtcgggcttctgtaacatggctctgcccccaaaataaaattttcaccacgagtcagggatcggcaaacattttctgtaaagagccagaaagtagatattttaagtcataaggtccctgttaacaactacttgactctgccattgtagcacaaaggcagccacagacaaaacaagcaagtagtcatgtctgtgttccaataagactttatttacaaaaacagcaggcacagacaagatttggcccacaggcatagattcccaactcatggtggtgaagtacagaaaaaaacacctgtctacaagcttttgtaagaaatcaggctaaatgttacctatgttttggttggaagatttctttggtttgaggaatgctttcctcttgcattggcatgccaagaggatagatgactctgaaagacgcctcttcagacatacctgtcatcacacaagatcaacttcttcagtttaaatgacacaaatccatattgtggaaggaaaatatgtagtgccttagcttcactaatagttgtaaaacttctttttaagacatcaaaggctagaggattcattttatgcagtgcgaacatctaataacactctctgtgtcaaatatatattgtacattaccttaaactattgtaatagctaggtaaaaatccttgtataaaagaatgttttcccccacacaaagggcagagtattgagcactaatttcctattaaaagtatatatatgtatctgtg

SEQ ID NO: 11667 - protein, 298 aa, Homo sapiens; identical to SEQ ID NO: 1932

SEQ ID NO: 11668 - DNA, 3989 bp, Homo sapiens
agccaacgaggggaagaaaggagttggggcaaaacaggaggcgtttccctacccgcatacatccccgtccccgagacacccaatccccccacccccagcctgcccgcgcctcccgcccccagctcctcgccctggggacagctggcagccccgcgcggaccagacacaaagccgatcaatcccggaggcgtgggggcggagggacgacccgccggggctttcccgggcgctgctctcctcctgctgccccctcgctaggacccggcggacgcctcgtctggttttcacgccctctagcccctacccccacacccccaaaacagaacagacccccatccctgggctggaggacccgcctcttggcagccagctgagaaggcgccccggggagggggaaactgacatcccatctagagccgtccctcctcttcctcccctcccgactctctgctcctttcccgccccagaagttcaagggcccccggcctcctgcgctcctgccgccgggaccctcgacctcctcagagcagccggctgccgccccgggaagatggcgaggaggagccgccaccgcctcctcctgctgctgctgcgctacctggtggtcgccctgggctatcataaggcctatgggttttctgccccaaaagaccaacaagtagtcacagcagtagagtaccaagaggctattttagcctgcaaaaccccaaagaagactgtttcctccagattagagtggaagaaactgggtcggagtgtctcctttgtctactatcaacagactcttcaaggtgattttaaaaatcgagctgagatgatagatttcaatatccggatcaaaaatgtgacaagaagtgatgcggggaaatatcgttgtgaagttagtgccccatctgagcaaggccaaaacctggaagaggatacagtcactctggaagtattagtggctccagcagttccatcatgtgaagtaccctcttctgctctgagtggaactgtggtagagctacgatgtcaagacaaagaagggaatccagctcctgaatacacatggtttaaggatggcatccgtttgctagaaaatcccagacttggctcccaaagcaccaacagctcatacacaatgaatacaaaaactggaactctgcaatttaatactgtttccaaactggacactggagaatattcctgtgaagcccgcaattctgttggatatcgcaggtgtcctgggaaacgaatgcaagtagatgatctcaacataagtggcatcatagcagccgtagtagttgtggccttagtgatttccgtttgtggccttggtgtatgctatgctcagaggaaaggctacttttcaagaagagtaattcttcatctaaagccacgacaatgagtgaaaatgatttcaagcacacaaaatcctttataatttaaagactccactttagagatacaccaaagccaccgttgttacacaagttattaaactattataaaactctgctttgtccgacatttgcaaagaggtacacgaggaaatggaattggtatttcattttaattttcatgactactaactcacctgaacttgctattttaaacaaatagttctgtcgacacctaaaatataatctggcttcttgtgtctggactaagttaaaagaattaaaatactttgtaatgtcctgggctttgggaaatgttaaccacgtcctaacttctagagaacgttactaaaatataacatactgattgtgaagtcaatccacaggtcatgaaaatataaatcagactctgcacgagagtctgatttagggggtccaacaaatactctgacagatgcaaaaggaacctctggtctcatttctgccagaatcctcttttctcccctaatatcatccttattctgatgctcgttcatcactaacacacccacagaaaggaggaagcgggatgggtcttatgcccaaggatttgcactttgtgtttacttccattcctgggaactaaaagcaacatcaaaagaaatgcctaatggctggagcccacaggtgtgcaccacaggatttgcctggtgtgtgtcactgatttcttcattaaacgtaatttagatggtcaaacacaaacccaagtggcttatttcacccctactgctgcttgccactgcttccttcttgtaagatttctttgaagaggatcagtgactttgacatcagaactcaccactggagcctacacaagtttgcagatacctttccctgcaggagtggtgacttcacatctttctgtctctaaaaattgtgcagtgacattccgggccaagtcccttagtcaggggttgacaattctgcttttggacaaggagggatgtggagggaagaagtaatagtctaccaggaaaatgagacgaaaaagctcagtatgactccctgcatctggtacccctcttgaaacacagtgggcacatgagcaatggctcaaacgaaaagtggatctaatgtgggtttctcaaccgatgaaccacaaaagcttccagctactattacaatgtgaaaattccaatgatccgtttaccagagcaattagactatgttaaaaattcatatcatttgtaacttcttttaattactgaattgatattaaaaacaaaatatggctagggcatgtcctattcttctgggcaaatgtggatgaaaaggtcacttgctacctttgacaactatgaacatgatggttaatcttctttctttttttttttttttttttgagacggagtctcactctgtcgcccaggctggagtacagtggcacaatcttggctcactgcaacctccgcctcccctccgcctcccagattcaagcacttctcctgcctcagcctcccaagtagctgagattataggcgtgtaccaccacacctggctaatttttgtattttagtagagaagggtttcaccatgttggccaggctggtctcaaacctctgacctcaaatgatccacccccatcagcctcccaaagtgctgggattataggcatgagccactgcactgggcaggttaatcttctttcaaaagagtctgctctttctacccaattggcgaagcaaatccccaggattcaccgaacaaatggattaagcacccactgagtgcctagcatgtgcctggacaccaggccaccgggaagatgctccccctttgacttgtctatgacatgctatgtctctcaccagatcccttcctggaggtcgggcttctgtaacatggctctgcccccaaaataaaattttcaccacgagtcagggatcggcaaacattttctgtaaagagccagaaagtagatattttaagtcataaggtccctgttaacaactacttgactctgccattgtagcacaaaggcagccacagacaaaacaagcaagtagtcatgtctgtgttccaataagactttatttacaaaaacagcaggcacagacaagatttggcccacaggcatagattcccaactcatggtggtgaagtacagaaaaaaacacctgtctacaagcttttgtaagaaatcaggctaaatgttacctatgttttggttggaagatttctttggtttgaggaatgctttcctcttgcattggcatgccaagaggatagatgactctgaaagacgcctcttcagacatacctgtcatcacacaagatcaacttcttcagtttaaatgacacaaatccatattgtggaaggaaaatatgtagtgccttagcttcactaatagttgtaaaacttctttttaagacatcaaaggctagaggattcattttatgcagtgcgaacatctaataacactctctgtgtcaaatatatattgtacattaccttaaactattgtaatagctaggtaaaaatccttgtataaaagaatgttttcccccacacaaagggcagagtattgagcactaatttcctattaaaagtatatatatgtatctgtg

SEQ ID NO: 11669 - protein, 279 aa, Homo sapiens; identical to SEQ ID NO: 11665

SEQ ID NO: 11670 - DNA, 4195 bp, Homo sapiens
agccaacgaggggaagaaaggagttggggcaaaacaggaggcgtttccctacccgcatacatccccgtccccgagacacccaatccccccacccccagcctgcccgcgcctcccgcccccagctcctcgccctggggacagctggcagccccgcgcggaccagacacaaagccgatcaatcccggaggcgtgggggcggagggacgacccgccggggctttcccgggcgctgctctcctcctgctgccccctcgctaggacccggcggacgcctcgtctggttttcacgccctctagcccctacccccacacccccaaaacagaacagacccccatccctgggctggaggacccgcctcttggcagccagctgagaaggcgccccggggagggggaaactgacatcccatctagagccgtccctcctcttcctcccctcccgactctctgctcctttcccgccccagaagttcaagggcccccggcctcctgcgctcctgccgccgggaccctcgacctcctcagagcagccggctgccgccccgggaagatggcgaggaggagccgccaccgcctcctcctgctgctgctgcgctacctggtggtcgccctgggctatcataaggcctatgggttttctgccccaaaagaccaacaagtagtcacagcagtagagtaccaagaggctattttagcctgcaaaaccccaaagaagactgtttcctccagattagagtggaagaaactgggtcggagtgtctcctttgtctactatcaacagactcttcaaggtgattttaaaaatcgagctgagatgatagatttcaatatccggatcaaaaatgtgacaagaagtgatgcggggaaatatcgttgtgaagttagtgccccatctgagcaaggccaaaacctggaagaggatacagtcactctggaagtattagtggctccagcagttccatcatgtgaagtaccctcttctgctctgagtggaactgtggtagagctacgatgtcaagacaaagaagggaatccagctcctgaatacacatggtttaaggatggcatccgtttgctagaaaatcccagacttggctcccaaagcaccaacagctcatacacaatgaatacaaaaactggaactctgcaatttaatactgtttccaaactggacactggagaatattcctgtgaagcccgcaattctgttggatatcgcaggtgtcctgggaaacgaatgcaagtagatgatctcaacataagtggcatcatagcagccgtagtagttgtggccttagtgatttccgtttgtggccttggtgtatgctatgctcagaggaaaggctacttttcaagtaaatctggcagacctaactttggctctatgggcgtagagagaagatggatgacaaactatctgaggctatggcagctgggagtggagaagatatactgaagccatggcttcagacagtttgtcatctcctaattcctttgaagaatcatctgccattgacttcctgttcccagatttctggctcaatcctggtctctcagtctcgaagagtaattcttcatctaaagccacgacaatgagtgaaaatgatttcaagcacacaaaatcctttataatttaaagactccactttagagatacaccaaagccaccgttgttacacaagttattaaactattataaaactctgctttgtccgacatttgcaaagaggtacacgaggaaatggaattggtatttcattttaattttcatgactactaactcacctgaacttgctattttaaacaaatagttctgtcgacacctaaaatataatctggcttcttgtgtctggactaagttaaaagaattaaaatactttgtaatgtcctgggctttgggaaatgttaaccacgtcctaacttctagagaacgttactaaaatataacatactgattgtgaagtcaatccacaggtcatgaaaatataaatcagactctgcacgagagtctgatttagggggtccaacaaatactctgacagatgcaaaaggaacctctggtctcatttctgccagaatcctcttttctcccctaatatcatccttattctgatgctcgttcatcactaacacacccacagaaaggaggaagcgggatgggtcttatgcccaaggatttgcactttgtgtttacttccattcctgggaactaaaagcaacatcaaaagaaatgcctaatggctggagcccacaggtgtgcaccacaggatttgcctggtgtgtgtcactgatttcttcattaaacgtaatttagatggtcaaacacaaacccaagtggcttatttcacccctactgctgcttgccactgcttccttcttgtaagatttctttgaagaggatcagtgactttgacatcagaactcaccactggagcctacacaagtttgcagatacctttccctgcaggagtggtgacttcacatctttctgtctctaaaaattgtgcagtgacattccgggccaagtcccttagtcaggggttgacaattctgcttttggacaaggagggatgtggagggaagaagtaatagtctaccaggaaaatgagacgaaaaagctcagtatgactccctgcatctggtacccctcttgaaacacagtgggcacatgagcaatggctcaaacgaaaagtggatctaatgtgggtttctcaaccgatgaaccacaaaagcttccagctactattacaatgtgaaaattccaatgatccgtttaccagagcaattagactatgttaaaaattcatatcatttgtaacttcttttaattactgaattgatattaaaaacaaaatatggctagggcatgtcctattcttctgggcaaatgtggatgaaaaggtcacttgctacctttgacaactatgaacatgatggttaatcttctttctttttttttttttttttttgagacggagtctcactctgtcgcccaggctggagtacagtggcacaatcttggctcactgcaacctccgcctcccctccgcctcccagattcaagcacttctcctgcctcagcctcccaagtagctgagattataggcgtgtaccaccacacctggctaatttttgtattttagtagagaagggtttcaccatgttggccaggctggtctcaaacctctgacctcaaatgatccacccccatcagcctcccaaagtgctgggattataggcatgagccactgcactgggcaggttaatcttctttcaaaagagtctgctctttctacccaattggcgaagcaaatccccaggattcaccgaacaaatggattaagcacccactgagtgcctagcatgtgcctggacaccaggccaccgggaagatgctccccctttgacttgtctatgacatgctatgtctctcaccagatcccttcctggaggtcgggcttctgtaacatggctctgcccccaaaataaaattttcaccacgagtcagggatcggcaaacattttctgtaaagagccagaaagtagatattttaagtcataaggtccctgttaacaactacttgactctgccattgtagcacaaaggcagccacagacaaaacaagcaagtagtcatgtctgtgttccaataagactttatttacaaaaacagcaggcacagacaagatttggcccacaggcatagattcccaactcatggtggtgaagtacagaaaaaaacacctgtctacaagcttttgtaagaaatcaggctaaatgttacctatgttttggttggaagatttctttggtttgaggaatgctttcctcttgcattggcatgccaagaggatagatgactctgaaagacgcctcttcagacatacctgtcatcacacaagatcaacttcttcagtttaaatgacacaaatccatattgtggaaggaaaatatgtagtgccttagcttcactaatagttgtaaaacttctttttaagacatcaaaggctagaggattcattttatgcagtgcgaacatctaataacactctctgtgtcaaatatatattgtacattaccttaaactattgtaatagctaggtaaaaatccttgtataaaagaatgttttcccccacacaaagggcagagtattgagcactaatttcctattaaaagtatatatatgtatctgtg

SEQ ID NO: 11671 - protein, 301 aa, Homo sapiens
MARRSRHRLLLLLLRYLVVALGYHKAYGFSAPKDQQVVTAVEYQEAILACKTPKKTVSSRLEWKKLGRSVSFVYYQQTLQGDFKNRAEMIDFNIRIKNVTRSDAGKYRCEVSAPSEQGQNLEEDTVTLEVLVAPAVPSCEVPSSALSGTVVELRCQDKEGNPAPEYTWFKDGIRLLENPRLGSQSTNSSYTMNTKTGTLQFNTVSKLDTGEYSCEARNSVGYRRCPGKRMQVDDLNISGIIAAVVVVALVISVCGLGVCYAQRKGYFSSKSGRPNFGSMGVERRWMTNYLRLWQLGVEKIY

SEQ ID NO: 11672 - DNA, 3950 bp, Homo sapiens
agccaacgaggggaagaaaggagttggggcaaaacaggaggcgtttccctacccgcatacatccccgtccccgagacacccaatccccccacccccagcctgcccgcgcctcccgcccccagctcctcgccctggggacagctggcagccccgcgcggaccagacacaaagccgatcaatcccggaggcgtgggggcggagggacgacccgccggggctttcccgggcgctgctctcctcctgctgccccctcgctaggacccggcggacgcctcgtctggttttcacgccctctagcccctacccccacacccccaaaacagaacagacccccatccctgggctggaggacccgcctcttggcagccagctgagaaggcgccccggggagggggaaactgacatcccatctagagccgtccctcctcttcctcccctcccgactctctgctcctttcccgccccagaagttcaagggcccccggcctcctgcgctcctgccgccgggaccctcgacctcctcagagcagccggctgccgccccgggaagatggcgaggaggagccgccaccgcctcctcctgctgctgctgcgctacctggtggtcgccctgggctatcataaggcctatgggttttctgccccaaaagaccaacaagtagtcacagcagtagagtaccaagaggctattttagcctgcaaaaccccaaagaagactgtttcctccagattagagtggaagaaactgggtcggagtgtctcctttgtctactatcaacagactcttcaaggtgattttaaaaatcgagctgagatgatagatttcaatatccggatcaaaaatgtgacaagaagtgatgcggggaaatatcgttgtgaagttagtgccccatctgagcaaggccaaaacctggaagaggatacagtcactctggaagtattagtggctccagcagttccatcatgtgaagtaccctcttctgctctgagtggaactgtggtagagctacgatgtcaagacaaagaagggaatccagctcctgaatacacatggtttaaggatggcatccgtttgctagaaaatcccagacttggctcccaaagcaccaacagctcatacacaatgaatacaaaaactggaactctgcaatttaatactgtttccaaactggacactggagaatattcctgtgaagcccgcaattctgttggatatcgcaggtgtcctgggaaacgaatgcaagtagatgatctcaacataagtggcatcatagcagccgtagtagttgtggccttagtgatttccgtttgtggccttggtgtatgctatgctcagaggaaaggctacttttcaagtaagatttcaagcacacaaaatcctttataatttaaagactccactttagagatacaccaaagccaccgttgttacacaagttattaaactattataaaactctgctttgtccgacatttgcaaagaggtacacgaggaaatggaattggtatttcattttaattttcatgactactaactcacctgaacttgctattttaaacaaatagttctgtcgacacctaaaatataatctggcttcttgtgtctggactaagttaaaagaattaaaatactttgtaatgtcctgggctttgggaaatgttaaccacgtcctaacttctagagaacgttactaaaatataacatactgattgtgaagtcaatccacaggtcatgaaaatataaatcagactctgcacgagagtctgatttagggggtccaacaaatactctgacagatgcaaaaggaacctctggtctcatttctgccagaatcctcttttctcccctaatatcatccttattctgatgctcgttcatcactaacacacccacagaaaggaggaagcgggatgggtcttatgcccaaggatttgcactttgtgtttacttccattcctgggaactaaaagcaacatcaaaagaaatgcctaatggctggagcccacaggtgtgcaccacaggatttgcctggtgtgtgtcactgatttcttcattaaacgtaatttagatggtcaaacacaaacccaagtggcttatttcacccctactgctgcttgccactgcttccttcttgtaagatttctttgaagaggatcagtgactttgacatcagaactcaccactggagcctacacaagtttgcagatacctttccctgcaggagtggtgacttcacatctttctgtctctaaaaattgtgcagtgacattccgggccaagtcccttagtcaggggttgacaattctgcttttggacaaggagggatgtggagggaagaagtaatagtctaccaggaaaatgagacgaaaaagctcagtatgactccctgcatctggtacccctcttgaaacacagtgggcacatgagcaatggctcaaacgaaaagtggatctaatgtgggtttctcaaccgatgaaccacaaaagcttccagctactattacaatgtgaaaattccaatgatccgtttaccagagcaattagactatgttaaaaattcatatcatttgtaacttcttttaattactgaattgatattaaaaacaaaatatggctagggcatgtcctattcttctgggcaaatgtggatgaaaaggtcacttgctacctttgacaactatgaacatgatggttaatcttctttctttttttttttttttttttgagacggagtctcactctgtcgcccaggctggagtacagtggcacaatcttggctcactgcaacctccgcctcccctccgcctcccagattcaagcacttctcctgcctcagcctcccaagtagctgagattataggcgtgtaccaccacacctggctaatttttgtattttagtagagaagggtttcaccatgttggccaggctggtctcaaacctctgacctcaaatgatccacccccatcagcctcccaaagtgctgggattataggcatgagccactgcactgggcaggttaatcttctttcaaaagagtctgctctttctacccaattggcgaagcaaatccccaggattcaccgaacaaatggattaagcacccactgagtgcctagcatgtgcctggacaccaggccaccgggaagatgctccccctttgacttgtctatgacatgctatgtctctcaccagatcccttcctggaggtcgggcttctgtaacatggctctgcccccaaaataaaattttcaccacgagtcagggatcggcaaacattttctgtaaagagccagaaagtagatattttaagtcataaggtccctgttaacaactacttgactctgccattgtagcacaaaggcagccacagacaaaacaagcaagtagtcatgtctgtgttccaataagactttatttacaaaaacagcaggcacagacaagatttggcccacaggcatagattcccaactcatggtggtgaagtacagaaaaaaacacctgtctacaagcttttgtaagaaatcaggctaaatgttacctatgttttggttggaagatttctttggtttgaggaatgctttcctcttgcattggcatgccaagaggatagatgactctgaaagacgcctcttcagacatacctgtcatcacacaagatcaacttcttcagtttaaatgacacaaatccatattgtggaaggaaaatatgtagtgccttagcttcactaatagttgtaaaacttctttttaagacatcaaaggctagaggattcattttatgcagtgcgaacatctaataacactctctgtgtcaaatatatattgtacattaccttaaactattgtaatagctaggtaaaaatccttgtataaaagaatgttttcccccacacaaagggcagagtattgagcactaatttcctattaaaagtatatatatgtatctgtg

SEQ ID NO: 11673 - protein, 278 aa, Homo sapiens
MARRSRHRLLLLLLRYLVVALGYHKAYGFSAPKDQQVVTAVEYQEAILACKTPKKTVSSRLEWKKLGRSVSFVYYQQTLQGDFKNRAEMIDFNIRIKNVTRSDAGKYRCEVSAPSEQGQNLEEDTVTLEVLVAPAVPSCEVPSSALSGTVVELRCQDKEGNPAPEYTWFKDGIRLLENPRLGSQSTNSSYTMNTKTGTLQFNTVSKLDTGEYSCEARNSVGYRRCPGKRMQVDDLNISGIIAAVVVVALVISVCGLGVCYAQRKGYFSSKISSTQNPL

SEQ ID NO: 11674 - DNA, 4644 bp, Homo sapiens
agccaacgaggggaagaaaggagttggggcaaaacaggaggcgtttccctacccgcatacatccccgtccccgagacacccaatccccccacccccagcctgcccgcgcctcccgcccccagctcctcgccctggggacagctggcagccccgcgcggaccagacacaaagccgatcaatcccggaggcgtgggggcggagggacgacccgccggggctttcccgggcgctgctctcctcctgctgccccctcgctaggacccggcggacgcctcgtctggttttcacgccctctagcccctacccccacacccccaaaacagaacagacccccatccctgggctggaggacccgcctcttggcagccagctgagaaggcgccccggggagggggaaactgacatcccatctagagccgtccctcctcttcctcccctcccgactctctgctcctttcccgccccagaagttcaagggcccccggcctcctgcgctcctgccgccgggaccctcgacctcctcagagcagccggctgccgccccgggaagatggcgaggaggagccgccaccgcctcctcctgctgctgctgcgctacctggtggtcgccctgggctatcataaggcctatgggttttctgccccaaaagaccaacaagtagtcacagcagtagagtaccaagaggctattttagcctgcaaaaccccaaagaagactgtttcctccagattagagtggaagaaactgggtcggagtgtctcctttgtctactatcaacagactcttcaaggtgattttaaaaatcgagctgagatgatagatttcaatatccggatcaaaaatgtgacaagaagtgatgcggggaaatatcgttgtgaagttagtgccccatctgagcaaggccaaaacctggaagaggatacagtcactctggaagtattagtggctccagcagttccatcatgtgaagtaccctcttctgctctgagtggaactgtggtagagctacgatgtcaagacaaagaagggaatccagctcctgaatacacatggtttaaggatggcatccgtttgctagaaaatcccagacttggctcccaaagcaccaacagctcatacacaatgaatacaaaaactggaactctgcaatttaatactgtttccaaactggacactggagaatattcctgtgaagcccgcaattctgttggatatcgcaggtgtcctgggaaacgaatgcaagtagatgatctcaacataagtggcatcatagcagccgtagtagttgtggccttagtgatttccgtttgtggccttggtgtatgctatgctcagaggaaaggctacttttcaagtaaatctggcagacctaactttggctctatgggcgtagagagaagatggatgacaaactatctgaggctatggcagctgggagtggagaagatatactgaagccatggcttcagacagtttgtcatctcctaattcctttgaagaatcatctgccattgacttcctgttcccagatttctggctcaatcctggtctctcagtctcgaagagtaattcttcatctaaagccacgacaatgagtgaaaatgatttcaagcacacaaaatcctttataatttaaagactccactttagagatacaccaaagccaccgttgttacacaagttattaaactattataaaactctgctttgtccgacatttgcaaagaggtacacgaggaaatggaattggtatttcattttaattttcatgactactaactcacctgaacttgctattttaaacaaatagttctgtcgacacctaaaatataatctggcttcttgtgtctggactaagttaaaagaattaaaatactttgtaatgtcctgggctttgggaaatgttaaccacgtcctaacttctagagaacgttactaaaatataacatactgattgtgaagtcaatccacaggtcatgaaaatataaatcagactctgcacgagagtctgatttagggggtccaacaaatactctgacagatgcaaaaggaacctctggtctcatttctgccagaatcctcttttctcccctaatatcatccttattctgatgctcgttcatcactaacacacccacagaaaggaggaagcgggatgggtcttatgcccaaggatttgcactttgtgtttacttccattcctgggaactaaaagcaacatcaaaagaaatgcctaatggctggagcccacaggtgtgcaccacaggatttgcctggtgtgtgtcactgatttcttcattaaacgtaatttagatggtcaaacacaaacccaagtggcttatttcacccctactgctgcttgccactgcttccttcttgtaagatttctttgaagaggatcagtgactttgacatcagaactcaccactggagcctacacaagtttgcagatacctttccctgcaggagtggtgacttcacatctttctgtctctaaaaattgtgcagtgacattccgggccaagtcccttagtcaggggttgacaattctgcttttggacaaggagggatgtggagggaagaagtaatagtctaccaggaaaatgagacgaaaaagctcagtatgactccctgcatctggtacccctcttgaaacacagtgggcacatgagcaatggctcaaacgaaaagtggatctaatgtgggtttctcaaccgatgaaccacaaaagcttccagctactattacaatgtgaaaattccaatgatccgtttaccagagcaattagactatgttaaaaattcatatcatttgtaacttcttttaattactgaattgatattaaaaacaaaatatggctagggcatgtcctattcttctgggcaaatgtggatgaaaaggtcacttgctacctttgacaactatgaacatgatggttaatcttctttctttttttttttttttttttgagacggagtctcactctgtcgcccaggctggagtacagtggcacaatcttggctcactgcaacctccgcctcccctccgcctcccagattcaagcacttctcctgcctcagcctcccaagtagctgagattataggcgtgtaccaccacacctggctaatttttgtattttagtagagaagggtttcaccatgttggccaggctggtctcaaacctctgacctcaaatgatccacccccatcagcctcccaaagtgctgggattataggcatgagccactgcactgggcaggttaatcttctttcaaaagagtctgctctttctacccaattggcgaagcaaatccccaggattcaccgaacaaatggattaagcacccactgagtgcctagcatgtgcctggacaccaggccaccgggaagatgctccccctttgacttgtctatgacatgctatgtctctcaccagatcccttcctggaggtcgggcttctgtaacatggctctgcccccaaaataaaattttcaccacgagtcagggatcggcaaacattttctgtaaagagccagaaagtagatattttaagtcataaggtccctgttaacaactacttgactctgccattgtagcacaaaggcagccacagacaaaacaagcaagtagtcatgtctgtgttccaataagactttatttacaaaaacagcaggcacagacaagatttggcccacaggcatagattcccaactcatggtggtgaagtacagaaaaaaacacctgtctacaagcttttgtaagaaatcaggctaaatgttacctatgttttggttggaagatttctttggtttgaggaatgctttcctcttgcattggcatgccaagaggatagatgactctgaaagacgcctcttcagacatacctgtcatcacacaagatcaacttcttcagtttaaatgacacaaatccatattgtggaaggaaaatatgtagtgccttagcttcactaatagttgtaaaacttctttttaagacatcaaaggctagaggattcattttatgcagtgcgaacatctaataacactctctgtgtcaaatatatattgtacattaccttaaactattgtaatagctaggtaaaaatccttgtataaaagaatgttttcccccacacaaagggcagagtattgagcactaatttcctattaaaagtatatatatgtatctgtgggtcactggtgtccagacttgtatttgcatttgtgtttacttgaggaacttgaacactaacaactggtaaaatcccattgtaattcttacagcattttgactttattttcctgcagtgaattgtgttgtgtaaagattagggctttaaaatcttattagcaagctttgttttgttttaattattgttgctgttgtaactagatttaatttatttttagttggaggtttgacctaagtctggaccaattgattgcttttcaatacaactttgcaaagaacttcctttttccacaggtggctttgttcgattaaagtctacactaataaaaatagctgaacttgttaaactttttagccccatataacagtgcagggaaagagtcatccacctattgttattcataaaacccaggaaactacaccctcttaccttctgtagctacaaggct

SEQ ID NO: 11675 - protein, 301 aa, Homo sapiens; identical to SEQ ID NO: 11671

SEQ ID NO: 11676 - DNA, 4454 bp, Homo sapiens
agccaacgaggggaagaaaggagttggggcaaaacaggaggcgtttccctacccgcatacatccccgtccccgagacacccaatccccccacccccagcctgcccgcgcctcccgcccccagctcctcgccctggggacagctggcagccccgcgcggaccagacacaaagccgatcaatcccggaggcgtgggggcggagggacgacccgccggggctttcccgggcgctgctctcctcctgctgccccctcgctaggacccggcggacgcctcgtctggttttcacgccctctagcccctacccccacacccccaaaacagaacagacccccatccctgggctggaggacccgcctcttggcagccagctgagaaggcgccccggggagggggaaactgacatcccatctagagccgtccctcctcttcctcccctcccgactctctgctcctttcccgccccagaagttcaagggcccccggcctcctgcgctcctgccgccgggaccctcgacctcctcagagcagccggctgccgccccgggaagatggcgaggaggagccgccaccgcctcctcctgctgctgctgcgctacctggtggtcgccctgggctatcataaggcctatgggttttctgccccaaaagaccaacaagtagtcacagcagtagagtaccaagaggctattttagcctgcaaaaccccaaagaagactgtttcctccagattagagtggaagaaactgggtcggagtgtctcctttgtctactatcaacagactcttcaaggtgattttaaaaatcgagctgagatgatagatttcaatatccggatcaaaaatgtgacaagaagtgatgcggggaaatatcgttgtgaagttagtgccccatctgagcaaggccaaaacctggaagaggatacagtcactctggaagtattagtggctccagcagttccatcatgtgaagtaccctcttctgctctgagtggaactgtggtagagctacgatgtcaagacaaagaagggaatccagctcctgaatacacatggtttaaggatggcatccgtttgctagaaaatcccagacttggctcccaaagcaccaacagctcatacacaatgaatacaaaaactggaactctgcaatttaatactgtttccaaactggacactggagaatattcctgtgaagcccgcaattctgttggatatcgcaggtgtcctgggaaacgaatgcaagtagatgatctcaacataagtggcatcatagcagccgtagtagttgtggccttagtgatttccgtttgtggccttggtgtatgctatgctcagaggaaaggctacttttcaaaagaaacctccttccagaagagtaattcttcatctaaagccacgacaatgagtgaaaatgatttcaagcacacaaaatcctttataatttaaagactccactttagagatacaccaaagccaccgttgttacacaagttattaaactattataaaactctgctttgtccgacatttgcaaagaggtacacgaggaaatggaattggtatttcattttaattttcatgactactaactcacctgaacttgctattttaaacaaatagttctgtcgacacctaaaatataatctggcttcttgtgtctggactaagttaaaagaattaaaatactttgtaatgtcctgggctttgggaaatgttaaccacgtcctaacttctagagaacgttactaaaatataacatactgattgtgaagtcaatccacaggtcatgaaaatataaatcagactctgcacgagagtctgatttagggggtccaacaaatactctgacagatgcaaaaggaacctctggtctcatttctgccagaatcctcttttctcccctaatatcatccttattctgatgctcgttcatcactaacacacccacagaaaggaggaagcgggatgggtcttatgcccaaggatttgcactttgtgtttacttccattcctgggaactaaaagcaacatcaaaagaaatgcctaatggctggagcccacaggtgtgcaccacaggatttgcctggtgtgtgtcactgatttcttcattaaacgtaatttagatggtcaaacacaaacccaagtggcttatttcacccctactgctgcttgccactgcttccttcttgtaagatttctttgaagaggatcagtgactttgacatcagaactcaccactggagcctacacaagtttgcagatacctttccctgcaggagtggtgacttcacatctttctgtctctaaaaattgtgcagtgacattccgggccaagtcccttagtcaggggttgacaattctgcttttggacaaggagggatgtggagggaagaagtaatagtctaccaggaaaatgagacgaaaaagctcagtatgactccctgcatctggtacccctcttgaaacacagtgggcacatgagcaatggctcaaacgaaaagtggatctaatgtgggtttctcaaccgatgaaccacaaaagcttccagctactattacaatgtgaaaattccaatgatccgtttaccagagcaattagactatgttaaaaattcatatcatttgtaacttcttttaattactgaattgatattaaaaacaaaatatggctagggcatgtcctattcttctgggcaaatgtggatgaaaaggtcacttgctacctttgacaactatgaacatgatggttaatcttctttctttttttttttttttttttgagacggagtctcactctgtcgcccaggctggagtacagtggcacaatcttggctcactgcaacctccgcctcccctccgcctcccagattcaagcacttctcctgcctcagcctcccaagtagctgagattataggcgtgtaccaccacacctggctaatttttgtattttagtagagaagggtttcaccatgttggccaggctggtctcaaacctctgacctcaaatgatccacccccatcagcctcccaaagtgctgggattataggcatgagccactgcactgggcaggttaatcttctttcaaaagagtctgctctttctacccaattggcgaagcaaatccccaggattcaccgaacaaatggattaagcacccactgagtgcctagcatgtgcctggacaccaggccaccgggaagatgctccccctttgacttgtctatgacatgctatgtctctcaccagatcccttcctggaggtcgggcttctgtaacatggctctgcccccaaaataaaattttcaccacgagtcagggatcggcaaacattttctgtaaagagccagaaagtagatattttaagtcataaggtccctgttaacaactacttgactctgccattgtagcacaaaggcagccacagacaaaacaagcaagtagtcatgtctgtgttccaataagactttatttacaaaaacagcaggcacagacaagatttggcccacaggcatagattcccaactcatggtggtgaagtacagaaaaaaacacctgtctacaagcttttgtaagaaatcaggctaaatgttacctatgttttggttggaagatttctttggtttgaggaatgctttcctcttgcattggcatgccaagaggatagatgactctgaaagacgcctcttcagacatacctgtcatcacacaagatcaacttcttcagtttaaatgacacaaatccatattgtggaaggaaaatatgtagtgccttagcttcactaatagttgtaaaacttctttttaagacatcaaaggctagaggattcattttatgcagtgcgaacatctaataacactctctgtgtcaaatatatattgtacattaccttaaactattgtaatagctaggtaaaaatccttgtataaaagaatgttttcccccacacaaagggcagagtattgagcactaatttcctattaaaagtatatatatgtatctgtgggtcactggtgtccagacttgtatttgcatttgtgtttacttgaggaacttgaacactaacaactggtaaaatcccattgtaattcttacagcattttgactttattttcctgcagtgaattgtgttgtgtaaagattagggctttaaaatcttattagcaagctttgttttgttttaattattgttgctgttgtaactagatttaatttatttttagttggaggtttgacctaagtctggaccaattgattgcttttcaatacaactttgcaaagaacttcctttttccacaggtggctttgttcgattaaagtctacactaataaaaatagctgaacttgttaaactttttagccccatataacagtgcagggaaagagtcatccacctattgttattcataaaacccaggaaactacaccctcttaccttctgtagctacaaggct

SEQ ID NO: 11677 - protein, 298 aa, Homo sapiens; identical to SEQ ID NO: 1932

SEQ ID NO: 11678 - DNA, 4438 bp, Homo sapiens
agccaacgaggggaagaaaggagttggggcaaaacaggaggcgtttccctacccgcatacatccccgtccccgagacacccaatccccccacccccagcctgcccgcgcctcccgcccccagctcctcgccctggggacagctggcagccccgcgcggaccagacacaaagccgatcaatcccggaggcgtgggggcggagggacgacccgccggggctttcccgggcgctgctctcctcctgctgccccctcgctaggacccggcggacgcctcgtctggttttcacgccctctagcccctacccccacacccccaaaacagaacagacccccatccctgggctggaggacccgcctcttggcagccagctgagaaggcgccccggggagggggaaactgacatcccatctagagccgtccctcctcttcctcccctcccgactctctgctcctttcccgccccagaagttcaagggcccccggcctcctgcgctcctgccgccgggaccctcgacctcctcagagcagccggctgccgccccgggaagatggcgaggaggagccgccaccgcctcctcctgctgctgctgcgctacctggtggtcgccctgggctatcataaggcctatgggttttctgccccaaaagaccaacaagtagtcacagcagtagagtaccaagaggctattttagcctgcaaaaccccaaagaagactgtttcctccagattagagtggaagaaactgggtcggagtgtctcctttgtctactatcaacagactcttcaaggtgattttaaaaatcgagctgagatgatagatttcaatatccggatcaaaaatgtgacaagaagtgatgcggggaaatatcgttgtgaagttagtgccccatctgagcaaggccaaaacctggaagaggatacagtcactctggaagtattagtggctccagcagttccatcatgtgaagtaccctcttctgctctgagtggaactgtggtagagctacgatgtcaagacaaagaagggaatccagctcctgaatacacatggtttaaggatggcatccgtttgctagaaaatcccagacttggctcccaaagcaccaacagctcatacacaatgaatacaaaaactggaactctgcaatttaatactgtttccaaactggacactggagaatattcctgtgaagcccgcaattctgttggatatcgcaggtgtcctgggaaacgaatgcaagtagatgatctcaacataagtggcatcatagcagccgtagtagttgtggccttagtgatttccgtttgtggccttggtgtatgctatgctcagaggaaaggctacttttcaagaagagtaattcttcatctaaagccacgacaatgagtgaaaatgatttcaagcacacaaaatcctttataatttaaagactccactttagagatacaccaaagccaccgttgttacacaagttattaaactattataaaactctgctttgtccgacatttgcaaagaggtacacgaggaaatggaattggtatttcattttaattttcatgactactaactcacctgaacttgctattttaaacaaatagttctgtcgacacctaaaatataatctggcttcttgtgtctggactaagttaaaagaattaaaatactttgtaatgtcctgggctttgggaaatgttaaccacgtcctaacttctagagaacgttactaaaatataacatactgattgtgaagtcaatccacaggtcatgaaaatataaatcagactctgcacgagagtctgatttagggggtccaacaaatactctgacagatgcaaaaggaacctctggtctcatttctgccagaatcctcttttctcccctaatatcatccttattctgatgctcgttcatcactaacacacccacagaaaggaggaagcgggatgggtcttatgcccaaggatttgcactttgtgtttacttccattcctgggaactaaaagcaacatcaaaagaaatgcctaatggctggagcccacaggtgtgcaccacaggatttgcctggtgtgtgtcactgatttcttcattaaacgtaatttagatggtcaaacacaaacccaagtggcttatttcacccctactgctgcttgccactgcttccttcttgtaagatttctttgaagaggatcagtgactttgacatcagaactcaccactggagcctacacaagtttgcagatacctttccctgcaggagtggtgacttcacatctttctgtctctaaaaattgtgcagtgacattccgggccaagtcccttagtcaggggttgacaattctgcttttggacaaggagggatgtggagggaagaagtaatagtctaccaggaaaatgagacgaaaaagctcagtatgactccctgcatctggtacccctcttgaaacacagtgggcacatgagcaatggctcaaacgaaaagtggatctaatgtgggtttctcaaccgatgaaccacaaaagcttccagctactattacaatgtgaaaattccaatgatccgtttaccagagcaattagactatgttaaaaattcatatcatttgtaacttcttttaattactgaattgatattaaaaacaaaatatggctagggcatgtcctattcttctgggcaaatgtggatgaaaaggtcacttgctacctttgacaactatgaacatgatggttaatcttctttctttttttttttttttttttgagacggagtctcactctgtcgcccaggctggagtacagtggcacaatcttggctcactgcaacctccgcctcccctccgcctcccagattcaagcacttctcctgcctcagcctcccaagtagctgagattataggcgtgtaccaccacacctggctaatttttgtattttagtagagaagggtttcaccatgttggccaggctggtctcaaacctctgacctcaaatgatccacccccatcagcctcccaaagtgctgggattataggcatgagccactgcactgggcaggttaatcttctttcaaaagagtctgctctttctacccaattggcgaagcaaatccccaggattcaccgaacaaatggattaagcacccactgagtgcctagcatgtgcctggacaccaggccaccgggaagatgctccccctttgacttgtctatgacatgctatgtctctcaccagatcccttcctggaggtcgggcttctgtaacatggctctgcccccaaaataaaattttcaccacgagtcagggatcggcaaacattttctgtaaagagccagaaagtagatattttaagtcataaggtccctgttaacaactacttgactctgccattgtagcacaaaggcagccacagacaaaacaagcaagtagtcatgtctgtgttccaataagactttatttacaaaaacagcaggcacagacaagatttggcccacaggcatagattcccaactcatggtggtgaagtacagaaaaaaacacctgtctacaagcttttgtaagaaatcaggctaaatgttacctatgttttggttggaagatttctttggtttgaggaatgctttcctcttgcattggcatgccaagaggatagatgactctgaaagacgcctcttcagacatacctgtcatcacacaagatcaacttcttcagtttaaatgacacaaatccatattgtggaaggaaaatatgtagtgccttagcttcactaatagttgtaaaacttctttttaagacatcaaaggctagaggattcattttatgcagtgcgaacatctaataacactctctgtgtcaaatatatattgtacattaccttaaactattgtaatagctaggtaaaaatccttgtataaaagaatgttttcccccacacaaagggcagagtattgagcactaatttcctattaaaagtatatatatgtatctgtgggtcactggtgtccagacttgtatttgcatttgtgtttacttgaggaacttgaacactaacaactggtaaaatcccattgtaattcttacagcattttgactttattttcctgcagtgaattgtgttgtgtaaagattagggctttaaaatcttattagcaagctttgttttgttttaattattgttgctgttgtaactagatttaatttatttttagttggaggtttgacctaagtctggaccaattgattgcttttcaatacaactttgcaaagaacttcctttttccacaggtggctttgttcgattaaagtctacactaataaaaatagctgaacttgttaaactttttagccccatataacagtgcagggaaagagtcatccacctattgttattcataaaacccaggaaactacaccctcttaccttctgtagctacaaggct

SEQ ID NO: 11679 - protein, 279 aa, Homo sapiens; identical to SEQ ID NO: 11665

SEQ ID NO: 11680 - DNA, 4399 bp, Homo sapiens
agccaacgaggggaagaaaggagttggggcaaaacaggaggcgtttccctacccgcatacatccccgtccccgagacacccaatccccccacccccagcctgcccgcgcctcccgcccccagctcctcgccctggggacagctggcagccccgcgcggaccagacacaaagccgatcaatcccggaggcgtgggggcggagggacgacccgccggggctttcccgggcgctgctctcctcctgctgccccctcgctaggacccggcggacgcctcgtctggttttcacgccctctagcccctacccccacacccccaaaacagaacagacccccatccctgggctggaggacccgcctcttggcagccagctgagaaggcgccccggggagggggaaactgacatcccatctagagccgtccctcctcttcctcccctcccgactctctgctcctttcccgccccagaagttcaagggcccccggcctcctgcgctcctgccgccgggaccctcgacctcctcagagcagccggctgccgccccgggaagatggcgaggaggagccgccaccgcctcctcctgctgctgctgcgctacctggtggtcgccctgggctatcataaggcctatgggttttctgccccaaaagaccaacaagtagtcacagcagtagagtaccaagaggctattttagcctgcaaaaccccaaagaagactgtttcctccagattagagtggaagaaactgggtcggagtgtctcctttgtctactatcaacagactcttcaaggtgattttaaaaatcgagctgagatgatagatttcaatatccggatcaaaaatgtgacaagaagtgatgcggggaaatatcgttgtgaagttagtgccccatctgagcaaggccaaaacctggaagaggatacagtcactctggaagtattagtggctccagcagttccatcatgtgaagtaccctcttctgctctgagtggaactgtggtagagctacgatgtcaagacaaagaagggaatccagctcctgaatacacatggtttaaggatggcatccgtttgctagaaaatcccagacttggctcccaaagcaccaacagctcatacacaatgaatacaaaaactggaactctgcaatttaatactgtttccaaactggacactggagaatattcctgtgaagcccgcaattctgttggatatcgcaggtgtcctgggaaacgaatgcaagtagatgatctcaacataagtggcatcatagcagccgtagtagttgtggccttagtgatttccgtttgtggccttggtgtatgctatgctcagaggaaaggctacttttcaagtaagatttcaagcacacaaaatcctttataatttaaagactccactttagagatacaccaaagccaccgttgttacacaagttattaaactattataaaactctgctttgtccgacatttgcaaagaggtacacgaggaaatggaattggtatttcattttaattttcatgactactaactcacctgaacttgctattttaaacaaatagttctgtcgacacctaaaatataatctggcttcttgtgtctggactaagttaaaagaattaaaatactttgtaatgtcctgggctttgggaaatgttaaccacgtcctaacttctagagaacgttactaaaatataacatactgattgtgaagtcaatccacaggtcatgaaaatataaatcagactctgcacgagagtctgatttagggggtccaacaaatactctgacagatgcaaaaggaacctctggtctcatttctgccagaatcctcttttctcccctaatatcatccttattctgatgctcgttcatcactaacacacccacagaaaggaggaagcgggatgggtcttatgcccaaggatttgcactttgtgtttacttccattcctgggaactaaaagcaacatcaaaagaaatgcctaatggctggagcccacaggtgtgcaccacaggatttgcctggtgtgtgtcactgatttcttcattaaacgtaatttagatggtcaaacacaaacccaagtggcttatttcacccctactgctgcttgccactgcttccttcttgtaagatttctttgaagaggatcagtgactttgacatcagaactcaccactggagcctacacaagtttgcagatacctttccctgcaggagtggtgacttcacatctttctgtctctaaaaattgtgcagtgacattccgggccaagtcccttagtcaggggttgacaattctgcttttggacaaggagggatgtggagggaagaagtaatagtctaccaggaaaatgagacgaaaaagctcagtatgactccctgcatctggtacccctcttgaaacacagtgggcacatgagcaatggctcaaacgaaaagtggatctaatgtgggtttctcaaccgatgaaccacaaaagcttccagctactattacaatgtgaaaattccaatgatccgtttaccagagcaattagactatgttaaaaattcatatcatttgtaacttcttttaattactgaattgatattaaaaacaaaatatggctagggcatgtcctattcttctgggcaaatgtggatgaaaaggtcacttgctacctttgacaactatgaacatgatggttaatcttctttctttttttttttttttttttgagacggagtctcactctgtcgcccaggctggagtacagtggcacaatcttggctcactgcaacctccgcctcccctccgcctcccagattcaagcacttctcctgcctcagcctcccaagtagctgagattataggcgtgtaccaccacacctggctaatttttgtattttagtagagaagggtttcaccatgttggccaggctggtctcaaacctctgacctcaaatgatccacccccatcagcctcccaaagtgctgggattataggcatgagccactgcactgggcaggttaatcttctttcaaaagagtctgctctttctacccaattggcgaagcaaatccccaggattcaccgaacaaatggattaagcacccactgagtgcctagcatgtgcctggacaccaggccaccgggaagatgctccccctttgacttgtctatgacatgctatgtctctcaccagatcccttcctggaggtcgggcttctgtaacatggctctgcccccaaaataaaattttcaccacgagtcagggatcggcaaacattttctgtaaagagccagaaagtagatattttaagtcataaggtccctgttaacaactacttgactctgccattgtagcacaaaggcagccacagacaaaacaagcaagtagtcatgtctgtgttccaataagactttatttacaaaaacagcaggcacagacaagatttggcccacaggcatagattcccaactcatggtggtgaagtacagaaaaaaacacctgtctacaagcttttgtaagaaatcaggctaaatgttacctatgttttggttggaagatttctttggtttgaggaatgctttcctcttgcattggcatgccaagaggatagatgactctgaaagacgcctcttcagacatacctgtcatcacacaagatcaacttcttcagtttaaatgacacaaatccatattgtggaaggaaaatatgtagtgccttagcttcactaatagttgtaaaacttctttttaagacatcaaaggctagaggattcattttatgcagtgcgaacatctaataacactctctgtgtcaaatatatattgtacattaccttaaactattgtaatagctaggtaaaaatccttgtataaaagaatgttttcccccacacaaagggcagagtattgagcactaatttcctattaaaagtatatatatgtatctgtgggtcactggtgtccagacttgtatttgcatttgtgtttacttgaggaacttgaacactaacaactggtaaaatcccattgtaattcttacagcattttgactttattttcctgcagtgaattgtgttgtgtaaagattagggctttaaaatcttattagcaagctttgttttgttttaattattgttgctgttgtaactagatttaatttatttttagttggaggtttgacctaagtctggaccaattgattgcttttcaatacaactttgcaaagaacttcctttttccacaggtggctttgttcgattaaagtctacactaataaaaatagctgaacttgttaaactttttagccccatataacagtgcagggaaagagtcatccacctattgttattcataaaacccaggaaactacaccctcttaccttctgtagctacaaggct

SEQ ID NO: 11681 - protein, 278 aa, Homo sapiens; identical to SEQ ID NO: 11673

SEQ ID NO: 11682 - DNA, 464 bp, Homo sapiens
aaaatattaaatgttaatatattaaattaaaagttagtaagtctctggtttgtgtattccacaaaaatctttagtatactagccacaagctacatttacgtgcacaaggcttcacactgatgttttgttgcatgactttctctgtgaatattgtctgtaaatataagaaattcagtaagaattgtctttttttctacctaagatatatgttcatgttcttgctgagaaaatgtatggaagtaaaattaactaaaagagcatatatgttccagattggaagtgataatgtagtaaatattgtcttttatattccacaaacaggaagagtaattcttcatctaaagccacgacaatgagtgaaaatgatttcaagcacacaaaatcctttataatttaaagactccactttagagatacaccaaagccaccgttgttacacaagttattaaactattataaaactc

SEQ ID NO: 11683 - protein, 78 aa, Homo sapiens
MFCCMTFSVNIVCKYKKFSKNCLFFYLRYMFMFLLRKCMEVKLTKRAYMFQIGSDNVVNIVFYIPQTGRVILHLKPRQ

SEQ ID NO: 11684 - DNA, 2726 bp, Homo sapiens
atgtatggaagtaaaattaactaaaagagcatatatgttccagattggaagtgataatgtagtaaatattgtcttttatattccacaaacaggaagagtaattcttcatctaaagccacgacaatgagtgaaaatgatttcaagcacacaaaatcctttataatttaaagactccactttagagatacaccaaagccaccgttgttacacaagttattaaactattataaaactctgctttgtccgacatttgcaaagaggtacacgaggaaatggaattggtatttcattttaattttcatgactactaactcacctgaacttgctattttaaacaaatagttctgtcgacacctaaaatataatctggcttcttgtgtctggactaagttaaaagaattaaaatactttgtaatgtcctgggctttgggaaatgttaaccacgtcctaacttctagagaacgttactaaaatataacatactgattgtgaagtcaatccacaggtcatgaaaatataaatcagactctgcacgagagtctgatttagggggtccaacaaatactctgacagatgcaaaaggaacctctggtctcatttctgccagaatcctcttttctcccctaatatcatccttattctgatgctcgttcatcactaacacacccacagaaaggaggaagcgggatgggtcttatgcccaaggatttgcactttgtgtttacttccattcctgggaactaaaagcaacatcaaaagaaatgcctaatggctggagcccacaggtgtgcaccacaggatttgcctggtgtgtgtcactgatttcttcattaaacgtaatttagatggtcaaacacaaacccaagtggcttatttcacccctactgctgcttgccactgcttccttcttgtaagatttctttgaagaggatcagtgactttgacatcagaactcaccactggagcctacacaagtttgcagatacctttccctgcaggagtggtgacttcacatctttctgtctctaaaaattgtgcagtgacattccgggccaagtcccttagtcaggggttgacaattctgcttttggacaaggagggatgtggagggaagaagtaatagtctaccaggaaaatgagacgaaaaagctcagtatgactccctgcatctggtacccctcttgaaacacagtgggcacatgagcaatggctcaaacgaaaagtggatctaatgtgggtttctcaaccgatgaaccacaaaagcttccagctactattacaatgtgaaaattccaatgatccgtttaccagagcaattagactatgttaaaaattcatatcatttgtaacttcttttaattactgaattgatattaaaaacaaaatatggctagggcatgtcctattcttctgggcaaatgtggatgaaaaggtcacttgctacctttgacaactatgaacatgatggttaatcttctttctttttttttttttttttttgagacggagtctcactctgtcgcccaggctggagtacagtggcacaatcttggctcactgcaacctccgcctcccctccgcctcccagattcaagcacttctcctgcctcagcctcccaagtagctgagattataggcgtgtaccaccacacctggctaatttttgtattttagtagagaagggtttcaccatgttggccaggctggtctcaaacctctgacctcaaatgatccacccccatcagcctcccaaagtgctgggattataggcatgagccactgcactgggcaggttaatcttctttcaaaagagtctgctctttctacccaattggcgaagcaaatccccaggattcaccgaacaaatggattaagcacccactgagtgcctagcatgtgcctggacaccaggccaccgggaagatgctccccctttgacttgtctatgacatgctatgtctctcaccagatcccttcctggaggtcgggcttctgtaacatggctctgcccccaaaataaaattttcaccacgagtcagggatcggcaaacattttctgtaaagagccagaaagtagatattttaagtcataaggtccctgttaacaactacttgactctgccattgtagcacaaaggcagccacagacaaaacaagcaagtagtcatgtctgtgttccaataagactttatttacaaaaacagcaggcacagacaagatttggcccacaggcatagattcccaactcatggtggtgaagtacagaaaaaaacacctgtctacaagcttttgtaagaaatcaggctaaatgttacctatgttttggttggaagatttctttggtttgaggaatgctttcctcttgcattggcatgccaagaggatagatgactctgaaagacgcctcttcagacatacctgtcatcacacaagatcaacttcttcagtttaaatgacacaaatccatattgtggaaggaaaatatgtagtgccttagcttcactaatagttgtaaaacttctttttaagacatcaaaggctagaggattcattttatgcagtgcgaacatctaataacactctctgtgtcaaatatatattgtacattaccttaaactattgtaatagctaggtaaaaatccttgtataaaagaatgttttcccccacacaaagggcagagtattgagcactaatttcctattaaaagtatatatatgtatctgtg

SEQ ID NO: 11685 - protein, 72 aa, Homo sapiens
MNMMVNLLSFFFFFFETESHSVAQAGVQWHNLGSLQPPPPLRLPDSSTSPASASQVAEIIGVYHHTWLIFVF

SEQ ID NO: 11686 - DNA, 3175 bp, Homo sapiens
atgtatggaagtaaaattaactaaaagagcatatatgttccagattggaagtgataatgtagtaaatattgtcttttatattccacaaacaggaagagtaattcttcatctaaagccacgacaatgagtgaaaatgatttcaagcacacaaaatcctttataatttaaagactccactttagagatacaccaaagccaccgttgttacacaagttattaaactattataaaactctgctttgtccgacatttgcaaagaggtacacgaggaaatggaattggtatttcattttaattttcatgactactaactcacctgaacttgctattttaaacaaatagttctgtcgacacctaaaatataatctggcttcttgtgtctggactaagttaaaagaattaaaatactttgtaatgtcctgggctttgggaaatgttaaccacgtcctaacttctagagaacgttactaaaatataacatactgattgtgaagtcaatccacaggtcatgaaaatataaatcagactctgcacgagagtctgatttagggggtccaacaaatactctgacagatgcaaaaggaacctctggtctcatttctgccagaatcctcttttctcccctaatatcatccttattctgatgctcgttcatcactaacacacccacagaaaggaggaagcgggatgggtcttatgcccaaggatttgcactttgtgtttacttccattcctgggaactaaaagcaacatcaaaagaaatgcctaatggctggagcccacaggtgtgcaccacaggatttgcctggtgtgtgtcactgatttcttcattaaacgtaatttagatggtcaaacacaaacccaagtggcttatttcacccctactgctgcttgccactgcttccttcttgtaagatttctttgaagaggatcagtgactttgacatcagaactcaccactggagcctacacaagtttgcagatacctttccctgcaggagtggtgacttcacatctttctgtctctaaaaattgtgcagtgacattccgggccaagtcccttagtcaggggttgacaattctgcttttggacaaggagggatgtggagggaagaagtaatagtctaccaggaaaatgagacgaaaaagctcagtatgactccctgcatctggtacccctcttgaaacacagtgggcacatgagcaatggctcaaacgaaaagtggatctaatgtgggtttctcaaccgatgaaccacaaaagcttccagctactattacaatgtgaaaattccaatgatccgtttaccagagcaattagactatgttaaaaattcatatcatttgtaacttcttttaattactgaattgatattaaaaacaaaatatggctagggcatgtcctattcttctgggcaaatgtggatgaaaaggtcacttgctacctttgacaactatgaacatgatggttaatcttctttctttttttttttttttttttgagacggagtctcactctgtcgcccaggctggagtacagtggcacaatcttggctcactgcaacctccgcctcccctccgcctcccagattcaagcacttctcctgcctcagcctcccaagtagctgagattataggcgtgtaccaccacacctggctaatttttgtattttagtagagaagggtttcaccatgttggccaggctggtctcaaacctctgacctcaaatgatccacccccatcagcctcccaaagtgctgggattataggcatgagccactgcactgggcaggttaatcttctttcaaaagagtctgctctttctacccaattggcgaagcaaatccccaggattcaccgaacaaatggattaagcacccactgagtgcctagcatgtgcctggacaccaggccaccgggaagatgctccccctttgacttgtctatgacatgctatgtctctcaccagatcccttcctggaggtcgggcttctgtaacatggctctgcccccaaaataaaattttcaccacgagtcagggatcggcaaacattttctgtaaagagccagaaagtagatattttaagtcataaggtccctgttaacaactacttgactctgccattgtagcacaaaggcagccacagacaaaacaagcaagtagtcatgtctgtgttccaataagactttatttacaaaaacagcaggcacagacaagatttggcccacaggcatagattcccaactcatggtggtgaagtacagaaaaaaacacctgtctacaagcttttgtaagaaatcaggctaaatgttacctatgttttggttggaagatttctttggtttgaggaatgctttcctcttgcattggcatgccaagaggatagatgactctgaaagacgcctcttcagacatacctgtcatcacacaagatcaacttcttcagtttaaatgacacaaatccatattgtggaaggaaaatatgtagtgccttagcttcactaatagttgtaaaacttctttttaagacatcaaaggctagaggattcattttatgcagtgcgaacatctaataacactctctgtgtcaaatatatattgtacattaccttaaactattgtaatagctaggtaaaaatccttgtataaaagaatgttttcccccacacaaagggcagagtattgagcactaatttcctattaaaagtatatatatgtatctgtgggtcactggtgtccagacttgtatttgcatttgtgtttacttgaggaacttgaacactaacaactggtaaaatcccattgtaattcttacagcattttgactttattttcctgcagtgaattgtgttgtgtaaagattagggctttaaaatcttattagcaagctttgttttgttttaattattgttgctgttgtaactagatttaatttatttttagttggaggtttgacctaagtctggaccaattgattgcttttcaatacaactttgcaaagaacttcctttttccacaggtggctttgttcgattaaagtctacactaataaaaatagctgaacttgttaaactttttagccccatataacagtgcagggaaagagtcatccacctattgttattcataaaacccaggaaactacaccctcttaccttctgtagctacaaggct

SEQ ID NO: 11687 - protein, 72 aa, Homo sapiens; identical to SEQ ID NO: 11685

SEQ ID NO: 11688 - DNA, 1119 bp, Homo sapiens
tgtgggggaaaaggccccggaacgaggccggcccgcgagggcccgcgctcccctcctccccggcggccgcactcacccactccggaatcggccctgtcgcccccgcccgcactccagagccggctgagaacggcagcggcgagggctccacgtgcagcgtctctccgggtaagacctgcagctcccgcgactagaagtgtgaggtcccagggcccttcccgcggaatcggcgctgagaagccccaacccccctcccgcctcccaggcaccttcgggtccaggactacaactcccggcagggtgcgcaaaacgaccgcccaaggcaacggaggctcacgaggtacaaggaagcacaacgccccaatccgctttgttttacacagtctcactttccctgcacctttatacacttcgataaccctaacgaacaggacgctgactcggaggggagcttgaactaggggaaaggccactcaaagagcgcatgcgtacagagcaaggtttcaaggaggggaaaaagaacgggtcaaattaggcgaagaaaagatggcggaggctgtgccaggggacccggaagcacttaccctccacttcctcctcctgtttggcttctgtctcacctagacccgtccggtcgcagactgtctccgagacgcttcctgtccgaatcagcatgattcttcagaggctcttcaggttctcctctgtcattcggtcagccgtctcagtccatttgcggaggaacattggtgttacagcagtggcatttaataaggaacttgatcctatacagaaactctttgtggacaagattagagaatacaaatctaagcgacagacatctggaggacctgttgatgctagttcagagtatcagcaagagctggagagggagctttttaagctcaagcaaatgtttggtaatgcagacatgaatacatttcccaccttcaaatttgaagagcatttttctcagcatttgagaagttggcagccatccagagatgatgacattctaatcttaagcagctaaccagcagctagccttgtagctacagaagaaaatgtttgccgatccctgactcgtggtgaaaattttattttgggggcagagccatg

SEQ ID NO: 11689 - protein, 119 aa, Homo sapiens
MILQRLFRFSSVIRSAVSVHLRRNIGVTAVAFNKELDPIQKLFVDKIREYKSKRQTSGGPVDASSEYQQELERELFKLKQMFGNADMNTFPTFKFEEHFSQHLRSWQPSRDDDILILSS

SEQ ID NO: 11690 - DNA, 1309 bp, Homo sapiens
tgtgggggaaaaggccccggaacgaggccggcccgcgagggcccgcgctcccctcctccccggcggccgcactcacccactccggaatcggccctgtcgcccccgcccgcactccagagccggctgagaacggcagcggcgagggctccacgtgcagcgtctctccgggtaagacctgcagctcccgcgactagaagtgtgaggtcccagggcccttcccgcggaatcggcgctgagaagccccaacccccctcccgcctcccaggcaccttcgggtccaggactacaactcccggcagggtgcgcaaaacgaccgcccaaggcaacggaggctcacgaggtacaaggaagcacaacgccccaatccgctttgttttacacagtctcactttccctgcacctttatacacttcgataaccctaacgaacaggacgctgactcggaggggagcttgaactaggggaaaggccactcaaagagcgcatgcgtacagagcaaggtttcaaggaggggaaaaagaacgggtcaaattaggcgaagaaaagatggcggaggctgtgccaggggacccggaagcacttaccctccacttcctcctcctgtttggcttctgtctcacctagacccgtccggtcgcagactgtctccgagacgcttcctgtccggtgagcgtcgaccgactgaaacggcggcccataatgcattgcgatggcgggtaggcgtgtgggggcggagccagggccggaagtagagcggaggtggtggcggcggaggctttggcagctcgggactgagtgcaagaatcagcatgattcttcagaggctcttcaggttctcctctgtcattcggtcagccgtctcagtccatttgcggaggaacattggtgttacagcagtggcatttaataaggaacttgatcctatacagaaactctttgtggacaagattagagaatacaaatctaagcgacagacatctggaggacctgttgatgctagttcagagtatcagcaagagctggagagggagctttttaagctcaagcaaatgtttggtaatgcagacatgaatacatttcccaccttcaaatttgaagatcccaaatttgaagtcatcgaaaaaccccaggcctgaagaaataaagtaaaattaatctggtaatttgtcacggattagttgtacaactagttagaagtttcagaataaacatgcatttcataactgtcaaatgttcttttaattctgagtccaaataaattatttggtgatgttgagtgtgttcttgatgaattgagttctgtgtgtta

SEQ ID NO: 11691 - protein, 108 aa, Homo sapiens; identical to SEQ ID NO: 1934

SEQ ID NO: 11692 - DNA, 495 bp, Homo sapiens
agaatcagcatgattcttcagaggctcttcaggttctcctctgtcattcggtcagccgtctcagtccatttgcggaggaacattggtgttacagcagtggcatttaataaggaacttgatcctatacagaaactctttgtggacaagattagagaatacaaatctaagcgacagacatctggaggacctgttgatgctagttcagagtatcagcaagagctggagagggagctttttaagctcaagcaaatgtttggtaatgcagacatgaatacatttcccaccttcaaatttgaagatcccaaatttgaagtcatcgaaaaaccccaggcctgaagaaataaagtaaaattaatctggtaatttgtcacggattagttgtacaactagttagaagtttcagaataaacatgcatttcataactgtcaaatgttcttttaattctgagtccaaataaattatttggtgatgttgagtgtgttcttgatgaattg

SEQ ID NO: 11693 - protein, 108 aa, Homo sapiens; identical to SEQ ID NO: 1934

SEQ ID NO: 11694 - DNA, 1067 bp, Homo sapiens
gtagagcggaggtggtggcggcggaggctttggcagctcgggactgagtgcaaggtgactgggagggtagctagatcagcgtggccttttgggactccagttctgggttttttcacgaggcctgggctgcctctcacctttactaggaggagagagcagctctgtgtcctggggaccttcacggcctggcccggggtcacagctgacctctacgtttgtagaccttggagtttgccgtagacccagaaataagatcgataccctctctgagggcaaatcggggcggcgcggggggcagggaggcccgggggtctcgggcccgcagcctggctggggcaacccaaggtcaggcgcgcgggagagattttcggccaggcctacccgccccgggcgcacgggagcgtctaggctacttaggcagaacgtgtaccattaagagggaaaaaattagtcataatattgaaagtttgcatcccacctaaaaacgatggtgctaacacttcattaggcgactttatggattgttcataggaatatgcactgaagaggcagcgaacctactaacctttggccgaatcagcatgattcttcagaggctcttcaggttctcctctgtcattcggtcagccgtctcagtccatttgcggaggaacattggtgttacagcagtggcatttaataaggaacttgatcctatacagaaactctttgtggacaagattagagaatacaaatctaagcgacagacatctggaggacctgttgatgctagttcagagtatcagcaagagctggagagggagctttttaagctcaagcaaatgtttggtaatgcagacatgaatacatttcccaccttcaaatttgaagatcccaaatttgaagtcatcgaaaaaccccaggcctgaagaaataaagtaaaattaatctggtaatttgtcacggattagttgtacaactagttagaagtttcagaataaacatgcatttcataactgtcaaatgttcttttaattctgagtccaaataaattatttggtgatgttgagtgtgttcttgatgaattg

SEQ ID NO: 11695 - protein, 108 aa, Homo sapiens; identical to SEQ ID NO: 1934

SEQ ID NO: 11696 - DNA, 598 bp, Homo sapiens
ggccggaagtagagcggaggtggtggcggcggaggctttggcagctcgggactgagtgcaaggaatatgcactgaagaggcagcgaacctactaacctttggccgaatcagcatgattcttcagaggctcttcaggttctcctctgtcattcggtcagccgtctcagtccatttgcggaggaacattggtgttacagcagtggcatttaataaggaacttgatcctatacagaaactctttgtggacaagattagagaatacaaatctaagcgacagacatctggaggacctgttgatgctagttcagagtatcagcaagagctggagagggagctttttaagctcaagcaaatgtttggtaatgcagacatgaatacatttcccaccttcaaatttgaagatcccaaatttgaagtcatcgaaaaaccccaggcctgaagaaataaagtaaaattaatctggtaatttgtcacggattagttgtacaactagttagaagtttcagaataaacatgcatttcataactgtcaaatgttcttttaattctgagtccaaataaattatttggtgatgttgagtgtgttcttgatgaattg

SEQ ID NO: 11697 - protein, 108 aa, Homo sapiens; identical to SEQ ID NO: 1934

SEQ ID NO: 11698 - DNA, 1209 bp, Homo sapiens
tgtgggggaaaaggccccggaacgaggccggcccgcgagggcccgcgctcccctcctccccggcggccgcactcacccactccggaatcggccctgtcgcccccgcccgcactccagagccggctgagaacggcagcggcgagggctccacgtgcagcgtctctccgggtaagacctgcagctcccgcgactagaagtgtgaggtcccagggcccttcccgcggaatcggcgctgagaagccccaacccccctcccgcctcccaggcaccttcgggtccaggactacaactcccggcagggtgcgcaaaacgaccgcccaaggcaacggaggctcacgaggtacaaggaagcacaacgccccaatccgctttgttttacacagtctcactttccctgcacctttatacacttcgataaccctaacgaacaggacgctgactcggaggggagcttgaactaggggaaaggccactcaaagagcgcatgcgtacagagcaaggtttcaaggaggggaaaaagaacgggtcaaattaggcgaagaaaagatggcggaggctgtgccaggggacccggaagcacttaccctccacttcctcctcctgtttggcttctgtctcacctagacccgtccggtcgcagactgtctccgagacgcttcctgtccggtgagcgtcgaccgactgaaacggcggcccataatgcattgcgatggcggaatcagcatgattcttcagaggctcttcaggttctcctctgtcattcggtcagccgtctcagtccatttgcggaggaacattggtgttacagcagtggcatttaataaggaacttgatcctatacagaaactctttgtggacaagattagagaatacaaatctaagcgacagacatctggaggacctgttgatgctagttcagagtatcagcaagagctggagagggagctttttaagctcaagcaaatgtttggtaatgcagacatgaatacatttcccaccttcaaatttgaagatcccaaatttgaagtcatcgaaaaaccccaggcctgaagaaataaagtaaaattaatctggtaatttgtcacggattagttgtacaactagttagaagtttcagaataaacatgcatttcataactgtcaaatgttcttttaattctgagtccaaataaattatttggtgatgttgagtgtgttcttgatgaattg

SEQ ID NO: 11699 - protein, 116 aa, Homo sapiens; identical to SEQ ID NO: 1938

SEQ ID NO: 11700 - DNA, 1159 bp, Homo sapiens
tgtgggggaaaaggccccggaacgaggccggcccgcgagggcccgcgctcccctcctccccggcggccgcactcacccactccggaatcggccctgtcgcccccgcccgcactccagagccggctgagaacggcagcggcgagggctccacgtgcagcgtctctccgggtaagacctgcagctcccgcgactagaagtgtgaggtcccagggcccttcccgcggaatcggcgctgagaagccccaacccccctcccgcctcccaggcaccttcgggtccaggactacaactcccggcagggtgcgcaaaacgaccgcccaaggcaacggaggctcacgaggtacaaggaagcacaacgccccaatccgctttgttttacacagtctcactttccctgcacctttatacacttcgataaccctaacgaacaggacgctgactcggaggggagcttgaactaggggaaaggccactcaaagagcgcatgcgtacagagcaaggtttcaaggaggggaaaaagaacgggtcaaattaggcgaagaaaagatggcggaggctgtgccaggggacccggaagcacttaccctccacttcctcctcctgtttggcttctgtctcacctagacccgtccggtcgcagactgtctccgagacgcttcctgtccgaatcagcatgattcttcagaggctcttcaggttctcctctgtcattcggtcagccgtctcagtccatttgcggaggaacattggtgttacagcagtggcatttaataaggaacttgatcctatacagaaactctttgtggacaagattagagaatacaaatctaagcgacagacatctggaggacctgttgatgctagttcagagtatcagcaagagctggagagggagctttttaagctcaagcaaatgtttggtaatgcagacatgaatacatttcccaccttcaaatttgaagatcccaaatttgaagtcatcgaaaaaccccaggcctgaagaaataaagtaaaattaatctggtaatttgtcacggattagttgtacaactagttagaagtttcagaataaacatgcatttcataactgtcaaatgttcttttaattctgagtccaaataaattatttggtgatgttgagtgtgttcttgatgaattg

SEQ ID NO: 11701 - protein, 108 aa, Homo sapiens; identical to SEQ ID NO: 1934

SEQ ID NO: 11702 - DNA, 833 bp, Homo sapiens
tgtgggggaaaaggccccggaacgaggccggcccgcgagggcccgcgctcccctcctccccggcggccgcactcacccactccggaatcggccctgtcgcccccgcccgcactccagagccggctgagaacggcagcggcgagggctccacgtgcagcgtctctccgggtaagacctgcagctcccgcgactagaagtgtgaggtcccagggcccttcccgcggaatcggcgctgagaagccccaacccccctcccgcctcccaggcaccttcgggtccaggactacaactcccggcagggtgcgcaaaacgaccgcccaaggcaacggaggctcacgagaatcagcatgattcttcagaggctcttcaggttctcctctgtcattcggtcagccgtctcagtccatttgcggaggaacattggtgttacagcagtggcatttaataaggaacttgatcctatacagaaactctttgtggacaagattagagaatacaaatctaagcgacagacatctggaggacctgttgatgctagttcagagtatcagcaagagctggagagggagctttttaagctcaagcaaatgtttggtaatgcagacatgaatacatttcccaccttcaaatttgaagatcccaaatttgaagtcatcgaaaaaccccaggcctgaagaaataaagtaaaattaatctggtaatttgtcacggattagttgtacaactagttagaagtttcagaataaacatgcatttcataactgtcaaatgttcttttaattctgagtccaaataaattatttggtgatgttgagtgtgttcttgatgaattg

SEQ ID NO: 11703 - protein, 108 aa, Homo sapiens; identical to SEQ ID NO: 1934

SEQ ID NO: 11704 - DNA, 662 bp, Homo sapiens
ttgtgggggaaaaggccccggaacgaggccggcccgcgagggcccgcgctcccctcctccccggcggccgcactcacccactccggaatcggccctgtcgcccccgcccgcactccagagccggctgagaacggcagcggcgagggctccacgtgcagcgtctctccggaatcagcatgattcttcagaggctcttcaggttctcctctgtcattcggtcagccgtctcagtccatttgcggaggaacattggtgttacagcagtggcatttaataaggaacttgatcctatacagaaactctttgtggacaagattagagaatacaaatctaagcgacagacatctggaggacctgttgatgctagttcagagtatcagcaagagctggagagggagctttttaagctcaagcaaatgtttggtaatgcagacatgaatacatttcccaccttcaaatttgaagatcccaaatttgaagtcatcgaaaaaccccaggcctgaagaaataaagtaaaattaatctggtaatttgtcacggattagttgtacaactagttagaagtttcagaataaacatgcatttcataactgtcaaatgttcttttaattctgagtccaaataaattatttggtgatgttgagtgtgttcttgatgaattg

SEQ ID NO: 11705 - protein, 108 aa, Homo sapiens; identical to SEQ ID NO: 1934

SEQ ID NO: 11706 - DNA, 417 bp, Homo sapiens
agaatcagcatgattcttcagaggctcttcaggttctcctctgtcattcggtcagccgtctcagtccatttgcggaggaacattggtgttacagcagtggcatttaataaggaacttgatcctatacagaaactctttgtggacaagattagagaatacaaatctaagcgacactttttaagctcaagcaaatgtttggtaatgcagacatgaatacatttcccaccttcaaatttgaagatcccaaatttgaagtcatcgaaaaaccccaggcctgaagaaataaagtaaaattaatctggtaatttgtcacggattagttgtacaactagttagaagtttcagaataaacatgcatttcataactgtcaaatgttcttttaattctgagtccaaataaattatttggtgatgttg

SEQ ID NO: 11707 - protein, 67 aa, Homo sapiens
MILQRLFRFSSVIRSAVSVHLRRNIGVTAVAFNKELDPIQKLFVDKIREYKSKRHFLSSSKCLVMQT

SEQ ID NO: 11708 - DNA, 1099 bp, Homo sapiens
gtgggggcggagccagggccggaagtagagcggaggtggtggcggcggaggctttggcagctcgggactgagtgcaagaatcagcatgattcttcagaggctcttcaggttctcctctgtcattcggtcagccgtctcagtccatttgcggaggaacattggtgttacagcagtggcatttaataaggaacttgatcctatacagaaactctttgtggacaagattagagaatacaaatctaagcgacagacatctggaggacctgttgatgctagttcagagtatcagcaagagctggagagggagctttttaagctcaagcaaatgtttggtaatgcagacatgaatacatttcccaccttcaaatttgaaggtacgtcttataaatcacagattcattcttgtgggggataagtgaagaatatttacacttacctggatttttagagaactgaatgacagtgttgacatgtgaatttattaggaccatgacgtgtgcctgagaagctgccggctaaatgtttgctgttagaataagagcagtataggagatcacataacatagtgattaaatggtggggatctgaaatcgaactgcccaatcttgaatccttataatcactttcagctgtgtaatcttgagtaattaactggtgcatgtctcctcatctgacatttggggagaattatagtatcttctgcatatgtagttaaatgacataatatatgcaaagtcaattaatggaatgcatggctcatagaaagtgttgcataaatgtttagctatatttctatgtaaatgtttacaaacagtgtttactaaaaaaatcagaaaattgatgagttaaatcttgagcattctacataatccattttattgcaatttggctaagcttgacccttttttccccctcttcttagatcccaaatttgaagtcatcgaaaaaccccaggcctgaagaaataaagtaaaattaatctggtaatttgtcacggattagttgtacaactagttagaagtttcagaataaacatgcatttcataactgtcaaatgttcttttaattctgagtccaaataaattatttggtgatgttg

SEQ ID NO: 11709 - protein, 109 aa, Homo sapiens [sequence omitted]

SEQ ID NO: 11710 - DNA, 428 bp, Homo sapiens
agaatcagcatgattcttcagaggctcttcaggttctcctctgtcattcggtcagccgtctcagtccatttgcggaggaacattggtgttacagcagtggcatttaataaggaacttgatcctatacagaaactctttgtggacaagattagagaatacaaatctaagcgacagacatctggaggacctgttgatgctagttcagagtatcagcaagagctggagagggagctttttaagctcaagcaaatgtttggtaatgcagacatgaatacatttcccaccttcaaatttgaagatcccaaatttgaagtcatcgaaaaaccccaggcctgaagaaataaagtaaaattaatctggtaatttgtcacggattagttgtacaactagttagaagtttcagaataaacatgcatttcataactgtc

SEQ ID NO: 11711 - protein, 108 aa, Homo sapiens; identical to SEQ ID NO: 1934

SEQ ID NO: 11712 - DNA, 531 bp, Homo sapiens
ggccggaagtagagcggaggtggtggcggcggaggctttggcagctcgggactgagtgcaaggaatatgcactgaagaggcagcgaacctactaacctttggccgaatcagcatgattcttcagaggctcttcaggttctcctctgtcattcggtcagccgtctcagtccatttgcggaggaacattggtgttacagcagtggcatttaataaggaacttgatcctatacagaaactctttgtggacaagattagagaatacaaatctaagcgacagacatctggaggacctgttgatgctagttcagagtatcagcaagagctggagagggagctttttaagctcaagcaaatgtttggtaatgcagacatgaatacatttcccaccttcaaatttgaagatcccaaatttgaagtcatcgaaaaaccccaggcctgaagaaataaagtaaaattaatctggtaatttgtcacggattagttgtacaactagttagaagtttcagaataaacatgcatttcataactgtc

SEQ ID NO: 11713 - protein, 108 aa, Homo sapiens; identical to SEQ ID NO: 1934

SEQ ID NO: 11714 - DNA, 462 bp, Homo sapiens
gtgggggcggagccagggccggaagtagagcggaggtggtggcggcggaggctttggcagctcgggactgagtgcaagaatcagcatgattcttcagaggctcttcaggttctcctctgtcattcggtcagccgtctcagtccatttgcggaggaacattggtgttacagcagtggcatttaataaggaacttgatcctatacagaaactctttgtggacaagattagagaatacaaatctaagcgacagacatctggaggacctgttgatgctagttcagagtatcagcaagagctggagagggagctttttaagctcaagcaaatgtttgatcccaaatttgaagtcatcgaaaaaccccaggcctgaagaaataaagtaaaattaatctggtaatttgtcacggattagttgtacaactagttagaagtttcagaataaacatgcatttcataactgtc

SEQ ID NO: 11715 - protein, 94 aa, Homo sapiens
MILQRLFRFSSVIRSAVSVHLRRNIGVTAVAFNKELDPIQKLFVDKIREYKSKRQTSGGPVDASSEYQQELERELFKLKQMFDPKFEVIEKPQA

SEQ ID NO: 11716 - DNA, 546 bp, Homo sapiens
tgaaacggcggcccataatgcattgcgatggcgggtaggcgtgtgggggcggagccagggccggaagtagagcggaggtggtggcggcggaggctttggcagctcgggactgagtgcaagaatcagcatgattcttcagaggctcttcaggttctcctctgtcattcggtcagccgtctcagtccatttgcggaggaacattggtgttacagcagtggcatttaataaggaacttgatcctatacagaaactctttgtggacaagattagagaatacaaatctaagcgacagacatctggaggacctgttgatgctagttcagagtatcagcaagagctggagagggagctttttaagctcaagcaaatgtttggtaatgcagacatgaatacatttcccaccttcaaatttgaagatcccaaatttgaagtcatcgaaaaaccccaggcctgaagaaataaagtaaaattaatctggtaatttgtcacggattagttgtacaactagttagaagtttcagaataaacatgcatttcataactgtc

SEQ ID NO: 11717 - protein, 108 aa, Homo sapiens; identical to SEQ ID NO: 1934

SEQ ID NO: 11718 - DNA, 493 bp, Homo sapiens
gagacgcttcctgtccggtgagcgtcgaccgactgaaacggcggcccataatgcattgcgatggcggaatcagcatgattcttcagaggctcttcaggttctcctctgtcattcggtcagccgtctcagtccatttgcggaggaacattggtgttacagcagtggcatttaataaggaacttgatcctatacagaaactctttgtggacaagattagagaatacaaatctaagcgacagacatctggaggacctgttgatgctagttcagagtatcagcaagagctggagagggagctttttaagctcaagcaaatgtttggtaatgcagacatgaatacatttcccaccttcaaatttgaagatcccaaatttgaagtcatcgaaaaaccccaggcctgaagaaataaagtaaaattaatctggtaatttgtcacggattagttgtacaactagttagaagtttcagaataaacatgcatttcataactgtc

SEQ ID NO: 11719 - protein, 116 aa, Homo sapiens; identical to SEQ ID NO: 1938

SEQ ID NO: 11720 - DNA, 762 bp, Homo sapiens
ggggaaaaggccccggaacgaggccggcccgcgagggcccgcgctcccctcctccccggcggccgcactcacccactccggaatcggccctgtcgcccccgcccgcactccagagccggctgagaacggcagcggcgagggctccacgtgcagcgtctctccgggtaagacctgcagctcccgcgactagaagtgtgaggtcccagggcccttcccgcggaatcggcgctgagaagccccaacccccctcccgcctcccaggcaccttcgggtccaggactacaactcccggcagggtgcgcaaaacgaccgcccaaggcaacggaggctcacgagaatcagcatgattcttcagaggctcttcaggttctcctctgtcattcggtcagccgtctcagtccatttgcggaggaacattggtgttacagcagtggcatttaataaggaacttgatcctatacagaaactctttgtggacaagattagagaatacaaatctaagcgacagacatctggaggacctgttgatgctagttcagagtatcagcaagagctggagagggagctttttaagctcaagcaaatgtttggtaatgcagacatgaatacatttcccaccttcaaatttgaagatcccaaatttgaagtcatcgaaaaaccccaggcctgaagaaataaagtaaaattaatctggtaatttgtcacggattagttgtacaactagttagaagtttcagaataaacatgcatttcataactgtc

SEQ ID NO: 11721 - protein, 108 aa, Homo sapiens; identical to SEQ ID NO: 1934

SEQ ID NO: 11722 - DNA, 595 bp, Homo sapiens
ttgtgggggaaaaggccccggaacgaggccggcccgcgagggcccgcgctcccctcctccccggcggccgcactcacccactccggaatcggccctgtcgcccccgcccgcactccagagccggctgagaacggcagcggcgagggctccacgtgcagcgtctctccggaatcagcatgattcttcagaggctcttcaggttctcctctgtcattcggtcagccgtctcagtccatttgcggaggaacattggtgttacagcagtggcatttaataaggaacttgatcctatacagaaactctttgtggacaagattagagaatacaaatctaagcgacagacatctggaggacctgttgatgctagttcagagtatcagcaagagctggagagggagctttttaagctcaagcaaatgtttggtaatgcagacatgaatacatttcccaccttcaaatttgaagatcccaaatttgaagtcatcgaaaaaccccaggcctgaagaaataaagtaaaattaatctggtaatttgtcacggattagttgtacaactagttagaagtttcagaataaacatgcatttcataactgtc

SEQ ID NO: 11723 - protein, 108 aa, Homo sapiens; identical to SEQ ID NO: 1934

SEQ ID NO: 11724 - DNA, 1458 bp, Homo sapiens
ggatttgaaatgagtgaatcgctgagtcccgcgatgagacagggtctgcattttgctcttaaaatctcgggggcgtcaggaccacatcccagctgagcaggctgagactgctgaggagtgcggacgggcgaggaggggacgcggaaaggagggagcggcgacaggcgacccgtccggcacgggtcccggcggtgcccggtccccccgggctccaggccgctcgccccccgcccctccccttcgctccccgcacagctctcccgcccctccccacccggctccctcaagtctccacgaacggaaatgggagtcacagcgccggggaccagcggaaacaaaacacagaggcggccgcgggggggcccttgtgggggaaaaggccccggaacgaggccggcccgcgagggcccgcgctcccctcctccccggcggccgcactcacccactccggaatcggccctgtcgcccccgcccgcactccagagccggctgagaacggcagcggcgagggctccacgtgcagcgtctctccgggtaagacctgcagctcccgcgactagaagtgtgaggtcccagggcccttcccgcggaatcggcgctgagaagccccaacccccctcccgcctcccaggcaccttcgggtccaggactacaactcccggcagggtgcgcaaaacgaccgcccaaggcaacggaggctcacgaggtacaaggaagcacaacgccccaatccgctttgttttacacagtctcactttccctgcacctttatacacttcgataaccctaacgaacaggacgctgactcggaggggagcttgaactaggggaaaggccactcaaagagcgcatgcgtacagagcaaggtttcaaggaggggaaaaagaacgggtcaaattaggcgaagaaaagatggcggaggctgtgccaggggacccggaagcacttaccctccacttcctcctcctgtttggcttctgtctcacctagacccgtccggtcgcagactgtctccgagacgcttcctgtccgaatcagcatgattcttcagaggctcttcaggttctcctctgtcattcggtcagccgtctcagtccatttgcggaggaacattggtgttacagcagtggcatttaataaggaacttgatcctatacagaaactctttgtggacaagattagagaatacaaatctaagcgacagacatctggaggacctgttgatgctagttcagagtatcagcaagagctggagagggagctttttaagctcaagcaaatgtttggtaatgcagacatgaatacatttcccaccttcaaatttgaagatcccaaatttgaagtcatcgaaaaaccccaggcctgaagaaataaagtaaaattaatctggtaatttgtcacggattagttgtacaactagttagaagtttcagaataaacatgcatttcataactgtc

SEQ ID NO: 11725 - protein, 108 aa, Homo sapiens; identical to SEQ ID NO: 1934

SEQ ID NO: 11726 - DNA, 958 bp, Homo sapiens
ggggaaaaggccccggaacgaggccggcccgcgagggcccgcgctcccctcctccccggcggccgcactcacccactccggaatcggccctgtcgcccccgcccgcactccagagccggctgagaacggcagcggcgagggctccacgtgcagcgtctctccgggtaagacctgcagctcccgcgactagaagtgtgaggtcccagggcccttcccgcggaatcggcgctgagaagccccaacccccctcccgcctcccaggcaccttcgggtccaggactacaactcccggcagggtgcgcaaaacgaccgcccaaggcaacggaggctcacgagaatcagcatgattcttcagaggctcttcaggttctcctctgtcattcggtcagccgtctcagtccatttgcggaggaacattggtgttacagcagtggcatttaataaggaacttgatcctatacagaaactctttgtggacaagattagagaatacaaatctaagcgacagacatctggaggacctgttgatgctagttcagagtatcagcaagagctggagagggagctttttaagctcaagcaaatgtttggtaatgcagacatgaatacatttcccaccttcaaatttgaaggtacgtcttataaatcacagattcattcttgtgggggataagtgaagaatatttacacttacctggatttttagagaactgaatgacagtgttgacatgtgaatttattaggaccatgacgtgtgcctgagaagctgccggctaaatgtttgctgttagaataagagcagtataggagatcacataacatagtgattaaatggtggggatctgaaatcgaactgcccaatcttgaatccttataatcactttcagctgtgtaatcttgagtaattaactggtgcatgtctcctcatctgacatttggggagaattatagtatcttc

SEQ ID NO: 11727 - protein, 109 aa, Homo sapiens [sequence omitted]

SEQ ID NO: 11728 - DNA, 513 bp, Homo sapiens
ctcccgcctcccaggcaccttcgggtccaggactacaactcccggcagggtgcaggctcttcaggttctcctctgtcattcggtcagccgtctcagtccatttgcggaggaacattggtgttacagcagtggcatttaataaggaacttgatcctatacagaaactctttgtggacaagattagagaatacaaatctaagcgacagacatctggaggacctgttgatgctagttcagagtatcagcaagagctggagagggagctttttaagctcaagcaaatgtttggtaatgcagacatgaatacatttcccaccttcaaatttgaaggtacgtcttataaatcacagattcattcttgtgggggataagtgaagaatatttacacttacctggatttttagagaactgaatgacagtgttgacatgtgaatttattaggaccatgacgtgtgcctgagaagctgccggctaaatgtttgctgttagaataagagcagtataggagatcac

SEQ ID NO: 11729 - protein, 45 aa, Homo sapiens [sequence omitted]

SEQ ID NO: 11730 - DNA, 317 bp, Homo sapiens
ccgagacgcttcctgtccggtgagcgtcgaccgactgaaacggcggcccataatgcattgcgatggcggaatcagcatgattcttcagaggctcttcaggttctcctctgtcattcggtcagccgtctcagtccatttgcggaggaacattggtgttacagcagtggcatttaataaggaacttgatcctatacagaaactctttgtggacaagattagagaatacaaatctaagcgacagacatctggaggacctgttgatgctagttcagagtatcagcaagagctggagagggagctttttaagctcaagcaaa

SEQ ID NO: 11731 - protein, 87 aa, Homo sapiens
MHCDGGISMILQRLFRFSSVIRSAVSVHLRRNIGVTAVAFNKELDPIQKLFVDKIREYKSKRQTSGGPVDASSEYQQELERELFKLK

SEQ ID NO: 11732 - DNA, 392 bp, Homo sapiens
tgtgggggcggagccagggccggaagtagagcggaggtggtggcggcggaggctttggcagctcgggactgagtgcaagaatcagcatgattcttcagaggctcttcaggttctcctctgtcattcggtcagccgtctcagtccatttgcggaggaacattggtgttacagcagtggcatttaataaggaacttgatcctatacagaaactctttgtggacaagattagagaatacaaatctaagcgacagtaagtgaataaataactacagtgtaaatataaatattcaaagtatgtaagtttcaaggtggtaataaaaatgacttggtatttgaaagtattagaccttcactgagctcatctctgacatagaggttcattaggtgccctc

SEQ ID NO: 11733 - protein, 55 aa, Homo sapiens
MILQRLFRFSSVIRSAVSVHLRRNIGVTAVAFNKELDPIQKLFVDKIREYKSKRQ

SEQ ID NO: 11734 - DNA, 5120 bp, Homo sapiens
gccccagccaggctgcgggcccgagacccccgggcctccctgccccccgcgccgccccgatttgccctcagagagggtatcgatcttatttctgggtctacggcaaactccaaggtctacaaacgtagaggtcagctgtgaccccgggccaggccgtgaaggtccccaggacacagagctgctctctcctcctagtaaaggtgagaggcagcccaggcctcgtgaaaaaacccagaactggagtcccaaaaggccacgctgatctagctaccctcccagtcaccttgcactcagtcccgagctgccaaagcctccgccgccaccacctccgctctacttccggccctggctccgcccccacacgcctacccgccatcgcaatgcattatgggccgccgtttcagtcggtcgacgctcaccggacaggaagcgtctcggagacagtctgcgaccggacgggtctaggtgagacagaagccaaacaggaggaggaagtggagggactgatcctttgaaatactccagccatgactaaaagagaagcagaggagctgatagaaattgagattgatggaacagagaaagcagagtgcacagaagaaagcattgtagaacaaacctacgcgccagctgaatgtgtaagccaggccatagacatcaatgaaccaataggcaatttaaagaaactgctagaaccaagactacagtgttctttggatgctcatgaaatttgtctgcaagatatccagctggatccagaacgaagtttatttgaccaaggagtaaaaacagatggaactgtacagcttagtgtacaggtaatttcttaccaaggaattgaaccaaagttaaacatccttgaaattgttaaacctgcggacactgttgaggttgttattgatccagatgcccaccatgctgaatcagaagcacatcttgttgaagaagctcaagtgataactcttgatggcacaaaacacatcacaaccatttcagatgaaacttcagaacaagtgacaagatgggctgctgcactggaaggctataggaaagaacaagaacgccttgggataccctatgatcccatacagtggtccacagaccaagtcctgcattgggtggtttgggtaatgaaggaattcagcatgaccgatatagacctcaccacactcaacatttcggggagagaattatgtagtctcaaccaagaagatttttttcagcgggttcctcggggagaaattctctggagtcatctggaacttctccgaaaatatgtattggcaagtcaagaacaacagatgaatgaaatagttacaattgatcaacctgtgcaaattattccagcatcagtgcaatctgctacacctactaccattaaagttataaatagtagtgcgaaagcagccaaagtacaaagagcgccgaggatttcaggagaagatagaagctcacctgggaacagaacaggaaacaatggccaaatccaactatggcagtttttgctagaacttcttactgataaggacgctcgagactgcatttcttgggttggtgatgaaggtgaatttaagctaaatcagcctgaactggttgcacagaaatggggacagcgtaaaaataagcctacgatgaactatgagaaactcagtcgtgcattaagatattattacgatggggacatgatttgtaaagttcaaggcaagagatttgtgtacaagtttgtctgtgacttgaagactcttattggatacagtgcagcggagttgaaccgtttggtcacagaatgtgaacagaagaaacttgcaaagatgcagctccatggaattgcccagccagtcacagcagtagctctggctactgcttctctgcaaacggaaaaggataattgagccccaggacattctgagactccaaagtctttcttaaaatgtttagagcaagtatagctcttacctttattactgaatttgaatcttcttttatttctaggctgtacagtctgatgcatgatttttttataaatatttcatactcttgtgaatttggatctttttactttgagcatatattttagaatatgtgtatgttaaaggatctccacaatgtctgcagtgtgaaggcaggttcattgtggaatagtttaacagtcaggaaggctaaactggtcagtattaatgtgtagccctaccaaaaatagccagtagtatctgaaaatgaaaaataaatgaagtatctctaggaaacagtctggcttaactatttttgaaaatataactgtttcccctctctgctgctttagatgttgctttacatagaaccagaaaatggaatttctcagctaaagcatgtgtgcctgtttcatctaatcaagcagagctaaaatgttcataccgaataaatttatattaataaattactaaactaagagtatcaggttatttatatatttgcaagcaaaggacagtaagaagttgactggcaaaagagcagtgctgaaggaggagatccaggtttaaatctggcttattaactcaagccaattttaaggattttctgtatagattactcatgtcagaccaagaatttaaattattttgagagaggcatttaattctaataaaccagctgttataaaaattataaaatgatctctgtttttcctgtcagagatttaaaaaactgaaaaggtatacctcaacccaaaaataaaggtttgttttggtttgttatggcttccttttttaaaaaattaccctgtagtgccagtttattatgcaaagcagcttatattcctttgtttctgataaaatgaagactttaaatcagtcagtagtactttacctttcaaggcattagtaaattacttgcaaatagttttaaaaggaaaatacgacctttgttataggcagtcttctctttaagacaatacttttccacttgttttccttttccatattatatatgtgtattcatatagctgtatacatattcagttgatcattttataaacatatgaaggcataaagatatacagaagaaaaattattaaacaactcattttaagattcaaattaactaattcctgcatatatgacattccttacataagcgaacactaaacaaaaatggctagaaatgtctttttctttcttttctctctttgttgtttaaggtattaagcacgaattattacatgagactggcagatagctattaatcctcttacagatttgagaaagttgattctcaaatatttatgcaccttctccttcattgttttctttaaatctgtcctcttaaaaagcttcttaagagctcagttaatgcttttgacttaactaggagaaaaaggcatgataatacaggcaagatggcattgttagcaattctggtagtggtttggaatgaatcctaagaggcagggatcttaaggacaaggaagagaagagagagagggagggatctttgatctctttctctggtaatcttaatgcataattttactaatacatgttctcaattcattcatattattaagctcttcctgcagttgatatctgagcagagtaagatttgtatttccatttttacttttttgaaagagaatatatggacagattattagtacaatttgggcactgtggttttaagaatatctgagtaaaataacaatatgaaataataaacagaagctctaacgtcaggtaacaaatagacagcaagaaaggttttgcaccatcctcttacggcctagagagttgacaagttgcttgtagttttaaaaaaataataaagtatacccttctggtatatcatcaagagcttaagaatcttggctttcatatttaaaatgcttttggggagacatatattaaaattttagccaagatgatagacatgtctcaattatatatgtgtgtgtatgtttttaaagctaaaaacattacttttagatccctagaatgaaaatttttttctcatctatgcaattcccatatggtttttttttaaatcatattttattcattttctccctttagcaattttcattttatttctcataatttgaacagagacagttctcatacatgatcagatgctttttttttcttcttaccatcatttatgcatgacataggtaatgtgactaatttctccagttgattcaagaaactcattactttgcctcaaattatatgtaaaatatttgttttacttaggttacagttatcagaaaggtagtttttttcttctattaaaatataacattgtgaaagaaaataaaatttatgctattctttgctttgtttttataaatgaatttttcatagaatttacagtatattcaaaggaagaaagataaaattattggtcatcatttgtaccttagaagtacaagaatttaagtaaaagaaatgttcatttttgttttaaaatttgttttccatgtgaagtttttattgagccaactttcatacatatcttgctagcctaaagtctaaatatttgtgttggcatcagaaaaacaaatgaggcagaattgctatgtgtggttgatcttcagataaattgactgatcacagttatttttgtatcagtctatgttattaggaaaaattgtttagttgttttctcccctgattaatggtgatattcaagtatgatacaaaaagaattgtaccaccaaatatttttgtgaggtctgctgttttccatattcattttatgctactgcctttaagaaagaactagtgtatccttgaaatagcacaaaaatgttttaaaattcataattgcaaaacaaatctgtgactaacttaatgtcttcagatctaaagggtgtaaaaatattgatacttcaatatttcacttgctgccaggaaaaacaaaattctcaatcttttgtaaatgggaggaggacttttgcatacatttttactctttaaataacgacaacgacacttatactgtcataataacaattatgtatttctttgtggttttaattttttttgtaattttacataaaacagttattttctatttttacgcagataaatatttgtgcataaaatgtaaaaatagtaaaatgagaaaaataaaactattatacagta

SEQ ID NO: 11735 - protein, 454 aa, Homo sapiens; identical to SEQ ID NO: 1944

SEQ ID NO: 11736 - DNA, 1104 bp, Homo sapiens
acaggaggaggaagtggagggtaagtgcttccgggtcccctggcacagcctccgccatcttttcttcgcctaatttgacccgttctttttcccctccttgaaaccttgctctgtacgcatgcgctctttgagtggcctttcccctagttcaagctcccctccgagtcagcgtcctgttcgttagggttatcgaagtgtataaaggtgcagggaaagtgagactgtgtaaaacaaagcggattggggcgttgtgcttccttgtacctcgtgagcctccgttgccttgggcggtcgttttgcgcaccctgccgggagttgtagtcctggacccgaaggtgcctgggaggcgggaggggggttggggcttctcagcgccgattccgcgggaagggccctgggacctcacacttctagtcgcgggagctgcaggtcttacccggagagacgctgcacgtggagccctcgccgctgccgttctcagccggctctggagtgcgggcgggggcgacagggccgattccggagtggagtattaggattacaggcatgaggcaccgtatctggccctagctgcgttttaaaaacgatcacactctggccgttgtattgactgagaatagactgtgaggggacaagagtggacacagggaccccctttaggagattgttgcagtactccaggtaaggggtggtggtggctgttgtactgatatacgcaatacagagcctatatttggacaaccatggttcatccccatctggaatgatacctacttaggttgatacaccaaaactgtgacatggagccacaagtggtttagcctcacctctgaatagcgttcgtatgagatggagctcaaaataagattgctctatgcaaagcatttgaatgcagtgcctgatgctcggcgagtaatggttaatacaaatgaacatttaaattcttcatttagtgaaatcttgtaagtgggagcacaactcttttgtaaatgtcgaaataccaaatttagtggagcgttccttttaaaggtacgcctctttttagatgtggtagtacgcttagaataactactcagaaggtgctgtggactgaaagtgcgtatg

SEQ ID NO: 11737 - protein, 38 aa, Homo sapiens [sequence omitted]

SEQ ID NO: 11738 - DNA, 1100 bp, Homo sapiens
acaggaggaggaagtggagggtaagtgcttccgggtcccctggcacagcctccgccatcttttcttcgcctaatttgacccgttctttttcccctccttgaaaccttgctctgtacgcatgcgctctttgagtggcctttcccctagttcaagctcccctccgagtcagcgtcctgttcgttagggttatcgaagtgtataaaggtgcagggaaagtgagactgtgtaaaacaaagcggattggggcgttgtgcttccttgtacctcgtgagcctccgttgccttgggcggtcgttttgcgcaccctgccgggagttgtagtcctggacccgaaggtgcctgggaggcgggaggggggttggggcttctcagcgccgattccgcgggaagggccctgggacctcacacttctagtcgcgggagctgcaggtcttacccggagagacgctgcacgtggagccctcgccgctgccgttctcagccggctctggagtgcgggcgggggcgacagggccgattccggagtggcattgtagaacaaacctacgcgccagctgaatgtgtaagccaggccatagacatcaatgaaccaataggcaatttaaagaaactgctagaaccaagactacagtgttctttggatgctcatgaaatttgtctgcaagatatccagctggatccagaacgaagtttatttgaccaaggagtaaaaacagatggaactgtacagcttagtgtacaggtaatttcttaccaaggaattgaaccaaagttaaacatccttgaaattgttaaacctgcggacactgttgaggttgttattgatccagatgcccaccatgctgaatcagaagcacatcttgttgaagaagctcaagtgataactcttgatggcacaaaacacatcacaaccatttcagatgaaacttcagaacaagtgacaagatgggctgctgcactggaaggctataggaaagaacaagaacgccttgggataccctatggtaataaaatgcataattctatattgggtagaataataggaattaagcttgacatagaagacactagggtaagttataatctattttacatgtaga

SEQ ID NO: 11739 - protein, 134 aa, Homo sapiens [sequence omitted]

SEQ ID NO: 11740 - DNA, 4715 bp, Homo sapiens
acaggaggaggaagtggagggtaagtgcttccgggtcccctggcacagcctccgccatcttttcttcgcctaatttgacccgttctttttcccctccttgaaaccttgctctgtacgcatgcgctctttgagtggcctttcccctagttcaagctcccctccgagtcagcgtcctgttcgttagggttatcgaagtgtataaaggtgcagggaaagtgagactgtgtaaaacaaagcggattggggcgttgtgcttccttgtacctcgtgagcctccgttgccttgggcggtcgttttgcgcaccctgccgggagttgtagtcctggacccgaaggtgcctgggaggcgggaggggggttggggcttctcagcgccgattccgcgggaagggccctgggacctcacacttctagtcgcgggagctgcaggtcttacccggagagacgctgcacgtggagccctcgccgctgccgttctcagccggctctggagtgcgggcgggggcgacagggccgattccggagtgggactgatcctttgaaatactccagccatgactaaaagagaagcagaggagctgatagaaattgagattgatggaacagagaaagcagagtgcacagaagaaagcattgtagaacaaacctacgcgccagctgaatgtgtaagccaggccatagacatcaatgaaccaataggcaatttaaagaaactgctagaaccaagactacagtgttctttggatgctcatgaaatttgtctgcaagatatccagctggatccagaacgaagtttatttgaccaaggagtaaaaacagatggaactgtacagcttagtgtacaggtaatttcttaccaaggaattgaaccaaagttaaacatccttgaaattgttaaacctgcggacactgttgaggttgttattgatccagatgcccaccatgctgaatcagaagcacatcttgttgaagaagctcaagtgataactcttgatggcacaaaacacatcacaaccatttcagatgaaacttcagaacaagtgacaagatgggctgctgcactggaaggctataggaaagaacaagaacgccttgggataccctatgatcccatacagtggtccacagaccaagtcctgcattgggtggtttgggtaatgaaggaattcagcatgaccgatatagacctcaccacactcaacatttcggggagagaattatgtagtctcaaccaagaagatttttttcagcgggttcctcggggagaaattctctggagtcatctggaacttctccgaaaatatgtattggcaagtcaagaacaacagatgaatgaaatagttacaattgatcaacctgtgcaaattattccagcatcagtgcaatctgctacacctactaccattaaagttataaatagtagtgcgaaagcagccaaagtacaaagagcgccgaggatttcaggagaagatagaagctcacctgggaacagaacaggaaacaatggccaaatccaactatggcagtttttgctagaacttcttactgataaggacgctcgagactgcatttcttgggttggtgatgaaggtgaatttaagctaaatcagcctgaactggttgcacagaaatggggacagcgtaaaaataagcctacgatgaactatgagaaactcagtcgtgcattaagatattattacgatggggacatgatttgtaaagttcaaggcaagagatttgtgtacaagtttgtctgtgacttgaagactcttattggatacagtgcagcggagttgaaccgtttggtcacagaatgtgaacagaagaaacttgcaaagatgcagctccatggaattgcccagccagtcacagcagtagctctggctactgcttctctgcaaacggaaaaggataattgagccccaggacattctgagactccaaagtctttcttaaaatgtttagagcaagtatagctcttacctttattactgaatttgaatcttcttttatttctaggctgtacagtctgatgcatgatttttttataaatatttcatactcttgtgaatttggatctttttactttgagcatatattttagaatatgtgtatgttaaaggatctccacaatgtctgcagtgtgaaggcaggttcattgtggaatagtttaacagtcaggaaggctaaactggtcagtattaatgtgtagccctaccaaaaatagccagtagtatctgaaaatgaaaaataaatgaagtatctctaggaaacagtctggcttaactatttttgaaaatataactgtttcccctctctgctgctttagatgttgctttacatagaaccagaaaatggaatttctcagctaaagcatgtgtgcctgtttcatctaatcaagcagagctaaaatgttcataccgaataaatttatattaataaattactaaactaagagtatcaggttatttatatatttgcaagcaaaggacagtaagaagttgactggcaaaagagcagtgctgaaggaggagatccaggtttaaatctggcttattaactcaagccaattttaaggattttctgtatagattactcatgtcagaccaagaatttaaattattttgagagaggcatttaattctaataaaccagctgttataaaaattataaaatgatctctgtttttcctgtcagagatttaaaaaactgaaaaggtatacctcaacccaaaaataaaggtttgttttggtttgttatggcttccttttttaaaaaattaccctgtagtgccagtttattatgcaaagcagcttatattcctttgtttctgataaaatgaagactttaaatcagtcagtagtactttacctttcaaggcattagtaaattacttgcaaatagttttaaaaggaaaatacgacctttgttataggcagtcttctctttaagacaatacttttccacttgttttccttttccatattatatatgtgtattcatatagctgtatacatattcagttgatcattttataaacatatgaaggcataaagatatacagaagaaaaattattaaacaactcattttaagattcaaattaactaattcctgcatatatgacattccttacataagcgaacactaaacaaaaatggctagaaatgtctttttctttcttttctctctttgttgtttaaggtattaagcacgaattattacatgagactggcagatagctattaatcctcttacagatttgagaaagttgattctcaaatatttatgcaccttctccttcattgttttctttaaatctgtcctcttaaaaagcttcttaagagctcagttaatgcttttgacttaactaggagaaaaaggcatgataatacaggcaagatggcattgttagcaattctggtagtggtttggaatgaatcctaagaggcagggatcttaaggacaaggaagagaagagagagagggagggatctttgatctctttctctggtaatcttaatgcataattttactaatacatgttctcaattcattcatattattaagctcttcctgcagttgatatctgagcagagtaagatttgtatttccatttttacttttttgaaagagaatatatggacagattattagtacaatttgggcactgtggttttaagaatatctgagtaaaataacaatatgaaataataaacagaagctctaacgtcaggtaacaaatagacagcaagaaaggttttgcaccatcctcttacggcctagagagttgacaagttgcttgtagttttaaaaaaataataaagtatacccttctggtatatcatcaagagcttaagaatcttggctttcatatttaaaatgcttttggggagacatatattaaaattttagccaagatgatagacatgtctcaattatatatgtgtgtgtatgtttttaaagctaaaaacattacttttagatccctagaatgaaaatttttttctcatctatgcaattcccatatggtttttttttaaatcatattttattcattttctccctttagcaattttcattttatttctcataatttgaacagagacagttctcatacatgatcagatgctttttttttcttcttaccatcatttatgcatgacataggtaatgtgactaatttctccagttgattcaagaaactcattactttgcctcaaattatatgtaaaatatttgttttacttaggttacagttatcagaaaggtagtttttttcttctattaaaatataacattgtgaaagaaaataaaatttatgctattctttgctttgtttttataaatgaatttttcatagaatttacagtatattcaaaggaagaaagataaaattattggtcatcatttgtaccttagaagtacaagaatttaagtaaaagaaatgttcatttttgttttaaaatttgttttccatgtgaagtttttattgagccaactttcatacatatcttgctagcctaaagtctaaatatttgtgttggcatcagaaaaacaaatgaggcagaattgctatgtgtggttgatcttcagataaattgactgatcacagttatttttgtatcagtctatgttattaggaaaaattgtttagttgttttctcccctgattaatggtgatattcaagtatgatacaaaaagaattgtaccacc

SEQ ID NO: 11741 - protein, 454 aa, Homo sapiens; identical to SEQ ID NO: 1944

SEQ ID NO: 11742 - DNA, 5147 bp, Homo sapiens
acaggaggaggaagtggagggtaagtgcttccgggtcccctggcacagcctccgccatcttttcttcgcctaatttgacccgttctttttcccctccttgaaaccttgctctgtacgcatgcgctctttgagtggcctttcccctagttcaagctcccctccgagtcagcgtcctgttcgttagggttatcgaagtgtataaaggtgcagggaaagtgagactgtgtaaaacaaagcggattggggcgttgtgcttccttgtacctcgtgagcctccgttgccttgggcggtcgttttgcgcaccctgccgggagttgtagtcctggacccgaaggtgcctgggaggcgggaggggggttggggcttctcagcgccgattccgcgggaagggccctgggacctcacacttctagtcgcgggagctgcaggtcttacccggagagacgctgcacgtggagccctcgccgctgccgttctcagccggctctggagtgcgggcgggggcgacagggccgattccggagtgggactgatcctttgaaatactccagccatgactaaaagagaagcagaggagctgatagaaattgagattgatggaacagagaaagcagagtgcacagaagaaagcattgtagaacaaacctacgcgccagctgaatgtgtaagccaggccatagacatcaatgaaccaataggcaatttaaagaaactgctagaaccaagactacagtgttctttggatgctcatgaaatttgtctgcaagatatccagctggatccagaacgaagtttatttgaccaaggagtaaaaacagatggaactgtacagcttagtgtacaggtaatttcttaccaaggaattgaaccaaagttaaacatccttgaaattgttaaacctgcggacactgttgaggttgttattgatccagatgcccaccatgctgaatcagaagcacatcttgttgaagaagctcaagtgataactcttgatggcacaaaacacatcacaaccatttcagatgaaacttcagaacaagtgacaagatgggctgctgcactggaaggctataggaaagaacaagaacgccttgggataccctatgatcccatacagtggtccacagaccaagtcctgcattgggtggtttgggtaatgaaggaattcagcatgaccgatatagacctcaccacactcaacatttcggggagagaattatgtagtctcaaccaagaagatttttttcagcgggttcctcggggagaaattctctggagtcatctggaacttctccgaaaatatgtattggcaagtcaagaacaacagatgaatgaaatagttacaattgatcaacctgtgcaaattattccagcatcagtgcaatctgctacacctactaccattaaagttataaatagtagtgcgaaagcagccaaagtacaaagagcgccgaggatttcaggagaagatagaagctcacctgggaacagaacaggaaacaatggccaaatccaactatggcagtttttgctagaacttcttactgataaggacgctcgagactgcatttcttgggttggtgatgaaggtgaatttaagctaaatcagcctgaactggttgcacagaaatggggacagcgtaaaaataagcctacgatgaactatgagaaactcagtcgtgcattaagatattattacgatggggacatgatttgtaaagttcaaggcaagagatttgtgtacaagtttgtctgtgacttgaagactcttattggatacagtgcagcggagttgaaccgtttggtcacagaatgtgaacagaagaaacttgcaaagatgcagctccatggaattgcccagccagtcacagcagtagctctggctactgcttctctgcaaacggaaaaggataattgagccccaggacattctgagactccaaagtctttcttaaaatgtttagagcaagtatagctcttacctttattactgaatttgaatcttcttttatttctaggctgtacagtctgatgcatgatttttttataaatatttcatactcttgtgaatttggatctttttactttgagcatatattttagaatatgtgtatgttaaaggatctccacaatgtctgcagtgtgaaggcaggttcattgtggaatagtttaacagtcaggaaggctaaactggtcagtattaatgtgtagccctaccaaaaatagccagtagtatctgaaaatgaaaaataaatgaagtatctctaggaaacagtctggcttaactatttttgaaaatataactgtttcccctctctgctgctttagatgttgctttacatagaaccagaaaatggaatttctcagctaaagcatgtgtgcctgtttcatctaatcaagcagagctaaaatgttcataccgaataaatttatattaataaattactaaactaagagtatcaggttatttatatatttgcaagcaaaggacagtaagaagttgactggcaaaagagcagtgctgaaggaggagatccaggtttaaatctggcttattaactcaagccaattttaaggattttctgtatagattactcatgtcagaccaagaatttaaattattttgagagaggcatttaattctaataaaccagctgttataaaaattataaaatgatctctgtttttcctgtcagagatttaaaaaactgaaaaggtatacctcaacccaaaaataaaggtttgttttggtttgttatggcttccttttttaaaaaattaccctgtagtgccagtttattatgcaaagcagcttatattcctttgtttctgataaaatgaagactttaaatcagtcagtagtactttacctttcaaggcattagtaaattacttgcaaatagttttaaaaggaaaatacgacctttgttataggcagtcttctctttaagacaatacttttccacttgttttccttttccatattatatatgtgtattcatatagctgtatacatattcagttgatcattttataaacatatgaaggcataaagatatacagaagaaaaattattaaacaactcattttaagattcaaattaactaattcctgcatatatgacattccttacataagcgaacactaaacaaaaatggctagaaatgtctttttctttcttttctctctttgttgtttaaggtattaagcacgaattattacatgagactggcagatagctattaatcctcttacagatttgagaaagttgattctcaaatatttatgcaccttctccttcattgttttctttaaatctgtcctcttaaaaagcttcttaagagctcagttaatgcttttgacttaactaggagaaaaaggcatgataatacaggcaagatggcattgttagcaattctggtagtggtttggaatgaatcctaagaggcagggatcttaaggacaaggaagagaagagagagagggagggatctttgatctctttctctggtaatcttaatgcataattttactaatacatgttctcaattcattcatattattaagctcttcctgcagttgatatctgagcagagtaagatttgtatttccatttttacttttttgaaagagaatatatggacagattattagtacaatttgggcactgtggttttaagaatatctgagtaaaataacaatatgaaataataaacagaagctctaacgtcaggtaacaaatagacagcaagaaaggttttgcaccatcctcttacggcctagagagttgacaagttgcttgtagttttaaaaaaataataaagtatacccttctggtatatcatcaagagcttaagaatcttggctttcatatttaaaatgcttttggggagacatatattaaaattttagccaagatgatagacatgtctcaattatatatgtgtgtgtatgtttttaaagctaaaaacattacttttagatccctagaatgaaaatttttttctcatctatgcaattcccatatggtttttttttaaatcatattttattcattttctccctttagcaattttcattttatttctcataatttgaacagagacagttctcatacatgatcagatgctttttttttcttcttaccatcatttatgcatgacataggtaatgtgactaatttctccagttgattcaagaaactcattactttgcctcaaattatatgtaaaatatttgttttacttaggttacagttatcagaaaggtagtttttttcttctattaaaatataacattgtgaaagaaaataaaatttatgctattctttgctttgtttttataaatgaatttttcatagaatttacagtatattcaaaggaagaaagataaaattattggtcatcatttgtaccttagaagtacaagaatttaagtaaaagaaatgttcatttttgttttaaaatttgttttccatgtgaagtttttattgagccaactttcatacatatcttgctagcctaaagtctaaatatttgtgttggcatcagaaaaacaaatgaggcagaattgctatgtgtggttgatcttcagataaattgactgatcacagttatttttgtatcagtctatgttattaggaaaaattgtttagttgttttctcccctgattaatggtgatattcaagtatgatacaaaaagaattgtaccaccaaatatttttgtgaggtctgctgttttccatattcattttatgctactgcctttaagaaagaactagtgtatccttgaaatagcacaaaaatgttttaaaattcataattgcaaaacaaatctgtgactaacttaatgtcttcagatctaaagggtgtaaaaatattgatacttcaatatttcacttgctgccaggaaaaacaaaattctcaatcttttgtaaatgggaggaggacttttgcatacatttttactctttaaataacgacaacgacacttatactgtcataataacaattatgtatttctttgtggttttaattttttttgtaattttacataaaacagttattttctatttttacgcagataaatatttgtgcataaaatgtaaaaatagtaaaatgagaaaaataaaactattatacagta

SEQ ID NO: 11743 - protein, 454 aa, Homo sapiens; identical to SEQ ID NO: 1944

SEQ ID NO: 11744 - DNA, 1075 bp, Homo sapiens
tctgaagacagcctcccaccccaccccacctcatcatgctcttccaggacagctacaggaagaaaaggagataacagaatctaatgatgtcccataagatctccagtcaaggtgtgaacatgaagctccatttgcctatctttaccaagagcttgatgatttgaaccactgactgattgccctgtacttggaggatgtgaggaagcagaattgagccaataaagagaagaggaagaaggagccacagaactgagtgggatgtcccctgagcactccttggtggagcaaaagtcttgcaagtctctagtgcgctgggcaggctgagggcgttcagccgagaacacagctctgtaaatacatcagcgaggatgcatatatacagtttccccagtgctccctcagacccttggaggctgggctactccaagctctgtttcctgcaaaaaaatggagtaagtcctgtggagtctaaatacacattccctctgcattatacccacgcctcgacttcattatatctaggagcactgagacaaagagatttataacaaacttcatccaagccaagaatgaaacacggcagcctccatgcagcaggaaacccattgatctgtttcttataagcatgtggttctatgctgtttttctgccaaagcttttccctgcctcccacttgaggagcatacaccagctgattctgcagattgactctacatcattctctgtcatgaagccatggcatgtgtttatgcgtctgtaacaaagcgtttatattctgccatctgcataaaaactgctgaaggacatttcagcaagaatccctatggtttatgcagctgcatgttgaacatgaaaatctaagatatgacagtggtctttcattcatacaacctttgaattttggtaaagttctgatgtaatgttaaagagtggtattttgaggactacgcatcaagatataaacatggcacatcttttataatatcagccactggaagacatttgaaataatatttgtataattgtgggctgtattatctttctttcttgcacataataaagtttcactggaagt

SEQ ID NO: 11745 - protein, 59 aa, Homo sapiens
MHIYSFPSAPSDPWRLGYSKLCFLQKNGVSPVESKYTFPLHYTHASTSLYLGALRQRDL

SEQ ID NO: 11746 - DNA, 422 bp, Homo sapiens
acctgagttctaaatttatttctcaaagaagccaagctcctgagagagaaatgatactgtaagagtatctgcctggaaaccctgttgcctggagaccactcttgaagaacatccactgctgtggcctcttaaagatttaagacatctaatgaacagctgacagaaatcatcaatttgctcctcatttcagtgtcaaatcatgatgcaacagcagagtgaactcagtgtttttggtatgaagatctccatgtgtttccatcatcagcatctcctgtgctcttaatcttaccctggacacctgacccaggtgcccattctgtgaattctttcattgtaggaaagagaaacagatgttgacaccatgctcttggacttcccagcttccagaatcatgagccaaataaacctcttttctttataaa

SEQ ID NO: 11747 - protein, 45 aa, Homo sapiens
TQCFWYEDLHVFPSSASPVLLILPWTPDPGAHSVNSFIVGKRNRC

SEQ ID NO: 11748 - DNA, 3412 bp, Homo sapiens
aggtgtcgaacccaagggctcttctcagcagagtgtctgcatgccacactctgctttagagtctgttccctggggaacacaaccagagactgaaataattggtgggcagtggggagcacaaagggctgtttttgtttcatgtgaagacgatgagcatgctatgaaccccgaagagctgttgtataaagtatctgcctggaaaccctgttgcctggagaccactcttgaagaacatccactgctgtggcctcttaaagatttaagacatctaatgaacagctgacagaaatcatcaatttgctcctcagcctccctcctccctgaaacacaaaaacattgaaattaggccaattaataactctacaatggcctctaagagttaaaatgaaaggaagtgtaaaatggtttctcacttgaaatcaaaagctagaaatgattaagcttcgtgaggaaggcaagttgaaagctgagacagccaaaagctgactcccgcaccagggagccaagttgtgcaagcaaaggaaaagttcttgaaggaaattaaaagtgctgctccagtgaacacatgaatgataagaaagcaaaagtgatctgggtagaagatcaaaccagccacaacatgcccttaagccaaagcctaatccagagcaaggctttaactctcttcaagtttgtgaagactgagagaggtaaggaaagtgcagaaggaaagttaaatgctagaagagtcggttcaggaggtttcaggaaaaagccatctccacaaataaacatacaacgcgaagcaacaaatgctgatgtagaagctgtggcaagttttccagaagagctagctcagatcattgataaacgtggctacattaaacaacatattttcagtgtggatgaaacagagtcctattggaagaagacaccatctaggactttcatagctacagggaaaagtcaatgactggcttcaaagcttcaaagaacagggtgactctcttgtcagacactaatacagctgctgacttgaagttgaagccagtgctcactgcacattctgaaaacttaaggatccttaagaactgtgctaaatctactgtgcctatgtgcaacaaagcccttatggcagcatgtctgtttacagtatcatttactgaatatttgaagcctactactgagaactactgctcaggaaaaaagatacttttcaaaatagtactgctctttgacaatggacctggtcacccaagagctctgatggaggtgtgcaaggagatgaacgctgtgttcatgcctgctaacacaacacccgttctgtactccatggatcacagagtaattttgactttcaagtcttattatttgagaaataaattttgtaaggctatagctgccacacatagttattcctgtgatggatccgggcaaagtaaattgaaaacctagaaaagagtcaccattctagatgtcactaagaacatttgtgattcatgggaggaggttaaattatcaacattaatagaagtttgaaagaaatttattccagccctcatggatgactttgatgggttcaagactttggtagaggaagtaactgcaggtatagtgataatatcaaggaaattagaactaaaagtggagcctgaagatgtgactgaattgcttcagtctcacgataaaacttgaacataacagcagttaattcttacggattagcaaaaaagtggttttgtgagatggaatctattcctggtgaaaatgctgtgaacactgtggaaatgacaacaaaggatttagaatattacataaacttagttgataaagcagcagtagggtttagaaggattgactccaattttgaaagaagttctacggtgggtcaaacgctaccgaagagcgttgcacgctatagagaaatctttcatgaaaggaggagtcaactgatgtagcagacttcactgttgtcttatttttaaaaatttccacagccaccccaattttcagcaaccaccaccttgatcagtcagcagccatcagcatcaaagcaagaccctcttccagcaaaaaaattacaacaacttgctgaaggctcggatgatttttagcaacaaactattttaaaattaagattgtcaaacatgacccttgaggcttacctctggattgtggtatgaaggaatgaaagcgaaaaataattacctttgtgagattcagtaagtacttaagtccacttttaaaatttgaaaacagaaacaaaatctaacgatttagacacaagggagaagccaatatattgacaatagatgctttttgcagagtacaacagacttttaaaggctatttattttacagttttcttggtgaatttccatagctctcatttttagtgctgtttaatttattcaaatatttagactggtcagttatcccaagggcttagtggggatgttttgcttcatgttcttaaaagccattcaatgtacgcctacagccatctgatctttgacaaagtcagcaaaaataagcaatggggaaaggactccctactcaataaatggtgttggataaccagttggccatacacagaagaatgaaactggactcctatcttttaccacatacaaaaattaactgaaaatggattaaagatttaaatgaaagacctcaaactataagactcctagaagaaaagctaggaagcaccgttcctgacatcagccttgggaaggaatttataactaagtcctcaatagcaattgcaacaaaagcaattgacaagcgggatttaattaaactaaagagcttctgcacagcaaaataaactatcaacagagtaaacaatctacagaatgggagaaaatatgtgtaagctatgcatctgacaaaagcctaatatccagaatctataaggaggttaaataattgaacaaacaaaaaccaaataatctcattaaaaaatgggcaaaggacatcaaccagacacttctcaaaagaagacatacaagcagccaacaaacacaacaaaaaaatgttcaacaagtcaccaatcatcagagaaatgcaaatcaaaacagagggctattattgaaaagtcaaaaaagcaacagatgctggtgagcctgtggagaaaagggaatacttatacactgctattggaaatgtaaattagttcaaccactgtggaaagcagttgggagatttctcaaagaacttaaatcaaaactaccatttgcctcagtgatcccattgctggggtatctatctaaagggaaataaatcattctatcaaaaagacaaatgcagttgtacattcgtcacagcactattcaaaatagtaaagagactgattcatcccaagtgttcattaatagtggactcagtaaagaaaatgtggtacatacacaccgtggaatactatgcagcc

SEQ ID NO: 11749 - protein, 80 aa, Homo sapiens
MPHSALESVPWGTQPETEIIGGQWGAQRAVFVSCEDDEHAMNPEELLYKVSAWKPCCLETTLEEHPLLWPLKDLRHLMNS

SEQ ID NO: 11750 - DNA, 2751 bp, Homo sapiens
ctaagcaagtgcttcaagccagatactgcttttcctgttctgcgcattccttaaggtgggaggcaggatgattgccttgctcagtgtggcaaagattgcaaatcttactgctgtgatggaaccacgccctactgttgctcctactacgcttatattgggaatatcctctcgggcactgcaattgcgggcattgtttttggaatagtatttatcatgggggtcattgctgggattgccatatgcatctgcatgtgcatgaagaaccacagggcgacccgcgtgggcatcctcaggacgactcacatcaacaccgtctcctcctatcctggaccaccaccctacggtcacgaccacgagatggaatactgtgcagacttgcctcctccatactcccccaccccacagggtccagcacagcgttctccaccccctccttatcctggaaacgcaaggaaataatctatctcccagaacagaacatgtgccaatgggcgatcttgcctggaataaaatgcctctactcagaaacaggcaggaaagaattgctccaaggaatactttttggggtcagataatgtgtcaggtggaatatccctgctaggagatataggatttctactctgctcaaagctgaccccatctggagtattaatgtttggttctatggaaccacattttaagagatctgctgatccacctaagcacattcagggaagagtaatgtaattgacaaaatatctgataatcatgttgtttaagggctaggtgaagaaagtttcagtattgatcctggaaaaaaagaagatctaagtaggatgggagaatgatttggcccacacaaggaagcaactttattctatatagctttaaaagtcagaactagaattgttcattctttcattcatcaataaatgtattttgagtgcctaagagtttactatgtgcctagcactgtttgaggtcctgatggaagttacaggacgggtactctggttttagtacaagaaagagcaatgactagattgctttgtgaagctcttggtagagacacgctccagaagggataacaaaatcaaatagtagatgggttcattgggcctcagaagttctgctcgtattttaggtgggtgtgaagtgaatttctatatgtccaggagtgaatacaacagaaagagttggatcttatttatttaattagggagttaaaacaagaccaaaaagactcaacagccgcttgaagccaagaactcttcaatgccagctactgccacctaaaaatcatctggctttatagtggatcagaataaaggttattctaactgtggggagaaaaaaaaaattgtatcaagttccacaggtagcagacacttcacttccaagtaaaagatgagaaatcaattattcccacaggattttaggtcagggagcaaaaatctcagaacttgaccatgaagatacacaacagactcgcaaaaataaagtgggaaatgaagttcagattcccttctgtagatttccttaaaactattatttttttcttcttcgtaaaattttgataatctgttctcttaaaaaagttaatgacacaattaagatactgacatcaaattgttgccttttaccaaaatgcaaattttatgaagtgcctacctttatatgtataaagcatttaataaataattctaatgtgccatattttgctgtgagtgaccttaacatttatatttttatatgaattgtttcatgtatttataaaaattgtatattgaacattggaaatagatgattagatttttgtgtcattttacaattaaatctaaaatgcttaatccaatatcatcatcaaaattcagtgaaatcccaaaacagtgccaagaattttgctgaatgaaacaatcaaacaaagcattttaaggtgtaagttatagtacctgtacttgcagataagaagcttactatatcattattataagtagcatatattactttcaaatacctatattagaaagatattgatctgactgaaatataacctacctgccagtaaggtccaaaggctgaatttgttttgaatgagttccttgatctttaagcactgatgattttcttatatatgaggatgcaaagcattcaagagtttcagcctgttctggtgaggggctccctgacttacataaagttttcagtgcaattttaatagtacatatgctttaatttatttttcttctgcgtgtggtcagacccaattacactgtggctaagactctcaaagtgccagggtttctgtgatgattctgagaatgctgaatacaaatataccttatattctttaaggaaaacggaaaggaaagatcagcagaaatagggttttctcatcttcaccatcaataaacatttattgcgtacctcctatattctgcaaattttccccaaatagaagccagttcagtccacaccatctcttctttgagttgtttatggcctcccttaaggcattttacaaacccataagcctacaatagatgagtatttttactatttgtattaagtgtcataatagcatcaatgtgcacattaccagtatagactgttggagttcactgattgttttcatagatgatgcttcttggggaaaaatagtataggatgtgaaagttttgaattacggttatttaaaaactaacatttgctatggccaaagtgtttacaataagcaataaagtgaaagaacctattataacacagattata

SEQ ID NO: 11751 - protein, 111 aa, Homo sapiens
MHLHVHEEPQGDPRGHPQDDSHQHRLLLSWTTTLRSRPRDGILCRLASSILPHPTGSSTAFSTPSLSWKRKEIIYLPEQNMCQWAILPGIKCLYSETGRKELLQGILFGVR

SEQ ID NO: 11752 - DNA, 3101 bp, Homo sapiens
agtcgttgccacccgcggagatgaaatgtgagcctgggtggccaaggacgccggagtggccgccttccccgcgcctgagcgcagtggggcgagacaaagagacctgggcccccagcgcagcccgtctcgggccacgggcgccccagctccgcggagtcccgcagtcgctggcccgggacgcgcccggcccgggctcccttggaaggctccctaggcaatggccgggtctctgctccacccggctctcaggagcgctgctctctccatctgatcgccctccatcctccccattccctccggttccgggctctcccttcgctccaagcctcaggccaccggcttggatggacgctccgaggctacccgtgcgtccaggggtcttgcttccgaagttggtcctgctctttgtctacgcagatgattgccttgctcagtgtggcaaagattgcaaatcttactgctgtgatggaaccacgccctactgttgctcctactacgcttatattgggaatatcctctcgggcactgcaattgcgggcattgtttttggaatagtatttatcatgggggtcattgctgggattgccatatgcatctgcatgtgcatgaagaaccacagggcgacccgcgtgggcatcctcaggacgactcacatcaacaccgtctcctcctatcctggaccaccaccctacggtcacgaccacgagatggaatactgtgcagacttgcctcctccatactcccccaccccacagggtccagcacagcgttctccaccccctccttatcctggaaacgcaaggaaataatctatctcccagaacagaacatgtgccaatgggcgatcttgcctggaataaaatgcctctactcagaaacaggcaggaaagaattgctccaaggaatactttttggggtcagataatgtgtcaggtggaatatccctgctaggagatataggatttctactctgctcaaagctgaccccatctggagtattaatgtttggttctatggaaccacattttaagagatctgctgatccacctaagcacattcagggaagagtaatgtaattgacaaaatatctgataatcatgttgtttaagggctaggtgaagaaagtttcagtattgatcctggaaaaaaagaagatctaagtaggatgggagaatgatttggcccacacaaggaagcaactttattctatatagctttaaaagtcagaactagaattgttcattctttcattcatcaataaatgtattttgagtgcctaagagtttactatgtgcctagcactgtttgaggtcctgatggaagttacaggacgggtactctggttttagtacaagaaagagcaatgactagattgctttgtgaagctcttggtagagacacgctccagaagggataacaaaatcaaatagtagatgggttcattgggcctcagaagttctgctcgtattttaggtgggtgtgaagtgaatttctatatgtccaggagtgaatacaacagaaagagttggatcttatttatttaattagggagttaaaacaagaccaaaaagactcaacagccgcttgaagccaagaactcttcaatgccagctactgccacctaaaaatcatctggctttatagtggatcagaataaaggttattctaactgtggggagaaaaaaaaaattgtatcaagttccacaggtagcagacacttcacttccaagtaaaagatgagaaatcaattattcccacaggattttaggtcagggagcaaaaatctcagaacttgaccatgaagatacacaacagactcgcaaaaataaagtgggaaatgaagttcagattcccttctgtagatttccttaaaactattatttttttcttcttcgtaaaattttgataatctgttctcttaaaaaagttaatgacacaattaagatactgacatcaaattgttgccttttaccaaaatgcaaattttatgaagtgcctacctttatatgtataaagcatttaataaataattctaatgtgccatattttgctgtgagtgaccttaacatttatatttttatatgaattgtttcatgtatttataaaaattgtatattgaacattggaaatagatgattagatttttgtgtcattttacaattaaatctaaaatgcttaatccaatatcatcatcaaaattcagtgaaatcccaaaacagtgccaagaattttgctgaatgaaacaatcaaacaaagcattttaaggtgtaagttatagtacctgtacttgcagataagaagcttactatatcattattataagtagcatatattactttcaaatacctatattagaaagatattgatctgactgaaatataacctacctgccagtaaggtccaaaggctgaatttgttttgaatgagttccttgatctttaagcactgatgattttcttatatatgaggatgcaaagcattcaagagtttcagcctgttctggtgaggggctccctgacttacataaagttttcagtgcaattttaatagtacatatgctttaatttatttttcttctgcgtgtggtcagacccaattacactgtggctaagactctcaaagtgccagggtttctgtgatgattctgagaatgctgaatacaaatataccttatattctttaaggaaaacggaaaggaaagatcagcagaaatagggttttctcatcttcaccatcaataaacatttattgcgtacctcctatattctgcaaattttccccaaatagaagccagttcagtccacaccatctcttctttgagttgtttatggcctcccttaaggcattttacaaacccataagcctacaatagatgagtatttttactatttgtattaagtgtcataatagcatcaatgtgcacattaccagtatagactgttggagttcactgattgttttcatagatgatgcttcttggggaaaaatagtataggatgtgaaagttttgaattacggttatttaaaaactaacatttgctatggccaaagtgtttacaataagcaataaagtgaaagaacctattataacacagattata

SEQ ID NO: 11753 - protein, 262 aa, Homo sapiens
MKCEPGWPRTPEWPPSPRLSAVGRDKETWAPSAARLGPRAPQLRGVPQSLARDAPGPGSLGRLPRQWPGLCSTRLSGALLSPSDRPPSSPFPPVPGSPFAPSLRPPAWMDAPRLPVRPGVLLPKLVLLFVYADDCLAQCGKDCKSYCCDGTTPYCCSYYAYIGNILSGTAIAGIVFGIVFIMGVIAGIAICICMCMKNHRATRVGILRTTHINTVSSYPGPPPYGHDHEMEYCADLPPPYSPTPQGPAQRSPPPPYPGNARK

SEQ ID NO: 11754 - DNA, 1694 bp, Homo sapiens
ctaagcaagtgcttcaagccagatactgcttttcctgttctgcgcattccttaaggtgggaggcaggatgattgccttgctcagtgtggcaaagattgcaaatcttactgctgtgatggaaccacgccctactgttgctcctactacgcttatattgggaatatcctctcgggcactgcaattgcgggcattgtttttggaatagtatttatcatgggggtcattgctgggattgccatatgcatctgcatgtgcatgaagaaccacagggcgacccgcgtgggcatcctcaggacgactcacatcaacaccgtctcctcctatcctggaccaccaccctacggtcacgaccacgagatggaatactgtgcagacttgcctcctccatactcccccaccccacagggtccagcacagcgttctccaccccctccttatcctggaaacgcaaggaaataatctatctcccagaacagaacatgtgccaatgggcgatcttgcctggaataaaatgcctctactcagaaacaggcaggaaagaattgctccaaggaatactttttggggtcagataatgtgtcaggtggaatatccctgctaggagatataggatttctactctgctcaaagctgaccccatctggagtattaatgtttggttctatggaaccacattttaagagatctgctgatccacctaagcacattcagggaagagtaatgtaattgacaaaatatctgataatcatgttgtttaagggctaggtgaagaaagtttcagtattgatcctggaaaaaaagaagatctaagtaggatgggagaatgatttggcccacacaaggaagcaactttattctatatagctttaaaagtcagaactagaattgttcattctttcattcatcaataaatgtattttgagtgcctaagagtttactatgtgcctagcactgtttgaggtcctgatggaagttacaggacgggtactctggttttagtacaagaaagagcaatgactagattgctttgtgaagctcttggtagagacacgctccagaagggataacaaaatcaaatagtagatgggttcattgggcctcagaagttctgctcgtattttaggtgggtgtgaagtgaatttctatatgtccaggagtgaatacaacagaaagagttggatcttatttatttaattagggagttaaaacaagaccaaaaagactcaacagccgcttgaagccaagaactcttcaatgccagctactgccacctaaaaatcatctggctttatagtggatcagaataaaggttattctaactgtggggagaaaaaaaaaattgtatcaagttccacaggtagcagacacttcacttccaagtaaaagatgagaaatcaattattcccacaggattttaggtcagggagcaaaaatctcagaacttgaccatgaagatacacaacagactcgcaaaaataaagtgggaaatgaagttcagattcccttctgtagatttccttaaaactattatttttttcttcttcgtaaaattttgataatctgttctcttaaaaaagttaatgacacaattaagatactgacatcaaattgttgccttttaccaaaatgcaaattttatgaagtgcctacctttatatgtataaagcatttaataaataattctaatgtgccat

SEQ ID NO: 11755 - protein, 111 aa, Homo sapiens; identical to SEQ ID NO: 11751

SEQ ID NO: 11756 - DNA, 2044 bp, Homo sapiens
agtcgttgccacccgcggagatgaaatgtgagcctgggtggccaaggacgccggagtggccgccttccccgcgcctgagcgcagtggggcgagacaaagagacctgggcccccagcgcagcccgtctcgggccacgggcgccccagctccgcggagtcccgcagtcgctggcccgggacgcgcccggcccgggctcccttggaaggctccctaggcaatggccgggtctctgctccacccggctctcaggagcgctgctctctccatctgatcgccctccatcctccccattccctccggttccgggctctcccttcgctccaagcctcaggccaccggcttggatggacgctccgaggctacccgtgcgtccaggggtcttgcttccgaagttggtcctgctctttgtctacgcagatgattgccttgctcagtgtggcaaagattgcaaatcttactgctgtgatggaaccacgccctactgttgctcctactacgcttatattgggaatatcctctcgggcactgcaattgcgggcattgtttttggaatagtatttatcatgggggtcattgctgggattgccatatgcatctgcatgtgcatgaagaaccacagggcgacccgcgtgggcatcctcaggacgactcacatcaacaccgtctcctcctatcctggaccaccaccctacggtcacgaccacgagatggaatactgtgcagacttgcctcctccatactcccccaccccacagggtccagcacagcgttctccaccccctccttatcctggaaacgcaaggaaataatctatctcccagaacagaacatgtgccaatgggcgatcttgcctggaataaaatgcctctactcagaaacaggcaggaaagaattgctccaaggaatactttttggggtcagataatgtgtcaggtggaatatccctgctaggagatataggatttctactctgctcaaagctgaccccatctggagtattaatgtttggttctatggaaccacattttaagagatctgctgatccacctaagcacattcagggaagagtaatgtaattgacaaaatatctgataatcatgttgtttaagggctaggtgaagaaagtttcagtattgatcctggaaaaaaagaagatctaagtaggatgggagaatgatttggcccacacaaggaagcaactttattctatatagctttaaaagtcagaactagaattgttcattctttcattcatcaataaatgtattttgagtgcctaagagtttactatgtgcctagcactgtttgaggtcctgatggaagttacaggacgggtactctggttttagtacaagaaagagcaatgactagattgctttgtgaagctcttggtagagacacgctccagaagggataacaaaatcaaatagtagatgggttcattgggcctcagaagttctgctcgtattttaggtgggtgtgaagtgaatttctatatgtccaggagtgaatacaacagaaagagttggatcttatttatttaattagggagttaaaacaagaccaaaaagactcaacagccgcttgaagccaagaactcttcaatgccagctactgccacctaaaaatcatctggctttatagtggatcagaataaaggttattctaactgtggggagaaaaaaaaaattgtatcaagttccacaggtagcagacacttcacttccaagtaaaagatgagaaatcaattattcccacaggattttaggtcagggagcaaaaatctcagaacttgaccatgaagatacacaacagactcgcaaaaataaagtgggaaatgaagttcagattcccttctgtagatttccttaaaactattatttttttcttcttcgtaaaattttgataatctgttctcttaaaaaagttaatgacacaattaagatactgacatcaaattgttgccttttaccaaaatgcaaattttatgaagtgcctacctttatatgtataaagcatttaataaataattctaatgtgccat

SEQ ID NO: 11757 - protein, 262 aa, Homo sapiens; identical to SEQ ID NO: 11753

SEQ ID NO: 11758 - DNA, 839 bp, Homo sapiens
agtcgttgccacccgcggagatgaaatgtgagcctgggtggccaaggacgccggagtggccgccttccccgcgcctgagcgcagtggggcgagacaaagagacctgggcccccagcgcagcccgtctcgggccacgggcgccccagctccgcggagtcccgcagtcgctggcccgggacgcgcccggcccgggctcccttggaaggctccctaggcaatggccgggtctctgctccacccggctctcaggagcgctgctctctccatctgatcgccctccatcctccccattccctccggttccgggctctcccttcgctccaagcctcaggccaccggcttggatggacgctccgaggctacccgtgcgtccaggggtcttgcttccgaagttggtcctgctctttgtctacgcagatgattgccttgctcagtgtggcaaagattgcaaatcttactgctgtgatggaaccacgccctactgttgctcctactacgcttatattgggaatatcctctcgggcactgcaattgcgggcattgtttttggaatagtatttatcatgggggtcattgctgggattgccatatgcatctgcatgtgcatgaagaaccacagggcgacccgcgtgggcatcctcaggacgactcacatcaacaccgtctcctcctatcctgaatatgaactccatgaggcagagatcttggtctattttgttcaacactctattccaagcatgtaagaccaggcctggtacataatgggcactcagctgaatgaatgatgaacacaactcatgaaaagacctgaattaatcatatatcaataccctagggaa

SEQ ID NO: 11759 - protein, 240 aa, Homo sapiens
MKCEPGWPRTPEWPPSPRLSAVGRDKETWAPSAARLGPRAPQLRGVPQSLARDAPGPGSLGRLPRQWPGLCSTRLSGALLSPSDRPPSSPFPPVPGSPFAPSLRPPAWMDAPRLPVRPGVLLPKLVLLFVYADDCLAQCGKDCKSYCCDGTTPYCCSYYAYIGNILSGTAIAGIVFGIVFIMGVIAGIAICICMCMKNHRATRVGILRTTHINTVSSYPEYELHEAEILVYFVQHSIPSM

SEQ ID NO: 11760 - DNA, 576 bp, Homo sapiens
agtcgttgccacccgcggagatgaaatgtgagcctgggtggccaaggacgccggagtggccgccttccccgcgcctgagcgcagtggggcgagacaaagagacctgggcccccagcgcagcccgtctcgggccacgggcgccccagctccgcggagtcccgcagtcgctggcccgggacgcgcccggcccgggctcccttggaaggctccctaggcaatggccgggtctctgctccacccggctctcaggagcgctgctctctccatctgatcgccctccatcctccccattccctccggttccgggctctcccttcgctccaagcctcaggccaccggcttggatggacgctccgaggctacccgtgcgtccaggggtcttgcttccgaagttggtcctgctctttgtctacgcagatgattgccttgctcagtgtggcaaagattgcaaatcttactgctgtgatggaaccacgccctactgttgctcctactacgcttatattgggaatatcctctcgagagaattcaaggatcaccagacatttgaagaaaacatcaaatatgaatgagatc

SEQ ID NO: 11761 - protein, 183 aa, Homo sapiens
MKCEPGWPRTPEWPPSPRLSAVGRDKETWAPSAARLGPRAPQLRGVPQSLARDAPGPGSLGRLPRQWPGLCSTRLSGALLSPSDRPPSSPFPPVPGSPFAPSLRPPAWMDAPRLPVRPGVLLPKLVLLFVYADDCLAQCGKDCKSYCCDGTTPYCCSYYAYIGNILSREFKDHQTFEENIKYE

SEQ ID NO: 11762 - DNA, 7385 bp, Homo sapiens; identical to SEQ ID NO: 1947

SEQ ID NO: 11763 - protein, 714 aa, Homo sapiens; identical to SEQ ID NO: 1948

SEQ ID NO: 11764 - DNA, 1005 bp, Homo sapiens
agagcggcctgcctgttcccggctacagattatgatgtctgtgcagctgcctttcattcacagcttccctgaatggtgccaaagttaattcctccaggaatagccccaccagtcacaaggaaggggggtaatgcccaggatgcccccttcattctcactcctggtgcgggcttgctgccatcaacagccaaagggagaagtcaggcagcagaaaagcttgggaggccctggaaaccccctaagcttctccacaacagtgccggtcttatctgttgcagccacggcgagagtcccacatcatccatcctcaggtgggaaccctgcaagcctgtattccaccatgggaagaccagcatgctgtgcattggctccagggagcaccacgcagtccccggcacttccaactctatgtcctttgcaggtgaagcagctctattagcaggtgtctgaagaaggttgcaggtgcgagcaggtagaaggaaagcacacagaagctgcgggatgcacacacaaaatgggtaaaagggatccctggaggtctgggcagagcaccaggagtgtcctggggtgctcttaccctcctattggacagatgagtaaagtgaggtacagggacattaagtaacttgcccaacattaaagagctttagtttggatgccttgatttggaacttctggccactagaactgtgagagaataaaatgtgttgttctaggccaccctgccagtggtactttattacagcagccactgaaaactcaggcaggagggatctgtggtgacggacttggaggcgtggttgcaagggttgtttcactgaacagacacagcaggggcagctgctggggtattgaggtcgaggtcaaacacggtcactgctggagcaattctgtaatcagccatggttagctgaaacctcattctctatgcaaaccccaaatggctgttttcccttttgaacctcaagaacacacgctagaaatcagtgctccctgtcagccagc

SEQ ID NO: 11765 - protein, 125 aa, Homo sapiens
MVPKLIPPGIAPPVTRKGGNAQDAPFILTPGAGLLPSTAKGRSQAAEKLGRPWKPPKLLHNSAGLICCSHGESPTSSILRWEPCKPVFHHGKTSMLCIGSREHHAVPGTSNSMSFAGEAALLAGV

SEQ ID NO: 11766 - DNA, 428 bp, Homo sapiens
aacagctctgtgtctggaatgagccctcctagaattcagtaccataaaactgaagacatgtaaatctgctcatgtaaatcctccactgcatagccttttgtgtggagcatttatccggactgatggcaaaaactactgatatcatatggaaatgccagctcagaagatgtggtgagctttgataattcaggaattgactgacagaaggaggacctcatttgggcagaatggctcccaaaacccagttgtgtctctgggtgtgtaagcccagcagcaggcagtgtgtcatcgctgtgtcagttctatggtgtgatgtgcggaactggtactggaatgtagacatcaaggctggttcttcggctctcccaaaggccaaagatatctatttaaatatcatttaaataaacccctttattgcttaaatcatc

SEQ ID NO: 11767 - protein, 57 aa, Homo sapiens
MAPKTQLCLWVCKPSSRQCVIAVSVLWCDVRNWYWNVDIKAGSSALPKAKDIYLNII

SEQ ID NO: 11768 - DNA, 929 bp, Homo sapiens
cctagtgttggaggtagagcctggcgggaggtgatttgatgatggggcggatttctcatgaatagtttggcaccatcccctcgatactgtcctcaccagagcgagtccgtttgtgagatctgcttgtttaaaagggtgtagcacctacccctccatctcttgctcctgctctgggcctgtgcctgcttcccctttgccttctaacatgattctgagcttcctgaggccactccagaagccgagcagatgccagcatcacgtttcctgtacagcctgcagaaccgtgagccaattaaacctcttttctttacaaattacccagtctcaggtatttctttataacaatgcaagaatggcctaacacaggtgtccaggggcagagggaggctgagtgtcaggtgaatggatgtcctgactcatagaaggaaagatcaggaataggaagaaaagctttcccacaaaactgccacttaccccagaacaactcacccagcatagtcaggtgttaggtctttactgaaggtttggaaggacagagggtgggctcacactgcttgacactgatggcttaaccttgagtattagccattggcctccttgtcttggaagtcctttggccctgccaccaagaactgttccctggctgcctccttcccagctgcagcttcctctggtgttgctagagccttccctcctggaaggtgcttctcctgaattcctcttataatgcagagaattttgactcttcgtccctctgttggacatctaagtaacattaaagggctcagcttcacacacgatcacatatctatttcggcatcttggaagagcgagcagggatgtagacatcaaggctggttcttcggctctcccaaaggccaaagatatctatttaaatatcatttaaataaacccctttattgcttaaa

SEQ ID NO: 11769 - protein, 66 aa, Homo sapiens
MQRILTLRPSVGHLSNIKGLSFTHDHISISASWKSEQGCRHQGWFFGSPKGQRYLFKYHLNKPLYC

SEQ ID NO: 11770 - DNA, 698 bp, Homo sapiens
atctctactgtcccatatccatccctgctgaccaaagcaaaactaggtttttcttgcttttcctgggctgagcctcttattgttcctagacacagccagcctggtgagcacaggcaaactggacattggaagacccagctgcacaaagactccttcctgtgagaggcttggagaagactttgctctagacacacaagggagcctgtgggaaggtgccaggggagccaagaagagcaaaaccaaggaggcattgtttcctccagagcctcattcatcaactcgctctgaacagttagcacgctcagacagtcatcttctgcaccttgcctttccctgtgtcttgactgagggcttatctgagagccttttgttcaggctcataattattcagtgactcaggagcccacaagcattacccacggagccagacaagaccagcaagctctgaggaccacctgttccaagtcatttcctgtgtgggcggcaacttcacagggctgaaaatacgagttacggtaaaaatgtcttcaaccctggcgcgctggattgttgaaactcgatggaatcttgcttgattatgttcaggccagacacatttcattatcattctttgcatatatattaaaaactctaacccctttacaaacaaatgttctcaaggggcagacagcacacccttgcctcatgacattgctcta

SEQ ID NO: 11771 - protein, 115 aa, Homo sapiens
VFLAFPGLSLLLFLDTASLVSTGKLDIGRPSCTKTPSCERLGEDFALDTQGSLWEGARGAKKSKTKEALFPPEPHSSTRSEQLARSDSHLLHLAFPCVLTEGLSESLLFRLIIIQ

SEQ ID NO: 11772 - DNA, 1423 bp, Homo sapiens
gtttctccaaggcacactcccacccctgctaggcatgctattattgtctgtggtgttaggtgaatacctagaggaatgtttccattctgtaacaaaattatatgttttttttaatttgaaataaattttatgttaggtttttggctcttgtccaaggaagaacatgcagataactattctcacatgtcgacatgttaccgattataaaacctcagaatccaccggcagccttccttctcctttcctgagagccctaaaaacacagaatttcaaagactcggcgtgttgtccattgctagaacaaccgaatatagtacacgaccttcctgcagcagttctaagctactgtcaagtatggaaaatcccagcaattctgtacttgtgttatactgatgtgatgaaattagacctaatcacagtggaagcttttaagcctatactttctaccagaagcttgaagggtttggttaagaatattccccaaagcactgagatactaaagaaattgatgacaacaaatgagattcagagtaacatttatacatgatcttaaacattgttttgtagtgtatattacttgtccattcctttaaggggagcagcctgcactcttttgtagattacttttgggggatatattttgagaatgatgaaacggaataaaattgtaaaaaattaattgtagttttaattccttatttatggtggtattattcacaaccaaaataagccaagcattttccttttatccactaggtgggagtattgttgtatttgaatattttaaggtactatagttaaatttttatcttatttatttatttatttattttttgaggctgggtcttgctctgttgcccaggctgaagtgcagtgtgctatcatggttcactgcatcctcgacctcctgggctcaagcatttcccccgcctcggcctcccaaaatgctgggattacaggtgtgagccactgtgcccaactttagttaaatttttcaaagctacagatatcagcagatggtattcatgtggcaaagtgtagttaattaggtgtaactattcattgacctgttggtgattcttaatatgtggaaagtttctggatattttaggagtcctgcagttttttttatcttgtgggtaaaaattgatgacaaagtaacaaaattatatatttactaaaaatgaaacagaaatgtgtatgtcctcactttttagtaatatctgacagatagcctcttcacccagactttcccagggctctctttcaaggctggctctgcgcgtgtcagcagttctcttacagtcatgtgttatcattaggagtgtgaatggaatcatgaacccggagtagccacacaacttcacaggaccacaaactgaactgcattcatgaaaataaattttaaaatggtggagttaaa

SEQ ID NO: 11773 - protein, 127 aa, Homo sapiens [sequence omitted]

SEQ ID NO: 11774 - DNA, 1308 bp, Homo sapiens
agcatttctgtcatcatttgttatgaattcaggagtctgggaggaagttggttgtgctaaactctggaatgaatggtgtagaacaacagacactacacatctgtcctccacagaggctttttgtgtgttttatcatccctaaaaacacagaatttcaaagactcggcgtgttgtccattgctagaacaaccgaatatagtacacgaccttcctgcagcagttctaagctactgtcaagtatggaaaatcccagcaattctgtacttgtgttatactgatgtgatgaaattagacctaatcacagtggaagcttttaagcctatactttctaccagaagcttgaagggtttggttaagaatattccccaaagcactgagatactaaagaaattgatgacaacaaatgagattcagagtaacatttatacatgatcttaaacattgttttgtagtgtatattacttgtccattcctttaaggggagcagcctgcactcttttgtagattacttttgggggatatattttgagaatgatgaaacggaataaaattgtaaaaaattaattgtagttttaattccttatttatggtggtattattcacaaccaaaataagccaagcattttccttttatccactaggtgggagtattgttgtatttgaatattttaaggtactatagttaaatttttatcttatttatttatttatttattttttgaggctgggtcttgctctgttgcccaggctgaagtgcagtgtgctatcatggttcactgcatcctcgacctcctgggctcaagcatttcccccgcctcggcctcccaaaatgctgggattacaggtgtgagccactgtgcccaactttagttaaatttttcaaagctacagatatcagcagatggtattcatgtggcaaagtgtagttaattaggtgtaactattcattgacctgttggtgattcttaatatgtggaaagtttctggatattttaggagtcctgcagttttttttatcttgtgggtaaaaattgatgacaaagtaacaaaattatatatttactaaaaatgaaacagaaatgtgtatgtcctcactttttagtaatatctgacagatagcctcttcacccagactttcccagggctctctttcaaggctggctctgcgcgtgtcagcagttctcttacagtcatgtgttatcattaggagtgtgaatggaatcatgaacccggagtagccacacaacttcacaggaccacaaactgaactgcattcatgaaaataaattttaaaatggtggagttaaa

SEQ ID NO: 11775 - protein, 69 aa, Homo sapiens
MNGVEQQTLHICPPQRLFVCFIIPKNTEFQRLGVLSIARTTEYSTRPSCSSSKLLSSMENPSNSVLVLY

SEQ ID NO: 11776 - DNA, 2110 bp, Homo sapiens
gaaagcctttgggggccggacgcggtggctgaggcctgtaatccaagcactttgggaggtctaaggaggacgatcgctagagtcctggagttcgagaccagtctgggcaacatagcgagaccccctcccccaatctgtaatttaaaaacaaaaaagctgcggggactgctggcccagggcatgacagcgcgggcgggcggtgtagagggcgtggccgcgagctcagggtgtgcctgggagcgagccctgtgcggggcgggacgtagcgcccgcgcggtgggggtgtggccgcgagcttgggctgtgcgcggagggcgtggcctgtgcggggcgggacttattgcccgcgcggtgagggagcgtggtctcgcgcaagccggcgtgcggtcccgcggcgctgcagttgtgtccagccggtcacggggcggctatggcggccacgttcttcggagaggtggtgaaggcgccgtgccgagctgggactgaggacgaagaggaggaggaggaggggcggagggagacgcccgaggacagggaggtgcgtctgcagctggcgcggaagagggaagtgcggctccttcgaagacaaacaaaaacatctttggaagtttctttgctagaaaaatatccgtgctccaagtttataattgctataggaaataatgcagtagcatttctgtcatcatttgttatgaattcaggagtctgggaggaagttggttgtgctaaactctggaatgaatggtgtagaacaacagacactacacatctgtcctccacagaggctttttgtgtgttttatcatctaaaatccaatccctcggtttttggctcttgtccaaggaagaacatgcagataactattctcacatgtcgacatgttaccgattataaaacctcagaatccaccggcagccttccttctcctttcctgagagccctaaaaacacagaatttcaaagactcggcgtgttgtccattgctagaacaaccgaatatagtacacgaccttcctgcagcagttctaagctactgtcaagtatggaaaatcccagcaattctgtacttgtgttatactgatgtgatgaaattagacctaatcacagtggaagcttttaagcctatactttctaccagaagcttgaagggtttggttaagaatattccccaaagcactgagatactaaagaaattgatgacaacaaatgagattcagagtaacatttatacatgatcttaaacattgttttgtagtgtatattacttgtccattcctttaaggggagcagcctgcactcttttgtagattacttttgggggatatattttgagaatgatgaaacggaataaaattgtaaaaaattaattgtagttttaattccttatttatggtggtattattcacaaccaaaataagccaagcattttccttttatccactaggtgggagtattgttgtatttgaatattttaaggtactatagttaaatttttatcttatttatttatttatttattttttgaggctgggtcttgctctgttgcccaggctgaagtgcagtgtgctatcatggttcactgcatcctcgacctcctgggctcaagcatttcccccgcctcggcctcccaaaatgctgggattacaggtgtgagccactgtgcccaactttagttaaatttttcaaagctacagatatcagcagatggtattcatgtggcaaagtgtagttaattaggtgtaactattcattgacctgttggtgattcttaatatgtggaaagtttctggatattttaggagtcctgcagttttttttatcttgtgggtaaaaattgatgacaaagtaacaaaattatatatttactaaaaatgaaacagaaatgtgtatgtcctcactttttagtaatatctgacagatagcctcttcacccagactttcccagggctctctttcaaggctggctctgcgcgtgtcagcagttctcttacagtcatgtgttatcattaggagtgtgaatggaatcatgaacccggagtagccacacaacttcacaggaccacaaactgaactgcattcatgaaaataaattttaaaatggtggagttaaa

SEQ ID NO: 11777 - protein, 267 aa, Homo sapiens; identical to SEQ ID NO: 1952

SEQ ID NO: 11778 - DNA, 2173 bp, Homo sapiens
gaaagcctttgggggccggacgcggtggctgaggcctgtaatccaagcactttgggaggtctaaggaggacgatcgctagagtcctggagttcgagaccagtctgggcaacatagcgagaccccctcccccaatctgtaatttaaaaacaaaaaagctgcggggactgctggcccagggcatgacagcgcgggcgggcggtgtagagggcgtggccgcgagctcagggtgtgcctgggagcgagccctgtgcggggcgggacgtagcgcccgcgcggtgggggtgtggccgcgagcttgggctgtgcgcggagggcgtggcctgtgcggggcgggacttattgcccgcgcggtgagggagcgtggtctcgcgcaagccggcgtgcggtcccgcggcgctgcagttgtgtccagccggtcacggggcggctatggcggccacgttcttcggagaggtggtgaaggcgccgtgccgagctgggactgaggacgaagaggaggaggaggaggggcggagggagacgcccgaggacagggaggtgcgtctgcagctggcgcggaagagggaagtgcggctccttcgaagacaaacaaaaacatctttggaagtttctttgctagaaaaatatccgtgctccaagtttataattgctataggaaataatgcagtagcatttctgtcatcatttgttatgaattcaggagtctgggaggaagttggttgtgctaaactctggaatgaatggtgtagaacaacagacactacacatctgtcctccacagaggctttttgtgtgttttatcatctaaaatccaatccctcggtttttctctgtcagtgcagttgctatgttgcagaagatcaacagtatcagtggctggaaaaggtttttggctcttgtccaaggaagaacatgcagataactattctcacatgtcgacatgttaccgattataaaacctcagaatccaccggcagccttccttctcctttcctgagagccctaaaaacacagaatttcaaagactcggcgtgttgtccattgctagaacaaccgaatatagtacacgaccttcctgcagcagttctaagctactgtcaagtatggaaaatcccagcaattctgtacttgtgttatactgatgtgatgaaattagacctaatcacagtggaagcttttaagcctatactttctaccagaagcttgaagggtttggttaagaatattccccaaagcactgagatactaaagaaattgatgacaacaaatgagattcagagtaacatttatacatgatcttaaacattgttttgtagtgtatattacttgtccattcctttaaggggagcagcctgcactcttttgtagattacttttgggggatatattttgagaatgatgaaacggaataaaattgtaaaaaattaattgtagttttaattccttatttatggtggtattattcacaaccaaaataagccaagcattttccttttatccactaggtgggagtattgttgtatttgaatattttaaggtactatagttaaatttttatcttatttatttatttatttattttttgaggctgggtcttgctctgttgcccaggctgaagtgcagtgtgctatcatggttcactgcatcctcgacctcctgggctcaagcatttcccccgcctcggcctcccaaaatgctgggattacaggtgtgagccactgtgcccaactttagttaaatttttcaaagctacagatatcagcagatggtattcatgtggcaaagtgtagttaattaggtgtaactattcattgacctgttggtgattcttaatatgtggaaagtttctggatattttaggagtcctgcagttttttttatcttgtgggtaaaaattgatgacaaagtaacaaaattatatatttactaaaaatgaaacagaaatgtgtatgtcctcactttttagtaatatctgacagatagcctcttcacccagactttcccagggctctctttcaaggctggctctgcgcgtgtcagcagttctcttacagtcatgtgttatcattaggagtgtgaatggaatcatgaacccggagtagccacacaacttcacaggaccacaaactgaactgcattcatgaaaataaattttaaaatggtggagttaaa

SEQ ID NO: 11779 - protein, 288 aa, Homo sapiens; identical to SEQ ID NO: 1950

SEQ ID NO: 11780 - DNA, 2066 bp, Homo sapiens
gaaagcctttgggggccggacgcggtggctgaggcctgtaatccaagcactttgggaggtctaaggaggacgatcgctagagtcctggagttcgagaccagtctgggcaacatagcgagaccccctcccccaatctgtaatttaaaaacaaaaaagctgcggggactgctggcccagggcatgacagcgcgggcgggcggtgtagagggcgtggccgcgagctcagggtgtgcctgggagcgagccctgtgcggggcgggacgtagcgcccgcgcggtgggggtgtggccgcgagcttgggctgtgcgcggagggcgtggcctgtgcggggcgggacttattgcccgcgcggtgagggagcgtggtctcgcgcaagccggcgtgcggtcccgcggcgctgcagttgtgtccagccggtcacggggcggctatggcggccacgttcttcggagaggtggtgaaggcgccgtgccgagctgggactgaggacgaagaggaggaggaggaggggcggagggagacgcccgaggacagggaggtgcgtctgcagctggcgcggaagagcatttctgtcatcatttgttatgaattcaggagtctgggaggaagttggttgtgctaaactctggaatgaatggtgtagaacaacagacactacacatctgtcctccacagaggctttttgtgtgttttatcatctaaaatccaatccctcggtttttctctgtcagtgcagttgctatgttgcagaagatcaacagtatcagtggctggaaaaggtttttggctcttgtccaaggaagaacatgcagataactattctcacatgtcgacatgttaccgattataaaacctcagaatccaccggcagccttccttctcctttcctgagagccctaaaaacacagaatttcaaagactcggcgtgttgtccattgctagaacaaccgaatatagtacacgaccttcctgcagcagttctaagctactgtcaagtatggaaaatcccagcaattctgtacttgtgttatactgatgtgatgaaattagacctaatcacagtggaagcttttaagcctatactttctaccagaagcttgaagggtttggttaagaatattccccaaagcactgagatactaaagaaattgatgacaacaaatgagattcagagtaacatttatacatgatcttaaacattgttttgtagtgtatattacttgtccattcctttaaggggagcagcctgcactcttttgtagattacttttgggggatatattttgagaatgatgaaacggaataaaattgtaaaaaattaattgtagttttaattccttatttatggtggtattattcacaaccaaaataagccaagcattttccttttatccactaggtgggagtattgttgtatttgaatattttaaggtactatagttaaatttttatcttatttatttatttatttattttttgaggctgggtcttgctctgttgcccaggctgaagtgcagtgtgctatcatggttcactgcatcctcgacctcctgggctcaagcatttcccccgcctcggcctcccaaaatgctgggattacaggtgtgagccactgtgcccaactttagttaaatttttcaaagctacagatatcagcagatggtattcatgtggcaaagtgtagttaattaggtgtaactattcattgacctgttggtgattcttaatatgtggaaagtttctggatattttaggagtcctgcagttttttttatcttgtgggtaaaaattgatgacaaagtaacaaaattatatatttactaaaaatgaaacagaaatgtgtatgtcctcactttttagtaatatctgacagatagcctcttcacccagactttcccagggctctctttcaaggctggctctgcgcgtgtcagcagttctcttacagtcatgtgttatcattaggagtgtgaatggaatcatgaacccggagtagccacacaacttcacaggaccacaaactgaactgcattcatgaaaataaattttaaaatggtggagttaaa

SEQ ID NO: 11781 - protein, 201 aa, Homo sapiens
MNSGVWEEVGCAKLWNEWCRTTDTTHLSSTEAFCVFYHLKSNPSVFLCQCSCYVAEDQQYQWLEKVFGSCPRKNMQITILTCRHVTDYKTSESTGSLPSPFLRALKTQNFKDSACCPLLEQPNIVHDLPAAVLSYCQVWKIPAILYLCYTDVMKLDLITVEAFKPILSTRSLKGLVKNIPQSTEILKKLMTTNEIQSNIYT

SEQ ID NO: 11782 - DNA, 2361 bp, Homo sapiens
gaaagcctttgggggccggacgcggtggctgaggcctgtaatccaagcactttgggaggtctaaggaggacgatcgctagagtcctggagttcgagaccagtctgggcaacatagcgagaccccctcccccaatctgtaatttaaaaacaaaaaagctgcggggactgctggcccagggcatgacagcgcgggcgggcggtgtagagggcgtggccgcgagctcagggtgtgcctgggagcgagccctgtgcggggcgggacgtagcgcccgcgcggtgggggtgtggccgcgagcttgggctgtgcgcggagggcgtggcctgtgcggggcgggacttattgcccgcgcggtgagggagcgtggtctcgcgcaagccggcgtgcggtcccgcggcgctgcagttgtgtccagccggtcacggggcggctatggcggccacgttcttcggagaggtggtgaaggcgccgtgccgagctgggactgaggacgaagaggaggaggaggaggggcggagggagacgcccgaggacagggaggtgcgtctgcagctggcgcggaagaggtgaggcaccgggataagggcagcgcgctcaccgcagctggaaggtgcgcgggcctggcagccgcgacggcgcctaaggccggggctccgcggtcttccgagtggcccccgcggttgccgccgctccttggctctgcttgggccctgggtctccgtgaagccgcggcgtccagcggcgccagccccagggaagtgcggctccttcgaagacaaacaaaaacatctttggaagtttctttgctagaaaaatatccgtgctccaagtttataattgctataggaaataatgcagtagcatttctgtcatcatttgttatgaattcaggagtctgggaggaagttggttgtgctaaactctggaatgaatggtgtagaacaacagacactacacatctgtcctccacagaggctttttgtgtgttttatcatctaaaatccaatccctcggtttttctctgtcagtgcagttgctatgttgcagaagatcaacagtatcagtggctggaaaaggtttttggctcttgtccaaggaagaacatgcagataactattctcacatgtcgacatgttaccgattataaaacctcagaatccaccggcagccttccttctcctttcctgagagccctaaaaacacagaatttcaaagactcggcgtgttgtccattgctagaacaaccgaatatagtacacgaccttcctgcagcagttctaagctactgtcaagtatggaaaatcccagcaattctgtacttgtgttatactgatgtgatgaaattagacctaatcacagtggaagcttttaagcctatactttctaccagaagcttgaagggtttggttaagaatattccccaaagcactgagatactaaagaaattgatgacaacaaatgagattcagagtaacatttatacatgatcttaaacattgttttgtagtgtatattacttgtccattcctttaaggggagcagcctgcactcttttgtagattacttttgggggatatattttgagaatgatgaaacggaataaaattgtaaaaaattaattgtagttttaattccttatttatggtggtattattcacaaccaaaataagccaagcattttccttttatccactaggtgggagtattgttgtatttgaatattttaaggtactatagttaaatttttatcttatttatttatttatttattttttgaggctgggtcttgctctgttgcccaggctgaagtgcagtgtgctatcatggttcactgcatcctcgacctcctgggctcaagcatttcccccgcctcggcctcccaaaatgctgggattacaggtgtgagccactgtgcccaactttagttaaatttttcaaagctacagatatcagcagatggtattcatgtggcaaagtgtagttaattaggtgtaactattcattgacctgttggtgattcttaatatgtggaaagtttctggatattttaggagtcctgcagttttttttatcttgtgggtaaaaattgatgacaaagtaacaaaattatatatttactaaaaatgaaacagaaatgtgtatgtcctcactttttagtaatatctgacagatagcctcttcacccagactttcccagggctctctttcaaggctggctctgcgcgtgtcagcagttctcttacagtcatgtgttatcattaggagtgtgaatggaatcatgaacccggagtagccacacaacttcacaggaccacaaactgaactgcattcatgaaaataaattttaaaatggtggagttaaa

SEQ ID NO: 11783 - protein, 201 aa, Homo sapiens; identical to SEQ ID NO: 11781

SEQ ID NO: 11784 - DNA, 714 bp, Homo sapiens
caagatcaaacccaggttgtgacagcaggtgtgttctgtttctccaaggcacactcccacccctgctaggcatgctattattgtctgtggtgttaggtgaatacctagaggaatgtttccattctgtaacaaaattatatgttttttttaatttgaaataaattttatgttaggtttttggctcttgtccaaggaagaacatgcagataactattctcacatgtcgacatgttaccgattataaaacctcagaatccaccggcagccttccttctcctttcctgagagccctaaaaacacagaatttcaaagactcggcgtgttgtccattgctagaacaaccgaatatagtacacgaccttcctgcagcagttctaagctactgtcaagtatggaaaatcccagcaattctgtacttgtgttatactgatgtgatgaaattagacctaatcacagtggaagcttttaagcctatactttctaccagaagcttgaagggtttggttaagaatattccccaaagcactgagatactaaagaaattgatgacaacaaatgagattcagagtaacatttatacatgatcttaaacattgttttgtagtgtatattacttgtccattcctttaaggggagcagcctgcactcttttgtagattacttttgggggatatattttgagaatgatgaaacggaataaaattgtaaaaaatt

SEQ ID NO: 11785 - protein, 127 aa, Homo sapiens [sequence omitted]

SEQ ID NO: 11786 - DNA, 476 bp, Homo sapiens
cagacactacacatctgtcctccacagaggctttttgtgtgttttatcatccctaaaaacacagaatttcaaagactcggcgtgttgtccattgctagaacaaccgaatatagtacacgaccttcctgcagcagttctaagctactgtcaagtatggaaaatcccagcaattctgtacttgtgttatactgatgtgatgaaattagacctaatcacagtggaagcttttaagcctatactttctaccagaagcttgaagggtttggttaagaatattccccaaagcactgagatactaaagaaattgatgacaacaaatgagattcagagtaacatttatacatgatcttaaacattgttttgtagtgtatattacttgtccattcctttaaggggagcagcctgcactcttttgtagattacttttgggggatatattttgagaatgatgaaacggaataaaattgtaaaaaatt

SEQ ID NO: 11787 - protein, 49 aa, Homo sapiens
MKLDLITVEAFKPILSTRSLKGLVKNIPQSTEILKKLMTTNEIQSNIYT

SEQ ID NO: 11788 - DNA, 1364 bp, Homo sapiens
gaaagcctttgggggccggacgcggtggctgaggcctgtaatccaagcactttgggaggtctaaggaggacgatcgctagagtcctggagttcgagaccagtctgggcaacatagcgagaccccctcccccaatctgtaatttaaaaacaaaaaagctgcggggactgctggcccagggcatgacagcgcgggcgggcggtgtagagggcgtggccgcgagctcagggtgtgcctgggagcgagccctgtgcggggcgggacgtagcgcccgcgcggtgggggtgtggccgcgagcttgggctgtgcgcggagggcgtggcctgtgcggggcgggacttattgcccgcgcggtgagggagcgtggtctcgcgcaagccggcgtgcggtcccgcggcgctgcagttgtgtccagccggtcacggggcggctatggcggccacgttcttcggagaggtggtgaaggcgccgtgccgagctgggactgaggacgaagaggaggaggaggaggggcggagggagacgcccgaggacagggaggtgcgtctgcagctggcgcggaagagggaagtgcggctccttcgaagacaaacaaaaacatctttggaagtttctttgctagaaaaatatccgtgctccaagtttataattgctataggaaataatgcagtagcatttctgtcatcatttgttatgaattcaggagtctgggaggaagttggttgtgctaaactctggaatgaatggtgtagaacaacagacactacacatctgtcctccacagaggctttttgtgtgttttatcatctaaaatccaatccctcggtttttggctcttgtccaaggaagaacatgcagataactattctcacatgtcgacatgttaccgattataaaacctcagaatccaccggcagccttccttctcctttcctgagagccctaaaaacacagaatttcaaagactcggcgtgttgtccattgctagaacaaccgaatatagtacacgaccttcctgcagcagttctaagctactgtcaagtatggaaaatcccagcaattctgtacttgtgttatactgatgtgatgaaattagacctaatcacagtggaagcttttaagcctatactttctaccagaagcttgaagggtttggttaagaatattccccaaagcactgagatactaaagaaattgatgacaacaaatgagattcagagtaacatttatacatgatcttaaacattgttttgtagtgtatattacttgtccattcctttaaggggagcagcctgcactcttttgtagattacttttgggggatatattttgagaatgatgaaacggaataaaattgtaaaaaatt

SEQ ID NO: 11789 - protein, 267 aa, Homo sapiens; identical to SEQ ID NO: 1952

SEQ ID NO: 11790 - DNA, 1320 bp, Homo sapiens
gaaagcctttgggggccggacgcggtggctgaggcctgtaatccaagcactttgggaggtctaaggaggacgatcgctagagtcctggagttcgagaccagtctgggcaacatagcgagaccccctcccccaatctgtaatttaaaaacaaaaaagctgcggggactgctggcccagggcatgacagcgcgggcgggcggtgtagagggcgtggccgcgagctcagggtgtgcctgggagcgagccctgtgcggggcgggacgtagcgcccgcgcggtgggggtgtggccgcgagcttgggctgtgcgcggagggcgtggcctgtgcggggcgggacttattgcccgcgcggtgagggagcgtggtctcgcgcaagccggcgtgcggtcccgcggcgctgcagttgtgtccagccggtcacggggcggctatggcggccacgttcttcggagaggtggtgaaggcgccgtgccgagctgggactgaggacgaagaggaggaggaggaggggcggagggagacgcccgaggacagggaggtgcgtctgcagctggcgcggaagagcatttctgtcatcatttgttatgaattcaggagtctgggaggaagttggttgtgctaaactctggaatgaatggtgtagaacaacagacactacacatctgtcctccacagaggctttttgtgtgttttatcatctaaaatccaatccctcggtttttctctgtcagtgcagttgctatgttgcagaagatcaacagtatcagtggctggaaaaggtttttggctcttgtccaaggaagaacatgcagataactattctcacatgtcgacatgttaccgattataaaacctcagaatccaccggcagccttccttctcctttcctgagagccctaaaaacacagaatttcaaagactcggcgtgttgtccattgctagaacaaccgaatatagtacacgaccttcctgcagcagttctaagctactgtcaagtatggaaaatcccagcaattctgtacttgtgttatactgatgtgatgaaattagacctaatcacagtggaagcttttaagcctatactttctaccagaagcttgaagggtttggttaagaatattccccaaagcactgagatactaaagaaattgatgacaacaaatgagattcagagtaacatttatacatgatcttaaacattgttttgtagtgtatattacttgtccattcctttaaggggagcagcctgcactcttttgtagattacttttgggggatatattttgagaatgatgaaacggaataaaattgtaaaaaatt

SEQ ID NO: 11791 - protein, 201 aa, Homo sapiens; identical to SEQ ID NO: 11781

SEQ ID NO: 11792 - DNA, 1427 bp, Homo sapiens
gaaagcctttgggggccggacgcggtggctgaggcctgtaatccaagcactttgggaggtctaaggaggacgatcgctagagtcctggagttcgagaccagtctgggcaacatagcgagaccccctcccccaatctgtaatttaaaaacaaaaaagctgcggggactgctggcccagggcatgacagcgcgggcgggcggtgtagagggcgtggccgcgagctcagggtgtgcctgggagcgagccctgtgcggggcgggacgtagcgcccgcgcggtgggggtgtggccgcgagcttgggctgtgcgcggagggcgtggcctgtgcggggcgggacttattgcccgcgcggtgagggagcgtggtctcgcgcaagccggcgtgcggtcccgcggcgctgcagttgtgtccagccggtcacggggcggctatggcggccacgttcttcggagaggtggtgaaggcgccgtgccgagctgggactgaggacgaagaggaggaggaggaggggcggagggagacgcccgaggacagggaggtgcgtctgcagctggcgcggaagagggaagtgcggctccttcgaagacaaacaaaaacatctttggaagtttctttgctagaaaaatatccgtgctccaagtttataattgctataggaaataatgcagtagcatttctgtcatcatttgttatgaattcaggagtctgggaggaagttggttgtgctaaactctggaatgaatggtgtagaacaacagacactacacatctgtcctccacagaggctttttgtgtgttttatcatctaaaatccaatccctcggtttttctctgtcagtgcagttgctatgttgcagaagatcaacagtatcagtggctggaaaaggtttttggctcttgtccaaggaagaacatgcagataactattctcacatgtcgacatgttaccgattataaaacctcagaatccaccggcagccttccttctcctttcctgagagccctaaaaacacagaatttcaaagactcggcgtgttgtccattgctagaacaaccgaatatagtacacgaccttcctgcagcagttctaagctactgtcaagtatggaaaatcccagcaattctgtacttgtgttatactgatgtgatgaaattagacctaatcacagtggaagcttttaagcctatactttctaccagaagcttgaagggtttggttaagaatattccccaaagcactgagatactaaagaaattgatgacaacaaatgagattcagagtaacatttatacatgatcttaaacattgttttgtagtgtatattacttgtccattcctttaaggggagcagcctgcactcttttgtagattacttttgggggatatattttgagaatgatgaaacggaataaaattgtaaaaaatt

SEQ ID NO: 11793 - protein, 288 aa, Homo sapiens; identical to SEQ ID NO: 1950

SEQ ID NO: 11794 - DNA, 1615 bp, Homo sapiens
gaaagcctttgggggccggacgcggtggctgaggcctgtaatccaagcactttgggaggtctaaggaggacgatcgctagagtcctggagttcgagaccagtctgggcaacatagcgagaccccctcccccaatctgtaatttaaaaacaaaaaagctgcggggactgctggcccagggcatgacagcgcgggcgggcggtgtagagggcgtggccgcgagctcagggtgtgcctgggagcgagccctgtgcggggcgggacgtagcgcccgcgcggtgggggtgtggccgcgagcttgggctgtgcgcggagggcgtggcctgtgcggggcgggacttattgcccgcgcggtgagggagcgtggtctcgcgcaagccggcgtgcggtcccgcggcgctgcagttgtgtccagccggtcacggggcggctatggcggccacgttcttcggagaggtggtgaaggcgccgtgccgagctgggactgaggacgaagaggaggaggaggaggggcggagggagacgcccgaggacagggaggtgcgtctgcagctggcgcggaagaggtgaggcaccgggataagggcagcgcgctcaccgcagctggaaggtgcgcgggcctggcagccgcgacggcgcctaaggccggggctccgcggtcttccgagtggcccccgcggttgccgccgctccttggctctgcttgggccctgggtctccgtgaagccgcggcgtccagcggcgccagccccagggaagtgcggctccttcgaagacaaacaaaaacatctttggaagtttctttgctagaaaaatatccgtgctccaagtttataattgctataggaaataatgcagtagcatttctgtcatcatttgttatgaattcaggagtctgggaggaagttggttgtgctaaactctggaatgaatggtgtagaacaacagacactacacatctgtcctccacagaggctttttgtgtgttttatcatctaaaatccaatccctcggtttttctctgtcagtgcagttgctatgttgcagaagatcaacagtatcagtggctggaaaaggtttttggctcttgtccaaggaagaacatgcagataactattctcacatgtcgacatgttaccgattataaaacctcagaatccaccggcagccttccttctcctttcctgagagccctaaaaacacagaatttcaaagactcggcgtgttgtccattgctagaacaaccgaatatagtacacgaccttcctgcagcagttctaagctactgtcaagtatggaaaatcccagcaattctgtacttgtgttatactgatgtgatgaaattagacctaatcacagtggaagcttttaagcctatactttctaccagaagcttgaagggtttggttaagaatattccccaaagcactgagatactaaagaaattgatgacaacaaatgagattcagagtaacatttatacatgatcttaaacattgttttgtagtgtatattacttgtccattcctttaaggggagcagcctgcactcttttgtagattacttttgggggatatattttgagaatgatgaaacggaataaaattgtaaaaaatt

SEQ ID NO: 11795 - protein, 201 aa, Homo sapiens; identical to SEQ ID NO: 11781

SEQ ID NO: 11796 - DNA, 1057 bp, Homo sapiens
gaaagcctttgggggccggacgcggtggctgaggcctgtaatccaagcactttgggaggtctaaggaggacgatcgctagagtcctggagttcgagaccagtctgggcaacatagcgagaccccctcccccaatctgtaatttaaaaacaaaaaagctgcggggactgctggcccagggcatgacagcgcgggcgggcggtgtagagggcgtggccgcgagctcagggtgtgcctgggagcgagccctgtgcggggcgggacgtagcgcccgcgcggtgggggtgtggccgcgagcttgggctgtgcgcggagggcgtggcctgtgcggggcgggacttattgcccgcgcggtgagggagcgtggtctcgcgcaagccggcgtgcggtcccgcggcgctgcagttgtgtccagccggtcacggggcggctatggcggccacgttcttcggagaggtggtgaaggcgccgtgccgagctgggactgaggacgaagaggaggaggaggaggggcggagggagacgcccgaggacagggaggtgcgtctgcagctggcgcggaagagggaagtgcggctccttcgaagacaaacaaaaacatctttggaagtttctttgctagaaaaatatccgtgctccaagtttataattgctataggaaataatgcagtagcatttctgtcatcatttgttatgaattcaggagtctgggaggaagttggttgtgctaaactctggaatgaatggtgtagaacaacagacactacacatctgtcctccacagaggctttttgtgtgttttatcatctaaaatccaatccctcggtaggtgggacttgtatgtttgaaaagcagttatttaagtatcacttacatgttatttactggtagtatactttagtatggcaaatctttcagttgctctgtcagtgtgcactttttctgatactaatcaccagtagtggtttgactgttaaattttaaagagaaataagtaggtcaatagtggagccaggaaaataagtattacctaagtgttgtcattcacatgttacatat

SEQ ID NO: 11797 - protein, 152 aa, Homo sapiens
MAATFFGEVVKAPCRAGTEDEEEEEEGRRETPEDREVRLQLARKREVRLLRRQTKTSLEVSLLEKYPCSKFIIAIGNNAVAFLSSFVMNSGVWEEVGCAKLWNEWCRTTDTTHLSSTEAFCVFYHLKSNPSVGGTCMFEKQLFKYHLHVIYW

SEQ ID NO: 11798 - DNA, 9350 bp, Homo sapiens
gtaattttctgccgggctgctggcttgtgggggatgtggctgggtctcggcagccttcagcgccgcagacgctccggcaacgccagcatacgaggcccccgccccaggagcgcgggtccgggcggcgttcccctctgcgggaggcgcggcgagccaatcctcactttaaaagctttcctgtcctcgaagcgaggggtcttccgtgcggggcaagacgcactggccccagacgaccggtccgtgaaatgacccttccgagcgacccggagcgggcgaccttgcccaacccgcgactcggggcccctgcggtcccgcgtagaggacccaggtcccacggggggcggcggtgaatcgccccctcttgtggccgcgcttccgcccccggcacccgcccgctgctgggccacccggcgtcgcgctgccgcctcacaaagcccgggcagccgcctcattgcgcgcagggattcggaccacgcgccctcccctcccccactcgctgctgcggcgcccaggtctttgcctccgcgtcactttctcctcatcgagtccccggaggcagagagctgagcgaggttcgcctccccgggcgggacacgagctccggtcctctcttggcgcaaacccccgccccccgcggagggactacttttcgtctcccgcggaggaactacttcctcccccgcggaggcgtcggtccaggcggcgcgcacggtatggcggcggcggcggcggcggcggcgcgcgcctgagaagaggggacgccagcccggtcaggcctcggcgcggcctacacgctccgctcgctcgctcgctcccgcctcccgccccgcgcccggccatggcggagccgtcgtccgcccgacgcccggtgcctctcatcgagtcggagctgtacttccttatcgcccggtacctatcggcgggcccgtgtcggagagcggcccaggtgctggtgcaggagctggagcagtaccagttgttgccgaagagattggactgggagggcaacgagcacaacaggagctacgaggagttggtcttgtccaataagcatgtggctcctgatcatcttttgcaaatctgccagcgcatcggtcctatgttggataaagaaattccacccagtatttcaagagtcacttctttacttggtgcaggaaggcagtctttgctacgtacagcaaaagactgcaggcacacagtttggaagggctctgcctttgctgctcttcatagaggaagacctcctgaaatgccagtgaattatggttccccaccaaatcttgtggagatacatcgaggaaaacaactcacagggtgttccacttttagtacagcatttccaggaactatgtatcagcatataaaaatgcacagaaggattctcggacatctatctgctgtttactgtgtagcatttgataggacaggacatagaatctttacaggttcagatgactgtttggtaaagatttggtcaacacataatggccgcttgttatctacattaagaggtcattctgcagaaatttcagatatggcagtaaactatgagaatacaatgattgctgcggggagctgtgataaaattattagagtgtggtgcttgagaacttgtgccccagttgctgtgctccaaggacacacaggatcaattacatctttacagtttagcccgatggccaaaggctctcaaagatacatggtttccactggtgctgatgggacagtttgcttttggcaatgggatttagaatccttaaaatttagcccacgtcccctgaagttcactgaaaagcctaggccaggcgttcaaatgctttgttcttcttttagtgttggtggtatgtttttagccacaggtagtactgatcatgtaatcagaatgtattttttgggttttgaagcacccgaaaaaatcgcagaacttgaaagccacactgataaagtagatagtatccaattttgtaacaatggtgatcggttcctaagtggtagcagagatggaacagcacggatttggagatttgagcagttagaatggaggagcattttattggatatggctaccagaatctcaggggacttatcttccgaagaggaaaggtttatgaaacctaaagtaacaatgatagcttggaatcaaaatgatagcattgttgtcacagctgtgaatgatcatgtcctcaaagtgtggaattcttacactggacaactgcttcataacttaatgggacatgctgatgaagtatttgttctggagacacatccctttgattccagaattatgttatctgcaggacatgatggcagcatatttatatgggatattacaaaaggtaccaagatgaaacattattttaatatgattgaaggacaaggacatggagctgtgtttgactgtaagttttcacaggatggacagcattttgcctgtacagattctcatgggcaccttctgatatttggttttggatgcagcaaaccatatgaaaagattcctgatcagatgttcttccatactgactatcgaccacttattagagattctaataattatgtcttagatgagcaaactcagcaggctcctcatcttatgcctccaccattcttggtagatgtagatggaaatcctcatccaaccaagtatcagagattagtaccaggccgagaaaattctgcagatgaacatttgattccacagctgggctatgtggcaacaagtgatggagaggtgattgaacaaattataagcctgcaaaccaatgataatgatgaacgcagcccagaatcgagtattcttgatggaatgataagacagttgcagcagcagcaagatcagagaatgggagcagatcaggatactattccaagaggactttcaaatggtgaagaaacaccccggagaggttttagaaggctgagcttagacattcagtcccctccaaatattggtctgcgtcgtagtggacaagttgaaggtgttcgtcagatgcatcaaaacgctccacgcagtcagattgctacagaacgtgacctgcaggcttggaaacgaagagtggttgtaccagaggtaccactaggcatatttaggaagctggaagacttccgattagagaaaggtgaagaggaaagaaatctttatataataggaagaaaaagaaagactcttcagctctcacataagtcggattcagtggttttggtatcacagtctagacaaaggacatgtaggcgtaaatatccaaattatggtagaagaaatcgtagctggcgtgagttatcttctggaaatgagtcttcaagctctgtaagacatgagacttcctgtgatcagagtgaaggttctggttcttcagaagaggatgaatggagaagtgacagaaaaagtgagagttacagcgaaagttcaagtgactcttcatctagatattccgattggacagctgatgcgggcatcaatttgcagcctcctttaagaacatcatgtcgtcgacgaattactcgattttgtagtagttcagaagatgaaatatctactgagaatttatctcctccaaaaagaagacgaaagagaaagaaagaaaataagcctaagaaggagaatttgcggaggatgactccagcagagcttgcaaatatggagcatttatatgaatttcaccctccagtttggattactgacaccacacttagaaaatctccttttgttcctcaaatgggtgatgaggtaatatattttcgacagggtcatgaagcttatattgaggctgtaagaagaaataatatttatgaactgaaccctaataaggagccatggagaaaaatggatcttagggatcaagaattggttaaaatagttggaatacgatatgaagttgggccccctacactctgttgcctaaaactagcatttatagatccagcaactggaaaacttatggacaaatctttctctattagatatcatgatatgccagatgttattgactttcttgtattgcgtcaattttatgatgaagcaagacagaggaattggcagtcttgtgacagattccgctctattattgatgatgcttggtggtttggaacagtgttaagtcaagagccatatcaaccacagtatcctgatagtcatttccagtgttatattgttaggtgggataatactgaaattgaaaaacttagcccatgggacatggaaccaattcctgataatgttgatccacctgaagaattaggagctagtatttctgtcacaacagatgagctagagaaattgctctataaaccacaagctggtgaatggggtcagaaatcaagagatgaagaatgtgatagaattatcagtggtatagatcaacttttgaatcttgatatagcagcagcttttgcaggccctgttgatttgtgtacatacccgaagtactgtactgtagtagcttatccaaccgatctttacacaattcgaatgagacttgttaatcgattttacaggaggctgtctgcgttagtttgggaagtcagatatatagaacataatgccagaacatttaacgaacctgagagtgtaattgcaagatcagctaaaaagataactgaccaacttttaaaatttatcaagaatcaacactgtacaaatatctcagaactttctaacacatctgaaaatgatgagcaaaatgctgaggatttggatgatagtgatcttcctaaaacatcttctggaaggaggagagtccatgatgggaaaaaaagcatcagagctacgaactatgttgaaagcaactggaagaaacagtgtaaggaactagtgaacttaatttttcagtgtgaagattctgaaccatttagacaacctgttgatttggttgaatatccagactacagagatattatagataccccaatggattttggaacagtaagggaaactctagatgcgggaaattatgacagccctttggagttttgcaaagacatccggctgatatttagcaatgcaaaagcgtatacaccaaacaaaagatcaaagatttatagtatgaccttgagattatctgccttatttgaagaaaaaatgaagaaaatctcttctgattttaaaattggtcaaaaattcaatgaaaaacttcgaagaagccagaggttcaagcaacggcaaaattgtaaaggtgacagtcagcctaacaaaagtatcagaaacctcaagccgaagaggttaaaatctcagacaaaaataattcctgagttggtaggttctcctacccagtctacctcaagtaggacagcttatcttggaacccacaagacaagtgctggtatctcttcaggtgttacttctggtgactcttcagattcagcagaatcatcagaaaggaggaaaagaaatagacctataacaaatggttctacattatctgaaagtgaagtggaagattctttagctacctctttgtcatcgtcagcttccagtagttctgaggaaagcaaagagagttccagagctcgtgaatcctcctcacgcagtgggctatccagaagcagcaatctcagggtaaccagaactagagctgctcaaagaaaaactggtcccgtttcattagcaaatggatgtggcagaaaagccactcgaaagagagtctatttaagtgattctgataacaattcattggagactggtgaaattctaaaagccagagctggaaataaccgaaaagtcttaaggaagtgtgctgctgtggctgccaataaaataaagctaatgagtgatgtagaagagaattctagctctgaaagtgtctgttctggtcggaagctgcctcaccgcaatgcttctgctgtagctagaaaaaagttattacataattctgaagatgaacagagcttaaagtcagaaattgaagaagaggagctaaaagatgaaaatcaactattaccagtgtccagttctcacactgcccagagcaatgttgatgaatctgaaaacagagactcagagtcagaaagtgatttgcgggtagcccggaaaaattggcatgctaatggttacaagtcccatactccagcaccttcaaagacaaaatttcttaaaatagagtcttctgaggaagactctaaaagtcatgattcagatcatgcatgtaacagaactgctggcccatcaacgtctgtgcagaaacttaaggcagagagcatctcagaggaagcagattctgaaccaggaagatctggtggtaggaaatacaatacatttcacaagaatgcgagtttctttaaaaaaaccaagattctgagtgactcagaagactctgaatctgaagagcaagatagagaagatgggaaatgtcataaaatggaaatgaacccaatttcaggaaatctgaactgtgaccctattgctatgtcccagtgttcctcagatcatggatgtgaaactgatttagattcagatgatgacaaaatagaaaaaccaaacaattttatgaaagattctgcatcacaagacaatggactaagcagaaaaatttccaggaaaagggtctgttccagtgactcagacagtagtttacaggtggttaagaaatcatcaaaagccagaacaggtctcctgaggattactcgaagatgtgcagctacggctgccaataagatcaagctcatgagtgatgtagaagatgtcagtttagaaaatgtgcacactagaagcaaaaatggaaggaaaaaacctctccatcttgcttgtactacagctaagaagaaattgagtgattgtgaaggaagtgtacattgtgaagtaccaagtgaacagtatgcctgtgaaggcaagccacctgatcctgactccgaaggtagtacaaaagtgcttagtcaggctctaaatggagactcagactctgaagatatgttgaattcagaacacaagcacaggcataccaatattcacaaaatagatgcaccttctaaaagaaaaagttcctctgttacatcttcaggagaagattcaaaaagtcatattccagggagtgagactgataggacattttcttcagagtcaaccttggcacaaaaagctactgcagagaataattttgaagtggaactgaattatgggctgcgcaggtggaatggcagaagactcaggacctatggaaaggctccttttagtaagacaaaagtgattcatgattcacaggaaacagcagagaaggaagtaaaaaggaagagatcgcatcctgaattggaaaatgtgaaaatctctgaaacaactgggaattcaaagtttagacctgatactagttccaaatcatcagatttgggatctgtaactgaatcagatattgactgtactgataatacaaaaaccaaaaggaggaaaacgaaaggaaaagcaaaagtagttagaaaagaatttgttcctagagacagagaacccaatacaaaagtgagaacatgtatgcataatcagaaggatgcagtgcagatgcctagtgaaactctgaaagcaaaaatggtacctgagaaagttccccgcagatgtgctactgttgctgcaaataaaataaagataatgagtaatctaaaagaaacgatctcaggaccagaaaatgtctggattaggaagagtagcagaaaactgccccatcgaaatgcttctgctgcggctaagaaaaaattactgaatgtttataaagaggatgatacaaccataaattctgaaagtgaaaaagagctagaagatattaatagaaaaatgctttttttaagggggttcagatcctggaaagaaaatgcacaatagtgactatgagaatgtagaagtggcatctgaaaacaattggtacacaagtaaactggcagttacattctgctcccagctctaaaattactcccttattggcatctttggaggaattttctaaaagccataatccagtgggttcctcccagtcagctcttgtacagacatgtgctctggggaattctgaggaggaaataaattgcagagtctgtaggtggagaggtggaaagaaaagacaaatggcctgctataagactactattcctttccagaatgcaaggccttgaagacatgattccttagaggaagaatataatgggaagtgtacaggctaggaagaacttgaagtgaacaaatttcaaaatcttaacctgatgctaattttcagggttctccattacagtgtaaaaattcagaccacgacaactatggtgtcatgaggaaaaaaaatcaggcatttttccaaaggaagtgctaatgggcctatttgacttctgagtgaagcaaaaactacccagatccattccctacaattcacatccccaaaggtcaaaaacaaactaggaggacctgggaatttcagctggagatactgattattgagttctgaagtagagtgttggaaataggcaattagagaaagtccattgatgtcattttgtttataatattgcagttcatactgaatgaccacttgatatgactaattcagggaatatatatttttctatgaaagctatgaatgttactatcacggcttttccttatttttacttgtatgtagcagcatttacagaaatgccaaaaatgtgcctcattaagaggcaggtcttaatcagttagataaaaataaaatgtatagcttaagatcaaaacagtcatatttttagatacagtgaaatcttttatgtttctctacagcaccttaaaaattagaacttgaatactttgagtaaacttactacaatctcatcccaacaaactttaatggtagcatgtttggcctatttcattgtggcctgtactaggattagaaaatttggtcgtggtataacaaagaagtgtatttacaataggatttaatttgttgttaatatgtatttgttgaaattaaaattgccagattaaatgaatatactgtcgcatctttttaacatagtaacgtgttactggaaaaattaagttgttgaaagtaagttgttttcccatttaaaaatatctgaatatatgatttgcatgtgtaaatctgaaaaactaaactacagaaacctagggttttctatttcttttttaagtcaaatgcatttttttttttttgttatacagatgaaccaagtgtctaaaatacttgagaaatttgtggttgcatgtctgttttaaaaaaaaggctttttgttttttagcataagccagaatattctaacctactaagtctgtgtcctttgctccttttgtagtatactttcatctaaattactgatccccaatatgttgatacacaggtgagaaagggaagaattcctaataaactgctattacttttaggtgc

SEQ ID NO: 11799 - protein, 2320 aa, Homo sapiens; identical to SEQ ID NO: 1956

SEQ ID NO: 11800 - DNA, 18430 bp, Homo sapiens
gtaattttctgccgggctgctggcttgtgggggatgtggctgggtctcggcagccttcagcgccgcagacgctccggcaacgccagcatacgaggcccccgccccaggagcgcgggtccgggcggcgttcccctctgcgggaggcgcggcgagccaatcctcactttaaaagctttcctgtcctcgaagcgaggggtcttccgtgcggggcaagacgcactggccccagacgaccggtccgtgaaatgacccttccgagcgacccggagcgggcgaccttgcccaacccgcgactcggggcccctgcggtcccgcgtagaggacccaggtcccacggggggcggcggtgaatcgccccctcttgtggccgcgcttccgcccccggcacccgcccgctgctgggccacccggcgtcgcgctgccgcctcacaaagcccgggcagccgcctcattgcgcgcagggattcggaccacgcgccctcccctcccccactcgctgctgcggcgcccaggtctttgcctccgcgtcactttctcctcatcgagtccccggaggcagagagctgagcgaggttcgcctccccgggcgggacacgagctccggtcctctcttggcgcaaacccccgccccccgcggagggactacttttcgtctcccgcggaggaactacttcctcccccgcggaggcgtcggtccaggcggcgcgcacggtatggcggcggcggcggcggcggcggcgcgcgcctgagaagaggggacgccagcccggtcaggcctcggcgcggcctacacgctccgctcgctcgctcgctcccgcctcccgccccgcgcccggccatggcggagccgtcgtccgcccgacgcccggtgcctctcatcgagtcggagctgtacttccttatcgcccggtacctatcggcgggcccgtgtcggagagcggcccaggtgctggtgcaggagctggagcagtaccagttgttgccgaagagattggactgggagggcaacgagcacaacaggagctacgaggagttggtcttgtccaataagcatgtggctcctgatcatcttttgcaaatctgccagcgcatcggtcctatgttggataaagaaattccacccagtatttcaagagtcacttctttacttggtgcaggaaggcagtctttgctacgtacagcaaaagactgcaggcacacagtttggaagggctctgcctttgctgctcttcatagaggaagacctcctgaaatgccagtgaattatggttccccaccaaatcttgtggagatacatcgaggaaaacaactcacagggtgttccacttttagtacagcatttccaggaactatgtatcagcatataaaaatgcacagaaggattctcggacatctatctgctgtttactgtgtagcatttgataggacaggacatagaatctttacaggttcagatgactgtttggtaaagatttggtcaacacataatggccgcttgttatctacattaagaggtcattctgcagaaatttcagatatggcagtaaactatgagaatacaatgattgctgcggggagctgtgataaaattattagagtgtggtgcttgagaacttgtgccccagttgctgtgctccaaggacacacaggatcaattacatctttacagtttagcccgatggccaaaggctctcaaagatacatggtttccactggtgctgatgggacagtttgcttttggcaatgggatttagaatccttaaaatttagcccacgtcccctgaagttcactgaaaagcctaggccaggcgttcaaatgctttgttcttcttttagtgttggtggtatgtttttagccacaggtagtactgatcatgtaatcagaatgtattttttgggttttgaagcacccgaaaaaatcgcagaacttgaaagccacactgataaagtagatagtatccaattttgtaacaatggtgatcggttcctaagtggtagcagagatggaacagcacggatttggagatttgagcagttagaatggaggagcattttattggatatggctaccagaatctcaggggacttatcttccgaagaggaaaggtttatgaaacctaaagtaacaatgatagcttggaatcaaaatgatagcattgttgtcacagctgtgaatgatcatgtcctcaaagtgtggaattcttacactggacaactgcttcataacttaatgggacatgctgatgaagtatttgttctggagacacatccctttgattccagaattatgttatctgcaggacatgatggcagcatatttatatgggatattacaaaaggtaccaagatgaaacattattttaatatgattgaaggacaaggacatggagctgtgtttgactgtaagttttcacaggatggacagcattttgcctgtacagattctcatgggcaccttctgatatttggttttggatgcagcaaaccatatgaaaagattcctgatcagatgttcttccatactgactatcgaccacttattagagattctaataattatgtcttagatgagcaaactcagcaggctcctcatcttatgcctccaccattcttggtagatgtagatggaaatcctcatccaaccaagtatcagagattagtaccaggccgagaaaattctgcagatgaacatttgattccacagctgggctatgtggcaacaagtgatggagaggtgattgaacaaattataagcctgcaaaccaatgataatgatgaacgcagcccagaatcgagtattcttgatggaatgataagacagttgcagcagcagcaagatcagagaatgggagcagatcaggatactattccaagaggactttcaaatggtgaagaaacaccccggagaggttttagaaggctgagcttagacattcagtcccctccaaatattggtctgcgtcgtagtggacaagttgaaggtgttcgtcagatgcatcaaaacgctccacgcagtcagattgctacagaacgtgacctgcaggcttggaaacgaagagtggttgtaccagaggtaccactaggcatatttaggaagctggaagacttccgattagagaaaggtgaagaggaaagaaatctttatataataggaagaaaaagaaagactcttcagctctcacataagtcggattcagtggttttggtatcacagtctagacaaaggacatgtaggcgtaaatatccaaattatggtagaagaaatcgtagctggcgtgagttatcttctggaaatgagtcttcaagctctgtaagacatgagacttcctgtgatcagagtgaaggttctggttcttcagaagaggatgaatggagaagtgacagaaaaagtgagagttacagcgaaagttcaagtgactcttcatctagatattccgattggacagctgatgcgggcatcaatttgcagcctcctttaagaacatcatgtcgtcgacgaattactcgattttgtagtagttcagaagatgaaatatctactgagaatttatctcctccaaaaagaagacgaaagagaaagaaagaaaataagcctaagaaggagaatttgcggaggatgactccagcagagcttgcaaatatggagcatttatatgaatttcaccctccagtttggattactgacaccacacttagaaaatctccttttgttcctcaaatgggtgatgaggtaatatattttcgacagggtcatgaagcttatattgaggctgtaagaagaaataatatttatgaactgaaccctaataaggagccatggagaaaaatggatcttagggatcaagaattggttaaaatagttggaatacgatatgaagttgggccccctacactctgttgcctaaaactagcatttatagatccagcaactggaaaacttatggacaaatctttctctattagatatcatgatatgccagatgttattgactttcttgtattgcgtcaattttatgatgaagcaagacagaggaattggcagtcttgtgacagattccgctctattattgatgatgcttggtggtttggaacagtgttaagtcaagagccatatcaaccacagtatcctgatagtcatttccagtgttatattgttaggtgggataatactgaaattgaaaaacttagcccatgggacatggaaccaattcctgataatgttgatccacctgaagaattaggagctagtatttctgtcacaacagatgagctagagaaattgctctataaaccacaagctggtgaatggggtcagaaatcaagagatgaagaatgtgatagaattatcagtggtatagatcaacttttgaatcttgatatagcagcagcttttgcaggccctgttgatttgtgtacatacccgaagtactgtactgtagtagcttatccaaccgatctttacacaattcgaatgagacttgttaatcgattttacaggaggctgtctgcgttagtttgggaagtcagatatatagaacataatgccagaacatttaacgaacctgagagtgtaattgcaagatcagctaaaaagataactgaccaacttttaaaatttatcaagaatcaacactgtacaaatatctcagaactttctaacacatctgaaaatgatgagcaaaatgctgaggatttggatgatagtgatcttcctaaaacatcttctggaaggaggagagtccatgatgggaaaaaaagcatcagagctacgaactatgttgaaagcaactggaagaaacagtgtaaggaactagtgaacttaatttttcagtgtgaagattctgaaccatttagacaacctgttgatttggttgaatatccagactacagagatattatagataccccaatggattttggaacagtaagggaaactctagatgcgggaaattatgacagccctttggagttttgcaaagacatccggctgatatttagcaatgcaaaagcgtatacaccaaacaaaagatcaaagatttatagtatgaccttgagattatctgccttatttgaagaaaaaatgaagaaaatctcttctgattttaaaattggtcaaaaattcaatgaaaaacttcgaagaagccagaggttcaagcaacggcaaaattgtaaaggtgacagtcagcctaacaaaagtatcagaaacctcaagccgaagaggttaaaatctcagacaaaaataattcctgagttggtaggttctcctacccagtctacctcaagtaggacagcttatcttggaacccacaagacaagtgctggtatctcttcaggtgttacttctggtgactcttcagattcagcagaatcatcagaaaggaggaaaagaaatagacctataacaaatggttctacattatctgaaagtgaagtggaagattctttagctacctctttgtcatcgtcagcttccagtagttctgaggaaagcaaagagagttccagagctcgtgaatcctcctcacgcagtgggctatccagaagcagcaatctcagggtaaccagaactagagctgctcaaagaaaaactggtcccgtttcattagcaaatggatgtggcagaaaagccactcgaaagagagtctatttaagtgattctgataacaattcattggagactggtgaaattctaaaagccagagctggaaataaccgaaaagtcttaaggaagtgtgctgctgtggctgccaataaaataaagctaatgagtgatgtagaagagaattctagctctgaaagtgtctgttctggtcggaagctgcctcaccgcaatgcttctgctgtagctagaaaaaagttattacataattctgaagatgaacagagcttaaagtcagaaattgaagaagaggagctaaaagatgaaaatcaactattaccagtgtccagttctcacactgcccagagcaatgttgatgaatctgaaaacagagactcagagtcagaaagtgatttgcgggtagcccggaaaaattggcatgctaatggttacaagtcccatactccagcaccttcaaagacaaaatttcttaaaatagagtcttctgaggaagactctaaaagtcatgattcagatcatgcatgtaacagaactgctggcccatcaacgtctgtgcagaaacttaaggcagagagcatctcagaggaagcagattctgaaccaggaagatctggtggtaggaaatacaatacatttcacaagaatgcgagtttctttaaaaaaaccaagattctgagtgactcagaagactctgaatctgaagagcaagatagagaagatgggaaatgtcataaaatggaaatgaacccaatttcaggaaatctgaactgtgaccctattgctatgtcccagtgttcctcagatcatggatgtgaaactgatttagattcagatgatgacaaaatagaaaaaccaaacaattttatgaaagattctgcatcacaagacaatggactaagcagaaaaatttccaggaaaagggtctgttccagtgactcagacagtagtttacaggtggttaagaaatcatcaaaagccagaacaggtctcctgaggattactcgaagatgtgcagctacggctgccaataagatcaagctcatgagtgatgtagaagatgtcagtttagaaaatgtgcacactagaagcaaaaatggaaggaaaaaacctctccatcttgcttgtactacagctaagaagaaattgagtgattgtgaaggaagtgtacattgtgaagtaccaagtgaacagtatgcctgtgaaggcaagccacctgatcctgactccgaaggtagtacaaaagtgcttagtcaggctctaaatggagactcagactctgaagatatgttgaattcagaacacaagcacaggcataccaatattcacaaaatagatgcaccttctaaaagaaaaagttcctctgttacatcttcaggagaagattcaaaaagtcatattccagggagtgagactgataggacattttcttcagagtcaaccttggcacaaaaagctactgcagagaataattttgaagtggaactgaattatgggctgcgcaggtggaatggcagaagactcaggacctatggaaaggctccttttagtaagacaaaagtgattcatgattcacaggaaacagcagagaaggaagtaaaaaggaagagatcgcatcctgaattggaaaatgtgaaaatctctgaaacaactgggaattcaaagtttagacctgatactagttccaaatcatcagatttgggatctgtaactgaatcagatattgactgtactgataatacaaaaaccaaaaggaggaaaacgaaaggaaaagcaaaagtagttagaaaaggtaaaacttttacagctaacatatctaaaactgtgagacgtcaaagacaaagcaaacgccctaggttaagtgtggatgataatgactgggaggatttggactatgcaaaatctaaaagagttcttcgacgttcaaaaataaaaacgagaaatcagggtagaaggactgtgagataccatgatggggatgatgacagaagtttagaaaatgtgttagatttcaatggttgcaccttatgaccttgagggaaagccagttcatttaagaggaaatggactggcatttatggtgaaagctggctgttaaaattatttttttgtcttacaattcagggaatatatttatatttttctatgaaaagttatgaatgtgactaaatcatgactgttatttttatttgcacttgctggtctttgtagcagcattcagcacaggtgccaaaatatgcttcattttgggggcagatctattttgacagtatttgactacatatagcaagagtttgaaatatgttaaacactagacatcctggttatcaaaaccaatgagcattactttcatggcagcaagtgtcatgcagttattttctgaatttgtcaaagaggcagtagtttctaacccctgttctatagtagttacaacaatttcacaacctatgtttacagattcttcataaatacatgcatactgacactataatcatgggaggtgtaaccatgattagtaggcgaggtacctaccacttttttttttttcttcccctggctacttgagtagaatgcattataccagatctggtcactttcattgaaatggtttctaattttcttcccaagtgctgttgggtttttttcttcttaaggaaaacgttgtcacttttatgttataaacttgaatttataaagtgctggtaaattatttttaatgatttgagtgcatgttttaaacctctaggaccagagcatagtcagagcattttcttttaaattgtgcactaacaaaatgctatataatctgtcttctgtccaagatctcctggtttccattgtaagggatttaaccaaaatcttgctcttccataatcttactctgtgaaatagaggaattcgtgtgccttagatttagaagtgtgttctttaatagagtgtacagggctaaaagagtatttaagttaatatgtaggtttcccccatctgtattccaattgtagaggtgagttttgttaagagtacaattgcaaatcttatctatataggaaaatagctaaatgtcattctccatctctttgttttagtttactgcttccatgtgcaatcctaagcattctttgctggggcaactaaatgtatctttattagtgacttctagtccaaatataagaaactgtcatgttttgtgggaaaataattttataatccatttaaagtgaaagtttatcacacaaatagtacacttattttctaaccaaatacttgataggttatgctactccagtgtagatggccattcctaacttgtttgtgcctgaagatggacttgattcaaatggtttacatatttagtgggtaagggatatgttacagtaccccacctgtaagttatttattagccctaattgtgtttgatttcagacaaaattaacccttttctcctgtgtatctttgaagtggcagataaggtgaagcatcagactggtatcaatattagacaatgttatttattagccctaattgtgtttggtttcagacaaaaccttttctcctgtgtatctttgaagtggcagacaaggcgaagcatcagactggtattaatgttagagaatgttctgaagtgttcctattttgtagttatctattccatttgacatagtagaaggtacattttctttctactctgatgcatggggaaggatgtttttggacattatcaactgagataggtgggaaacctcctctcatttgtggcttagagagctatcaccatttcagaactatgatgcttttcttctcagaacttgtgttaagtagatagtaaacagattgattcatgataattgtccttgactaagactgaaaagactaatgggatgccttttactttgctaattttaaaaactggtgatagatgtcaaatccattaatttatttaaactcttcttaaccttctcttttataatctgttctcaggttttaactccatgtttaccatcatttgcaaaaaggtaccaaaaaaatccataaataaatatggaatacattcataagtacatacattcttttggtataaaacaatattttgacagtttaggcttcattaatagaactattctgattatttggactgcattaattggtcattgactggccatccaattaccattttttctttcagtccaaaatagttagacccttgcatacagaagtggtattttggtttttaatcagatttggtttcatcagaagcagcaagaatggacctgatgtctttaaaagcatagccgacaatggtagcttctcaagttatgaaataaaactgagagataatggagaaaataatttttatgggtttttttggttatggtgctattcctaaggttaactttgaatatgtgacacacacactcctaagtacctttaaggaaaattaataaatcattaatagttaaaatgtttacattgagcactagaacatgtttggccttttttttctacgttatgcaaaatgcccagggatttaatgcacaggtgtactttaatgtttagggtcagtttgtagtattcttgagaaaaagataaagggttataatttgaatgtgaactgatccagaaataagtgctgtacctttccactgcacttgaagttcaacttaatggtgtatgtgaaaaacaaaaactactttggttgtgtatgtccaaagtcctatggttttattcatttatggttttacaggctttgaagtactcagatttgatttttgctttcttggaaagactcactttaccaagcatataaaggaaaaatgatttcaaacattgacaagatagatgagtgttaacaaagctttcttttttcgtgtcctccttatttaaaaaggtatacttacaatgtgaagtaacttatgaataaaaggaaaagtttatcccatattcaaataattcctaaggtcagcctccctttttgtaagtggcaaatatctgattaaatcatttctcagtttattaatccttggaaacaatgatatagcagttactcacagcttgtaaattacaacagaaaggttcctttcaaatagtagagctgcacctaaagaggaaattgggtttataagaaaatggaggcaaagaacttaagttttaagaaaaagcacttcaaaacagaagggcaaatggaaaaggggaatataaaacaaaccaataaaaataccatctgagggtgttactgtccaaaagtaaagaataagatgcatcactaagccctttgcactcgttatgacctcgtaagtaaaaattatcacttagaataaggggtgcacactacattccctctgtcttctagacttttttttttgtagaagaatcagaaaacaatttactaacctccctgtttgatattaaaaataggaagaattttaatattttctgttagtacaagttgaacttgattgtgccaactgaaaccccagaggtttgtatatcagtagaatgcaagaacattgttaaaggtgcttacgatcttttttgttttcctttccactccattgtatcaattttttgagtaacttttaaatggctagaaaatggtctttttgctttgcccttttaaagctgaaataaccagctccattcttttcatgaatagtaagttgatatatttatttatcaggtatcttgcagttgtcaccaaatactgtagttttcttatgttgtatggaaattatagttcaattattttaatgtgatagagtgcaacaagtcattgtagaacttttcacctgttaatgttgaagttatacctctgaatttctgctgtggatatcaaggaaataataaagcagaaaccccaagaaatttgcaacttaacagtttgagactgtctcttatcctagtatttgggaagagaaggaataaatttgtcaaaactaggtgagaaaatagagcattgtgggaaaaactgagtccaactagattagcaaatgttaattcctagctcaaactgtgaatagtaaggattgaaaagtaaagtatgtaatgctaagggctgtgttgtcttttcttacgattttaagttttaaaggctgttaaattacagagatgttgcccaaggatacatggggattctcaaaagtaagagatttttacctttttcataatctgccaagctggttcctaatatattgttaaattggtagaaaaatatctttaaattggtgtctgctcaagaattgcttttctagatttgatggagggagggggagagtcacatcatttggattctaccaatctgcaggctctatctttggcaacatgtaaataattagactatacatctgtttctcaagtatggcaagaccaatagtttgaatttaattatcaatgctatggtatactttctggtcatattttagttatgtcagttttaaggtaagttttttcatttattaaagcccttaaatgagattttagactgccaaagagaagaggcagtccaattgacctaactgaaatgagatgaccagtatatagagcctagatggactgtagcagctctacccctttgttttacaaggtaaatcattttaaaaattaccttttttgatcagtgggtaaaagttaaagggatctttaatttttgatatattcaagttaattttctaaatgtgaatcagtccttggactgcaactatatattcacctacaaaatcccaatcaaaaaattacatgagcctgtcaagcagatctttagttttccacttcacataagatcgttaatgttctaaattaatctattcatttagatgatttttgtcagttcttaaatgggatataataaatttagcattttcatcttaacaagcaaaagagttaaaaaacaaaacaaaacactactccaagccaaatacattctagctggttaattccagacttgtcccaagtggttccccaacctcttttccactggtaatttcttttcatgcaggcagaatataggggtgcgagcgctgtgagttttacatatgagcttggataggggaactgaagcgagtcaggagccctgctggaaaaggggtttgccattggattgtctgtggcctggtttctttccagtagtacagtaatagggtagattgaaaacaagtatttacttctgattctgcctgcatttagtgtgaaatgctcttaaggtattgcttctaaaaagcaaattaagcagttaagtataaagtccctgaattcatatttcaaaataaggcttttatgagatttttattaaaaattgcaatagccatcacaaatctgagtttttctaggggtgagagaaaactgtattgtgatgagctagattagttgtagttccagaataagaacaaaaattcagagttgtgtggtgcccatcattgagtaaatgaaccctaaaaatgaataagctaatgaactagttcatggaattatttctgatggtcttttgacctgatgctgccatactgcagtgttaccagctccccctagaaaacggaactgtttaaaaacacagcaagttacagaaaccattttattctacagccattggggtacttcagtttatgggatgtttttggaaacttctgctttgggagggatgaagatcattgataaatgttatttgctttctgagttttggggtcatttcattgcttatcaatgaagggcagacagaggagagaatatctcaagtcttttctgataaaaggcttgcttgagggagcttataacttgcacctagagggtttacccactttgtggatttgatttatccaccaaccacagcaaccaataatgtcaagattctaggagtttatgaaagaggctagtatgttttcattttgagtcagacattcttttctcattctcaaatctgttttaaatgctccaattttaaaaatgccaatgaaaattttataatgcttctgtagtaaccatatgcagtttactttgaatttaggaaaacagttttgtatgatgaaatattgtgcagaatctgtaaataaggtagcttaaaaattaaaaaaaagtctaattagaatatgattaatccttgaaatgtagaaactagagattgtgttgagtcagaactgttatgtttgtatccaggtttctattcaccacatataccatcttagaatacacacatatctgtgagttataatttaaagtggtcatccagggaaatgatcatggagtgctactacagatgtacagttttacactactgatgtgttcttgccatacccaagtagggaatcacttccaggaaaacaagtcctcaagcactcaatgactttgtaaacccatgactgaaacaagactcatctgaggcagtaggactggtgggattctactgacttcttagtatcacatggcaccatcacaaatgcattgttagagcagcaacatccagagttcttaagcttgtaccctaacacacaaatttgacttctaaccctgaaatatcctatatatatttctaaaactgtttgtagttttcttgagaaaaagcactttataatttactcagttttcagtaataaaattaacactgacttgaatgtatttaaaaaaattctccacagttttgtcttcctcagattgtttttatccttattctctgaaattcctgttttattgtctaagacttaagagattcagctttatcaagttagagtacagtgtaattcaaattctccctcccttgggcatagttactgaagttcaaatttccttaagtattttttaaaaacctgattttagttttttttttcctgcagaatcttaacttttccattattctggatgacaaataaacatttattaaaatgtgttagaattagtatttactaggttcctaaattgtcagtataggtactttgatcacacatcaaaatggaatttctgcaacttaaagcattttgttacaaattgtagttgaaatagaattttatctatttgtctggatgaataggttgttgggaatgaaccagttatctgttcttttcttccaaatgcaaatggtgcagctagttgataatagtatattctcatcctactataaagtgcaaatttcaccttaattttgcatattttaaaatttttgtttaccctttgtagcatatttacattttagcatttgctaacattgatttaatgtgttaaagattcattttggatatagggttgacttgttggagatactagttcataattttaaaattcccaagagaagtgtctttgaagtggtaaacacagtgcactttaagccacttctcttcccacagagtccagctgaaggaggtaagggcatgctgcatgagagtaatgccgtgatgagtgtcttactctggtaaaatgccatttacaatgcctggagactgaacactgaacaaaacatagtgcccttagaatttcactggaaaaacatgtgaatcacataagttagttggcaaaaggaactgatgtgtatgtggtggggttgctttgaataaagtatttcctaacctattctggggagaacgctcaactgatcttagagaagtgtgaaatcagtttcatagacttagggaaaaatctgaagtgcttgcactgtgagggcagaggcctgcctcattagtctagctgtatgaacatgtcagtccacagaagcagtttttacctgtactcatctgcccttcagtcagctttgtgacagaagggcaaacatcttcacagaagaaaaagttcagaaggttggcattggtggtttcattgctacagaataatagtgttacttgatagtatctgactaaaagagctctcattttctagtacttagtagtaaaaagaatgtggtggagtcctccagatgtctagtgtgggtggaggatatcaactggttatttcagtgatctacagccttaccttttgaatgctaaatgtctggaaacttcaggcagggtcctacaaaacaaactgccatcaagattggtgtgtaccatgaaggcagttttagatagtttgactgttcatggctgcaagaaagacctaaaattcaagggcccgtgaacttcagatacgtaaaaggaatatcacttctgttctagaagagtactaattagacttgtttgtgaaatttgaaaatttggctttgagacactggtaacaaacatatctgagccctcctaagtttggtcagcacggagtagtagctctggcatcatgtggctgtgtagagctccagtgtgatttcaagccccctctaaaaactgccttagtctgcatgaagtagttaactctccaaagtgctttttgtctggcaaatcccttcacaattttcacctctcgtctaaaagcttccttaaaggaagccttccttgatcccttaggctaggttaggtttccagtctgtgttctcatagcactctgcactttttggttccttaaagcaactctgtgttattttttagaattttaatctgaatctcgtgtgtcacatacctaggtcagaaaatactggaacaatgaagttaagatttagtaattcaaattatgtaaaatgctcatatatatgtttttagattagcagctttatgatgccgatgctgaaggaacttttcaccccattcttacaagtctgctactgttttaagtgacatccttatagttgtagataagcaaatgtaaggttatatcaatgtgaagaagcccttagtatcacattttaaaatttatcatttagcaatatgacttttaaatttattgtttccgaatgagtgttgttgaggaatgttagcagtagtaaaatcttgtgttacaagatttttgcatttacatgaactttcactcatttttcagaatttgttcctagagacagagaacccaatacaaaagtgagaacatgtatgcataatcagaaggatgcagtgcagatgcctagtgaaactctgaaagcaaaaatggtacctgagaaagttccccgcagatgtgctactgttgctgcaaataaaataaagataatgagtaatctaaaagaaacgatctcaggaccagaaaatgtctggattaggaagagtagcagaaaactgccccatcgaaatgcttctgctgcggctaagaaaaaattactgaatgtttataaagaggatgatacaaccataaattctgaaagtgaaaaagagctagaagatattaatagaaaaatgctttttttaagggggttcagatcctggaaagaaaatgcacaatagtgactatgagaatgtagaagtggcatctgaaaacaattggtacacaagtaaactggcagttacattctgctcccagctctaaaattactcccttattggcatctttggaggaattttctaaaagccataatccagtgggttcctcccagtcagctcttgtacagacatgtgctctggggaattctgaggaggaaataaattgcagagtctgtaggtggagaggtggaaagaaaagacaaatggcctgctataagactactattcctttccagaatgcaaggccttgaagacatgattccttagaggaagaatataatgggaagtgtacaggctaggaagaacttgaagtgaacaaatttcaaaatcttaacctgatgctaattttcagggttctccattacagtgtaaaaattcagaccacgacaactatggtgtcatgaggaaaaaaaatcaggcatttttccaaaggaagtgctaatgggcctatttgacttctgagtgaagcaaaaactacccagatccattccctacaattcacatccccaaaggtcaaaaacaaactaggaggacctgggaatttcagctggagatactgattattgagttctgaagtagagtgttggaaataggcaattagagaaagtccattgatgtcattttgtttataatattgcagttcatactgaatgaccacttgatatgactaattcagggaatatatatttttctatgaaagctatgaatgttactatcacggcttttccttatttttacttgtatgtagcagcatttacagaaatgccaaaaatgtgcctcattaagaggcaggtcttaatcagttagataaaaataaaatgtatagcttaagatcaaaacagtcatatttttagatacagtgaaatcttttatgtttctctacagcaccttaaaaattagaacttgaatactttgagtaaacttactacaatctcatcccaacaaactttaatggtagcatgtttggcctatttcattgtggcctgtactaggattagaaaatttggtcgtggtataacaaagaagtgtatttacaataggatttaatttgttgttaatatgtatttgttgaaattaaaattgccagattaaatgaatatactgtcgcatctttttaacatagtaacgtgttactggaaaaattaagttgttgaaagtaagttgttttcccatttaaaaatatctgaatatatgatttgcatgtgtaaatctgaaaaactaaactacagaaacctagggttttctatttcttttttaagtcaaatgcatttttttttttttgttatacagatgaaccaagtgtctaaaatacttgagaaatttgtggttgcatgtctgttttaaaaaaaaggctttttgttttttagcataagccagaatattctaacctactaagtctgtgtcctttgctccttttgtagtatactttcatctaaattactgatccccaatatgttgatacacaggtgagaaagggaagaattcctaataaactgctattacttttaggtgc

SEQ ID NO: 11801 - protein, 2269 aa, Homo sapiens; identical to SEQ ID NO: 1958

SEQ ID NO: 11802 - DNA, 8932 bp, Homo sapiens
gtaattttctgccgggctgctggcttgtgggggatgtggctgggtctcggcagccttcagcgccgcagacgctccggcaacgccagcatacgaggcccccgccccaggagcgcgggtccgggcggcgttcccctctgcgggaggcgcggcgagccaatcctcactttaaaagctttcctgtcctcgaagcgaggggtcttccgtgcggggcaagacgcactggccccagacgaccggtccgtgaaatgacccttccgagcgacccggagcgggcgaccttgcccaacccgcgactcggggcccctgcggtcccgcgtagaggacccaggtcccacggggggcggcggtgaatcgccccctcttgtggccgcgcttccgcccccggcacccgcccgctgctgggccacccggcgtcgcgctgccgcctcacaaagcccgggcagccgcctcattgcgcgcagggattcggaccacgcgccctcccctcccccactcgctgctgcggcgcccaggtctttgcctccgcgtcactttctcctcatcgagtccccggaggcagagagctgagcgaggttcgcctccccgggcgggacacgagctccggtcctctcttggcgcaaacccccgccccccgcggagggactacttttcgtctcccgcggaggaactacttcctcccccgcggaggcgtcggtccaggcggcgcgcacggtatggcggcggcggcggcggcggcggcgcgcgcctgagaagaggggacgccagcccggtcaggcctcggcgcggcctacacgctccgctcgctcgctcgctcccgcctcccgccccgcgcccggccatggcggagccgtcgtccgcccgacgcccggtgcctctcatcgagtcggagctgtacttccttatcgcccggtacctatcggcgggcccgtgtcggagagcggcccaggtgctggtgcaggagctggagcagtaccagttgttgccgaagagattggactgggagggcaacgagcacaacaggagctacgaggagttggtcttgtccaataagcatgtggctcctgatcatcttttgcaaatctgccagcgcatcggtcctatgttggataaagaaattccacccagtatttcaagagtcacttctttacttggtgcaggaaggcagtctttgctacgtacagcaaaagactgcaggcacacagtttggaagggctctgcctttgctgctcttcatagaggaagacctcctgaaatgccagtgaattatggttccccaccaaatcttgtggagatacatcgaggaaaacaactcacagggtgttccacttttagtacagcatttccaggaactatgtatcagcatataaaaatgcacagaaggattctcggacatctatctgctgtttactgtgtagcatttgataggacaggacatagaatctttacaggttcagatgactgtttggtaaagatttggtcaacacataatggccgcttgttatctacattaagaggtcattctgcagaaatttcagatatggcagtaaactatgagaatacaatgattgctgcggggagctgtgataaaattattagagtgtggtgcttgagaacttgtgccccagttgctgtgctccaaggacacacaggatcaattacatctttacagtttagcccgatggccaaaggctctcaaagatacatggtttccactggtgctgatgggacagtttgcttttggcaatgggatttagaatccttaaaatttagcccacgtcccctgaagttcactgaaaagcctaggccaggcgttcaaatgctttgttcttcttttagtgttggtggtatgtttttagccacaggtagtactgatcatgtaatcagaatgtattttttgggttttgaagcacccgaaaaaatcgcagaacttgaaagccacactgataaagtagatagtatccaattttgtaacaatggtgatcggttcctaagtggtagcagagatggaacagcacggatttggagatttgagcagttagaatggaggagcattttattggatatggctaccagaatctcaggggacttatcttccgaagaggaaaggtttatgaaacctaaagtaacaatgatagcttggaatcaaaatgatagcattgttgtcacagctgtgaatgatcatgtcctcaaagtgtggaattcttacactggacaactgcttcataacttaatgggacatgctgatgaagtatttgttctggagacacatccctttgattccagaattatgttatctgcaggacatgatggcagcatatttatatgggatattacaaaaggtaccaagatgaaacattattttaatatgattgaaggacaaggacatggagctgtgtttgactgtaagttttcacaggatggacagcattttgcctgtacagattctcatgggcaccttctgatatttggttttggatgcagcaaaccatatgaaaagattcctgatcagatgttcttccatactgactatcgaccacttattagagattctaataattatgtcttagatgagcaaactcagcaggctcctcatcttatgcctccaccattcttggtagatgtagatggaaatcctcatccaaccaagtatcagagattagtaccaggccgagaaaattctgcagatgaacatttgattccacagctgggctatgtggcaacaagtgatggagaggtgattgaacaaattataagcctgcaaaccaatgataatgatgaacgcagcccagaatcgagtattcttgatggaatgataagacagttgcagcagcagcaagatcagagaatgggagcagatcaggatactattccaagaggactttcaaatggtgaagaaacaccccggagaggttttagaaggctgagcttagacattcagtcccctccaaatattggtctgcgtcgtagtggacaagttgaaggtgttcgtcagatgcatcaaaacgctccacgcagtcagattgctacagaacgtgacctgcaggcttggaaacgaagagtggttgtaccagaggtaccactaggcatatttaggaagctggaagacttccgattagagaaaggtgaagaggaaagaaatctttatataataggaagaaaaagaaagactcttcagctctcacataagtcggattcagtggttttggtatcacagtctagacaaaggacatgtaggcgtaaatatccaaattatggtagaagaaatcgtagctggcgtgagttatcttctggaaatgagtcttcaagctctgtaagacatgagacttcctgtgatcagagtgaaggttctggttcttcagaagaggatgaatggagaagtgacagaaaaagtgagagttacagcgaaagttcaagtgactcttcatctagatattccgattggacagctgatgcgggcatcaatttgcagcctcctttaagaacatcatgtcgtcgacgaattactcgattttgtagtagttcagaagatgaaatatctactgagaatttatctcctccaaaaagaagacgaaagagaaagaaagaaaataagcctaagaaggagaatttgcggaggatgactccagcagagcttgcaaatatggagcatttatatgaatttcaccctccagtttggattactgacaccacacttagaaaatctccttttgttcctcaaatgggtgatgaggtaatatattttcgacagggtcatgaagcttatattgaggctgtaagaagaaataatatttatgaactgaaccctaataaggagccatggagaaaaatggatcttagggatcaagaattggttaaaatagttggaatacgatatgaagttgggccccctacactctgttgcctaaaactagcatttatagatccagcaactggaaaacttatggacaaatctttctctattagatatcatgatatgccagatgttattgactttcttgtattgcgtcaattttatgatgaagcaagacagaggaattggcagtcttgtgacagattccgctctattattgatgatgcttggtggtttggaacagtgttaagtcaagagccatatcaaccacagtatcctgatagtcatttccagtgttatattgttaggtgggataatactgaaattgaaaaacttagcccatgggacatggaaccaattcctgataatgttgatccacctgaagaattaggagctagtatttctgtcacaacagatgagctagagaaattgctctataaaccacaagctggtgaatggggtcagaaatcaagagatgaagaatgtgatagaattatcagtggtatagatcaacttttgaatcttgatatagcagcagcttttgcaggccctgttgatttgtgtacatacccgaagtactgtactgtagtagcttatccaaccgatctttacacaattcgaatgagacttgttaatcgattttacaggaggctgtctgcgttagtttgggaagtcagatatatagaacataatgccagaacatttaacgaacctgagagtgtaattgcaagatcagctaaaaagataactgaccaacttttaaaatttatcaagaatcaacactgtacaaatatctcagaactttctaacacatctgaaaatgatgagcaaaatgctgaggatttggatgatagtgatcttcctaaaacatcttctggaaggaggagagtccatgatgggaaaaaaagcatcagagctacgaactatgttgaaagcaactggaagaaacagtgtaaggaactagtgaacttaatttttcagtgtgaagattctgaaccatttagacaacctgttgatttggttgaatatccagactacagagatattatagataccccaatggattttggaacagtaagggaaactctagatgcgggaaattatgacagccctttggagttttgcaaagacatccggctgatatttagcaatgcaaaagcgtatacaccaaacaaaagatcaaagatttatagtatgaccttgagattatctgccttatttgaagaaaaaatgaagaaaatctcttctgattttaaaattggtcaaaaattcaatgaaaaacttcgaagaagccagaggttcaagcaacggcaaaattgtaaaggtgacagtcagcctaacaaaagtatcagaaacctcaagccgaagaggttaaaatctcagacaaaaataattcctgagttggtaggttctcctacccagtctacctcaagtaggacagcttatcttggaacccacaagacaagtgctggtatctcttcaggtgttacttctggtgactcttcagattcagcagaatcatcagaaaggaggaaaagaaatagacctataacaaatggttctacattatctgaaagtgaagtggaagattctttagctacctctttgtcatcgtcagcttccagtagttctgaggaaagcaaagagagttccagagctcgtgaatcctcctcacgcagtgggctatccagaagcagcaatctcagggtaaccagaactagagctgctcaaagaaaaactggtcccgtttcattagcaaatggatgtggcagaaaagccactcgaaagagagtctatttaagtgattctgataacaattcattggagactggtgaaattctaaaagccagagctggaaataaccgaaaagtcttaaggaagtgtgctgctgtggctgccaataaaataaagctaatgagtgatgtagaagagaattctagctctgaaagtgtctgttctggtcggaagctgcctcaccgcaatgcttctgctgtagctagaaaaaagttattacataattctgaagatgaacagagcttaaagtcagaaattgaagaagaggagctaaaagatgaaaatcaactattaccagtgtccagttctcacactgcccagagcaatgttgatgaatctgaaaacagagactcagagtcagaaagtgatttgcgggtagcccggaaaaattggcatgctaatggttacaagtcccatactccagcaccttcaaagacaaaatttcttaaaatagagtcttctgaggaagactctaaaagtcatgattcagatcatgcatgtaacagaactgctggcccatcaacgtctgtgcagaaacttaaggcagagagcatctcagaggaagcagattctgaaccaggaagatctggtggtaggaaatacaatacatttcacaagaatgcgagtttctttaaaaaaaccaagattctgagtgactcagaagactctgaatctgaagagcaagatagagaagatgggaaatgtcataaaatggaaatgaacccaatttcaggaaatctgaactgtgaccctattgctatgtcccagtgttcctcagatcatggatgtgaaactgatttagattcagatgatgacaaaatagaaaaaccaaacaattttatgaaagattctgcatcacaagacaatggactaagcagaaaaatttccaggaaaagggtctgttccagtgactcagacagtagtttacaggtggttaagaaatcatcaaaagccagaacaggtctcctgaggattactcgaagatgtgcagctacggctgccaataagatcaagctcatgagtgatgtagaagatgtcagtttagaaaatgtgcacactagaagcaaaaatggaaggaaaaaacctctccatcttgcttgtactacagctaagaagaaattgagtgattgtgaaggaagtgtacattgtgaagtaccaagtgaacagtatgcctgtgaaggcaagccacctgatcctgactccgaaggtagtacaaaagtgcttagtcaggctctaaatggagactcagactctgaagatatgttgaattcagaacacaagcacaggcataccaatattcacaaaatagatgcaccttctaaaagaaaaagttcctctgttacatcttcaggagaagattcaaaaagtcatattccagggagtgagactgataggacattttcttcagagtcaaccttggcacaaaaagctactgcagagaataattttgaagtggaactgaattatgggctgcgcaggtggaatggcagaagactcaggacctatggaaaggctccttttagtaagacaaaagtgattcatgattcacaggaaacagcagagaaggaagtaaaaaggaagagatcgcatcctgaattggaaaatgtgaaaatctctgaaacaactgggaattcaaagtttagacctgatactagttccaaatcatcagatttgggatctgtaactgaatcagatattgactgtactgataatacaaaaaccaaaaggaggaaaacgaaaggaaaagcaaaagtagttagaaaagaatttgttcctagagacagagaacccaatacaaaagtgagaacatgtatgcataatcagaaggatgcagtgcagatgcctagtgaaactctgaaagcaaaaatggtacctgagaaagttccccgcagatgtgctactgttgctgcaaataaaataaagataatgagtaatctaaaagaaacgatctcaggaccagaaaatgtctggattaggaagagtagcagaaaactgccccatcgaaatgcttctgctgcggctaagaaaaaattactgaatgtttataaagaggatgatacaaccataaattctgaaagtgaaaaagagctagaagatattaatagaaaaatgctttttttaagggggttcagatcctggaaagaaaatgcacaatagtgactatgagaatgtagaagtggcatctgaaaacaattggtacacaagtaaactggcagttacattctgctcccagctctaaaattactcccttattggcatctttggaggaattttctaaaagccataatccagtgggttcctcccagtcagctcttgtacagacatgtgctctggggaattctgaggaggaaataaattgcagagtctgtaggtggagaggtggaaagaaaagacaaatggcctgctataagactactattcctttccagaatgcaaggccttgaagacatgattccttagaggaagaatataatgggaagtgtacaggctaggaagaacttgaagtgaacaaatttcaaaatcttaacctgatgctaattttcagggttctccattacagtgtaaaaattcagaccacgacaactatggtgtcatgaggaaaaaaaatcaggcatttttccaaaggaagtgctaatgggcctatttgacttctgagtgaagcaaaaactacccagatccattccctacaattcacatccccaaaggtcaaaaacaaactaggaggacctgggaatttcagctggagatactgattattgagttctgaagtagagtgttggaaataggcaattagagaaagtccattgatgtcattttgtttataatattgcagttcatactgaatgaccacttgatatgactaattcagggaatatatatttttctatgaaagctatgaatgttactatcacggcttttccttatttttacttgtatgtagcagcatttacagaaatgccaaaaatgtgcctcattaagaggcaggtcttaatcagttagataaaaataaaatgtatagcttaagatcaaaacagtcatatttttagatacagtgaaatcttttatgtttctctacagcaccttaaaaattagaacttgaatactttgagtaaacttactacaatctcatcccaacaaactttaatggtagcatgtttggcctatttcattgtggcctgtactaggattagaaaatttggtcgtggtataacaaagaagtgtatttacaataggatttaatttgttgttaatatgtatttgttgaaattaaaattgccagattaaatg

SEQ ID NO: 11803 - protein, 2320 aa, Homo sapiens; identical to SEQ ID NO: 1956

SEQ ID NO: 11804 - DNA, 18012 bp, Homo sapiens
gtaattttctgccgggctgctggcttgtgggggatgtggctgggtctcggcagccttcagcgccgcagacgctccggcaacgccagcatacgaggcccccgccccaggagcgcgggtccgggcggcgttcccctctgcgggaggcgcggcgagccaatcctcactttaaaagctttcctgtcctcgaagcgaggggtcttccgtgcggggcaagacgcactggccccagacgaccggtccgtgaaatgacccttccgagcgacccggagcgggcgaccttgcccaacccgcgactcggggcccctgcggtcccgcgtagaggacccaggtcccacggggggcggcggtgaatcgccccctcttgtggccgcgcttccgcccccggcacccgcccgctgctgggccacccggcgtcgcgctgccgcctcacaaagcccgggcagccgcctcattgcgcgcagggattcggaccacgcgccctcccctcccccactcgctgctgcggcgcccaggtctttgcctccgcgtcactttctcctcatcgagtccccggaggcagagagctgagcgaggttcgcctccccgggcgggacacgagctccggtcctctcttggcgcaaacccccgccccccgcggagggactacttttcgtctcccgcggaggaactacttcctcccccgcggaggcgtcggtccaggcggcgcgcacggtatggcggcggcggcggcggcggcggcgcgcgcctgagaagaggggacgccagcccggtcaggcctcggcgcggcctacacgctccgctcgctcgctcgctcccgcctcccgccccgcgcccggccatggcggagccgtcgtccgcccgacgcccggtgcctctcatcgagtcggagctgtacttccttatcgcccggtacctatcggcgggcccgtgtcggagagcggcccaggtgctggtgcaggagctggagcagtaccagttgttgccgaagagattggactgggagggcaacgagcacaacaggagctacgaggagttggtcttgtccaataagcatgtggctcctgatcatcttttgcaaatctgccagcgcatcggtcctatgttggataaagaaattccacccagtatttcaagagtcacttctttacttggtgcaggaaggcagtctttgctacgtacagcaaaagactgcaggcacacagtttggaagggctctgcctttgctgctcttcatagaggaagacctcctgaaatgccagtgaattatggttccccaccaaatcttgtggagatacatcgaggaaaacaactcacagggtgttccacttttagtacagcatttccaggaactatgtatcagcatataaaaatgcacagaaggattctcggacatctatctgctgtttactgtgtagcatttgataggacaggacatagaatctttacaggttcagatgactgtttggtaaagatttggtcaacacataatggccgcttgttatctacattaagaggtcattctgcagaaatttcagatatggcagtaaactatgagaatacaatgattgctgcggggagctgtgataaaattattagagtgtggtgcttgagaacttgtgccccagttgctgtgctccaaggacacacaggatcaattacatctttacagtttagcccgatggccaaaggctctcaaagatacatggtttccactggtgctgatgggacagtttgcttttggcaatgggatttagaatccttaaaatttagcccacgtcccctgaagttcactgaaaagcctaggccaggcgttcaaatgctttgttcttcttttagtgttggtggtatgtttttagccacaggtagtactgatcatgtaatcagaatgtattttttgggttttgaagcacccgaaaaaatcgcagaacttgaaagccacactgataaagtagatagtatccaattttgtaacaatggtgatcggttcctaagtggtagcagagatggaacagcacggatttggagatttgagcagttagaatggaggagcattttattggatatggctaccagaatctcaggggacttatcttccgaagaggaaaggtttatgaaacctaaagtaacaatgatagcttggaatcaaaatgatagcattgttgtcacagctgtgaatgatcatgtcctcaaagtgtggaattcttacactggacaactgcttcataacttaatgggacatgctgatgaagtatttgttctggagacacatccctttgattccagaattatgttatctgcaggacatgatggcagcatatttatatgggatattacaaaaggtaccaagatgaaacattattttaatatgattgaaggacaaggacatggagctgtgtttgactgtaagttttcacaggatggacagcattttgcctgtacagattctcatgggcaccttctgatatttggttttggatgcagcaaaccatatgaaaagattcctgatcagatgttcttccatactgactatcgaccacttattagagattctaataattatgtcttagatgagcaaactcagcaggctcctcatcttatgcctccaccattcttggtagatgtagatggaaatcctcatccaaccaagtatcagagattagtaccaggccgagaaaattctgcagatgaacatttgattccacagctgggctatgtggcaacaagtgatggagaggtgattgaacaaattataagcctgcaaaccaatgataatgatgaacgcagcccagaatcgagtattcttgatggaatgataagacagttgcagcagcagcaagatcagagaatgggagcagatcaggatactattccaagaggactttcaaatggtgaagaaacaccccggagaggttttagaaggctgagcttagacattcagtcccctccaaatattggtctgcgtcgtagtggacaagttgaaggtgttcgtcagatgcatcaaaacgctccacgcagtcagattgctacagaacgtgacctgcaggcttggaaacgaagagtggttgtaccagaggtaccactaggcatatttaggaagctggaagacttccgattagagaaaggtgaagaggaaagaaatctttatataataggaagaaaaagaaagactcttcagctctcacataagtcggattcagtggttttggtatcacagtctagacaaaggacatgtaggcgtaaatatccaaattatggtagaagaaatcgtagctggcgtgagttatcttctggaaatgagtcttcaagctctgtaagacatgagacttcctgtgatcagagtgaaggttctggttcttcagaagaggatgaatggagaagtgacagaaaaagtgagagttacagcgaaagttcaagtgactcttcatctagatattccgattggacagctgatgcgggcatcaatttgcagcctcctttaagaacatcatgtcgtcgacgaattactcgattttgtagtagttcagaagatgaaatatctactgagaatttatctcctccaaaaagaagacgaaagagaaagaaagaaaataagcctaagaaggagaatttgcggaggatgactccagcagagcttgcaaatatggagcatttatatgaatttcaccctccagtttggattactgacaccacacttagaaaatctccttttgttcctcaaatgggtgatgaggtaatatattttcgacagggtcatgaagcttatattgaggctgtaagaagaaataatatttatgaactgaaccctaataaggagccatggagaaaaatggatcttagggatcaagaattggttaaaatagttggaatacgatatgaagttgggccccctacactctgttgcctaaaactagcatttatagatccagcaactggaaaacttatggacaaatctttctctattagatatcatgatatgccagatgttattgactttcttgtattgcgtcaattttatgatgaagcaagacagaggaattggcagtcttgtgacagattccgctctattattgatgatgcttggtggtttggaacagtgttaagtcaagagccatatcaaccacagtatcctgatagtcatttccagtgttatattgttaggtgggataatactgaaattgaaaaacttagcccatgggacatggaaccaattcctgataatgttgatccacctgaagaattaggagctagtatttctgtcacaacagatgagctagagaaattgctctataaaccacaagctggtgaatggggtcagaaatcaagagatgaagaatgtgatagaattatcagtggtatagatcaacttttgaatcttgatatagcagcagcttttgcaggccctgttgatttgtgtacatacccgaagtactgtactgtagtagcttatccaaccgatctttacacaattcgaatgagacttgttaatcgattttacaggaggctgtctgcgttagtttgggaagtcagatatatagaacataatgccagaacatttaacgaacctgagagtgtaattgcaagatcagctaaaaagataactgaccaacttttaaaatttatcaagaatcaacactgtacaaatatctcagaactttctaacacatctgaaaatgatgagcaaaatgctgaggatttggatgatagtgatcttcctaaaacatcttctggaaggaggagagtccatgatgggaaaaaaagcatcagagctacgaactatgttgaaagcaactggaagaaacagtgtaaggaactagtgaacttaatttttcagtgtgaagattctgaaccatttagacaacctgttgatttggttgaatatccagactacagagatattatagataccccaatggattttggaacagtaagggaaactctagatgcgggaaattatgacagccctttggagttttgcaaagacatccggctgatatttagcaatgcaaaagcgtatacaccaaacaaaagatcaaagatttatagtatgaccttgagattatctgccttatttgaagaaaaaatgaagaaaatctcttctgattttaaaattggtcaaaaattcaatgaaaaacttcgaagaagccagaggttcaagcaacggcaaaattgtaaaggtgacagtcagcctaacaaaagtatcagaaacctcaagccgaagaggttaaaatctcagacaaaaataattcctgagttggtaggttctcctacccagtctacctcaagtaggacagcttatcttggaacccacaagacaagtgctggtatctcttcaggtgttacttctggtgactcttcagattcagcagaatcatcagaaaggaggaaaagaaatagacctataacaaatggttctacattatctgaaagtgaagtggaagattctttagctacctctttgtcatcgtcagcttccagtagttctgaggaaagcaaagagagttccagagctcgtgaatcctcctcacgcagtgggctatccagaagcagcaatctcagggtaaccagaactagagctgctcaaagaaaaactggtcccgtttcattagcaaatggatgtggcagaaaagccactcgaaagagagtctatttaagtgattctgataacaattcattggagactggtgaaattctaaaagccagagctggaaataaccgaaaagtcttaaggaagtgtgctgctgtggctgccaataaaataaagctaatgagtgatgtagaagagaattctagctctgaaagtgtctgttctggtcggaagctgcctcaccgcaatgcttctgctgtagctagaaaaaagttattacataattctgaagatgaacagagcttaaagtcagaaattgaagaagaggagctaaaagatgaaaatcaactattaccagtgtccagttctcacactgcccagagcaatgttgatgaatctgaaaacagagactcagagtcagaaagtgatttgcgggtagcccggaaaaattggcatgctaatggttacaagtcccatactccagcaccttcaaagacaaaatttcttaaaatagagtcttctgaggaagactctaaaagtcatgattcagatcatgcatgtaacagaactgctggcccatcaacgtctgtgcagaaacttaaggcagagagcatctcagaggaagcagattctgaaccaggaagatctggtggtaggaaatacaatacatttcacaagaatgcgagtttctttaaaaaaaccaagattctgagtgactcagaagactctgaatctgaagagcaagatagagaagatgggaaatgtcataaaatggaaatgaacccaatttcaggaaatctgaactgtgaccctattgctatgtcccagtgttcctcagatcatggatgtgaaactgatttagattcagatgatgacaaaatagaaaaaccaaacaattttatgaaagattctgcatcacaagacaatggactaagcagaaaaatttccaggaaaagggtctgttccagtgactcagacagtagtttacaggtggttaagaaatcatcaaaagccagaacaggtctcctgaggattactcgaagatgtgcagctacggctgccaataagatcaagctcatgagtgatgtagaagatgtcagtttagaaaatgtgcacactagaagcaaaaatggaaggaaaaaacctctccatcttgcttgtactacagctaagaagaaattgagtgattgtgaaggaagtgtacattgtgaagtaccaagtgaacagtatgcctgtgaaggcaagccacctgatcctgactccgaaggtagtacaaaagtgcttagtcaggctctaaatggagactcagactctgaagatatgttgaattcagaacacaagcacaggcataccaatattcacaaaatagatgcaccttctaaaagaaaaagttcctctgttacatcttcaggagaagattcaaaaagtcatattccagggagtgagactgataggacattttcttcagagtcaaccttggcacaaaaagctactgcagagaataattttgaagtggaactgaattatgggctgcgcaggtggaatggcagaagactcaggacctatggaaaggctccttttagtaagacaaaagtgattcatgattcacaggaaacagcagagaaggaagtaaaaaggaagagatcgcatcctgaattggaaaatgtgaaaatctctgaaacaactgggaattcaaagtttagacctgatactagttccaaatcatcagatttgggatctgtaactgaatcagatattgactgtactgataatacaaaaaccaaaaggaggaaaacgaaaggaaaagcaaaagtagttagaaaaggtaaaacttttacagctaacatatctaaaactgtgagacgtcaaagacaaagcaaacgccctaggttaagtgtggatgataatgactgggaggatttggactatgcaaaatctaaaagagttcttcgacgttcaaaaataaaaacgagaaatcagggtagaaggactgtgagataccatgatggggatgatgacagaagtttagaaaatgtgttagatttcaatggttgcaccttatgaccttgagggaaagccagttcatttaagaggaaatggactggcatttatggtgaaagctggctgttaaaattatttttttgtcttacaattcagggaatatatttatatttttctatgaaaagttatgaatgtgactaaatcatgactgttatttttatttgcacttgctggtctttgtagcagcattcagcacaggtgccaaaatatgcttcattttgggggcagatctattttgacagtatttgactacatatagcaagagtttgaaatatgttaaacactagacatcctggttatcaaaaccaatgagcattactttcatggcagcaagtgtcatgcagttattttctgaatttgtcaaagaggcagtagtttctaacccctgttctatagtagttacaacaatttcacaacctatgtttacagattcttcataaatacatgcatactgacactataatcatgggaggtgtaaccatgattagtaggcgaggtacctaccacttttttttttttcttcccctggctacttgagtagaatgcattataccagatctggtcactttcattgaaatggtttctaattttcttcccaagtgctgttgggtttttttcttcttaaggaaaacgttgtcacttttatgttataaacttgaatttataaagtgctggtaaattatttttaatgatttgagtgcatgttttaaacctctaggaccagagcatagtcagagcattttcttttaaattgtgcactaacaaaatgctatataatctgtcttctgtccaagatctcctggtttccattgtaagggatttaaccaaaatcttgctcttccataatcttactctgtgaaatagaggaattcgtgtgccttagatttagaagtgtgttctttaatagagtgtacagggctaaaagagtatttaagttaatatgtaggtttcccccatctgtattccaattgtagaggtgagttttgttaagagtacaattgcaaatcttatctatataggaaaatagctaaatgtcattctccatctctttgttttagtttactgcttccatgtgcaatcctaagcattctttgctggggcaactaaatgtatctttattagtgacttctagtccaaatataagaaactgtcatgttttgtgggaaaataattttataatccatttaaagtgaaagtttatcacacaaatagtacacttattttctaaccaaatacttgataggttatgctactccagtgtagatggccattcctaacttgtttgtgcctgaagatggacttgattcaaatggtttacatatttagtgggtaagggatatgttacagtaccccacctgtaagttatttattagccctaattgtgtttgatttcagacaaaattaacccttttctcctgtgtatctttgaagtggcagataaggtgaagcatcagactggtatcaatattagacaatgttatttattagccctaattgtgtttggtttcagacaaaaccttttctcctgtgtatctttgaagtggcagacaaggcgaagcatcagactggtattaatgttagagaatgttctgaagtgttcctattttgtagttatctattccatttgacatagtagaaggtacattttctttctactctgatgcatggggaaggatgtttttggacattatcaactgagataggtgggaaacctcctctcatttgtggcttagagagctatcaccatttcagaactatgatgcttttcttctcagaacttgtgttaagtagatagtaaacagattgattcatgataattgtccttgactaagactgaaaagactaatgggatgccttttactttgctaattttaaaaactggtgatagatgtcaaatccattaatttatttaaactcttcttaaccttctcttttataatctgttctcaggttttaactccatgtttaccatcatttgcaaaaaggtaccaaaaaaatccataaataaatatggaatacattcataagtacatacattcttttggtataaaacaatattttgacagtttaggcttcattaatagaactattctgattatttggactgcattaattggtcattgactggccatccaattaccattttttctttcagtccaaaatagttagacccttgcatacagaagtggtattttggtttttaatcagatttggtttcatcagaagcagcaagaatggacctgatgtctttaaaagcatagccgacaatggtagcttctcaagttatgaaataaaactgagagataatggagaaaataatttttatgggtttttttggttatggtgctattcctaaggttaactttgaatatgtgacacacacactcctaagtacctttaaggaaaattaataaatcattaatagttaaaatgtttacattgagcactagaacatgtttggccttttttttctacgttatgcaaaatgcccagggatttaatgcacaggtgtactttaatgtttagggtcagtttgtagtattcttgagaaaaagataaagggttataatttgaatgtgaactgatccagaaataagtgctgtacctttccactgcacttgaagttcaacttaatggtgtatgtgaaaaacaaaaactactttggttgtgtatgtccaaagtcctatggttttattcatttatggttttacaggctttgaagtactcagatttgatttttgctttcttggaaagactcactttaccaagcatataaaggaaaaatgatttcaaacattgacaagatagatgagtgttaacaaagctttcttttttcgtgtcctccttatttaaaaaggtatacttacaatgtgaagtaacttatgaataaaaggaaaagtttatcccatattcaaataattcctaaggtcagcctccctttttgtaagtggcaaatatctgattaaatcatttctcagtttattaatccttggaaacaatgatatagcagttactcacagcttgtaaattacaacagaaaggttcctttcaaatagtagagctgcacctaaagaggaaattgggtttataagaaaatggaggcaaagaacttaagttttaagaaaaagcacttcaaaacagaagggcaaatggaaaaggggaatataaaacaaaccaataaaaataccatctgagggtgttactgtccaaaagtaaagaataagatgcatcactaagccctttgcactcgttatgacctcgtaagtaaaaattatcacttagaataaggggtgcacactacattccctctgtcttctagacttttttttttgtagaagaatcagaaaacaatttactaacctccctgtttgatattaaaaataggaagaattttaatattttctgttagtacaagttgaacttgattgtgccaactgaaaccccagaggtttgtatatcagtagaatgcaagaacattgttaaaggtgcttacgatcttttttgttttcctttccactccattgtatcaattttttgagtaacttttaaatggctagaaaatggtctttttgctttgcccttttaaagctgaaataaccagctccattcttttcatgaatagtaagttgatatatttatttatcaggtatcttgcagttgtcaccaaatactgtagttttcttatgttgtatggaaattatagttcaattattttaatgtgatagagtgcaacaagtcattgtagaacttttcacctgttaatgttgaagttatacctctgaatttctgctgtggatatcaaggaaataataaagcagaaaccccaagaaatttgcaacttaacagtttgagactgtctcttatcctagtatttgggaagagaaggaataaatttgtcaaaactaggtgagaaaatagagcattgtgggaaaaactgagtccaactagattagcaaatgttaattcctagctcaaactgtgaatagtaaggattgaaaagtaaagtatgtaatgctaagggctgtgttgtcttttcttacgattttaagttttaaaggctgttaaattacagagatgttgcccaaggatacatggggattctcaaaagtaagagatttttacctttttcataatctgccaagctggttcctaatatattgttaaattggtagaaaaatatctttaaattggtgtctgctcaagaattgcttttctagatttgatggagggagggggagagtcacatcatttggattctaccaatctgcaggctctatctttggcaacatgtaaataattagactatacatctgtttctcaagtatggcaagaccaatagtttgaatttaattatcaatgctatggtatactttctggtcatattttagttatgtcagttttaaggtaagttttttcatttattaaagcccttaaatgagattttagactgccaaagagaagaggcagtccaattgacctaactgaaatgagatgaccagtatatagagcctagatggactgtagcagctctacccctttgttttacaaggtaaatcattttaaaaattaccttttttgatcagtgggtaaaagttaaagggatctttaatttttgatatattcaagttaattttctaaatgtgaatcagtccttggactgcaactatatattcacctacaaaatcccaatcaaaaaattacatgagcctgtcaagcagatctttagttttccacttcacataagatcgttaatgttctaaattaatctattcatttagatgatttttgtcagttcttaaatgggatataataaatttagcattttcatcttaacaagcaaaagagttaaaaaacaaaacaaaacactactccaagccaaatacattctagctggttaattccagacttgtcccaagtggttccccaacctcttttccactggtaatttcttttcatgcaggcagaatataggggtgcgagcgctgtgagttttacatatgagcttggataggggaactgaagcgagtcaggagccctgctggaaaaggggtttgccattggattgtctgtggcctggtttctttccagtagtacagtaatagggtagattgaaaacaagtatttacttctgattctgcctgcatttagtgtgaaatgctcttaaggtattgcttctaaaaagcaaattaagcagttaagtataaagtccctgaattcatatttcaaaataaggcttttatgagatttttattaaaaattgcaatagccatcacaaatctgagtttttctaggggtgagagaaaactgtattgtgatgagctagattagttgtagttccagaataagaacaaaaattcagagttgtgtggtgcccatcattgagtaaatgaaccctaaaaatgaataagctaatgaactagttcatggaattatttctgatggtcttttgacctgatgctgccatactgcagtgttaccagctccccctagaaaacggaactgtttaaaaacacagcaagttacagaaaccattttattctacagccattggggtacttcagtttatgggatgtttttggaaacttctgctttgggagggatgaagatcattgataaatgttatttgctttctgagttttggggtcatttcattgcttatcaatgaagggcagacagaggagagaatatctcaagtcttttctgataaaaggcttgcttgagggagcttataacttgcacctagagggtttacccactttgtggatttgatttatccaccaaccacagcaaccaataatgtcaagattctaggagtttatgaaagaggctagtatgttttcattttgagtcagacattcttttctcattctcaaatctgttttaaatgctccaattttaaaaatgccaatgaaaattttataatgcttctgtagtaaccatatgcagtttactttgaatttaggaaaacagttttgtatgatgaaatattgtgcagaatctgtaaataaggtagcttaaaaattaaaaaaaagtctaattagaatatgattaatccttgaaatgtagaaactagagattgtgttgagtcagaactgttatgtttgtatccaggtttctattcaccacatataccatcttagaatacacacatatctgtgagttataatttaaagtggtcatccagggaaatgatcatggagtgctactacagatgtacagttttacactactgatgtgttcttgccatacccaagtagggaatcacttccaggaaaacaagtcctcaagcactcaatgactttgtaaacccatgactgaaacaagactcatctgaggcagtaggactggtgggattctactgacttcttagtatcacatggcaccatcacaaatgcattgttagagcagcaacatccagagttcttaagcttgtaccctaacacacaaatttgacttctaaccctgaaatatcctatatatatttctaaaactgtttgtagttttcttgagaaaaagcactttataatttactcagttttcagtaataaaattaacactgacttgaatgtatttaaaaaaattctccacagttttgtcttcctcagattgtttttatccttattctctgaaattcctgttttattgtctaagacttaagagattcagctttatcaagttagagtacagtgtaattcaaattctccctcccttgggcatagttactgaagttcaaatttccttaagtattttttaaaaacctgattttagttttttttttcctgcagaatcttaacttttccattattctggatgacaaataaacatttattaaaatgtgttagaattagtatttactaggttcctaaattgtcagtataggtactttgatcacacatcaaaatggaatttctgcaacttaaagcattttgttacaaattgtagttgaaatagaattttatctatttgtctggatgaataggttgttgggaatgaaccagttatctgttcttttcttccaaatgcaaatggtgcagctagttgataatagtatattctcatcctactataaagtgcaaatttcaccttaattttgcatattttaaaatttttgtttaccctttgtagcatatttacattttagcatttgctaacattgatttaatgtgttaaagattcattttggatatagggttgacttgttggagatactagttcataattttaaaattcccaagagaagtgtctttgaagtggtaaacacagtgcactttaagccacttctcttcccacagagtccagctgaaggaggtaagggcatgctgcatgagagtaatgccgtgatgagtgtcttactctggtaaaatgccatttacaatgcctggagactgaacactgaacaaaacatagtgcccttagaatttcactggaaaaacatgtgaatcacataagttagttggcaaaaggaactgatgtgtatgtggtggggttgctttgaataaagtatttcctaacctattctggggagaacgctcaactgatcttagagaagtgtgaaatcagtttcatagacttagggaaaaatctgaagtgcttgcactgtgagggcagaggcctgcctcattagtctagctgtatgaacatgtcagtccacagaagcagtttttacctgtactcatctgcccttcagtcagctttgtgacagaagggcaaacatcttcacagaagaaaaagttcagaaggttggcattggtggtttcattgctacagaataatagtgttacttgatagtatctgactaaaagagctctcattttctagtacttagtagtaaaaagaatgtggtggagtcctccagatgtctagtgtgggtggaggatatcaactggttatttcagtgatctacagccttaccttttgaatgctaaatgtctggaaacttcaggcagggtcctacaaaacaaactgccatcaagattggtgtgtaccatgaaggcagttttagatagtttgactgttcatggctgcaagaaagacctaaaattcaagggcccgtgaacttcagatacgtaaaaggaatatcacttctgttctagaagagtactaattagacttgtttgtgaaatttgaaaatttggctttgagacactggtaacaaacatatctgagccctcctaagtttggtcagcacggagtagtagctctggcatcatgtggctgtgtagagctccagtgtgatttcaagccccctctaaaaactgccttagtctgcatgaagtagttaactctccaaagtgctttttgtctggcaaatcccttcacaattttcacctctcgtctaaaagcttccttaaaggaagccttccttgatcccttaggctaggttaggtttccagtctgtgttctcatagcactctgcactttttggttccttaaagcaactctgtgttattttttagaattttaatctgaatctcgtgtgtcacatacctaggtcagaaaatactggaacaatgaagttaagatttagtaattcaaattatgtaaaatgctcatatatatgtttttagattagcagctttatgatgccgatgctgaaggaacttttcaccccattcttacaagtctgctactgttttaagtgacatccttatagttgtagataagcaaatgtaaggttatatcaatgtgaagaagcccttagtatcacattttaaaatttatcatttagcaatatgacttttaaatttattgtttccgaatgagtgttgttgaggaatgttagcagtagtaaaatcttgtgttacaagatttttgcatttacatgaactttcactcatttttcagaatttgttcctagagacagagaacccaatacaaaagtgagaacatgtatgcataatcagaaggatgcagtgcagatgcctagtgaaactctgaaagcaaaaatggtacctgagaaagttccccgcagatgtgctactgttgctgcaaataaaataaagataatgagtaatctaaaagaaacgatctcaggaccagaaaatgtctggattaggaagagtagcagaaaactgccccatcgaaatgcttctgctgcggctaagaaaaaattactgaatgtttataaagaggatgatacaaccataaattctgaaagtgaaaaagagctagaagatattaatagaaaaatgctttttttaagggggttcagatcctggaaagaaaatgcacaatagtgactatgagaatgtagaagtggcatctgaaaacaattggtacacaagtaaactggcagttacattctgctcccagctctaaaattactcccttattggcatctttggaggaattttctaaaagccataatccagtgggttcctcccagtcagctcttgtacagacatgtgctctggggaattctgaggaggaaataaattgcagagtctgtaggtggagaggtggaaagaaaagacaaatggcctgctataagactactattcctttccagaatgcaaggccttgaagacatgattccttagaggaagaatataatgggaagtgtacaggctaggaagaacttgaagtgaacaaatttcaaaatcttaacctgatgctaattttcagggttctccattacagtgtaaaaattcagaccacgacaactatggtgtcatgaggaaaaaaaatcaggcatttttccaaaggaagtgctaatgggcctatttgacttctgagtgaagcaaaaactacccagatccattccctacaattcacatccccaaaggtcaaaaacaaactaggaggacctgggaatttcagctggagatactgattattgagttctgaagtagagtgttggaaataggcaattagagaaagtccattgatgtcattttgtttataatattgcagttcatactgaatgaccacttgatatgactaattcagggaatatatatttttctatgaaagctatgaatgttactatcacggcttttccttatttttacttgtatgtagcagcatttacagaaatgccaaaaatgtgcctcattaagaggcaggtcttaatcagttagataaaaataaaatgtatagcttaagatcaaaacagtcatatttttagatacagtgaaatcttttatgtttctctacagcaccttaaaaattagaacttgaatactttgagtaaacttactacaatctcatcccaacaaactttaatggtagcatgtttggcctatttcattgtggcctgtactaggattagaaaatttggtcgtggtataacaaagaagtgtatttacaataggatttaatttgttgttaatatgtatttgttgaaattaaaattgccagattaaatg

SEQ ID NO: 11805 - protein, 2269 aa, Homo sapiens; identical to SEQ ID NO: 1958

SEQ ID NO: 11806 - DNA, 13684 bp, Homo sapiens
gtaattttctgccgggctgctggcttgtgggggatgtggctgggtctcggcagccttcagcgccgcagacgctccggcaacgccagcatacgaggcccccgccccaggagcgcgggtccgggcggcgttcccctctgcgggaggcgcggcgagccaatcctcactttaaaagctttcctgtcctcgaagcgaggggtcttccgtgcggggcaagacgcactggccccagacgaccggtccgtgaaatgacccttccgagcgacccggagcgggcgaccttgcccaacccgcgactcggggcccctgcggtcccgcgtagaggacccaggtcccacggggggcggcggtgaatcgccccctcttgtggccgcgcttccgcccccggcacccgcccgctgctgggccacccggcgtcgcgctgccgcctcacaaagcccgggcagccgcctcattgcgcgcagggattcggaccacgcgccctcccctcccccactcgctgctgcggcgcccaggtctttgcctccgcgtcactttctcctcatcgagtccccggaggcagagagctgagcgaggttcgcctccccgggcgggacacgagctccggtcctctcttggcgcaaacccccgccccccgcggagggactacttttcgtctcccgcggaggaactacttcctcccccgcggaggcgtcggtccaggcggcgcgcacggtatggcggcggcggcggcggcggcggcgcgcgcctgagaagaggggacgccagcccggtcaggcctcggcgcggcctacacgctccgctcgctcgctcgctcccgcctcccgccccgcgcccggccatggcggagccgtcgtccgcccgacgcccggtgcctctcatcgagtcggagctgtacttccttatcgcccggtacctatcggcgggcccgtgtcggagagcggcccaggtgctggtgcaggagctggagcagtaccagttgttgccgaagagattggactgggagggcaacgagcacaacaggagctacgaggagttggtcttgtccaataagcatgtggctcctgatcatcttttgcaaatctgccagcgcatcggtcctatgttggataaagaaattccacccagtatttcaagagtcacttctttacttggtgcaggaaggcagtctttgctacgtacagcaaaagactgcaggcacacagtttggaagggctctgcctttgctgctcttcatagaggaagacctcctgaaatgccagtgaattatggttccccaccaaatcttgtggagatacatcgaggaaaacaactcacagggtgttccacttttagtacagcatttccaggaactatgtatcagcatataaaaatgcacagaaggattctcggacatctatctgctgtttactgtgtagcatttgataggacaggacatagaatctttacaggttcagatgactgtttggtaaagatttggtcaacacataatggccgcttgttatctacattaagaggtcattctgcagaaatttcagatatggcagtaaactatgagaatacaatgattgctgcggggagctgtgataaaattattagagtgtggtgcttgagaacttgtgccccagttgctgtgctccaaggacacacaggatcaattacatctttacagtttagcccgatggccaaaggctctcaaagatacatggtttccactggtgctgatgggacagtttgcttttggcaatgggatttagaatccttaaaatttagcccacgtcccctgaagttcactgaaaagcctaggccaggcgttcaaatgctttgttcttcttttagtgttggtggtatgtttttagccacaggtagtactgatcatgtaatcagaatgtattttttgggttttgaagcacccgaaaaaatcgcagaacttgaaagccacactgataaagtagatagtatccaattttgtaacaatggtgatcggttcctaagtggtagcagagatggaacagcacggatttggagatttgagcagttagaatggaggagcattttattggatatggctaccagaatctcaggggacttatcttccgaagaggaaaggtttatgaaacctaaagtaacaatgatagcttggaatcaaaatgatagcattgttgtcacagctgtgaatgatcatgtcctcaaagtgtggaattcttacactggacaactgcttcataacttaatgggacatgctgatgaagtatttgttctggagacacatccctttgattccagaattatgttatctgcaggacatgatggcagcatatttatatgggatattacaaaaggtaccaagatgaaacattattttaatatgattgaaggacaaggacatggagctgtgtttgactgtaagttttcacaggatggacagcattttgcctgtacagattctcatgggcaccttctgatatttggttttggatgcagcaaaccatatgaaaagattcctgatcagatgttcttccatactgactatcgaccacttattagagattctaataattatgtcttagatgagcaaactcagcaggctcctcatcttatgcctccaccattcttggtagatgtagatggaaatcctcatccaaccaagtatcagagattagtaccaggccgagaaaattctgcagatgaacatttgattccacagctgggctatgtggcaacaagtgatggagaggtgattgaacaaattataagcctgcaaaccaatgataatgatgaacgcagcccagaatcgagtattcttgatggaatgataagacagttgcagcagcagcaagatcagagaatgggagcagatcaggatactattccaagaggactttcaaatggtgaagaaacaccccggagaggttttagaaggctgagcttagacattcagtcccctccaaatattggtctgcgtcgtagtggacaagttgaaggtgttcgtcagatgcatcaaaacgctccacgcagtcagattgctacagaacgtgacctgcaggcttggaaacgaagagtggttgtaccagaggtaccactaggcatatttaggaagctggaagacttccgattagagaaaggtgaagaggaaagaaatctttatataataggaagaaaaagaaagactcttcagctctcacataagtcggattcagtggttttggtatcacagtctagacaaaggacatgtaggcgtaaatatccaaattatggtagaagaaatcgtagctggcgtgagttatcttctggaaatgagtcttcaagctctgtaagacatgagacttcctgtgatcagagtgaaggttctggttcttcagaagaggatgaatggagaagtgacagaaaaagtgagagttacagcgaaagttcaagtgactcttcatctagatattccgattggacagctgatgcgggcatcaatttgcagcctcctttaagaacatcatgtcgtcgacgaattactcgattttgtagtagttcagaagatgaaatatctactgagaatttatctcctccaaaaagaagacgaaagagaaagaaagaaaataagcctaagaaggagaatttgcggaggatgactccagcagagcttgcaaatatggagcatttatatgaatttcaccctccagtttggattactgacaccacacttagaaaatctccttttgttcctcaaatgggtgatgaggtaatatattttcgacagggtcatgaagcttatattgaggctgtaagaagaaataatatttatgaactgaaccctaataaggagccatggagaaaaatggatcttagggatcaagaattggttaaaatagttggaatacgatatgaagttgggccccctacactctgttgcctaaaactagcatttatagatccagcaactggaaaacttatggacaaatctttctctattagatatcatgatatgccagatgttattgactttcttgtattgcgtcaattttatgatgaagcaagacagaggaattggcagtcttgtgacagattccgctctattattgatgatgcttggtggtttggaacagtgttaagtcaagagccatatcaaccacagtatcctgatagtcatttccagtgttatattgttaggtgggataatactgaaattgaaaaacttagcccatgggacatggaaccaattcctgataatgttgatccacctgaagaattaggagctagtatttctgtcacaacagatgagctagagaaattgctctataaaccacaagctggtgaatggggtcagaaatcaagagatgaagaatgtgatagaattatcagtggtatagatcaacttttgaatcttgatatagcagcagcttttgcaggccctgttgatttgtgtacatacccgaagtactgtactgtagtagcttatccaaccgatctttacacaattcgaatgagacttgttaatcgattttacaggaggctgtctgcgttagtttgggaagtcagatatatagaacataatgccagaacatttaacgaacctgagagtgtaattgcaagatcagctaaaaagataactgaccaacttttaaaatttatcaagaatcaacactgtacaaatatctcagaactttctaacacatctgaaaatgatgagcaaaatgctgaggatttggatgatagtgatcttcctaaaacatcttctggaaggaggagagtccatgatgggaaaaaaagcatcagagctacgaactatgttgaaagcaactggaagaaacagtgtaaggaactagtgaacttaatttttcagtgtgaagattctgaaccatttagacaacctgttgatttggttgaatatccagactacagagatattatagataccccaatggattttggaacagtaagggaaactctagatgcgggaaattatgacagccctttggagttttgcaaagacatccggctgatatttagcaatgcaaaagcgtatacaccaaacaaaagatcaaagatttatagtatgaccttgagattatctgccttatttgaagaaaaaatgaagaaaatctcttctgattttaaaattggtcaaaaattcaatgaaaaacttcgaagaagccagaggttcaagcaacggcaaaattgtaaaggtgacagtcagcctaacaaaagtatcagaaacctcaagccgaagaggttaaaatctcagacaaaaataattcctgagttggtaggttctcctacccagtctacctcaagtaggacagcttatcttggaacccacaagacaagtgctggtatctcttcaggtgttacttctggtgactcttcagattcagcagaatcatcagaaaggaggaaaagaaatagacctataacaaatggttctacattatctgaaagtgaagtggaagattctttagctacctctttgtcatcgtcagcttccagtagttctgaggaaagcaaagagagttccagagctcgtgaatcctcctcacgcagtgggctatccagaagcagcaatctcagggtaaccagaactagagctgctcaaagaaaaactggtcccgtttcattagcaaatggatgtggcagaaaagccactcgaaagagagtctatttaagtgattctgataacaattcattggagactggtgaaattctaaaagccagagctggaaataaccgaaaagtcttaaggaagtgtgctgctgtggctgccaataaaataaagctaatgagtgatgtagaagagaattctagctctgaaagtgtctgttctggtcggaagctgcctcaccgcaatgcttctgctgtagctagaaaaaagttattacataattctgaagatgaacagagcttaaagtcagaaattgaagaagaggagctaaaagatgaaaatcaactattaccagtgtccagttctcacactgcccagagcaatgttgatgaatctgaaaacagagactcagagtcagaaagtgatttgcgggtagcccggaaaaattggcatgctaatggttacaagtcccatactccagcaccttcaaagacaaaatttcttaaaatagagtcttctgaggaagactctaaaagtcatgattcagatcatgcatgtaacagaactgctggcccatcaacgtctgtgcagaaacttaaggcagagagcatctcagaggaagcagattctgaaccaggaagatctggtggtaggaaatacaatacatttcacaagaatgcgagtttctttaaaaaaaccaagattctgagtgactcagaagactctgaatctgaagagcaagatagagaagatgggaaatgtcataaaatggaaatgaacccaatttcaggaaatctgaactgtgaccctattgctatgtcccagtgttcctcagatcatggatgtgaaactgatttagattcagatgatgacaaaatagaaaaaccaaacaattttatgaaagattctgcatcacaagacaatggactaagcagaaaaatttccaggaaaagggtctgttccagtgactcagacagtagtttacaggtggttaagaaatcatcaaaagccagaacaggtctcctgaggattactcgaagatgtgcagctacggctgccaataagatcaagctcatgagtgatgtagaagatgtcagtttagaaaatgtgcacactagaagcaaaaatggaaggaaaaaacctctccatcttgcttgtactacagctaagaagaaattgagtgattgtgaaggaagtgtacattgtgaagtaccaagtgaacagtatgcctgtgaaggcaagccacctgatcctgactccgaaggtagtacaaaagtgcttagtcaggctctaaatggagactcagactctgaagatatgttgaattcagaacacaagcacaggcataccaatattcacaaaatagatgcaccttctaaaagaaaaagttcctctgttacatcttcaggagaagattcaaaaagtcatattccagggagtgagactgataggacattttcttcagagtcaaccttggcacaaaaagctactgcagagaataattttgaagtggaactgaattatgggctgcgcaggtggaatggcagaagactcaggacctatggaaaggctccttttagtaagacaaaagtgattcatgattcacaggaaacagcagagaaggaagtaaaaaggaagagatcgcatcctgaattggaaaatgtgaaaatctctgaaacaactgggaattcaaagtttagacctgatactagttccaaatcatcagatttgggatctgtaactgaatcagatattgactgtactgataatacaaaaaccaaaaggaggaaaacgaaaggaaaagcaaaagtagttagaaaaggtaaaacttttacagctaacatatctaaaactgtgagacgtcaaagacaaagcaaacgccctaggttaagtgtggatgataatgactgggaggatttggactatgcaaaatctaaaagagttcttcgacgttcaaaaataaaaacgagaaatcagggtagaaggactgtgagataccatgatggggatgatgacagaagtttagaaaatgtgttagatttcaatggttgcaccttatgaccttgagggaaagccagttcatttaagaggaaatggactggcatttatggtgaaagctggctgttaaaattatttttttgtcttacaattcagggaatatatttatatttttctatgaaaagttatgaatgtgactaaatcatgactgttatttttatttgcacttgctggtctttgtagcagcattcagcacaggtgccaaaatatgcttcattttgggggcagatctattttgacagtatttgactacatatagcaagagtttgaaatatgttaaacactagacatcctggttatcaaaaccaatgagcattactttcatggcagcaagtgtcatgcagttattttctgaatttgtcaaagaggcagtagtttctaacccctgttctatagtagttacaacaatttcacaacctatgtttacagattcttcataaatacatgcatactgacactataatcatgggaggtgtaaccatgattagtaggcgaggtacctaccacttttttttttttcttcccctggctacttgagtagaatgcattataccagatctggtcactttcattgaaatggtttctaattttcttcccaagtgctgttgggtttttttcttcttaaggaaaacgttgtcacttttatgttataaacttgaatttataaagtgctggtaaattatttttaatgatttgagtgcatgttttaaacctctaggaccagagcatagtcagagcattttcttttaaattgtgcactaacaaaatgctatataatctgtcttctgtccaagatctcctggtttccattgtaagggatttaaccaaaatcttgctcttccataatcttactctgtgaaatagaggaattcgtgtgccttagatttagaagtgtgttctttaatagagtgtacagggctaaaagagtatttaagttaatatgtaggtttcccccatctgtattccaattgtagaggtgagttttgttaagagtacaattgcaaatcttatctatataggaaaatagctaaatgtcattctccatctctttgttttagtttactgcttccatgtgcaatcctaagcattctttgctggggcaactaaatgtatctttattagtgacttctagtccaaatataagaaactgtcatgttttgtgggaaaataattttataatccatttaaagtgaaagtttatcacacaaatagtacacttattttctaaccaaatacttgataggttatgctactccagtgtagatggccattcctaacttgtttgtgcctgaagatggacttgattcaaatggtttacatatttagtgggtaagggatatgttacagtaccccacctgtaagttatttattagccctaattgtgtttgatttcagacaaaattaacccttttctcctgtgtatctttgaagtggcagataaggtgaagcatcagactggtatcaatattagacaatgttatttattagccctaattgtgtttggtttcagacaaaaccttttctcctgtgtatctttgaagtggcagacaaggcgaagcatcagactggtattaatgttagagaatgttctgaagtgttcctattttgtagttatctattccatttgacatagtagaaggtacattttctttctactctgatgcatggggaaggatgtttttggacattatcaactgagataggtgggaaacctcctctcatttgtggcttagagagctatcaccatttcagaactatgatgcttttcttctcagaacttgtgttaagtagatagtaaacagattgattcatgataattgtccttgactaagactgaaaagactaatgggatgccttttactttgctaattttaaaaactggtgatagatgtcaaatccattaatttatttaaactcttcttaaccttctcttttataatctgttctcaggttttaactccatgtttaccatcatttgcaaaaaggtaccaaaaaaatccataaataaatatggaatacattcataagtacatacattcttttggtataaaacaatattttgacagtttaggcttcattaatagaactattctgattatttggactgcattaattggtcattgactggccatccaattaccattttttctttcagtccaaaatagttagacccttgcatacagaagtggtattttggtttttaatcagatttggtttcatcagaagcagcaagaatggacctgatgtctttaaaagcatagccgacaatggtagcttctcaagttatgaaataaaactgagagataatggagaaaataatttttatgggtttttttggttatggtgctattcctaaggttaactttgaatatgtgacacacacactcctaagtacctttaaggaaaattaataaatcattaatagttaaaatgtttacattgagcactagaacatgtttggccttttttttctacgttatgcaaaatgcccagggatttaatgcacaggtgtactttaatgtttagggtcagtttgtagtattcttgagaaaaagataaagggttataatttgaatgtgaactgatccagaaataagtgctgtacctttccactgcacttgaagttcaacttaatggtgtatgtgaaaaacaaaaactactttggttgtgtatgtccaaagtcctatggttttattcatttatggttttacaggctttgaagtactcagatttgatttttgctttcttggaaagactcactttaccaagcatataaaggaaaaatgatttcaaacattgacaagatagatgagtgttaacaaagctttcttttttcgtgtcctccttatttaaaaaggtatacttacaatgtgaagtaacttatgaataaaaggaaaagtttatcccatattcaaataattcctaaggtcagcctccctttttgtaagtggcaaatatctgattaaatcatttctcagtttattaatccttggaaacaatgatatagcagttactcacagcttgtaaattacaacagaaaggttcctttcaaatagtagagctgcacctaaagaggaaattgggtttataagaaaatggaggcaaagaacttaagttttaagaaaaagcacttcaaaacagaagggcaaatggaaaaggggaatataaaacaaaccaataaaaataccatctgagggtgttactgtccaaaagtaaagaataagatgcatcactaagccctttgcactcgttatgacctcgtaagtaaaaattatcacttagaataaggggtgcacactacattccctctgtcttctagacttttttttttgtagaagaatcagaaaacaatttactaacctccctgtttgatattaaaaataggaagaattttaatattttctgttagtacaagttgaacttgattgtgccaactgaaaccccagaggtttgtatatcagtagaatgcaagaacattgttaaaggtgcttacgatcttttttgttttcctttccactccattgtatcaattttttgagtaacttttaaatggctagaaaatggtctttttgctttgcccttttaaagctgaaataaccagctccattcttttcatgaatagtaagttgatatatttatttatcaggtatcttgcagttgtcaccaaatactgtagttttcttatgttgtatggaaattatagttcaattattttaatgtgatagagtgcaacaagtcattgtagaacttttcacctgttaatgttgaagttatacctctgaatttctgctgtggatatcaaggaaataataaagcagaaaccccaagaaatttgcaacttaacagtttgagactgtctcttatcctagtatttgggaagagaaggaataaatttgtcaaaactaggtgagaaaatagagcattgtgggaaaaactgagtccaactagattagcaaatgttaattcctagctcaaactgtgaatagtaaggattgaaaagtaaagtatgtaatgctaagggctgtgttgtcttttcttacgattttaagttttaaaggctgttaaattacagagatgttgcccaaggatacatggggattctcaaaagtaagagatttttacctttttcataatctgccaagctggttcctaatatattgttaaattggtagaaaaatatctttaaattggtgtctgctcaagaattgcttttctagatttgatggagggagggggagagtcacatcatttggattctaccaatctgcaggctctatctttggcaacatgtaaataattagactatacatctgtttctcaagtatggcaagaccaatagtttgaatttaattatcaatgctatggtatactttctggtcatattttagttatgtcagttttaaggtaagttttttcatttattaaagcccttaaatgagattttagactgccaaagagaagaggcagtccaattgacctaactgaaatgagatgaccagtatatagagcctagatggactgtagcagctctacccctttgttttacaaggtaaatcattttaaaaattaccttttttgatcagtgggtaaaagttaaagggatctttaatttttgatatattcaagttaattttctaaatgtgaatcagtccttggactgcaactatatattcacctacaaaatcccaatcaaaaaattacatgagcctgtcaagcagatctttagttttccacttcacataagatcgttaatgttctaaattaatctattcatttagatgatttttgtcagttcttaaatgggatataataaatttagcattttcatcttaacaagcaaaagagttaaaaaacaaaacaaaacactactccaagccaaatacattctagctggttaattccagacttgtcccaagtggttccccaacctcttttccactggtaatttcttttcatgcaggcagaatataggggtgcgagcgctgtgagttttacatatgagcttggataggggaactgaagcgagtcaggagccctgctggaaaaggggtttgccattggattgtctgtggcctggtttctttccagtagtacagtaatagggtagattgaaaacaagtatttacttctgattctgcctgcatttagtgtgaaatgctcttaaggtattgcttctaaaaagcaaattaagcagttaagtataaagtccctgaattcatatttcaaaataaggcttttatgagatttttattaaaaattgcaatagccatcacaaatctgagtttttctaggggtgagagaaaactgtattgtgatgagctagattagttgtagttccagaataagaacaaaaattcagagttgtgtggtgcccatcattgagtaaatgaaccctaaaaatgaataagctaatgaactagttcatggaattatttctgatggtcttttgacctgatgctgccatactgcagtgttaccagctccccctagaaaacggaactgtttaaaaacacagcaagttacagaaaccattttattctacagccattggggtacttcagtttatgggatgtttttggaaacttctgctttgggagggatgaagatcattgataaatgttatttgctttctgagttttggggtcatttcattgcttatcaatgaagggcagacagaggagagaatatctcaagtcttttctgataaaaggcttgcttgagggagcttataacttgcacctagagggtttacccactttgtggatttgatttatccaccaaccacagcaaccaataatgtcaagattctaggagtttatgaaagaggctagtatgttttcattttgagtcagacattcttttctcattctcaaatctgttttaaatgctccaattttaaaaatgccaatgaaaattttataatgcttctgtagtaaccatatgcagtttactttgaatttaggaaaacagttttgtatgatgaaatattgtgcagaatctgtaaataaggtagcttaaaaattaaaaaaaagtctaatt

SEQ ID NO: 11807 - protein, 2269 aa, Homo sapiens; identical to SEQ ID NO: 1958

SEQ ID NO: 11808 - DNA, 10933 bp, Homo sapiens
gtaattttctgccgggctgctggcttgtgggggatgtggctgggtctcggcagccttcagcgccgcagacgctccggcaacgccagcatacgaggcccccgccccaggagcgcgggtccgggcggcgttcccctctgcgggaggcgcggcgagccaatcctcactttaaaagctttcctgtcctcgaagcgaggggtcttccgtgcggggcaagacgcactggccccagacgaccggtccgtgaaatgacccttccgagcgacccggagcgggcgaccttgcccaacccgcgactcggggcccctgcggtcccgcgtagaggacccaggtcccacggggggcggcggtgaatcgccccctcttgtggccgcgcttccgcccccggcacccgcccgctgctgggccacccggcgtcgcgctgccgcctcacaaagcccgggcagccgcctcattgcgcgcagggattcggaccacgcgccctcccctcccccactcgctgctgcggcgcccaggtctttgcctccgcgtcactttctcctcatcgagtccccggaggcagagagctgagcgaggttcgcctccccgggcgggacacgagctccggtcctctcttggcgcaaacccccgccccccgcggagggactacttttcgtctcccgcggaggaactacttcctcccccgcggaggcgtcggtccaggcggcgcgcacggtatggcggcggcggcggcggcggcggcgcgcgcctgagaagaggggacgccagcccggtcaggcctcggcgcggcctacacgctccgctcgctcgctcgctcccgcctcccgccccgcgcccggccatggcggagccgtcgtccgcccgacgcccggtgcctctcatcgagtcggagctgtacttccttatcgcccggtacctatcggcgggcccgtgtcggagagcggcccaggtgctggtgcaggagctggagcagtaccagttgttgccgaagagattggactgggagggcaacgagcacaacaggagctacgaggagttggtcttgtccaataagcatgtggctcctgatcatcttttgcaaatctgccagcgcatcggtcctatgttggataaagaaattccacccagtatttcaagagtcacttctttacttggtgcaggaaggcagtctttgctacgtacagcaaaagactgcaggcacacagtttggaagggctctgcctttgctgctcttcatagaggaagacctcctgaaatgccagtgaattatggttccccaccaaatcttgtggagatacatcgaggaaaacaactcacagggtgttccacttttagtacagcatttccaggaactatgtatcagcatataaaaatgcacagaaggattctcggacatctatctgctgtttactgtgtagcatttgataggacaggacatagaatctttacaggttcagatgactgtttggtaaagatttggtcaacacataatggccgcttgttatctacattaagaggtcattctgcagaaatttcagatatggcagtaaactatgagaatacaatgattgctgcggggagctgtgataaaattattagagtgtggtgcttgagaacttgtgccccagttgctgtgctccaaggacacacaggatcaattacatctttacagtttagcccgatggccaaaggctctcaaagatacatggtttccactggtgctgatgggacagtttgcttttggcaatgggatttagaatccttaaaatttagcccacgtcccctgaagttcactgaaaagcctaggccaggcgttcaaatgctttgttcttcttttagtgttggtggtatgtttttagccacaggtagtactgatcatgtaatcagaatgtattttttgggttttgaagcacccgaaaaaatcgcagaacttgaaagccacactgataaagtagatagtatccaattttgtaacaatggtgatcggttcctaagtggtagcagagatggaacagcacggatttggagatttgagcagttagaatggaggagcattttattggatatggctaccagaatctcaggggacttatcttccgaagaggaaaggtttatgaaacctaaagtaacaatgatagcttggaatcaaaatgatagcattgttgtcacagctgtgaatgatcatgtcctcaaagtgtggaattcttacactggacaactgcttcataacttaatgggacatgctgatgaagtatttgttctggagacacatccctttgattccagaattatgttatctgcaggacatgatggcagcatatttatatgggatattacaaaaggtaccaagatgaaacattattttaatatgattgaaggacaaggacatggagctgtgtttgactgtaagttttcacaggatggacagcattttgcctgtacagattctcatgggcaccttctgatatttggttttggatgcagcaaaccatatgaaaagattcctgatcagatgttcttccatactgactatcgaccacttattagagattctaataattatgtcttagatgagcaaactcagcaggctcctcatcttatgcctccaccattcttggtagatgtagatggaaatcctcatccaaccaagtatcagagattagtaccaggccgagaaaattctgcagatgaacatttgattccacagctgggctatgtggcaacaagtgatggagaggtgattgaacaaattataagcctgcaaaccaatgataatgatgaacgcagcccagaatcgagtattcttgatggaatgataagacagttgcagcagcagcaagatcagagaatgggagcagatcaggatactattccaagaggactttcaaatggtgaagaaacaccccggagaggttttagaaggctgagcttagacattcagtcccctccaaatattggtctgcgtcgtagtggacaagttgaaggtgttcgtcagatgcatcaaaacgctccacgcagtcagattgctacagaacgtgacctgcaggcttggaaacgaagagtggttgtaccagaggtaccactaggcatatttaggaagctggaagacttccgattagagaaaggtgaagaggaaagaaatctttatataataggaagaaaaagaaagactcttcagctctcacataagtcggattcagtggttttggtatcacagtctagacaaaggacatgtaggcgtaaatatccaaattatggtagaagaaatcgtagctggcgtgagttatcttctggaaatgagtcttcaagctctgtaagacatgagacttcctgtgatcagagtgaaggttctggttcttcagaagaggatgaatggagaagtgacagaaaaagtgagagttacagcgaaagttcaagtgactcttcatctagatattccgattggacagctgatgcgggcatcaatttgcagcctcctttaagaacatcatgtcgtcgacgaattactcgattttgtagtagttcagaagatgaaatatctactgagaatttatctcctccaaaaagaagacgaaagagaaagaaagaaaataagcctaagaaggagaatttgcggaggatgactccagcagagcttgcaaatatggagcatttatatgaatttcaccctccagtttggattactgacaccacacttagaaaatctccttttgttcctcaaatgggtgatgaggtaatatattttcgacagggtcatgaagcttatattgaggctgtaagaagaaataatatttatgaactgaaccctaataaggagccatggagaaaaatggatcttagggatcaagaattggttaaaatagttggaatacgatatgaagttgggccccctacactctgttgcctaaaactagcatttatagatccagcaactggaaaacttatggacaaatctttctctattagatatcatgatatgccagatgttattgactttcttgtattgcgtcaattttatgatgaagcaagacagaggaattggcagtcttgtgacagattccgctctattattgatgatgcttggtggtttggaacagtgttaagtcaagagccatatcaaccacagtatcctgatagtcatttccagtgttatattgttaggtgggataatactgaaattgaaaaacttagcccatgggacatggaaccaattcctgataatgttgatccacctgaagaattaggagctagtatttctgtcacaacagatgagctagagaaattgctctataaaccacaagctggtgaatggggtcagaaatcaagagatgaagaatgtgatagaattatcagtggtatagatcaacttttgaatcttgatatagcagcagcttttgcaggccctgttgatttgtgtacatacccgaagtactgtactgtagtagcttatccaaccgatctttacacaattcgaatgagacttgttaatcgattttacaggaggctgtctgcgttagtttgggaagtcagatatatagaacataatgccagaacatttaacgaacctgagagtgtaattgcaagatcagctaaaaagataactgaccaacttttaaaatttatcaagaatcaacactgtacaaatatctcagaactttctaacacatctgaaaatgatgagcaaaatgctgaggatttggatgatagtgatcttcctaaaacatcttctggaaggaggagagtccatgatgggaaaaaaagcatcagagctacgaactatgttgaaagcaactggaagaaacagtgtaaggaactagtgaacttaatttttcagtgtgaagattctgaaccatttagacaacctgttgatttggttgaatatccagactacagagatattatagataccccaatggattttggaacagtaagggaaactctagatgcgggaaattatgacagccctttggagttttgcaaagacatccggctgatatttagcaatgcaaaagcgtatacaccaaacaaaagatcaaagatttatagtatgaccttgagattatctgccttatttgaagaaaaaatgaagaaaatctcttctgattttaaaattggtcaaaaattcaatgaaaaacttcgaagaagccagaggttcaagcaacggcaaaattgtaaaggtgacagtcagcctaacaaaagtatcagaaacctcaagccgaagaggttaaaatctcagacaaaaataattcctgagttggtaggttctcctacccagtctacctcaagtaggacagcttatcttggaacccacaagacaagtgctggtatctcttcaggtgttacttctggtgactcttcagattcagcagaatcatcagaaaggaggaaaagaaatagacctataacaaatggttctacattatctgaaagtgaagtggaagattctttagctacctctttgtcatcgtcagcttccagtagttctgaggaaagcaaagagagttccagagctcgtgaatcctcctcacgcagtgggctatccagaagcagcaatctcagggtaaccagaactagagctgctcaaagaaaaactggtcccgtttcattagcaaatggatgtggcagaaaagccactcgaaagagagtctatttaagtgattctgataacaattcattggagactggtgaaattctaaaagccagagctggaaataaccgaaaagtcttaaggaagtgtgctgctgtggctgccaataaaataaagctaatgagtgatgtagaagagaattctagctctgaaagtgtctgttctggtcggaagctgcctcaccgcaatgcttctgctgtagctagaaaaaagttattacataattctgaagatgaacagagcttaaagtcagaaattgaagaagaggagctaaaagatgaaaatcaactattaccagtgtccagttctcacactgcccagagcaatgttgatgaatctgaaaacagagactcagagtcagaaagtgatttgcgggtagcccggaaaaattggcatgctaatggttacaagtcccatactccagcaccttcaaagacaaaatttcttaaaatagagtcttctgaggaagactctaaaagtcatgattcagatcatgcatgtaacagaactgctggcccatcaacgtctgtgcagaaacttaaggcagagagcatctcagaggaagcagattctgaaccaggaagatctggtggtaggaaatacaatacatttcacaagaatgcgagtttctttaaaaaaaccaagattctgagtgactcagaagactctgaatctgaagagcaagatagagaagatgggaaatgtcataaaatggaaatgaacccaatttcaggaaatctgaactgtgaccctattgctatgtcccagtgttcctcagatcatggatgtgaaactgatttagattcagatgatgacaaaatagaaaaaccaaacaattttatgaaagattctgcatcacaagacaatggactaagcagaaaaatttccaggaaaagggtctgttccagtgactcagacagtagtttacaggtggttaagaaatcatcaaaagccagaacaggtctcctgaggattactcgaagatgtgcagctacggctgccaataagatcaagctcatgagtgatgtagaagatgtcagtttagaaaatgtgcacactagaagcaaaaatggaaggaaaaaacctctccatcttgcttgtactacagctaagaagaaattgagtgattgtgaaggaagtgtacattgtgaagtaccaagtgaacagtatgcctgtgaaggcaagccacctgatcctgactccgaaggtagtacaaaagtgcttagtcaggctctaaatggagactcagactctgaagatatgttgaattcagaacacaagcacaggcataccaatattcacaaaatagatgcaccttctaaaagaaaaagttcctctgttacatcttcaggagaagattcaaaaagtcatattccagggagtgagactgataggacattttcttcagagtcaaccttggcacaaaaagctactgcagagaataattttgaagtggaactgaattatgggctgcgcaggtggaatggcagaagactcaggacctatggaaaggctccttttagtaagacaaaagtgattcatgattcacaggaaacagcagagaaggaagtaaaaaggaagagatcgcatcctgaattggaaaatgtgaaaatctctgaaacaactgggaattcaaagtttagacctgatactagttccaaatcatcagatttgggatctgtaactgaatcagatattgactgtactgataatacaaaaaccaaaaggaggaaaacgaaaggaaaagcaaaagtagttagaaaagacaaaaccttttctcctgtgtatctttgaagtggcagacaaggcgaagcatcagactggtattaatgttagagaatgttctgaagtgttcctattttgtagttatctattccatttgacatagtagaaggtacattttctttctactctgatgcatggggaaggatgtttttggacattatcaactgagataggtgggaaacctcctctcatttgtggcttagagagctatcaccatttcagaactatgatgcttttcttctcagaacttgtgttaagtagatagtaaacagattgattcatgataattgtccttgactaagactgaaaagactaatgggatgccttttactttgctaattttaaaaactggtgatagatgtcaaatccattaatttatttaaactcttcttaaccttctcttttataatctgttctcaggttttaactccatgtttaccatcatttgcaaaaaggtaccaaaaaaatccataaataaatatggaatacattcataagtacatacattcttttggtataaaacaatattttgacagtttaggcttcattaatagaactattctgattatttggactgcattaattggtcattgactggccatccaattaccattttttctttcagtccaaaatagttagacccttgcatacagaagtggtattttggtttttaatcagatttggtttcatcagaagcagcaagaatggacctgatgtctttaaaagcatagccgacaatggtagcttctcaagttatgaaataaaactgagagataatggagaaaataatttttatgggtttttttggttatggtgctattcctaaggttaactttgaatatgtgacacacacactcctaagtacctttaaggaaaattaataaatcattaatagttaaaatgtttacattgagcactagaacatgtttggccttttttttctacgttatgcaaaatgcccagggatttaatgcacaggtgtactttaatgtttagggtcagtttgtagtattcttgagaaaaagataaagggttataatttgaatgtgaactgatccagaaataagtgctgtacctttccactgcacttgaagttcaacttaatggtgtatgtgaaaaacaaaaactactttggttgtgtatgtccaaagtcctatggttttattcatttatggttttacaggctttgaagtactcagatttgatttttgctttcttggaaagactcactttaccaagcatataaaggaaaaatgatttcaaacattgacaagatagatgagtgttaacaaagctttcttttttcgtgtcctccttatttaaaaaggtatacttacaatgtgaagtaacttatgaataaaaggaaaagtttatcccatattcaaataattcctaaggtcagcctccctttttgtaagtggcaaatatctgattaaatcatttctcagtttattaatccttggaaacaatgatatagcagttactcacagcttgtaaattacaacagaaaggttcctttcaaatagtagagctgcacctaaagaggaaattgggtttataagaaaatggaggcaaagaacttaagttttaagaaaaagcacttcaaaacagaagggcaaatggaaaaggggaatataaaacaaaccaataaaaataccatctgagggtgttactgtccaaaagtaaagaataagatgcatcactaagccctttgcactcgttatgacctcgtaagtaaaaattatcacttagaataaggggtgcacactacattccctctgtcttctagacttttttttttgtagaagaatcagaaaacaatttactaacctccctgtttgatattaaaaataggaagaattttaatattttctgttagtacaagttgaacttgattgtgccaactgaaaccccagaggtttgtatatcagtagaatgcaagaacattgttaaaggtgcttacgatcttttttgttttcctttccactccattgtatcaattttttgagtaacttttaaatggctagaaaatggtctttttgctttgcccttttaaagctgaaataaccagctccattcttttcatgaatagtaagttgatatatttatttatcaggtatcttgcagttgtcaccaaatactgtagttttcttatgttgtatggaaattatagttcaattattttaatgtgatagagtgcaacaagtcattgtagaacttttcacctgttaatgttgaagttatacctctgaatttctgctgtggatatcaaggaaataataaagcagaaaccccaagaaatttgcaacttaacagtttgagactgtctcttatcctagtatttgggaagagaaggaataaatttgtcaaaactaggtgagaaaatagagcattgtgggaaaaactgagtccaactagattagcaaatgttaattcctagctcaaactgtgaatagtaaggattgaaaagtaaagtatgtaatgctaagggctgtgttgtcttttcttacgattttaagttttaaaggctgttaaattacagagatgttgcccaaggatacatggggattctcaaaagtaagagatttttacctttttcataatctgccaagctggttcctaatatattgttaaattggtagaaaaatatctttaaattggtgtctgctcaagaattgcttttctagatttgatggagggagggggagagtcacatcatttggattctaccaatctgcaggctctatctttggcaacatgtaaataattagactatacatctgtttctcaagtatggcaagaccaatagtttgaatttaattatcaatgctatggtatactttctggtcatattttagttatgtcagttttaaggtaagttttttcatttattaaagcccttaaatgagattttagactgccaaagagaagaggcagtccaattgacctaactgaaatgagatgaccagtatatagagcctagatggactgtagcagctctacccctttgttttacaaggtaaatcattttaaaaattaccttttttgatcagtgggtaaaagttaaagggatctttaatttttgatatattcaagttaattttctaaatgtgaatcagtccttggactgcaactatatattcacctacaaaatcccaatcaaaaaattacatgagcctgtcaagcagatctttagttttccacttcacataagatcgttaatgttctaaattaatctattcatttagatgatttttgtcagttcttaaatgggatataataaatttagcattttcatcttaacaagcaaaagagttaaaaaacaaaacaaaacactactccaagccaaatacattctagctggttaattccagacttgtcccaagtggttccccaacctcttttccactggtaatttcttttcatgcaggcagaatataggggtgcgagcgctgtgagttttacatatgagcttggataggggaactgaagcgagtcaggagc

SEQ ID NO: 11809 - protein, 2199 aa, Homo sapiens
MAEPSSARRPVPLIESELYFLIARYLSAGPCRRAAQVLVQELEQYQLLPKRLDWEGNEHNRSYEELVLSNKHVAPDHLLQICQRIGPMLDKEIPPSISRVTSLLGAGRQSLLRTAKDCRHTVWKGSAFAALHRGRPPEMPVNYGSPPNLVEIHRGKQLTGCSTFSTAFPGTMYQHIKMHRRILGHLSAVYCVAFDRTGHRIFTGSDDCLVKIWSTHNGRLLSTLRGHSAEISDMAVNYENTMIAAGSCDKIIRVWCLRTCAPVAVLQGHTGSITSLQFSPMAKGSQRYMVSTGADGTVCFWQWDLESLKFSPRPLKFTEKPRPGVQMLCSSFSVGGMFLATGSTDHVIRMYFLGFEAPEKIAELESHTDKVDSIQFCNNGDRFLSGSRDGTARIWRFEQLEWRSILLDMATRISGDLSSEEERFMKPKVTMIAWNQNDSIVVTAVNDHVLKVWNSYTGQLLHNLMGHADEVFVLETHPFDSRIMLSAGHDGSIFIWDITKGTKMKHYFNMIEGQGHGAVFDCKFSQDGQHFACTDSHGHLLIFGFGCSKPYEKIPDQMFFHTDYRPLIRDSNNYVLDEQTQQAPHLMPPPFLVDVDGNPHPTKYQRLVPGRENSADEHLIPQLGYVATSDGEVIEQIISLQTNDNDERSPESSILDGMIRQLQQQQDQRMGADQDTIPRGLSNGEETPRRGFRRLSLDIQSPPNIGLRRSGQVEGVRQMHQNAPRSQIATERDLQAWKRRVVVPEVPLGIFRKLEDFRLEKGEEERNLYIIGRKRKTLQLSHKSDSVVLVSQSRQRTCRRKYPNYGRRNRSWRELSSGNESSSSVRHETSCDQSEGSGSSEEDEWRSDRKSESYSESSSDSSSRYSDWTADAGINLQPPLRTSCRRRITRFCSSSEDEISTENLSPPKRRRKRKKENKPKKENLRRMTPAELANMEHLYEFHPPVWITDTTLRKSPFVPQMGDEVIYFRQGHEAYIEAVRRNNIYELNPNKEPWRKMDLRDQELVKIVGIRYEVGPPTLCCLKLAFIDPATGKLMDKSFSIRYHDMPDVIDFLVLRQFYDEARQRNWQSCDRFRSIIDDAWWFGTVLSQEPYQPQYPDSHFQCYIVRWDNTEIEKLSPWDMEPIPDNVDPPEELGASISVTTDELEKLLYKPQAGEWGQKSRDEECDRIISGIDQLLNLDIAAAFAGPVDLCTYPKYCTVVAYPTDLYTIRMRLVNRFYRRLSALVWEVRYIEHNARTFNEPESVIARSAKKITDQLLKFIKNQHCTNISELSNTSENDEQNAEDLDDSDLPKTSSGRRRVHDGKKSIRATNYVESNWKKQCKELVNLIFQCEDSEPFRQPVDLVEYPDYRDIIDTPMDFGTVRETLDAGNYDSPLEFCKDIRLIFSNAKAYTPNKRSKIYSMTLRLSALFEEKMKKISSDFKIGQKFNEKLRRSQRFKQRQNCKGDSQPNKSIRNLKPKRLKSQTKIIPELVGSPTQSTSSRTAYLGTHKTSAGISSGVTSGDSSDSAESSERRKRNRPITNGSTLSESEVEDSLATSLSSSASSSSEESKESSRARESSSRSGLSRSSNLRVTRTRAAQRKTGPVSLANGCGRKATRKRVYLSDSDNNSLETGEILKARAGNNRKVLRKCAAVAANKIKLMSDVEENSSSESVCSGRKLPHRNASAVARKKLLHNSEDEQSLKSEIEEEELKDENQLLPVSSSHTAQSNVDESENRDSESESDLRVARKNWHANGYKSHTPAPSKTKFLKIESSEEDSKSHDSDHACNRTAGPSTSVQKLKAESISEEADSEPGRSGGRKYNTFHKNASFFKKTKILSDSEDSESEEQDREDGKCHKMEMNPISGNLNCDPIAMSQCSSDHGCETDLDSDDDKIEKPNNFMKDSASQDNGLSRKISRKRVCSSDSDSSLQVVKKSSKARTGLLRITRRCAATAANKIKLMSDVEDVSLENVHTRSKNGRKKPLHLACTTAKKKLSDCEGSVHCEVPSEQYACEGKPPDPDSEGSTKVLSQALNGDSDSEDMLNSEHKHRHTNIHKIDAPSKRKSSSVTSSGEDSKSHIPGSETDRTFSSESTLAQKATAENNFEVELNYGLRRWNGRRLRTYGKAPFSKTKVIHDSQETAEKEVKRKRSHPELENVKISETTGNSKFRPDTSSKSSDLGSVTESDIDCTDNTKTKRRKTKGKAKVVRKDKTFSPVYL

SEQ ID NO: 11810 - DNA, 9740 bp, Homo sapiens
gtaattttctgccgggctgctggcttgtgggggatgtggctgggtctcggcagccttcagcgccgcagacgctccggcaacgccagcatacgaggcccccgccccaggagcgcgggtccgggcggcgttcccctctgcgggaggcgcggcgagccaatcctcactttaaaagctttcctgtcctcgaagcgaggggtcttccgtgcggggcaagacgcactggccccagacgaccggtccgtgaaatgacccttccgagcgacccggagcgggcgaccttgcccaacccgcgactcggggcccctgcggtcccgcgtagaggacccaggtcccacggggggcggcggtgaatcgccccctcttgtggccgcgcttccgcccccggcacccgcccgctgctgggccacccggcgtcgcgctgccgcctcacaaagcccgggcagccgcctcattgcgcgcagggattcggaccacgcgccctcccctcccccactcgctgctgcggcgcccaggtctttgcctccgcgtcactttctcctcatcgagtccccggaggcagagagctgagcgaggttcgcctccccgggcgggacacgagctccggtcctctcttggcgcaaacccccgccccccgcggagggactacttttcgtctcccgcggaggaactacttcctcccccgcggaggcgtcggtccaggcggcgcgcacggtatggcggcggcggcggcggcggcggcgcgcgcctgagaagaggggacgccagcccggtcaggcctcggcgcggcctacacgctccgctcgctcgctcgctcccgcctcccgccccgcgcccggccatggcggagccgtcgtccgcccgacgcccggtgcctctcatcgagtcggagctgtacttccttatcgcccggtacctatcggcgggcccgtgtcggagagcggcccaggtgctggtgcaggagctggagcagtaccagttgttgccgaagagattggactgggagggcaacgagcacaacaggagctacgaggagttggtcttgtccaataagcatgtggctcctgatcatcttttgcaaatctgccagcgcatcggtcctatgttggataaagaaattccacccagtatttcaagagtcacttctttacttggtgcaggaaggcagtctttgctacgtacagcaaaagactgcaggcacacagtttggaagggctctgcctttgctgctcttcatagaggaagacctcctgaaatgccagtgaattatggttccccaccaaatcttgtggagatacatcgaggaaaacaactcacagggtgttccacttttagtacagcatttccaggaactatgtatcagcatataaaaatgcacagaaggattctcggacatctatctgctgtttactgtgtagcatttgataggacaggacatagaatctttacaggttcagatgactgtttggtaaagatttggtcaacacataatggccgcttgttatctacattaagaggtcattctgcagaaatttcagatatggcagtaaactatgagaatacaatgattgctgcggggagctgtgataaaattattagagtgtggtgcttgagaacttgtgccccagttgctgtgctccaaggacacacaggatcaattacatctttacagtttagcccgatggccaaaggctctcaaagatacatggtttccactggtgctgatgggacagtttgcttttggcaatgggatttagaatccttaaaatttagcccacgtcccctgaagttcactgaaaagcctaggccaggcgttcaaatgctttgttcttcttttagtgttggtggtatgtttttagccacaggtagtactgatcatgtaatcagaatgtattttttgggttttgaagcacccgaaaaaatcgcagaacttgaaagccacactgataaagtagatagtatccaattttgtaacaatggtgatcggttcctaagtggtagcagagatggaacagcacggatttggagatttgagcagttagaatggaggagcattttattggatatggctaccagaatctcaggggacttatcttccgaagaggaaaggtttatgaaacctaaagtaacaatgatagcttggaatcaaaatgatagcattgttgtcacagctgtgaatgatcatgtcctcaaagtgtggaattcttacactggacaactgcttcataacttaatgggacatgctgatgaagtatttgttctggagacacatccctttgattccagaattatgttatctgcaggacatgatggcagcatatttatatgggatattacaaaaggtaccaagatgaaacattattttaatatgattgaaggacaaggacatggagctgtgtttgactgtaagttttcacaggatggacagcattttgcctgtacagattctcatgggcaccttctgatatttggttttggatgcagcaaaccatatgaaaagattcctgatcagatgttcttccatactgactatcgaccacttattagagattctaataattatgtcttagatgagcaaactcagcaggctcctcatcttatgcctccaccattcttggtagatgtagatggaaatcctcatccaaccaagtatcagagattagtaccaggccgagaaaattctgcagatgaacatttgattccacagctgggctatgtggcaacaagtgatggagaggtgattgaacaaattataagcctgcaaaccaatgataatgatgaacgcagcccagaatcgagtattcttgatggaatgataagacagttgcagcagcagcaagatcagagaatgggagcagatcaggatactattccaagaggactttcaaatggtgaagaaacaccccggagaggttttagaaggctgagcttagacattcagtcccctccaaatattggtctgcgtcgtagtggacaagttgaaggtgttcgtcagatgcatcaaaacgctccacgcagtcagattgctacagaacgtgacctgcaggcttggaaacgaagagtggttgtaccagaggtaccactaggcatatttaggaagctggaagacttccgattagagaaaggtgaagaggaaagaaatctttatataataggaagaaaaagaaagactcttcagctctcacataagtcggattcagtggttttggtatcacagtctagacaaaggacatgtaggcgtaaatatccaaattatggtagaagaaatcgtagctggcgtgagttatcttctggaaatgagtcttcaagctctgtaagacatgagacttcctgtgatcagagtgaaggttctggttcttcagaagaggatgaatggagaagtgacagaaaaagtgagagttacagcgaaagttcaagtgactcttcatctagatattccgattggacagctgatgcgggcatcaatttgcagcctcctttaagaacatcatgtcgtcgacgaattactcgattttgtagtagttcagaagatgaaatatctactgagaatttatctcctccaaaaagaagacgaaagagaaagaaagaaaataagcctaagaaggagaatttgcggaggatgactccagcagagcttgcaaatatggagcatttatatgaatttcaccctccagtttggattactgacaccacacttagaaaatctccttttgttcctcaaatgggtgatgaggtaatatattttcgacagggtcatgaagcttatattgaggctgtaagaagaaataatatttatgaactgaaccctaataaggagccatggagaaaaatggatcttagggatcaagaattggttaaaatagttggaatacgatatgaagttgggccccctacactctgttgcctaaaactagcatttatagatccagcaactggaaaacttatggacaaatctttctctattagatatcatgatatgccagatgttattgactttcttgtattgcgtcaattttatgatgaagcaagacagaggaattggcagtcttgtgacagattccgctctattattgatgatgcttggtggtttggaacagtgttaagtcaagagccatatcaaccacagtatcctgatagtcatttccagtgttatattgttaggtgggataatactgaaattgaaaaacttagcccatgggacatggaaccaattcctgataatgttgatccacctgaagaattaggagctagtatttctgtcacaacagatgagctagagaaattgctctataaaccacaagctggtgaatggggtcagaaatcaagagatgaagaatgtgatagaattatcagtggtatagatcaacttttgaatcttgatatagcagcagcttttgcaggccctgttgatttgtgtacatacccgaagtactgtactgtagtagcttatccaaccgatctttacacaattcgaatgagacttgttaatcgattttacaggaggctgtctgcgttagtttgggaagtcagatatatagaacataatgccagaacatttaacgaacctgagagtgtaattgcaagatcagctaaaaagataactgaccaacttttaaaatttatcaagaatcaacactgtacaaatatctcagaactttctaacacatctgaaaatgatgagcaaaatgctgaggatttggatgatagtgatcttcctaaaacatcttctggaaggaggagagtccatgatgggaaaaaaagcatcagagctacgaactatgttgaaagcaactggaagaaacagtgtaaggaactagtgaacttaatttttcagtgtgaagattctgaaccatttagacaacctgttgatttggttgaatatccagactacagagatattatagataccccaatggattttggaacagtaagggaaactctagatgcgggaaattatgacagccctttggagttttgcaaagacatccggctgatatttagcaatgcaaaagcgtatacaccaaacaaaagatcaaagatttatagtatgaccttgagattatctgccttatttgaagaaaaaatgaagaaaatctcttctgattttaaaattggtcaaaaattcaatgaaaaacttcgaagaagccagaggttcaagcaacggcaaaattgtaaaggtgacagtcagcctaacaaaagtatcagaaacctcaagccgaagaggttaaaatctcagacaaaaataattcctgagttggtaggttctcctacccagtctacctcaagtaggacagcttatcttggaacccacaagacaagtgctggtatctcttcaggtgttacttctggtgactcttcagattcagcagaatcatcagaaaggaggaaaagaaatagacctataacaaatggttctacattatctgaaagtgaagtggaagattctttagctacctctttgtcatcgtcagcttccagtagttctgaggaaagcaaagagagttccagagctcgtgaatcctcctcacgcagtgggctatccagaagcagcaatctcagggtaaccagaactagagctgctcaaagaaaaactggtcccgtttcattagcaaatggatgtggcagaaaagccactcgaaagagagtctatttaagtgattctgataacaattcattggagactggtgaaattctaaaagccagagctggaaataaccgaaaagtcttaaggaagtgtgctgctgtggctgccaataaaataaagctaatgagtgatgtagaagagaattctagctctgaaagtgtctgttctggtcggaagctgcctcaccgcaatgcttctgctgtagctagaaaaaagttattacataattctgaagatgaacagagcttaaagtcagaaattgaagaagaggagctaaaagatgaaaatcaactattaccagtgtccagttctcacactgcccagagcaatgttgatgaatctgaaaacagagactcagagtcagaaagtgatttgcgggtagcccggaaaaattggcatgctaatggttacaagtcccatactccagcaccttcaaagacaaaatttcttaaaatagagtcttctgaggaagactctaaaagtcatgattcagatcatgcatgtaacagaactgctggcccatcaacgtctgtgcagaaacttaaggcagagagcatctcagaggaagcagattctgaaccaggaagatctggtggtaggaaatacaatacatttcacaagaatgcgagtttctttaaaaaaaccaagattctgagtgactcagaagactctgaatctgaagagcaagatagagaagatgggaaatgtcataaaatggaaatgaacccaatttcaggaaatctgaactgtgaccctattgctatgtcccagtgttcctcagatcatggatgtgaaactgatttagattcagatgatgacaaaatagaaaaaccaaacaattttatgaaagattctgcatcacaagacaatggactaagcagaaaaatttccaggaaaagggtctgttccagtgactcagacagtagtttacaggtggttaagaaatcatcaaaagccagaacaggtctcctgaggattactcgaagatgtgcagctacggctgccaataagatcaagctcatgagtgatgtagaagatgtcagtttagaaaatgtgcacactagaagcaaaaatggaaggaaaaaacctctccatcttgcttgtactacagctaagaagaaattgagtgattgtgaaggaagtgtacattgtgaagtaccaagtgaacagtatgcctgtgaaggcaagccacctgatcctgactccgaaggtagtacaaaagtgcttagtcaggctctaaatggagactcagactctgaagatatgttgaattcagaacacaagcacaggcataccaatattcacaaaatagatgcaccttctaaaagaaaaagttcctctgttacatcttcaggagaagattcaaaaagtcatattccagggagtgagactgataggacattttcttcagagtcaaccttggcacaaaaagctactgcagagaataattttgaagtggaactgaattatgggctgcgcaggtggaatggcagaagactcaggacctatggaaaggctccttttagtaagacaaaagtgattcatgattcacaggaaacagcagagaaggaagtaaaaaggaagagatcgcatcctgaattggaaaatgtgaaaatctctgaaacaactgggaattcaaagtttagacctgatactagttccaaatcatcagatttgggatctgtaactgaatcagatattgactgtactgataatacaaaaaccaaaaggaggaaaacgaaaggaaaagcaaaagtagttagaaaagacaaaaccttttctcctgtgtatctttgaagtggcagacaaggcgaagcatcagactggtattaatgttagagaatgttctgaagtgttcctattttgtagttatctattccatttgacatagtagaaggtacattttctttctactctgatgcatggggaaggatgtttttggacattatcaactgagataggtgggaaacctcctctcatttgtggcttagagagctatcaccatttcagaactatgatgcttttcttctcagaacttgtgttaagtagatagtaaacagattgattcatgataattgtccttgactaagactgaaaagactaatgggatgccttttactttgctaattttaaaaactggtgatagatgtcaaatccattaatttatttaaactcttcttaaccttctcttttataatctgttctcaggttttaactccatgtttaccatcatttgcaaaaaggtaccaaaaaaatccataaataaatatggaatacattcataagtacatacattcttttggtataaaacaatattttgacagtttaggcttcattaatagaactattctgattatttggactgcattaattggtcattgactggccatccaattaccattttttctttcagtccaaaatagttagacccttgcatacagaagtggtattttggtttttaatcagatttggtttcatcagaagcagcaagaatggacctgatgtctttaaaagcatagccgacaatggtagcttctcaagttatgaaataaaactgagagataatggagaaaataatttttatgggtttttttggttatggtgctattcctaaggttaactttgaatatgtgacacacacactcctaagtacctttaaggaaaattaataaatcattaatagttaaaatgtttacattgagcactagaacatgtttggccttttttttctacgttatgcaaaatgcccagggatttaatgcacaggtgtactttaatgtttagggtcagtttgtagtattcttgagaaaaagataaagggttataatttgaatgtgaactgatccagaaataagtgctgtacctttccactgcacttgaagttcaacttaatggtgtatgtgaaaaacaaaaactactttggttgtgtatgtccaaagtcctatggttttattcatttatggttttacaggctttgaagtactcagatttgatttttgctttcttggaaagactcactttaccaagcatataaaggaaaaatgatttcaaacattgacaagatagatgagtgttaacaaagctttcttttttcgtgtcctccttatttaaaaaggtatacttacaatgtgaagtaacttatgaataaaaggaaaagtttatcccatattcaaataattcctaaggtcagcctccctttttgtaagtggcaaatatctgattaaatcatttctcagtttattaatccttggaaacaatgatatagcagttactcacagcttgtaaattacaacagaaaggttcctttcaaatagtagagctgcacctaaagaggaaattgggtttataagaaaatggaggcaaagaacttaagttttaagaaaaagcacttcaaaacagaagggcaaatggaaaaggggaatataaaacaaaccaataaaaataccatctgagggtgttactgtccaaaagtaaagaataagatgcatcactaagccctttgcactcgttatgacctcgtaagtaaaaattatcacttagaataaggggtgcacactacattccctctgtcttctagacttttttttttgtagaagaatcagaaaacaatttactaacctccctgtttgatattaaaaataggaagaattttaatattttctgttagtacaagttgaacttgattgtgccaactgaaaccccagaggtttgtatatcagtagaatgcaagaacattgttaaaggtgcttacgatcttttttgttttcctttccactccattgtatcaattttttgagtaacttttaaatggctagaaaatggtctttttgctttgcccttttaaagctgaaataaccagctccattcttttcatgaatagtaagttgatatatttatttatcaggtatcttgcagttgtcaccaaatactgtagttttcttatgttgtatggaaattatagttcaattattttaatgtgatagagtgcaacaagtcattgtagaacttttcacctgttaatgttgaagttatacctctgaatttctgctgtggatatcaaggaaataataaagcagaaaccccaagaaatttgcaactt

SEQ ID NO: 11811 - protein, 2199 aa, Homo sapiens; identical to SEQ ID NO: 11809

SEQ ID NO: 11812 - DNA, 11486 bp, Homo sapiens
gtaattttctgccgggctgctggcttgtgggggatgtggctgggtctcggcagccttcagcgccgcagacgctccggcaacgccagcatacgaggcccccgccccaggagcgcgggtccgggcggcgttcccctctgcgggaggcgcggcgagccaatcctcactttaaaagctttcctgtcctcgaagcgaggggtcttccgtgcggggcaagacgcactggccccagacgaccggtccgtgaaatgacccttccgagcgacccggagcgggcgaccttgcccaacccgcgactcggggcccctgcggtcccgcgtagaggacccaggtcccacggggggcggcggtgaatcgccccctcttgtggccgcgcttccgcccccggcacccgcccgctgctgggccacccggcgtcgcgctgccgcctcacaaagcccgggcagccgcctcattgcgcgcagggattcggaccacgcgccctcccctcccccactcgctgctgcggcgcccaggtctttgcctccgcgtcactttctcctcatcgagtccccggaggcagagagctgagcgaggttcgcctccccgggcgggacacgagctccggtcctctcttggcgcaaacccccgccccccgcggagggactacttttcgtctcccgcggaggaactacttcctcccccgcggaggcgtcggtccaggcggcgcgcacggtatggcggcggcggcggcggcggcggcgcgcgcctgagaagaggggacgccagcccggtcaggcctcggcgcggcctacacgctccgctcgctcgctcgctcccgcctcccgccccgcgcccggccatggcggagccgtcgtccgcccgacgcccggtgcctctcatcgagtcggagctgtacttccttatcgcccggtacctatcggcgggcccgtgtcggagagcggcccaggtgctggtgcaggagctggagcagtaccagttgttgccgaagagattggactgggagggcaacgagcacaacaggagctacgaggagttggtcttgtccaataagcatgtggctcctgatcatcttttgcaaatctgccagcgcatcggtcctatgttggataaagaaattccacccagtatttcaagagtcacttctttacttggtgcaggaaggcagtctttgctacgtacagcaaaagactgcaggcacacagtttggaagggctctgcctttgctgctcttcatagaggaagacctcctgaaatgccagtgaattatggttccccaccaaatcttgtggagatacatcgaggaaaacaactcacagggtgttccacttttagtacagcatttccaggaactatgtatcagcatataaaaatgcacagaaggattctcggacatctatctgctgtttactgtgtagcatttgataggacaggacatagaatctttacaggttcagatgactgtttggtaaagatttggtcaacacataatggccgcttgttatctacattaagaggtcattctgcagaaatttcagatatggcagtaaactatgagaatacaatgattgctgcggggagctgtgataaaattattagagtgtggtgcttgagaacttgtgccccagttgctgtgctccaaggacacacaggatcaattacatctttacagtttagcccgatggccaaaggctctcaaagatacatggtttccactggtgctgatgggacagtttgcttttggcaatgggatttagaatccttaaaatttagcccacgtcccctgaagttcactgaaaagcctaggccaggcgttcaaatgctttgttcttcttttagtgttggtggtatgtttttagccacaggtagtactgatcatgtaatcagaatgtattttttgggttttgaagcacccgaaaaaatcgcagaacttgaaagccacactgataaagtagatagtatccaattttgtaacaatggtgatcggttcctaagtggtagcagagatggaacagcacggatttggagatttgagcagttagaatggaggagcattttattggatatggctaccagaatctcaggggacttatcttccgaagaggaaaggtttatgaaacctaaagtaacaatgatagcttggaatcaaaatgatagcattgttgtcacagctgtgaatgatcatgtcctcaaagtgtggaattcttacactggacaactgcttcataacttaatgggacatgctgatgaagtatttgttctggagacacatccctttgattccagaattatgttatctgcaggacatgatggcagcatatttatatgggatattacaaaaggtaccaagatgaaacattattttaatatgattgaaggacaaggacatggagctgtgtttgactgtaagttttcacaggatggacagcattttgcctgtacagattctcatgggcaccttctgatatttggttttggatgcagcaaaccatatgaaaagattcctgatcagatgttcttccatactgactatcgaccacttattagagattctaataattatgtcttagatgagcaaactcagcaggctcctcatcttatgcctccaccattcttggtagatgtagatggaaatcctcatccaaccaagtatcagagattagtaccaggccgagaaaattctgcagatgaacatttgattccacagctgggctatgtggcaacaagtgatggagaggtgattgaacaaattataagcctgcaaaccaatgataatgatgaacgcagcccagaatcgagtattcttgatggaatgataagacagttgcagcagcagcaagatcagagaatgggagcagatcaggatactattccaagaggactttcaaatggtgaagaaacaccccggagaggttttagaaggctgagcttagacattcagtcccctccaaatattggtctgcgtcgtagtggacaagttgaaggtgttcgtcagatgcatcaaaacgctccacgcagtcagattgctacagaacgtgacctgcaggcttggaaacgaagagtggttgtaccagaggtaccactaggcatatttaggaagctggaagacttccgattagagaaaggtgaagaggaaagaaatctttatataataggaagaaaaagaaagactcttcagctctcacataagtcggattcagtggttttggtatcacagtctagacaaaggacatgtaggcgtaaatatccaaattatggtagaagaaatcgtagctggcgtgagttatcttctggaaatgagtcttcaagctctgtaagacatgagacttcctgtgatcagagtgaaggttctggttcttcagaagaggatgaatggagaagtgacagaaaaagtgagagttacagcgaaagttcaagtgactcttcatctagatattccgattggacagctgatgcgggcatcaatttgcagcctcctttaagaacatcatgtcgtcgacgaattactcgattttgtagtagttcagaagatgaaatatctactgagaatttatctcctccaaaaagaagacgaaagagaaagaaagaaaataagcctaagaaggagaatttgcggaggatgactccagcagagcttgcaaatatggagcatttatatgaatttcaccctccagtttggattactgacaccacacttagaaaatctccttttgttcctcaaatgggtgatgaggtaatatattttcgacagggtcatgaagcttatattgaggctgtaagaagaaataatatttatgaactgaaccctaataaggagccatggagaaaaatggatcttagggatcaagaattggttaaaatagttggaatacgatatgaagttgggccccctacactctgttgcctaaaactagcatttatagatccagcaactggaaaacttatggacaaatctttctctattagatatcatgatatgccagatgttattgactttcttgtattgcgtcaattttatgatgaagcaagacagaggaattggcagtcttgtgacagattccgctctattattgatgatgcttggtggtttggaacagtgttaagtcaagagccatatcaaccacagtatcctgatagtcatttccagtgttatattgttaggtgggataatactgaaattgaaaaacttagcccatgggacatggaaccaattcctgataatgttgatccacctgaagaattaggagctagtatttctgtcacaacagatgagctagagaaattgctctataaaccacaagctggtgaatggggtcagaaatcaagagatgaagaatgtgatagaattatcagtggtatagatcaacttttgaatcttgatatagcagcagcttttgcaggccctgttgatttgtgtacatacccgaagtactgtactgtagtagcttatccaaccgatctttacacaattcgaatgagacttgttaatcgattttacaggaggctgtctgcgttagtttgggaagtcagatatatagaacataatgccagaacatttaacgaacctgagagtgtaattgcaagatcagctaaaaagataactgaccaacttttaaaatttatcaagaatcaacactgtacaaatatctcagaactttctaacacatctgaaaatgatgagcaaaatgctgaggatttggatgatagtgatcttcctaaaacatcttctggaaggaggagagtccatgatgggaaaaaaagcatcagagctacgaactatgttgaaagcaactggaagaaacagtgtaaggaactagtgaacttaatttttcagtgtgaagattctgaaccatttagacaacctgttgatttggttgaatatccagactacagagatattatagataccccaatggattttggaacagtaagggaaactctagatgcgggaaattatgacagccctttggagttttgcaaagacatccggctgatatttagcaatgcaaaagcgtatacaccaaacaaaagatcaaagatttatagtatgaccttgagattatctgccttatttgaagaaaaaatgaagaaaatctcttctgattttaaaattggtcaaaaattcaatgaaaaacttcgaagaagccagaggttcaagcaacggcaaaattgtaaaggtgacagtcagcctaacaaaagtatcagaaacctcaagccgaagaggttaaaatctcagacaaaaataattcctgagttggtaggttctcctacccagtctacctcaagtaggacagcttatcttggaacccacaagacaagtgctggtatctcttcaggtgttacttctggtgactcttcagattcagcagaatcatcagaaaggaggaaaagaaatagacctataacaaatggttctacattatctgaaagtgaagtggaagattctttagctacctctttgtcatcgtcagcttccagtagttctgaggaaagcaaagagagttccagagctcgtgaatcctcctcacgcagtgggctatccagaagcagcaatctcagggtaaccagaactagagctgctcaaagaaaaactggtcccgtttcattagcaaatggatgtggcagaaaagccactcgaaagagagtctatttaagtgattctgataacaattcattggagactggtgaaattctaaaagccagagctggaaataaccgaaaagtcttaaggaagtgtgctgctgtggctgccaataaaataaagctaatgagtgatgtagaagagaattctagctctgaaagtgtctgttctggtcggaagctgcctcaccgcaatgcttctgctgtagctagaaaaaagttattacataattctgaagatgaacagagcttaaagtcagaaattgaagaagaggagctaaaagatgaaaatcaactattaccagtgtccagttctcacactgcccagagcaatgttgatgaatctgaaaacagagactcagagtcagaaagtgatttgcgggtagcccggaaaaattggcatgctaatggttacaagtcccatactccagcaccttcaaagacaaaatttcttaaaatagagtcttctgaggaagactctaaaagtcatgattcagatcatgcatgtaacagaactgctggcccatcaacgtctgtgcagaaacttaaggcagagagcatctcagaggaagcagattctgaaccaggaagatctggtggtaggaaatacaatacatttcacaagaatgcgagtttctttaaaaaaaccaagattctgagtgactcagaagactctgaatctgaagagcaagatagagaagatgggaaatgtcataaaatggaaatgaacccaatttcaggaaatctgaactgtgaccctattgctatgtcccagtgttcctcagatcatggatgtgaaactgatttagattcagatgatgacaaaatagaaaaaccaaacaattttatgaaagattctgcatcacaagacaatggactaagcagaaaaatttccaggaaaagggtctgttccagtgactcagacagtagtttacaggtggttaagaaatcatcaaaagccagaacaggtctcctgaggattactcgaagatgtgcagctacggctgccaataagatcaagctcatgagtgatgtagaagatgtcagtttagaaaatgtgcacactagaagcaaaaatggaaggaaaaaacctctccatcttgcttgtactacagctaagaagaaattgagtgattgtgaaggaagtgtacattgtgaagtaccaagtgaacagtatgcctgtgaaggcaagccacctgatcctgactccgaaggtagtacaaaagtgcttagtcaggctctaaatggagactcagactctgaagatatgttgaattcagaacacaagcacaggcataccaatattcacaaaatagatgcaccttctaaaagaaaaagttcctctgttacatcttcaggagaagattcaaaaagtcatattccagggagtgagactgataggacattttcttcagagtcaaccttggcacaaaaagctactgcagagaataattttgaagtggaactgaattatgggctgcgcaggtggaatggcagaagactcaggacctatggaaaggctccttttagtaagacaaaagtgattcatgattcacaggaaacagcagagaaggaagtaaaaaggaagagatcgcatcctgaattggaaaatgtgaaaatctctgaaacaactgggaattcaaagtttagacctgatactagttccaaatcatcagatttgggatctgtaactgaatcagatattgactgtactgataatacaaaaaccaaaaggaggaaaacgaaaggaaaagcaaaagtagttagaaaaggtaaaacttttacagctaacatatctaaaactgtgagacgtcaaagacaaagcaaacgccctaggttaagtgtggatgataatgactgggaggatttggactatgcaaaatctaaaagagttcttcgacgttcaaaaataaaaacgagaaatcagggtagaaggactgtgagataccatgatggggatgatgacagaagtttagaaaatgtgttagatttcaatggttgcaccttatgaccttgagggaaagccagttcatttaagaggaaatggactggcatttatggtgaaagctggctgttaaaattatttttttgtcttacaattcagggaatatatttatatttttctatgaaaagttatgaatgtgactaaatcatgactgttatttttatttgcacttgctggtctttgtagcagcattcagcacaggtgccaaaatatgcttcattttgggggcagatctattttgacagtatttgactacatatagcaagagtttgaaatatgttaaacactagacatcctggttatcaaaaccaatgagcattactttcatggcagcaagtgtcatgcagttattttctgaatttgtcaaagaggcagtagtttctaacccctgttctatagtagttacaacaatttcacaacctatgtttacagattcttcataaatacatgcatactgacactataatcatgggaggtgtaaccatgattagtaggcgaggtacctaccacttttttttttttcttcccctggctacttgagtagaatgcattataccagatctggtcactttcattgaaatggtttctaattttcttcccaagtgctgttgggtttttttcttcttaaggaaaacgttgtcacttttatgttataaacttgaatttataaagtgctggtaaattatttttaatgatttgagtgcatgttttaaacctctaggaccagagcatagtcagagcattttcttttaaattgtgcactaacaaaatgctatataatctgtcttctgtccaagatctcctggtttccattgtaagggatttaaccaaaatcttgctcttccataatcttactctgtgaaatagaggaattcgtgtgccttagatttagaagtgtgttctttaatagagtgtacagggctaaaagagtatttaagttaatatgtaggtttcccccatctgtattccaattgtagaggtgagttttgttaagagtacaattgcaaatcttatctatataggaaaatagctaaatgtcattctccatctctttgttttagtttactgcttccatgtgcaatcctaagcattctttgctggggcaactaaatgtatctttattagtgacttctagtccaaatataagaaactgtcatgttttgtgggaaaataattttataatccatttaaagtgaaagtttatcacacaaatagtacacttattttctaaccaaatacttgataggttatgctactccagtgtagatggccattcctaacttgtttgtgcctgaagatggacttgattcaaatggtttacatatttagtgggtaagggatatgttacagtaccccacctgtaagttatttattagccctaattgtgtttgatttcagacaaaattaacccttttctcctgtgtatctttgaagtggcagataaggtgaagcatcagactggtatcaatattagacaatgttatttattagccctaattgtgtttggtttcagacaaaaccttttctcctgtgtatctttgaagtggcagacaaggcgaagcatcagactggtattaatgttagagaatgttctgaagtgttcctattttgtagttatctattccatttgacatagtagaaggtacattttctttctactctgatgcatggggaaggatgtttttggacattatcaactgagataggtgggaaacctcctctcatttgtggcttagagagctatcaccatttcagaactatgatgcttttcttctcagaacttgtgttaagtagatagtaaacagattgattcatgataattgtccttgactaagactgaaaagactaatgggatgccttttactttgctaattttaaaaactggtgatagatgtcaaatccattaatttatttaaactcttcttaaccttctcttttataatctgttctcaggttttaactccatgtttaccatcatttgcaaaaaggtaccaaaaaaatccataaataaatatggaatacattcataagtacatacattcttttggtataaaacaatattttgacagtttaggcttcattaatagaactattctgattatttggactgcattaattggtcattgactggccatccaattaccattttttctttcagtccaaaatagttagacccttgcatacagaagtggtattttggtttttaatcagatttggtttcatcagaagcagcaagaatggacctgatgtctttaaaagcatagccgacaatggtagcttctcaagttatgaaataaaactgagagataatggagaaaataatttttatgggtttttttggttatggtgctattcctaaggttaactttgaatatgtgacacacacactcctaagtacctttaaggaaaattaataaatcattaatagttaaaatgtttacattgagcactagaacatgtttggccttttttttctacgttatgcaaaatgcccagggatttaatgcacaggtgtactttaatgtttagggtcagtttgtagtattcttgagaaaaagataaagggttataatttgaatgtgaactgatccagaaataagtgctgtacctttccactgcacttgaagttcaacttaatggtgtatgtgaaaaacaaaaactactttggttgtgtatgtccaaagtcctatggttttattcatttatggttttacaggctttgaagtactcagatttgatttttgctttcttggaaagactcactttaccaagcatataaaggaaaaatgatttcaaacattgacaagatagatgagtgttaacaaagctttcttttttcgtgtcctccttatttaaaaaggtatacttacaatgtgaagtaacttatgaataaaaggaaaagtttatcccatattcaaataattcctaaggtcagcctccctttttgtaagtggcaaatatctgattaaatcatttctcagtttattaatccttggaaacaatgatatagcagttactcacagcttgtaaattacaacagaaaggttcctttcaaatagtagagctgcacctaaagaggaaattgggtttataagaaaatggaggcaaagaacttaagttttaagaaaaagcacttcaaaacagaagggcaaatggaaaaggggaatataaaacaaaccaataaaaataccatctgagggtgttactgtccaaaagtaaagaataagatgcatcactaagccctttgcactcgttatgacctcgtaagtaaaaattatcacttagaataaggggtgcacactacattccctctgtcttctagacttttttttttgtagaagaatcagaaaacaatttactaacctccctgtttgatattaaaaataggaagaattttaatattttctgttagtacaagttgaacttgattgtgccaactgaaaccccagaggtttgtatatcagtagaatgcaagaacattgttaaaggtgcttacgatcttttttgttttcctttccactccattgtatcaattttttgagtaacttttaaatggctagaaaatggtctttttgctttgcccttttaaagctgaaataaccagctccattcttttcatgaatagtaagttgatatatttatttatcaggtatcttgcagttgtcaccaaatactgtagttttcttatgttgtatggaaattatagttcaattattttaatgtgatagagtgcaacaagtcattgtagaacttttcacctgttaatgttgaagttatacctctgaatttctgctgtggatatcaaggaaataataaagcagaaaccccaagaaatttgcaactt

SEQ ID NO: 11813 - protein, 2269 aa, Homo sapiens; identical to SEQ ID NO: 1958

SEQ ID NO: 11814 - DNA, 901 bp, Homo sapiens
aattgcttagacagggtctcactccaccacccaggatggagtgtagtggcgtgatctcagctcactgcaacagggcaagactctgtctcaaaaaaaaaaaaaggagaaaatctgaggaagctcaaaatattttagcttattgaatagtagttctaacatacagataagaaatgtcatttactgtgtactgtgtactggctaccaggttaactcagagcacgtttacaatgagggaacaagggcattgggaagagcatcattttaacagctgctaaatgatggagagaatgctcatgggagcatttcctctagaaacatatccattaagattcctgcaaacatacacacaagttttatatagagcattctttgggaatgctcttaacttcagtagagttgacctattagaattaagtcatatgatgtagtcttttagctgagagatgggaattttttaaacatggatgataaatgattcctataagcttataattcatgttcttgcaaaaagaaaaaggatttccattttattttctgcatgaacataaaagaaatgtgggggaagagggcagagacatcccactgccctaataagccaaaatgtgtatttttatactgtaattcagagttatgctttcagtattttatctcatcaaaaggaagaggaaagacgctgtacaggcaggcaacataaagtgctttaaaaaacactggtttatcaaagccgggatctaagttcaaatcacatctataccacctaaaaactatgactttgggcaaggggtgtgggtgggtgggtgtgtgggtgtgtctgttttaatggggagaaagggggtctcactatgttgcctgggctggtctcctcaggtattctggtgaatactgatcaacccacacgtgt

SEQ ID NO: 11815 - protein, 35 aa, Homo sapiens
MECSGVISAHCNRARLCLKKKKRRKSEEAQNILAY

SEQ ID NO: 11816 - DNA, 7118 bp, Homo sapiens
cgcggggcagcggcggcgcggcggagccatccgcgctcgtgcccgcgcgggtgcgttgctgtcctggccgcgcccctgtcccgccgcctcccgctcctcgcctggcggatgtaggttgttggcctgaggggagctacgtagccgaggtttgcgctgccgccgccaggcccggtccggttccagcctctgcccggacgctagccggcctggccatggctgaccgcgggtgcccgctggaggcggcgccgctgcctgccgaggtgcgggagagcctggctgagctggagctggagctgtcggaaggtgacatcactcaaaaaggatatgaaaagaaaagggcaaagctgcttgcacgttatataccgcttattcaaggaatagacccatctctgcaagcagagaatagaattcctgggccctcacaaaccacggccgctgcacccaagcagcagaagtctcggcccaccgcctcgagggatgagcgcttccggtcagatgtccacactgaagccgtgcaagcagctttggccaaatacaaagagaggaagatgcctatgccttcgaagagacgttctgtccttgtgcattcgtctgtggaaacctacacccctccagacacgtcgtctgcctcagaagatgagggctctttacggcgacccgggcgactcacctccactccgctccagagccattccagcgtcgagccctggctcgaccgggtcattcagggctcgtccacctcatcctctgcatcctccacctcatctcacccgggagggagacccaccactgctcccagtgctgcagccacgccgggggccgccgctaccactgcactcgcaggcctcgaggcccacacccacatagatctgcattctgcccctcctgatgtcaccacgggcctcgtggagcattcgtactttgagcgtccacaggtggcttctgtgagaagtgttcctcgggggtgcagcgggagcatgctggaaacagcagatggtgtccctgtgaacagcagagtgtcctccaaaatccagcagcttctgaacaccctgaagaggccaaagcgccctccactgaaggagttctttgtggatgattttgaggaattgttggaagttcagcaaccagatccaaatcagccaaagcctgagggaagcgagacgagtgtgctgagaggggagcctctcactgcaggtgtcccccgaccgccgtcgctgttggccaccttgcagcgctggggcacaacacagcccaaatccccctgtctgactgccttggatacaactgggaaagccgtctacactctcacctatggtaaactttggagtcggagtttaaaactagcttatactctacttaataaactgacaagtaagaatgaacctctacttaaacctggagacagagtggcgctcgtgtttccgaatagtgaccctgtgatgttcatggttgcattttatgggtgtctcctggcagagctggttcctgtccccatagaagtgccattaacaagaaaggatgcaggcagccagcaggttgggtttctgctgggcagctgtggagtcttcttggccctgaccacagacgcttgtcagaaaggcctccccaaggcacagacaggagaggtggcagctttcaaaggttggcccccgctctcctggctagtgattgatgggaagcatctagccaagcccccaaaggactggcaccctctggcccaggacacagggactgggactgcctacattgagtataaaaccagcaaagaaggcagtacggtgggggtcacagtgtcccacgcatccctgctggcacagtgccgggctctgacccaggcgtgcgggtactcagaagctgaaacattaacaaacgtgctggatttcaaaagggatgctggtctgtggcatggcgtgttaacaagcgtcatgaacaggatgcacgtggtcagcgtcccctacgcgctgatgaaggcgaacccactctcctggatccagaaagtgtgcttctataaagctcgggccgcgctggtgaagtcgcgagacatgcactggtctctcctagctcagcggggccagagggacgtcagcctcagctcactgcgcatgctgattgtggccgatggtgccaacccgtggtcgatctcctcctgtgacgccttcctcaacgtcttccagtccagaggtctgaggccagaggtcatctgtccttgtgcaagttctcctgaggcgctgactgtcgccatccgcaggccacctgatctgggaggaccacctccaagaaaagcagtcctgtcgatgaacggtctaagttatggtgttatcagagtggatactgaagaaaagttgtcagtccttactgttcaggacgttggtcaggtgatgcctggagctaatgtatgtgttgtgaagttagaaggtaccccttatctttgtaaaactgatgaagtgggagaaatatgcgtcagttccagtgcaactggcacagcgtactatggattgcttggaatcacgaagaatgtgtttgaggcagttccggtcaccacaggaggagcacccatctttgacaggccattcaccaggacaggcctgctgggcttcatcgggcctgacaacctggtcttcatcgtgggcaaactggacgggctgatggtcactggagttcgcagacacaatgcagatgacgttgtggccaccgcactggccgtggagcccatgaagtttgtctacagaggcaggatcgctgtgttctctgtgaccgtgctgcacgacgaccggattgtcctggtggctgagcagcggccggatgcctcggaggaggacagcttccagtggatgagccgtgtgctgcaggccattgatagcatccaccaggtgggcgtgtactgtctggccctggttcctgccaacaccttgcccaaggctcctctcggagggattcacatttctgaaaccaaacagcgctttctggaagggacgctgcacccgtgtaatgtgctgatgtgccctcacacctgtgttaccaacctccccaaacctcgtcagaaacaaccagaggttggaccagcctcaatgatcgtggggaacctggttgctgggaagagaatcgctcaggcttccgggagagagctcgcccacctggaggacagcgaccaggcacggaagttcctgttcctggctgacgtgctgcagtggcgtgcccacaccactcctgaccacccgctgttcttgctgctgaacgccaagggcaccgtcacaagcactgcaacctgtgtccagctgcacaaaagggctgagagagtggccgcggctctgatggagaagggaagactgagtgttggggaccatgtggctctggtctacccaccaggggtggacctcattgccgcgttctatggctgcttgtactgtggctgcgtgcctgtcaccgtgcggcccccgcaccctcagaacctcggcaccacactgcccaccgtcaagatgatcgtggaggtcagcaagtctgcatgcgtcctcaccacgcaggctgtcacacggctgctcaggtccaaggaggctgctgctgccgtggacatcaggacctggcccaccatcctagacacagatgacatcccaaaaaagaagatagcaagcgttttcaggcccccctcccccgatgtcctcgcatacttggacttcagcgtgtcaaccactgggatattagcgggagtgaagatgtcgcacgcggccacaagcgccttatgccgctccataaagctgcagtgtgagctgtacccctcgcggcagatcgccatctgcctcgacccctactgtggccttggttttgccctgtggtgtctgtgcagtgtctactcgggacaccaatcagtgctggtgcccccgctggagctggagagcaacgtgtccctgtggctgtcggccgtcagccagtacaaggcccgcgtcaccttctgctcctactctgtgatggagatgtgcaccaagggcctaggcgcacagacgggtgtcctcaggatgaagggggtgaacctgtcatgtgtgcgcacgtgcatggtggtcgccgaggagcggcccaggattgcgctgacccagtccttctccaagctcttcaaggacctgggcctgccggcccgcgccgtaagcaccacgttcgggtgcagggtcaacgtggccatctgcctccagggcacagctggcccggaccccacaaccgtctacgtggacatgcgggcactgcgccatgacagggttcgtttggtagaacggggttctccgcacagcctgccattgatggagtctggaaagatcctccccggcgtgaaggtcatcatcgcacacaccgagaccaaaggacccttgggagactcacacctgggagagatctgggtaagcagcccccacaatgccaccgggtactacaccgtttacggggaggaggcgcttcatgccgaccacttcagtgcccggctgagttttggagacacacagaccatctgggcaaggaccggctaccttggcttccttcggcgaacagagctcactgatgccagtggagggcggcacgatgcactgtatgtggttgggtctctggatgaaactctggagctcagaggcatgcggtaccaccccatcgacattgagacctctgtcatccgagcacacaggagcatcgctgagtgtgccgtattcacctggaccaacctgctggtggtggtggtggagctggatgggctagagcaggatgccctggacctggtggccctggtgaccaacgtggtgctggaggagcactacctggtcgtgggagtggtggtcatcgtggacccaggggtgatccctatcaactctcggggtgagaagcagcgcatgcacctgcgggacggcttcctggctgaccagctggaccccatctatgtcgcctacaacatgtgagcgcagcacaccggcccaggtgccggagatgaatgagccccagcagtccaaggtgtgatgtgggaagacaccgcagagctcactcaccgggactcgcccttcctgtgctcttacagatccctctcaacaatccccgcatctccttttagaaagcacttcctgaattatttaaagaaatattttgaatctgccaagtacatttacaaaaacacggatgctggtattttaacagatggagagacaaggaaaggaaaggaaaggcctggcatgggcattgtgaggaatcacaggcaccgaggttgttctctgctgtactgcaagtttgcactttctttaggctaaaaatatagttcctgatttttaaaattcagttatttattcccacttcaaatgacaagttcatatatagaatttacgggagaaacttgagaccatttacggggagaaacttgattctgggaagatagcagagtacaaaccagctgcctcacttctgtttcacagggaggctgatggaaaaaggaagcaagctggacccatcctccctgctcacagagggcactgtggtcacacacagtgcctcctctgccagttcctttattgaaagaggtgtgctgaggtgtgctgcttgtcagcatgtattgtcacggacactcaataagtgccattttggactgtcaaatttagatgctttgtttcagaaagataagccagcatttagttttaaatcactttcctggtttgtaacttgatgctgtttagttaaattgctagttttcctaacactacaatattaattcttctcgtggaagtgtactgatttattatttttattccaagtcagcagatttggaagcattgtggtaaagtctaaggttttcatatccatagtgctgtttggtgagtaccggcagtacagttgaggggagcagggaacagcattgccccgtattgaaggtggagatggttacattcttcactgctttttgcattttgagttgtgtgcctataaaatttggccaaaccattttattattttgttcaaacttgactaagctgagtgatctaaaattatacagaacctaaatcaaagaagagaatgtaaagtcctttagttacttctaagaatttgaagtcaagcacgaatctaagacatagattatttttatatagctaatgaagagtatgttacgaaattgttgggtttttggggtattgagggtggcaaattttgtgaatcatgcatgcttcacagaaacaaccaggtttttccagaattagtctggatcagtgcctaacaaagctgttattaattctccacacatgagtctggctaactgggccagctctcatgttttactcctgtctggctacaaatagcactgtgcatagtagccctgtttccccatggtgttggactgtggtaaagtatgttgtgacatactggaattctaataatcctgttgtaagtatgtacagaatctatgtaacttattgttgacatacagaggtttgggaagtagtctaatggacattccttacaatagaatggctgggaagggaaagaaaaaaaaaaaaaaactacctaactccaatcttaatgttgtagttttatagcaaacaaaaattgtcagctttttgtattgaaaggtcagtggtggtaagacaaggtgtcttgtaaattaagattttaagaagtgcattaaaatgttttagaattactctgggaattctgtatatcacactaaaatttttatatcattatgttaataaaagttattgactttgtaattctgcattttgaaatgtgtgaaaagggtctttaaattaccccgaataggttgtatcttattttgctttttttctgactataaaagcagttatgcttatagcataaaatctagaaagcacattaaagtataaagaaaattaaaatttcttataattctacctctgagtaaacagcagcattcgtatgtaacataaaccctctcagggatttattttttctttttaaaaattttttacaaaattaggatcaagtgcttttttaaataatttgcttttgtacttaataaattatagactttaaaatctattacatatattcttctacatgtttcagtggctgtattttacaagtgtgccatgagtaaatgtagtatttgctgtattgccgtacatcagcgt

SEQ ID NO: 11817 - protein, 1571 aa, Homo sapiens; identical to SEQ ID NO: 1960

SEQ ID NO: 11818 - DNA, 2900 bp, Homo sapiens
caatacagtggagtgatgtaacctggagtgctggggagggggctttgaatggaactgggtagcaggggctatgaagaatgatgcccagtggctcaaggcaggaaaggaggccagtgtggtgggggccaggtggtcccaggtaggggatgcagataaggctgggggtcgctgggttttccctaaggatgcagtgggatcccagaccttgcgggctttgagtcccagtccagatctcaggttctgtcctgatggggccctgactcatatggactggcaaagcttccgggatttggaatctcaggatctgcccagcccttgtgcctggacacagcacataagtgcgtccactggtctctctcttccactgccttctgtcagtagaagccaccaatcgagaaacagggagttttgatgttacactggtctgctctggagttttatatttattagactgaattgcactttttatcttcttaagaaggactaaaaaagctgcgaggcctggcaggggatcagggaggatgagtgtcctgagcagagaggtagggttaccaggtatttctgtttgccttgaactggtcacatagccccagtgcccctcagcagagagacagggtgaatgaaggagctggtgtagtcagtcctagaggagacacacagatgcctctgagaaagccggttgcagatgacacacgcccaggctcagtgcaggtgacctgtgggcatggaaagtagtacaattcagggatgtttgcttatcgcttattatgtatttataatggtgtcgtatggaatattttattgaaaaggccagaaaggtcttctttacccacgtgtttctggctctgccctgggtgaatggagtgcccgcatctctccctcttagctgggaccacacaggagatacttgcatgcctgtcccttcactgctagtgagagagtacagatggtgagaaaagacaccagtcgtggaccatgtgcggtggcttatgcctgtaatcccagcactttgagaggctgaggcgggcagatcacttgaggtcaggagttcgagaccagcctggccaacatggtgaaaccccatctctaccaaaaaaaagacaccagccgtacgtctaggactgacacattgtcattatcatggacgctaatcacaaggtgtcgtgtgcagtggcgtgcaggtggtgtgcacgcagatctgcgaacagcccacctgcacgcaccagcatacagatgagctcaaagatcgctttcctagggcaccgtcacaagcactgcaacctgtgtccagctgcacaaaagggctgagagagtggccgcggctctgatggagaagggaagactgagtgttggggaccatgtggctctggtctacccaccaggggtggacctcattgccgcgttctatggctgcttgtactgtggctgcgtgcctgtcaccgtgcggcccccgcaccctcagaacctcggcaccacactgcccaccgtcaagatgatcgtggaggtcagcaagtctgcatgcgtcctcaccacgcaggctgtcacacggctgctcaggtccaaggaggctgctgctgccgtggacatcaggacctggcccaccatcctagacacagatgacatcccaaaaaagaagatagcaagcgttttcaggcccccctcccccgatgtcctcgcatacttggacttcagcgtgtcaaccactgggatattagcgggagtgaagatgtcgcacgcggccacaagcgccttatgccgctccataaagctgcagtgtgagctgtacccctcgcggcagatcgccatctgcctcgacccctactgtggccttggttttgccctgtggtgtctgtgcagtgtctactcgggacaccaatcagtgctggtgcccccgctggagctggagagcaacgtgtccctgtggctgtcggccgtcagccagtacaaggcccgcgtcaccttctgctcctactctgtgatggagatgtgcaccaagggcctaggcgcacagacgggtgtcctcaggatgaagggggtgaacctgtcatgtgtgcgcacgtgcatggtggtcgccgaggagcggcccaggattgcgctgacccagtccttctccaagctcttcaaggacctgggcctgccggcccgcgccgtaagcaccacgttcgggtgcagggtcaacgtggccatctgcctccaggtgaggtgcctggggctgcggttctcgaaagctggctgttggcagcatggagacccagtttcccagttgttaatgtgccgttttgtagccgcctgatctatttctccttctctgggcctttgatatctcatttccatgtaacattttagcttcaagggttttatttttaaagatgttctattctagttggagaaaggcttatttggaaaaaaaacacattgtttttgaacagtgactaataactgtaagactctctaagttagatataaaacacagctaagttcttaaagcaagattgaacttactgttttaagatatctagcaatattaaattgaaacattaataaatgtggtaatttgtgttgactcaaattcatttctgaaaccatgaaatgtcttattaaaaggaagcaccaagtttcaggccaggagtggtggctcatgcctataatcccagcactttgggaggctgaggcaggcggattacctgaggtcaggaattcgagaccagcctggacaatatgatgagaccccgtctctactaaaaatacaaaaattagctggctggtggtgcgcgcctgttgtcccggctacttgggaggttgaggcacaagaatcgcttgaacctggcaagaggaggttgcagcgagccaagatctcaccactgcactccagcctgggtgacagagcgagaccctgtctc

SEQ ID NO: 11819 - protein, 321 aa, Homo sapiens
MEKGRLSVGDHVALVYPPGVDLIAAFYGCLYCGCVPVTVRPPHPQNLGTTLPTVKMIVEVSKSACVLTTQAVTRLLRSKEAAAAVDIRTWPTILDTDDIPKKKIASVFRPPSPDVLAYLDFSVSTTGILAGVKMSHAATSALCRSIKLQCELYPSRQIAICLDPYCGLGFALWCLCSVYSGHQSVLVPPLELESNVSLWLSAVSQYKARVTFCSYSVMEMCTKGLGAQTGVLRMKGVNLSCVRTCMVVAEERPRIALTQSFSKLFKDLGLPARAVSTTFGCRVNVAICLQVRCLGLRFSKAGCWQHGDPVSQLLMCRFVAA

SEQ ID NO: 11820 - DNA, 3109 bp, Homo sapiens
ctgtgtccagttgcacccagggaggcagtggtgtctggctcatggggccacgagaacttgatgaagcacgcagaacccagagcccgtccacagctattcttgctgtggtcgggactcggctcatctgggctttgccataggctctgtgacttttggcaaatccctagtcctctaatctttcctactggtcagtgacgtgatgcctcccctcttcgccctgcctcgtcccccatccccacaggctcagtgtggtcttggtgggaccgggtagcgtttccatgaagaatgaaatacgctttcctgagcacgcacagcctgcatcgtcacggccccactcccgtctgagctcactctctgcaggactcccaaggacaaatcatgtgtcgcctcttgcctgtgaaagcccagagcgttcagaatacatgtgggaacactaatgttgctggtgtctcctgtttaacagatgacatcccaaaaaagaagatagcaagcgttttcaggcccccctcccccgatgtcctcgcatacttggacttcagcgtgtcaaccactgggatattagcgggagtgaaggtaggtcctctgaaatcttgtttgcttcagcccctagaaatcaggaggagtggacagaaaggatgtcagatgcagatttaaactgacaggtccttcttatgcaaagcacaaagcaacaattttgcttcttaagatttgtgttaaataccaataaatgctaagatgtgattagcctgagagtaatgcgttttctgatgcattatggttatgtctaaactttctgatttatgactgtctagcttacaggaactggtggctttgaagaatctcttaccttgctgggagtcaatagctcaattaaaatttttcaggcggggcgtggtggctcacgcctgtaatcccagcacttcgggaggccgaggcgggtggatcacaagatcaagagatggagaccatcctggccaacgtggtgaaaccccgtctctactaaaaatacaaaaaattagctgggcatggtggcaggtgcctctaatcccagatactcaggaggctgaggcaggagaattgcttgaacccgggaggcagaggttgcagtgagccgagattgtgccattgcactccagcctgggcgacagagcaagactctgcctcaaaaaaaaaaaaaagaaaaaaattttaaaaattcattaccctgaaattttgtttcaaagatttttagtgtaccatttcttgggtattatttaggttatatggggatttgagccaaccgtcttttaaggaaataaatatgatgtttggtagttcggagctatggtctagccatgtgaacagcggacactgccatccaccctctcccctcctgaatttcatttcactttttttttttgaactttattttactcttaagatgtcgcacgcggccacaagcgccttatgccgctccataaagctgcagtgtgagctgtacccctcgcggcagatcgccatctgcctcgacccctactgtggccttggttttgccctgtggtgtctgtgcaggtgagtgcagggcccctgctgcctgccaggtgggagcagctcgtgtggctcttaggaaccttggccttctaaggcaccttttctgggtgctcaggaagccgatgagatgtgtgtgagtgggtttgtttggggatgaagtgggttggagtctgagtctgaaattgagtgaaaatacatttttcattaaatacactgtccgttatcagtacttgggaagaatctgcttgattccttcaaacactagaaagtggcgatccgtctctagaagtgaatgcctctggagtggtgtccccggatcctctccaagtgttcggagcagagctcagaaccccgtgcctgccatcccccaaccttcaccctgtggcatgttttccaccaaacccccccacttggcgtcagaacagaaatcatgcccctgttgtggctggaaaagaagtgttcttgaggaagggaagagtggagtgcccagggtgctgggtgggcgggcggagcctcacgagccttccctctcgcagtgtctactcgggacaccaatcagtgctggtgcccccgctggagctggagagcaacgtgtccctgtggctgtcggccgtcagccagtacaaggcccgcgtcaccttctgctcctactctgtgatggagatgtgcaccaagggcctaggcgcacagacgggtgtcctcaggatgaagggggtgaacctgtcatgtgtgcgcacgtgcatggtggtcgccgaggagcggcccaggattgcgctgacccagtccttctccaagctcttcaaggacctgggcctgccggcccgcgccgtaagcaccacgttcgggtgcagggtcaacgtggccatctgcctccaggtgaggtgcctggggctgcggttctcgaaagctggctgttggcagcatggagacccagtttcccagttgttaatgtgccgttttgtagccgcctgatctatttctccttctctgggcctttgatatctcatttccatgtaacattttagcttcaagggttttatttttaaagatgttctattctagttggagaaaggcttatttggaaaaaaaacacattgtttttgaacagtgactaataactgtaagactctctaagttagatataaaacacagctaagttcttaaagcaagattgaacttactgttttaagatatctagcaatattaaattgaaacattaataaatgtggtaatttgtgttgactcaaattcatttctgaaaccatgaaatgtcttattaaaaggaagcaccaagtttcaggccaggagtggtggctcatgcctataatcccagcactttgggaggctgaggcaggcggattacctgaggtcaggaattcgagaccagcctggacaatatgatgagaccccgtctctactaaaaatacaaaaattagctggctggtggtgcgcgcctgttgtcccggctacttgggaggttgaggcacaagaatcgcttgaacctggcaagaggaggttgcagcgagccaagatctcaccactgcactccagcctgggtgacagagcgagaccctgtctc

SEQ ID NO: 11821 - protein, 212 aa, Homo sapiens
MFSTKPPHLASEQKSCPCCGWKRSVLEEGKSGVPRVLGGRAEPHEPSLSQCLLGTPISAGAPAGAGEQRVPVAVGRQPVQGPRHLLLLLCDGDVHQGPRRTDGCPQDEGGEPVMCAHVHGGRRGAAQDCADPVLLQALQGPGPAGPRRKHHVRVQGQRGHLPPGEVPGAAVLESWLLAAWRPSFPVVNVPFCSRLIYFSFSGPLISHFHVTF

SEQ ID NO: 11822 - DNA, 701 bp, Homo sapiens
cctggcagccctgccacccccgccttcggctcccattggctgccacggcctgcagtgggctgcaccagggttcatccatcctccctgggcagagggaataagaggctgcctctgcccaccagtcctgccgcccaggacccgcagcagagacgacgcctgcagcaaggagaccaggaaggggtgagacaaggaagaggatgtctgagctggagaaggccatggtggccctcatcgacgttttccaccaatattctggaagggagggagacaagcacaagctgaagaaatccgaactgaaggagctcatcaacaatgagctttcccatttcttagagtgagaaggtgctgttgagaagttgggctgcaggaacccaccatctctggacgctgcggaccatcctctacaggggctgctgtccctgccagaagtacaagcaacacaattgccagactttcctgccaccaaaaggaggaatcatcatctaataattggattgcggggggtaaggccttgggcccccaggcagtatctggacataccccacctgtacccaccagcagggacagagacagcaggaaggctattgggctctcaagccctggactatgtgccctcctgaccccatgcccctgcctggggaaagggagcagtgaggacggaagtggagagttggtgatcctgggctcccctggccctctgt

SEQ ID NO: 11823 - protein, 46 aa, Homo sapiens
MSELEKAMVALIDVFHQYSGREGDKHKLKKSELKELINNELSHFLE

SEQ ID NO: 11824 - DNA, 1215 bp, Homo sapiens
cctggcagccctgccacccccgccttcggctcccattggctgccacggcctgcagtgggctgcaccagggttcatccatcctccctgggcagagggaataagaggctgcctctgcccaccagtcctgccgcccaggacccgcagcagagacgacgcctgcagcaaggagaccaggaaggggtgagacaaggaagaggatgtctgagctggagaaggccatggtggccctcatcgacgttttccaccaatattctggaagggagggagacaagcacaagctgaagaaatccgaactgaaggagctcatcaacaatgagctttcccatttcttagaggaaatcaaagagcaggaggttgtggacaaagtcatggaaacactggacaatgatggagacggcgaatgtgacttccaggaattcatggcctttgttgccatggttactactgcctgccacgagttctttgaacatgagtgagattagaaagcagccaaacctttcctgtaacagagacggtcatgcaagaaagcagacagcaagggcttgcagcctagtaggagctgagctttccagccgtgttgtagctaattaggaagcttgatttgctttgtgattgaaaaattgaaaacctctttccaaaggctgttttaacggcctgcatcattctttctgctatattaggcctgtgtgtaagctgactggccccagggactcttgttaacagtaacttaggagtcaggtctcagtgataaagcgtgcaccgtgcagcccgccatggccgtgtagaccctaacccggagggaaccctgactacagaaattaccccggggcacccttaaaacttccactacctttaaaaaacaaagccttatccagcattatttgaaaacactgctgttctttaaatgcgttcctcatccatgcagataacagctggttggccggtgtggccctgcaagggcgtggtggcttcggcctgcttcccgggatgcgcctgatcaccaggtgaacgctcagcgctggcagcgctcctggaaaaagcaactccatcagaactcgcaatccgagccagctctgggggctccagcgtggcctccgtgacccatgcgattcaagtcgcggctgcaggatccttgcctccaacgtgcctccagcacatgcggcttccgagggcactaccgggggctctgagccaccgcgagggcctgcgttcaat

SEQ ID NO: 11825 - protein, 92 aa, Homo sapiens; identical to SEQ ID NO: 1968

SEQ ID NO: 11826 - DNA, 1324 bp, Homo sapiens
ttgctcctagtcactgtctcactttcagattgattttaacagcttgcagttgatggtttgctcacctgcactctaccacctcatcttggagccttgcaggaacagagagggaccctgtggggattaattcaggggaaattaatccctgaattcccttgctgctctgcctctgtatttttgccagtttccctgttggcccaacccagccagaattcagagggcatgggaatatatccccgtggcccacacggacagagaaggcaggcccacagctgtctaagaggccggtggaaggattatgataaaagtgcaaattcccagaatgcccctccaggccatgcctgctgctctgagcttgaaaagagtgccaaggccattccatcccccttgtctgggttgaggtctgtattgataacatatgaaatgttttaggatgaggtatagatgagaaggcaactttcctttgcgagcccctaggatgtctgagctggagaaggccatggtggccctcatcgacgttttccaccaatattctggaagggagggagacaagcacaagctgaagaaatccgaactgaaggagctcatcaacaatgagctttcccatttcttagaggaaatcaaagagcaggaggttgtggacaaagtcatggaaacactggacaatgatggagacggcgaatgtgacttccaggaattcatggcctttgttgccatggttactactgcctgccacgagttctttgaacatgagtgagattagaaagcagccaaacctttcctgtaacagagacggtcatgcaagaaagcagacagcaagggcttgcagcctagtaggagctgagctttccagccgtgttgtagctaattaggaagcttgatttgctttgtgattgaaaaattgaaaacctctttccaaaggctgttttaacggcctgcatcattctttctgctatattaggcctgtgtgtaagctgactggccccagggactcttgttaacagtaacttaggagtcaggtctcagtgataaagcgtgcaccgtgcagcccgccatggccgtgtagaccctaacccggagggaaccctgactacagaaattaccccggggcacccttaaaacttccactacctttaaaaaacaaagccttatccagcattatttgaaaacactgctgttctttaaatgcgttcctcatccatgcagataacagctggttggccggtgtggccctgcaagggcgtggtggcttcggcctgcttcccgggatgcgcctgatcaccaggtgaacgctcagcgctggcagcgctcctggaaaaagcaa

SEQ ID NO: 11827 - protein, 92 aa, Homo sapiens; identical to SEQ ID NO: 1968

SEQ ID NO: 11828 - DNA, 1137 bp, Homo sapiens
cctggcagccctgccacccccgccttcggctcccattggctgccacggcctgcagtgggctgcaccagggttcatccatcctccctgggcagagggaataagaggctgcctctgcccaccagtcctgccgcccaggacccgcagcagagacgacgcctgcagcaaggagaccaggaaggggtgagacaaggaagaggatgtctgagctggagaaggccatggtggccctcatcgacgttttccaccaatattctggaagggagggagacaagcacaagctgaagaaatccgaactgaaggagctcatcaacaatgagctttcccatttcttagagagatggagtctccctatgttgcccaggctggtctcaaacttcctgtgctcaagttatcctcctgccttagcttcccaaagtgctgggattacaggaaatcaaagagcaggaggttgtggacaaagtcatggaaacactggacaatgatggagacggcgaatgtgacttccaggaattcatggcctttgttgccatggttactactgcctgccacgagttctttgaacatgagtgagattagaaagcagccaaacctttcctgtaacagagacggtcatgcaagaaagcagacagcaagggcttgcagcctagtaggagctgagctttccagccgtgttgtagctaattaggaagcttgatttgctttgtgattgaaaaattgaaaacctctttccaaaggctgttttaacggcctgcatcattctttctgctatattaggcctgtgtgtaagctgactggccccagggactcttgttaacagtaacttaggagtcaggtctcagtgataaagcgtgcaccgtgcagcccgccatggccgtgtagaccctaacccggagggaaccctgactacagaaattaccccggggcacccttaaaacttccactacctttaaaaaacaaagccttatccagcattatttgaaaacactgctgttctttaaatgcgttcctcatccatgcagataacagctggttggccggtgtggccctgcaagggcgtggtggcttcggcctgcttcccgggatgcgcctgatcaccaggtgaacgctcagcgctggcagcgctcctggaaaaagcaa

SEQ ID NO: 11829 - protein, 115 aa, Homo sapiens
MESPYVAQAGLKLPVLKLSSCLSFPKCWDYRKSKSRRLWTKSWKHWTMMETANVTSRNSWPLLPWLLLPATSSLNMSEIRKQPNLSCNRDGHARKQTARACSLVGAELSSRVVAN

SEQ ID NO: 11830 - DNA, 1172 bp, Homo sapiens
ttgctcctagtcactgtctcactttcagattgattttaacagcttgcagttgatggtttgctcacctgcactctaccacctcatcttggagccttgcaggaacagagagggaccctgtggggattaattcaggggaaattaatccctgaattcccttgctgctctgcctctgtatttttgccagtttccctgttggcccaacccagccagaattcagagggcatgggaatatatccccgtggcccacacggacagagaaggcaggcccacagctgtctaagaggccggtggaaggattatgataaaagtgcaaattcccagaatgcccctccaggccatgcctgctgctctgagcttgaaaagagtgccaaggccattccatcccccttgtctgggttgaggtctgtattgataacatatgaaatgttttaggatgaggtatagatgagaaggcaactttcctttgcgagcccctaggatgtctgagctggagaaggccatggtggccctcatcgacgttttccaccaatattctggaagggagggagacaagcacaagctgaagaaatccgaactgaaggagctcatcaacaatgagctttcccatttcttagaggaaatcaaagagcaggaggttgtggacaaagtcatggaaacactggacaatgatggagacggcgaatgtgacttccaggaattcatggcctttgttgccatggttactactgcctgccacgagttctttgaacatgagtgagattagaaagcagccaaacctttcctgtaacagagacggtcatgcaagaaagcagacagcaagggcttgcagcctagtaggagctgagctttccagccgtgttgtagctaattaggaagcttgatttgctttgtgattgaaaaattgaaaacctctttccaaaggctgttttaacggcctgcatcattctttctgctatattaggcctgtgtgtaagctgactggccccagggactcttgttaacagtaacttaggagtcaggtctcagtgataaagcgtgcaccgtgcagcccgccatggccgtgtagaccctaacccggagggaaccctgactacagaaattaccccggggcacccttaaaacttccactacctttaaaaaacaaagccttatccagcattatttgaaaacac

SEQ ID NO: 11831 - protein, 92 aa, Homo sapiens; identical to SEQ ID NO: 1968

SEQ ID NO: 11832 - DNA, 985 bp, Homo sapiens
cctggcagccctgccacccccgccttcggctcccattggctgccacggcctgcagtgggctgcaccagggttcatccatcctccctgggcagagggaataagaggctgcctctgcccaccagtcctgccgcccaggacccgcagcagagacgacgcctgcagcaaggagaccaggaaggggtgagacaaggaagaggatgtctgagctggagaaggccatggtggccctcatcgacgttttccaccaatattctggaagggagggagacaagcacaagctgaagaaatccgaactgaaggagctcatcaacaatgagctttcccatttcttagagagatggagtctccctatgttgcccaggctggtctcaaacttcctgtgctcaagttatcctcctgccttagcttcccaaagtgctgggattacaggaaatcaaagagcaggaggttgtggacaaagtcatggaaacactggacaatgatggagacggcgaatgtgacttccaggaattcatggcctttgttgccatggttactactgcctgccacgagttctttgaacatgagtgagattagaaagcagccaaacctttcctgtaacagagacggtcatgcaagaaagcagacagcaagggcttgcagcctagtaggagctgagctttccagccgtgttgtagctaattaggaagcttgatttgctttgtgattgaaaaattgaaaacctctttccaaaggctgttttaacggcctgcatcattctttctgctatattaggcctgtgtgtaagctgactggccccagggactcttgttaacagtaacttaggagtcaggtctcagtgataaagcgtgcaccgtgcagcccgccatggccgtgtagaccctaacccggagggaaccctgactacagaaattaccccggggcacccttaaaacttccactacctttaaaaaacaaagccttatccagcattatttgaaaacac

SEQ ID NO: 11833 - protein, 115 aa, Homo sapiens; identical to SEQ ID NO: 11829

SEQ ID NO: 11834 - DNA, 891 bp, Homo sapiens
cctggcagccctgccacccccgccttcggctcccattggctgccacggcctgcagtgggctgcaccagggttcatccatcctccctgggcagagggaataagaggctgcctctgcccaccagtcctgccgcccaggacccgcagcagagacgacgcctgcagcaaggagaccaggaaggggtgagacaaggaagaggatgtctgagctggagaaggccatggtggccctcatcgacgttttccaccaatattctggaagggagggagacaagcacaagctgaagaaatccgaactgaaggagctcatcaacaatgagctttcccatttcttagaggaaatcaaagagcaggaggttgtggacaaagtcatggaaacactggacaatgatggagacggcgaatgtgacttccaggaattcatggcctttgttgccatggttactactgcctgccacgagttctttgaacatgagtgagattagaaagcagccaaacctttcctgtaacagagacggtcatgcaagaaagcagacagcaagggcttgcagcctagtaggagctgagctttccagccgtgttgtagctaattaggaagcttgatttgctttgtgattgaaaaattgaaaacctctttccaaaggctgttttaacggcctgcatcattctttctgctatattaggcctgtgtgtaagctgactggccccagggactcttgttaacagtaacttaggagtcaggtctcagtgataaagcgtgcaccgtgcagcccgccatggccgtgtagaccctaacccggagggaaccctgactacagaaattaccccggggcacccttaaaacttccactacctttaaaaaacaaagccttatccagcattatttgaaaacac

SEQ ID NO: 11835 - protein, 92 aa, Homo sapiens; identical to SEQ ID NO: 1968

SEQ ID NO: 11836 - DNA, 661 bp, Homo sapiens
cctggcagccctgccacccccgccttcggctcccattggctgccacggcctgcagtgggctgcaccagggttcatccatcctccctgggcagagggaataagaggctgcctctgcccaccagtcctgccgcccaggacccgcagcagagacgacgcctgcagcaaggagaccaggaaggggtgagacaaggaagaggatgtctgagctggagaaggccatggtggccctcatcgacgttttccaccaatattctggaagggagggagacaagcacaagctgaagaaatccgaactgaaggagctcatcaacaatgagctttcccatttcttagaggaaatcaaagagcaggaggttgtggacaaagtcatggaaacactggacaatgatggagacggcgaatgtgacttccaggaattcatggcctttgttgccatggttactactgcctgccacgagttctttgaacatgagtgagattagaaagcagccaaacctttcctgtaacagagacggtcatgcaagaaagcagacagcaagggcttgcagcctagtaggagctgagctttccagccgtgttgtagctaattaggaagcttgatttgctttgtgattgaaaaattgaaaacctctttccaaaggctgttttaacggcctgcatc

SEQ ID NO: 11837 - protein, 92 aa, Homo sapiens; identical to SEQ ID NO: 1968

SEQ ID NO: 11838 - DNA, 929 bp, Homo sapiens
ttgctcctagtcactgtctcactttcagattgattttaacagcttgcagttgatggtttgctcacctgcactctaccacctcatcttggagccttgcaggaacagagagggaccctgtggggattaattcaggggaaattaatccctgaattcccttgctgctctgcctctgtatttttgccagtttccctgttggcccaacccagccagaattcagagggcatgggaatatatccccgtggcccacacggacagagaaggcaggcccacagctgtctaagaggccggtggaaggattatgataaaagtgcaaattcccagaatgcccctccaggccatgcctgctgctctgagcttgaaaagagtgccaaggccattccatcccccttgtctgggttgaggtctgtattgataacatatgaaatgttttaggatgaggtatagatgagaaggcaactttcctttgcgagcccctaggatgtctgagctggagaaggccatggtggccctcatcgacgttttccaccaatattctggaagggagggagacaagcacaagctgaagaaatccgaactgaaggagctcatcaacaatgagctttcccatttcttagaggaaatcaaagagcaggaggttgtggacaaagtcatggaaacactggacaatgatggagacggcgaatgtgacttccaggaattcatggcctttgttgccatggttactactgcctgccacgagttctttgaacatgagtgagattagaaagcagccaaacctttcctgtaacagagacggtcatgcaagaaagcagacagcaagggcttgcagcctagtaggagctgagctttccagccgtgttgtagctaattaggaagcttgatttgctttgtgattgaaaaattgaaaacctctttccaaaggctgtttt

SEQ ID NO: 11839 - protein, 92 aa, Homo sapiens; identical to SEQ ID NO: 1968

SEQ ID NO: 11840 - DNA, 742 bp, Homo sapiens
cctggcagccctgccacccccgccttcggctcccattggctgccacggcctgcagtgggctgcaccagggttcatccatcctccctgggcagagggaataagaggctgcctctgcccaccagtcctgccgcccaggacccgcagcagagacgacgcctgcagcaaggagaccaggaaggggtgagacaaggaagaggatgtctgagctggagaaggccatggtggccctcatcgacgttttccaccaatattctggaagggagggagacaagcacaagctgaagaaatccgaactgaaggagctcatcaacaatgagctttcccatttcttagagagatggagtctccctatgttgcccaggctggtctcaaacttcctgtgctcaagttatcctcctgccttagcttcccaaagtgctgggattacaggaaatcaaagagcaggaggttgtggacaaagtcatggaaacactggacaatgatggagacggcgaatgtgacttccaggaattcatggcctttgttgccatggttactactgcctgccacgagttctttgaacatgagtgagattagaaagcagccaaacctttcctgtaacagagacggtcatgcaagaaagcagacagcaagggcttgcagcctagtaggagctgagctttccagccgtgttgtagctaattaggaagcttgatttgctttgtgattgaaaaattgaaaacctctttccaaaggctgtttt

SEQ ID NO: 11841 - protein, 115 aa, Homo sapiens; identical to SEQ ID NO: 11829

SEQ ID NO: 11842 - DNA, 1185 bp, Homo sapiens
ctggagtcggtgcctgaggttgcagccgagagtgtgcgccagcccgcggcccagccgaagctctttcccgccgcctctccgcgcctcgcccaggttcagctccgcctgaccctccgcttggcacggtcccctgaccctcagtccggcctggtccggccttccagccgccccggggacgatgaacggaggataaatgggtgccaggtggccagtgagggcccgaggaccacgcagcagagtcccccacgggcctgagcctgagagctcagaggattcctgccaggcctcagaactgtgtgtgcgggacagggtggctggcacgagatgtgtgggactgggacgcttcctttggggaccagaggaacattaggggccggtcagacacgtagggggcagtgaggaaacggggtaaagtggaccatgcaggctgcagagggtgggccttgggctggccggggttgctgggtggccccttccccatgggcctccacaagcactcaggccactggcacgttgggccaggcagaaggtccacatggcagggctgcctggaacaccgctgccactgtggctccaggaggcccttgggagcatgaggagagctggactcgctcatctgttcttgcaccaccatccagaatgccccctttgcaaggcctgctgcagtccccagtctgaccagcaagtcccggggtcacccttgctgaaccttgtgctccaggggtcctcctcctctaggaccagcttgccacggtttctcagagcccaggtgccctctgacctgccatgcggaggtgggatttgatactgtacattgtcttgatgcctgtttttttatgttttcattaagggtttttagtttttggttgggttgacactaacttttcttaagatgctgtgagaatcatttcatccaaatgccaaataaacttgtgttccggaagaggcatggttagtccttggtgtggcccccacggctgccacaggctaaggtggaagaggctgggtacccacctttcagcagaatgcacctagggtttgcagcccttgcaggcgtccatcaaaccccctgaggaccaggcagagctgagcctggagcccctaggtggagtgtgcagggagagcagcagccctgagctgcctacagctatcctgcagcacccagccctgcttggggcatcggct

SEQ ID NO: 11843 - protein, 58 aa, Homo sapiens
MGARWPVRARGPRSRVPHGPEPESSEDSCQASELCVRDRVAGTRCVGLGRFLWGPEEH

SEQ ID NO: 11844 - DNA, 3324 bp, Homo sapiens
cttgcgcgcagctggagtcggtgcctgaggttgcagccgagagtgtgcgccagcccgcggcccagccgaagctgggcctcacgccgctgcatctttctgacgacggagagggtgggactttccatttccacgaccctccacctccctacacggcatacaagtacccggacatcggccagcccgacgaccctccgccgccctacgaggcctccatccacccggacagtgtgttctatgaccctgcagacgatgatgcttttgagcctgtggaggtcagcctgccagcccctggggatggtgggagtgaaggtgcattactccggcgcctggagcagcctctgcccactgcgggggcctctctggcagacctggaagactctgccgacagcagcagcgccctgctcgtgccccctgaccctgcccagagcgggagcaccccagctgcagaggcactgccagggggtggccgccacagccgcagctccctcaatactgtggtgtagacggcctggcctgtaccccaacggtctgggagcacctgtctgttgtagaaaacaccggtccctggggagacttgaaaggcccctgtcccagcctggacgccacgcactgccgcacgtcactggcgggctcgcgtgtgtacatagagaccacagcccgccttctgccaaaagaagtgatggcctgcaccgagcttccttgagggcttcagaaacatgcatagctttggatcactgtcttctcctttataaatggcagaagagtgacaaaattcattcagaccgcacatgttagaggcagggaatgaagaaggtactgtgggccatggccacacctgatgcgtttttggtgggcttacttggtgcagtgtgctgtccagagagacctgctgacccagtctgggacaggcacagtgggagctgccacagtgccccttgctggccgccctcaggagggggcctctggaccgtcagtgtggcgtaggcagtgggtctgcttcagggaggcagcctcttgactttgtcacaacggttgcactgaagatggcccccacaagcccagttgtgaatatcaaggtgaccctgcccctggctgggagctcccctggggctctggaacctgaagccctgagaaggagagcttggaaggaggttgagctcttcactgtgtctttccatctgggctctgcagcccagctctgtggcaggaggcctgaccccaccccatcagtccctctcccagcattgctgtgcatggctccctcaggaagaagctctggagtggggccgaggccccagatgctctgctggggtctggggactgagctgcctcctgtctctccactctggagccctgggctcttgcctcctgttgaattgcccctgggcctgcccccggccccatttgtgccataaagggttgcttcattgcaggaggggtggctgaaaccaccatcctgggctgcatctatctccttaaagtccactccttacatcaccgccactactgcagctcagtgcccagcggccgcatgcacacctcccggcccctcctcagcagcgcaggggctgggggcccttcctggcacccttttgcctgacggaccctgttgcctgctcctgggcagtggttttgttgcctgacacagggcctttaacatttctgaggtttggagattaagcgggttctgtgcgatttttagcacatccatatcttttctacgttgaatgtctggatctttcctttgtatgtttgtgtctctgtgtgtgtatgtggccaagcgtctgcaggtgagggtggcacatggaacttcacgggtcactgggggcccactcttccagggtcatcgatgcatcctgggctgtgctgaggcagtgctgtctcgctcagtctttccagaccagcggggcagcacctgggaggcctgtctgaagcatgcagttctgtggtgctgctcggggatggactccatgcacagtccacttcttgacacattctcacactgtggctggagacccattttttccatcccatgtggaatgagaatcttgagttgcccacagacagacttgacctttgtgccagaactgtccagagctgtgagttttgttactgaattgcctgtccctgagcttggcctgctggagcatgatgctggaggctgtgtgcgggcaggcttgtgctccccttggagaagggctgctacttaacaaggaagtcctggccacaggagtcccctactggctgcagaggacgaagcaggaagcatgccgtggatcccacatgcactggggcagggcagccaggttccagagcagcaggcatgtgcattatgggtgccaggtggccagtgagggcccgaggaccacgcagcagagtcccccacgggcctgagcctgagagctcagaggattcctgccaggcctcagaactgtgtgtgcgggacagggtggctggcacgagatgtgtgggactgggacgcttcctttggggaccagaggaacattaggggccggtcagacacgtagggggcagtgaggaaacggggtaaagtggaccatgcaggctgcagagggtgggccttgggctggccggggttgctgggtggccccttccccatgggcctccacaagcactcaggccactggcacgttgggccaggcagaaggtccacatggcagggctgcctggaacaccgctgccactgtggctccaggaggcccttgggagcatgaggagagctggactcgctcatctgttcttgcaccaccatccagaatgccccctttgcaaggcctgctgcagtccccagtctgaccagcaagtcccggggtcacccttgctgaaccttgtgctccaggggtcctcctcctctaggaccagcttgccacggtttctcagagcccaggtgccctctgacctgccatgcggaggtgggatttgatactgtacattgtcttgatgcctgtttttttatgttttcattaagggtttttagtttttggttgggttgacactaacttttcttaagatgctgtgagaatcatttcatccaaatgccaaataaacttgtgttccggaagaggcatggttagtccttggtgtggcccccacggctgccacaggctaaggtggaagaggctgggtacccacctttcagcagaatgcacctagggtttgcagcccttgcaggcgtccatcaaaccccctgaggaccaggcagagctgagcctggagcccctaggtggagtgtgcagggagagcagcagccctgagctgcctacagctatcctgcagcacccagccctgcttggggcatcggct

SEQ ID NO: 11845 - protein, 186 aa, Homo sapiens
MTLQTMMLLSLWRSACQPLGMVGVKVHYSGAWSSLCPLRGPLWQTWKTLPTAAAPCSCPLTLPRAGAPQLQRHCQGVAATAAAPSILWCRRPGLYPNGLGAPVCCRKHRSLGRLERPLSQPGRHALPHVTGGLACVHRDHSPPSAKRSDGLHRASLRASETCIALDHCLLLYKWQKSDKIHSDRTC

SEQ ID NO: 11846 - DNA, 3409 bp, Homo sapiens
cttgcgcgcagctggagtcggtgcctgaggttgcagccgagagtgctgcgccagcggcgccgggagcgcatcgagtccctgattggagcaaacttgcaccacttcaacctcggccgcaggatccctggctttgattacggcccagacgggtttggcacgggcctcacgccgctgcatctttctgacgacggagagggtgggactttccatttccacgaccctccacctccctacacggcatacaagtacccggacatcggccagcccgacgaccctccgccgccctacgaggcctccatccacccggacagtgtgttctatgaccctgcagacgatgatgcttttgagcctgtggaggtcagcctgccagcccctggggatggtgggagtgaaggtgcattactccggcgcctggagcagcctctgcccactgcgggggcctctctggcagacctggaagactctgccgacagcagcagcgccctgctcgtgccccctgaccctgcccagagcgggagcaccccagctgcagaggcactgccagggggtggccgccacagccgcagctccctcaatactgtggtgtagacggcctggcctgtaccccaacggtctgggagcacctgtctgttgtagaaaacaccggtccctggggagacttgaaaggcccctgtcccagcctggacgccacgcactgccgcacgtcactggcgggctcgcgtgtgtacatagagaccacagcccgccttctgccaaaagaagtgatggcctgcaccgagcttccttgagggcttcagaaacatgcatagctttggatcactgtcttctcctttataaatggcagaagagtgacaaaattcattcagaccgcacatgttagaggcagggaatgaagaaggtactgtgggccatggccacacctgatgcgtttttggtgggcttacttggtgcagtgtgctgtccagagagacctgctgacccagtctgggacaggcacagtgggagctgccacagtgccccttgctggccgccctcaggagggggcctctggaccgtcagtgtggcgtaggcagtgggtctgcttcagggaggcagcctcttgactttgtcacaacggttgcactgaagatggcccccacaagcccagttgtgaatatcaaggtgaccctgcccctggctgggagctcccctggggctctggaacctgaagccctgagaaggagagcttggaaggaggttgagctcttcactgtgtctttccatctgggctctgcagcccagctctgtggcaggaggcctgaccccaccccatcagtccctctcccagcattgctgtgcatggctccctcaggaagaagctctggagtggggccgaggccccagatgctctgctggggtctggggactgagctgcctcctgtctctccactctggagccctgggctcttgcctcctgttgaattgcccctgggcctgcccccggccccatttgtgccataaagggttgcttcattgcaggaggggtggctgaaaccaccatcctgggctgcatctatctccttaaagtccactccttacatcaccgccactactgcagctcagtgcccagcggccgcatgcacacctcccggcccctcctcagcagcgcaggggctgggggcccttcctggcacccttttgcctgacggaccctgttgcctgctcctgggcagtggttttgttgcctgacacagggcctttaacatttctgaggtttggagattaagcgggttctgtgcgatttttagcacatccatatcttttctacgttgaatgtctggatctttcctttgtatgtttgtgtctctgtgtgtgtatgtggccaagcgtctgcaggtgagggtggcacatggaacttcacgggtcactgggggcccactcttccagggtcatcgatgcatcctgggctgtgctgaggcagtgctgtctcgctcagtctttccagaccagcggggcagcacctgggaggcctgtctgaagcatgcagttctgtggtgctgctcggggatggactccatgcacagtccacttcttgacacattctcacactgtggctggagacccattttttccatcccatgtggaatgagaatcttgagttgcccacagacagacttgacctttgtgccagaactgtccagagctgtgagttttgttactgaattgcctgtccctgagcttggcctgctggagcatgatgctggaggctgtgtgcgggcaggcttgtgctccccttggagaagggctgctacttaacaaggaagtcctggccacaggagtcccctactggctgcagaggacgaagcaggaagcatgccgtggatcccacatgcactggggcagggcagccaggttccagagcagcaggcatgtgcattatgggtgccaggtggccagtgagggcccgaggaccacgcagcagagtcccccacgggcctgagcctgagagctcagaggattcctgccaggcctcagaactgtgtgtgcgggacagggtggctggcacgagatgtgtgggactgggacgcttcctttggggaccagaggaacattaggggccggtcagacacgtagggggcagtgaggaaacggggtaaagtggaccatgcaggctgcagagggtgggccttgggctggccggggttgctgggtggccccttccccatgggcctccacaagcactcaggccactggcacgttgggccaggcagaaggtccacatggcagggctgcctggaacaccgctgccactgtggctccaggaggcccttgggagcatgaggagagctggactcgctcatctgttcttgcaccaccatccagaatgccccctttgcaaggcctgctgcagtccccagtctgaccagcaagtcccggggtcacccttgctgaaccttgtgctccaggggtcctcctcctctaggaccagcttgccacggtttctcagagcccaggtgccctctgacctgccatgcggaggtgggatttgatactgtacattgtcttgatgcctgtttttttatgttttcattaagggtttttagtttttggttgggttgacactaacttttcttaagatgctgtgagaatcatttcatccaaatgccaaataaacttgtgttccggaagaggcatggttagtccttggtgtggcccccacggctgccacaggctaaggtggaagaggctgggtacccacctttcagcagaatgcacctagggtttgcagcccttgcaggcgtccatcaaaccccctgaggaccaggcagagctgagcctggagcccctaggtggagtgtgcagggagagcagcagccctgagctgcctacagctatcctgcagcacccagccctgcttggggcatcggct

SEQ ID NO: 11847 - protein, 186 aa, Homo sapiens; identical to SEQ ID NO: 11845

SEQ ID NO: 11848 - DNA, 3211 bp, Homo sapiens
atcttgcgcgcagctggagtcggtgcctgaggttgcagccgagagtgtgcgccagcccgcggcccagccgaagctcctccgccgccctacgaggcctccatccacccggacagtgtgttctatgaccctgcagacgatgatgcttttgagcctgtggaggtcagcctgccagcccctggggatggtgggagtgaaggtgcattactccggcgcctggagcagcctctgcccactgcgggggcctctctggcagacctggaagactctgccgacagcagcagcgccctgctcgtgccccctgaccctgcccagagcgggagcaccccagctgcagaggcactgccagggggtggccgccacagccgcagctccctcaatactgtggtgtagacggcctggcctgtaccccaacggtctgggagcacctgtctgttgtagaaaacaccggtccctggggagacttgaaaggcccctgtcccagcctggacgccacgcactgccgcacgtcactggcgggctcgcgtgtgtacatagagaccacagcccgccttctgccaaaagaagtgatggcctgcaccgagcttccttgagggcttcagaaacatgcatagctttggatcactgtcttctcctttataaatggcagaagagtgacaaaattcattcagaccgcacatgttagaggcagggaatgaagaaggtactgtgggccatggccacacctgatgcgtttttggtgggcttacttggtgcagtgtgctgtccagagagacctgctgacccagtctgggacaggcacagtgggagctgccacagtgccccttgctggccgccctcaggagggggcctctggaccgtcagtgtggcgtaggcagtgggtctgcttcagggaggcagcctcttgactttgtcacaacggttgcactgaagatggcccccacaagcccagttgtgaatatcaaggtgaccctgcccctggctgggagctcccctggggctctggaacctgaagccctgagaaggagagcttggaaggaggttgagctcttcactgtgtctttccatctgggctctgcagcccagctctgtggcaggaggcctgaccccaccccatcagtccctctcccagcattgctgtgcatggctccctcaggaagaagctctggagtggggccgaggccccagatgctctgctggggtctggggactgagctgcctcctgtctctccactctggagccctgggctcttgcctcctgttgaattgcccctgggcctgcccccggccccatttgtgccataaagggttgcttcattgcaggaggggtggctgaaaccaccatcctgggctgcatctatctccttaaagtccactccttacatcaccgccactactgcagctcagtgcccagcggccgcatgcacacctcccggcccctcctcagcagcgcaggggctgggggcccttcctggcacccttttgcctgacggaccctgttgcctgctcctgggcagtggttttgttgcctgacacagggcctttaacatttctgaggtttggagattaagcgggttctgtgcgatttttagcacatccatatcttttctacgttgaatgtctggatctttcctttgtatgtttgtgtctctgtgtgtgtatgtggccaagcgtctgcaggtgagggtggcacatggaacttcacgggtcactgggggcccactcttccagggtcatcgatgcatcctgggctgtgctgaggcagtgctgtctcgctcagtctttccagaccagcggggcagcacctgggaggcctgtctgaagcatgcagttctgtggtgctgctcggggatggactccatgcacagtccacttcttgacacattctcacactgtggctggagacccattttttccatcccatgtggaatgagaatcttgagttgcccacagacagacttgacctttgtgccagaactgtccagagctgtgagttttgttactgaattgcctgtccctgagcttggcctgctggagcatgatgctggaggctgtgtgcgggcaggcttgtgctccccttggagaagggctgctacttaacaaggaagtcctggccacaggagtcccctactggctgcagaggacgaagcaggaagcatgccgtggatcccacatgcactggggcagggcagccaggttccagagcagcaggcatgtgcattatgggtgccaggtggccagtgagggcccgaggaccacgcagcagagtcccccacgggcctgagcctgagagctcagaggattcctgccaggcctcagaactgtgtgtgcgggacagggtggctggcacgagatgtgtgggactgggacgcttcctttggggaccagaggaacattaggggccggtcagacacgtagggggcagtgaggaaacggggtaaagtggaccatgcaggctgcagagggtgggccttgggctggccggggttgctgggtggccccttccccatgggcctccacaagcactcaggccactggcacgttgggccaggcagaaggtccacatggcagggctgcctggaacaccgctgccactgtggctccaggaggcccttgggagcatgaggagagctggactcgctcatctgttcttgcaccaccatccagaatgccccctttgcaaggcctgctgcagtccccagtctgaccagcaagtcccggggtcacccttgctgaaccttgtgctccaggggtcctcctcctctaggaccagcttgccacggtttctcagagcccaggtgccctctgacctgccatgcggaggtgggatttgatactgtacattgtcttgatgcctgtttttttatgttttcattaagggtttttagtttttggttgggttgacactaacttttcttaagatgctgtgagaatcatttcatccaaatgccaaataaacttgtgttccggaagaggcatggttagtccttggtgtggcccccacggctgccacaggctaaggtggaagaggctgggtacccacctttcagcagaatgcacctagggtttgcagcccttgcaggcgtccatcaaaccccctgaggaccaggcagagctgagcctggagcccctaggtggagtgtgcagggagagcagcagccctgagctgcctacagctatcctgcagcacccagccctgcttggggcatcggct

SEQ ID NO: 11849 - protein, 186 aa, Homo sapiens; identical to SEQ ID NO: 11845

SEQ ID NO: 11850 - DNA, 3058 bp, Homo sapiens
ccatcttgcgcgcagctggagtcggtgcctgaggttgcagccgagagtgtgcgccagcccgcggcccagccgaagctctttcccgccgcctctctggcagacctggaagactctgccgacagcagcagcgccctgctcgtgccccctgaccctgcccagagcgggagcaccccagctgcagaggcactgccagggggtggccgccacagccgcagctccctcaatactgtggtgtagacggcctggcctgtaccccaacggtctgggagcacctgtctgttgtagaaaacaccggtccctggggagacttgaaaggcccctgtcccagcctggacgccacgcactgccgcacgtcactggcgggctcgcgtgtgtacatagagaccacagcccgccttctgccaaaagaagtgatggcctgcaccgagcttccttgagggcttcagaaacatgcatagctttggatcactgtcttctcctttataaatggcagaagagtgacaaaattcattcagaccgcacatgttagaggcagggaatgaagaaggtactgtgggccatggccacacctgatgcgtttttggtgggcttacttggtgcagtgtgctgtccagagagacctgctgacccagtctgggacaggcacagtgggagctgccacagtgccccttgctggccgccctcaggagggggcctctggaccgtcagtgtggcgtaggcagtgggtctgcttcagggaggcagcctcttgactttgtcacaacggttgcactgaagatggcccccacaagcccagttgtgaatatcaaggtgaccctgcccctggctgggagctcccctggggctctggaacctgaagccctgagaaggagagcttggaaggaggttgagctcttcactgtgtctttccatctgggctctgcagcccagctctgtggcaggaggcctgaccccaccccatcagtccctctcccagcattgctgtgcatggctccctcaggaagaagctctggagtggggccgaggccccagatgctctgctggggtctggggactgagctgcctcctgtctctccactctggagccctgggctcttgcctcctgttgaattgcccctgggcctgcccccggccccatttgtgccataaagggttgcttcattgcaggaggggtggctgaaaccaccatcctgggctgcatctatctccttaaagtccactccttacatcaccgccactactgcagctcagtgcccagcggccgcatgcacacctcccggcccctcctcagcagcgcaggggctgggggcccttcctggcacccttttgcctgacggaccctgttgcctgctcctgggcagtggttttgttgcctgacacagggcctttaacatttctgaggtttggagattaagcgggttctgtgcgatttttagcacatccatatcttttctacgttgaatgtctggatctttcctttgtatgtttgtgtctctgtgtgtgtatgtggccaagcgtctgcaggtgagggtggcacatggaacttcacgggtcactgggggcccactcttccagggtcatcgatgcatcctgggctgtgctgaggcagtgctgtctcgctcagtctttccagaccagcggggcagcacctgggaggcctgtctgaagcatgcagttctgtggtgctgctcggggatggactccatgcacagtccacttcttgacacattctcacactgtggctggagacccattttttccatcccatgtggaatgagaatcttgagttgcccacagacagacttgacctttgtgccagaactgtccagagctgtgagttttgttactgaattgcctgtccctgagcttggcctgctggagcatgatgctggaggctgtgtgcgggcaggcttgtgctccccttggagaagggctgctacttaacaaggaagtcctggccacaggagtcccctactggctgcagaggacgaagcaggaagcatgccgtggatcccacatgcactggggcagggcagccaggttccagagcagcaggcatgtgcattatgggtgccaggtggccagtgagggcccgaggaccacgcagcagagtcccccacgggcctgagcctgagagctcagaggattcctgccaggcctcagaactgtgtgtgcgggacagggtggctggcacgagatgtgtgggactgggacgcttcctttggggaccagaggaacattaggggccggtcagacacgtagggggcagtgaggaaacggggtaaagtggaccatgcaggctgcagagggtgggccttgggctggccggggttgctgggtggccccttccccatgggcctccacaagcactcaggccactggcacgttgggccaggcagaaggtccacatggcagggctgcctggaacaccgctgccactgtggctccaggaggcccttgggagcatgaggagagctggactcgctcatctgttcttgcaccaccatccagaatgccccctttgcaaggcctgctgcagtccccagtctgaccagcaagtcccggggtcacccttgctgaaccttgtgctccaggggtcctcctcctctaggaccagcttgccacggtttctcagagcccaggtgccctctgacctgccatgcggaggtgggatttgatactgtacattgtcttgatgcctgtttttttatgttttcattaagggtttttagtttttggttgggttgacactaacttttcttaagatgctgtgagaatcatttcatccaaatgccaaataaacttgtgttccggaagaggcatggttagtccttggtgtggcccccacggctgccacaggctaaggtggaagaggctgggtacccacctttcagcagaatgcacctagggtttgcagcccttgcaggcgtccatcaaaccccctgaggaccaggcagagctgagcctggagcccctaggtggagtgtgcagggagagcagcagccctgagctgcctacagctatcctgcagcacccagccctgcttggggcatcggct

SEQ ID NO: 11851 - protein, 160 aa, Homo sapiens [sequence omitted]

SEQ ID NO: 11852 - DNA, 4713 bp, Homo sapiens
ggggcggggcggcgcggcgcggagccgagcaggacggccgccatcttgcgcgcagctggagtcggtgcctgaggttgcagccgagagtgtgcgccagcccgcggcccagccgaagctctttcccgccgcctctccgcgcctcgcccaggttcagctccgcctgaccctccgcttggcacggtcccctgaccctcagtccggcctggtccggccttccagccgccccggggacgatgaacggaggataaatggtgcccaaggcagacagcggcgccttcctgctgctcttcctgctcgtgctcactgtcaccgagccgctgcggccagagctgcggtgcaaccctgggcagtttgcgtgtcgcagcggcaccatccagtgcatccccctcccctggcagtgtgacggctgggcgacttgcgaggatgagagcgacgaagccaactgtccagaagtgaccggggaggtgcgtcctcatcatgggaaggaggctgtggatccgcggcaggggcgggccagaggaggcgacccttcgcacttccacgcggtgaacgtggcgcagcccgttcgcttcagcaggaagtgcccgacagggtggcaccactacgaaggcacggccagctgctaccgggtctacctgagcggggagaactactgggatgccgcgcagacctgccagcgcctgaatggctctctcgccaccttctccactgaccaggagctgcgctttgtcctggcccaggaatgggaccagcccgagcggagctttggttggaaggaccagcgcaagttgtgggttggctatcagtatgttatcactggccggaaccgctccttggaaggtcgctgggaggtggcattcaaaggctcttcagaggtgttcctgcccccagaccccatctttgcctcggccatgtctgagaacgacaacgtgttctgtgcccagcttcagtgcttccatttccccaccctgcggcaccacgacctccacagctggcacgccgagagctgctacgagaagtcttcatttctgtgtaaaagaagtcaaacatgtgttgacatcaaggacaacgtggtggatgaagggttctacttcacccctaagggggacgacccatgcctgagctgcacctgccatggaggggagcctgagatgtgtgtggctgctctctgtgagaggccccagggctgccaacagtaccgcaaggaccccaaagagtgctgcaagttcatgtgtctggacccagatggcaacagtctgtttgactccatggccagcgggatgcgcctggtcgtcagctgcatctcctccttcctcatcctgtcactgctgctcttcatggtccaccggctgcgccagcggcgccgggagcgcatcgagtccctgattggagcaaacttgcaccacttcaacctcggccgcaggatccctggctttgattacggcccagacgggtttggcacgggcctcacgccgctgcatctttctgacgacggagagggtgggactttccatttccacgaccctccacctccctacacggcatacaagtacccggacatcggccagcccgacgaccctccgccgccctacgaggcctccatccacccggacagtgtgttctatgaccctgcagacgatgatgcttttgagcctgtggaggtcagcctgccagcccctggggatggtgggagtgaaggtgcattactccggcgcctggagcagcctctgcccactgcgggggcctctctggcagacctggaagactctgccgacagcagcagcgccctgctcgtgccccctgaccctgcccagagcgggagcaccccagctgcagaggcactgccagggggtggccgccacagccgcagctccctcaatactgtggtgtagacggcctggcctgtaccccaacggtctgggagcacctgtctgttgtagaaaacaccggtccctggggagacttgaaaggcccctgtcccagcctggacgccacgcactgccgcacgtcactggcgggctcgcgtgtgtacatagagaccacagcccgccttctgccaaaagaagtgatggcctgcaccgagcttccttgagggcttcagaaacatgcatagctttggatcactgtcttctcctttataaatggcagaagagtgacaaaattcattcagaccgcacatgttagaggcagggaatgaagaaggtactgtgggccatggccacacctgatgcgtttttggtgggcttacttggtgcagtgtgctgtccagagagacctgctgacccagtctgggacaggcacagtgggagctgccacagtgccccttgctggccgccctcaggagggggcctctggaccgtcagtgtggcgtaggcagtgggtctgcttcagggaggcagcctcttgactttgtcacaacggttgcactgaagatggcccccacaagcccagttgtgaatatcaaggtgaccctgcccctggctgggagctcccctggggctctggaacctgaagccctgagaaggagagcttggaaggaggttgagctcttcactgtgtctttccatctgggctctgcagcccagctctgtggcaggaggcctgaccccaccccatcagtccctctcccagcattgctgtgcatggctccctcaggaagaagctctggagtggggccgaggccccagatgctctgctggggtctggggactgagctgcctcctgtctctccactctggagccctgggctcttgcctcctgttgaattgcccctgggcctgcccccggccccatttgtgccataaagggttgcttcattgcaggaggggtggctgaaaccaccatcctgggctgcatctatctccttaaagtccactccttacatcaccgccactactgcagctcagtgcccagcggccgcatgcacacctcccggcccctcctcagcagcgcaggggctgggggcccttcctggcacccttttgcctgacggaccctgttgcctgctcctgggcagtggttttgttgcctgacacagggcctttaacatttctgaggtttggagattaagcgggttctgtgcgatttttagcacatccatatcttttctacgttgaatgtctggatctttcctttgtatgtttgtgtctctgtgtgtgtatgtggccaagcgtctgcaggtgagggtggcacatggaacttcacgggtcactgggggcccactcttccagggtcatcgatgcatcctgggctgtgctgaggcagtgctgtctcgctcagtctttccagaccagcggggcagcacctgggaggcctgtctgaagcatgcagttctgtggtgctgctcggggatggactccatgcacagtccacttcttgacacattctcacactgtggctggagacccattttttccatcccatgtggaatgagaatcttgagttgcccacagacagacttgacctttgtgccagaactgtccagagctgtgagttttgttactgaattgcctgtccctgagcttggcctgctggagcatgatgctggaggctgtgtgcgggcaggcttgtgctccccttggagaagggctgctacttaacaaggaagtcctggccacaggagtcccctactggctgcagaggacgaagcaggaagcatgccgtggatcccacatgcactggggcagggcagccaggttccagagcagcaggcatgtgcattatgggtgccaggtggccagtgagggcccgaggaccacgcagcagagtcccccacgggcctgagcctgagagctcagaggattcctgccaggcctcagaactgtgtgtgcgggacagggtggctggcacgagatgtgtgggactgggacgcttcctttggggaccagaggaacattaggggccggtcagacacgtagggggcagtgaggaaacggggtaaagtggaccatgcaggctgcagagggtgggccttgggctggccggggttgctgggtggccccttccccatgggcctccacaagcactcaggccactggcacgttgggccaggcagaaggtccacatggcagggctgcctggaacaccgctgccactgtggctccaggaggcccttgggagcatgaggagagctggactcgctcatctgttcttgcaccaccatccagaatgccccctttgcaaggcctgctgcagtccccagtctgaccagcaagtcccggggtcacccttgctgaaccttgtgctccaggggtcctcctcctctaggaccagcttgccacggtttctcagagcccaggtgccctctgacctgccatgcggaggtgggatttgatactgtacattgtcttgatgcctgtttttttatgttttcattaagggtttttagtttttggttgggttgacactaacttttcttaagatgctgtgagaatcatttcatccaaatgccaaataaacttgtgttccggaagaggcatggttagtccttggtgtggcccccacggctgccacaggctaaggtggaagaggctgggtacccacctttcagcagaatgcacctagggtttgcagcccttgcaggcgtccatcaaaccccctgaggaccaggcagagctgagcctggagcccctaggtggagtgtgcagggagagcagcagccctgagctgcctacagctatcctgcagcacccagccctgcttggggcatcggct

SEQ ID NO: 11853 - protein, 547 aa, Homo sapiens
MVPKADSGAFLLLFLLVLTVTEPLRPELRCNPGQFACRSGTIQCIPLPWQCDGWATCEDESDEANCPEVTGEVRPHHGKEAVDPRQGRARGGDPSHFHAVNVAQPVRFSRKCPTGWHHYEGTASCYRVYLSGENYWDAAQTCQRLNGSLATFSTDQELRFVLAQEWDQPERSFGWKDQRKLWVGYQYVITGRNRSLEGRWEVAFKGSSEVFLPPDPIFASAMSENDNVFCAQLQCFHFPTLRHHDLHSWHAESCYEKSSFLCKRSQTCVDIKDNVVDEGFYFTPKGDDPCLSCTCHGGEPEMCVAALCERPQGCQQYRKDPKECCKFMCLDPDGNSLFDSMASGMRLVVSCISSFLILSLLLFMVHRLRQRRRERIESLIGANLHHFNLGRRIPGFDYGPDGFGTGLTPLHLSDDGEGGTFHFHDPPPPYTAYKYPDIGQPDDPPPPYEASIHPDSVFYDPADDDAFEPVEVSLPAPGDGGSEGALLRRLEQPLPTAGASLADLEDSADSSSALLVPPDPAQSGSTPAAEALPGGGRHSRSSLNTVV

SEQ ID NO: 11854 - DNA, 2425 bp, Homo sapiens
ggctctggccccgccccccatcttgacggtcattggcccgcgcctgcgtcgcgggcgggaggcggggcggggcggcgcggcgcggagccgagcaggacggccgccatcttgcgcgcagctggagtcggtgcctgaggttgcagccgagagtgtgcgccagcccgcggcccagccgaagctctttcccgccgcctctccgcgcctcgcccaggttcagctccgcctgaccctccgcttggcacggtcccctgaccctcagtccggcctggtccggccttccagccgccccggggacgatgaacggaggataaatggtgcccaaggcagacagcggcgccttcctgctgctcttcctgctcgtgctcactgtcaccgagccgctgcggccagagctgcggtgcaaccctgggcagtttgcgtgtcgcagcggcaccatccagtgcatccccctcccctggcagtgtgacggctgggcgacttgcgaggatgagagcgacgaagccaactgtccagaagtgaccggggaggtgcgtcctcatcatgggaaggaggctgtggatccgcggcaggggcgggccagaggaggcgacccttcgcaccgccactactgcagctcagtgcccagcggccgcatgcacacctcccggcccctcctcagcagcgcaggggctgggggcccttcctggcacccttttgcctgacggaccctgttgcctgctcctgggcagtggttttgttgcctgacacagggcctttaacatttctgaggtttggagattaagcgggttctgtgcgatttttagcacatccatatcttttctacgttgaatgtctggatctttcctttgtatgtttgtgtctctgtgtgtgtatgtggccaagcgtctgcaggtgagggtggcacatggaacttcacgggtcactgggggcccactcttccagggtcatcgatgcatcctgggctgtgctgaggcagtgctgtctcgctcagtctttccagaccagcggggcagcacctgggaggcctgtctgaagcatgcagttctgtggtgctgctcggggatggactccatgcacagtccacttcttgacacattctcacactgtggctggagacccattttttccatcccatgtggaatgagaatcttgagttgcccacagacagacttgacctttgtgccagaactgtccagagctgtgagttttgttactgaattgcctgtccctgagcttggcctgctggagcatgatgctggaggctgtgtgcgggcaggcttgtgctccccttggagaagggctgctacttaacaaggaagtcctggccacaggagtcccctactggctgcagaggacgaagcaggaagcatgccgtggatcccacatgcactggggcagggcagccaggttccagagcagcaggcatgtgcattatgggtgccaggtggccagtgagggcccgaggaccacgcagcagagtcccccacgggcctgagcctgagagctcagaggattcctgccaggcctcagaactgtgtgtgcgggacagggtggctggcacgagatgtgtgggactgggacgcttcctttggggaccagaggaacattaggggccggtcagacacgtagggggcagtgaggaaacggggtaaagtggaccatgcaggctgcagagggtgggccttgggctggccggggttgctgggtggccccttccccatgggcctccacaagcactcaggccactggcacgttgggccaggcagaaggtccacatggcagggctgcctggaacaccgctgccactgtggctccaggaggcccttgggagcatgaggagagctggactcgctcatctgttcttgcaccaccatccagaatgccccctttgcaaggcctgctgcagtccccagtctgaccagcaagtcccggggtcacccttgctgaaccttgtgctccaggggtcctcctcctctaggaccagcttgccacggtttctcagagcccaggtgccctctgacctgccatgcggaggtgggatttgatactgtacattgtcttgatgcctgtttttttatgttttcattaagggtttttagtttttggttgggttgacactaacttttcttaagatgctgtgagaatcatttcatccaaatgccaaataaacttgtgttccggaagaggcatggttagtccttggtgtggcccccacggctgccacaggctaaggtggaagaggctgggtacccacctttcagcagaatgcacctagggtttgcagcccttgcaggcgtccatcaaaccccctgaggaccaggcagagctgagcctggagcccctaggtggagtgtgcagggagagcagcagccctgagctgcctacagctatcctgcagcacccagccctgcttggggcatcggct

SEQ ID NO: 11855 - protein, 129 aa, Homo sapiens
MVPKADSGAFLLLFLLVLTVTEPLRPELRCNPGQFACRSGTIQCIPLPWQCDGWATCEDESDEANCPEVTGEVRPHHGKEAVDPRQGRARGGDPSHRHYCSSVPSGRMHTSRPLLSSAGAGGPSWHPFA

SEQ ID NO: 11856 - DNA, 947 bp, Homo sapiens
ctggagtcggtgcctgaggttgcagccgagagtgtgcgccagcccgcggcccagccgaagctctttcccgccgcctctccgcgcctcgcccaggttcagctccgcctgaccctccgcttggcacggtcccctgaccctcagtccggcctggtccggccttccagccgccccggggacgatgaacggaggataaatgggtgccaggtggccagtgagggcccgaggaccacgcagcagagtcccccacgggcctgagcctgagagctcagaggattcctgccaggcctcagaactgtgtgtgcgggacagggtggctggcacgagatgtgtgggactgggacgcttcctttggggaccagaggaacattaggggccggtcagacacgtagggggcagtgaggaaacggggtaaagtggaccatgcaggctgcagagggtgggccttgggctggccggggttgctgggtggccccttccccatgggcctccacaagcactcaggccactggcacgttgggccaggcagaaggtccacatggcagggctgcctggaacaccgctgccactgtggctccaggaggcccttgggagcatgaggagagctggactcgctcatctgttcttgcaccaccatccagaatgccccctttgcaaggcctgctgcagtccccagtctgaccagcaagtcccggggtcacccttgctgaaccttgtgctccaggggtcctcctcctctaggaccagcttgccacggtttctcagagcccaggtgccctctgacctgccatgcggaggtgggatttgatactgtacattgtcttgatgcctgtttttttatgttttcattaagggtttttagtttttggttgggttgacactaacttttcttaagatgctgtgagaatcatttcatccaaatgccaaataaacttgtgttccggaagagg

SEQ ID NO: 11857 - protein, 58 aa, Homo sapiens; identical to SEQ ID NO: 11843

SEQ ID NO: 11858 - DNA, 3086 bp, Homo sapiens
cttgcgcgcagctggagtcggtgcctgaggttgcagccgagagtgtgcgccagcccgcggcccagccgaagctgggcctcacgccgctgcatctttctgacgacggagagggtgggactttccatttccacgaccctccacctccctacacggcatacaagtacccggacatcggccagcccgacgaccctccgccgccctacgaggcctccatccacccggacagtgtgttctatgaccctgcagacgatgatgcttttgagcctgtggaggtcagcctgccagcccctggggatggtgggagtgaaggtgcattactccggcgcctggagcagcctctgcccactgcgggggcctctctggcagacctggaagactctgccgacagcagcagcgccctgctcgtgccccctgaccctgcccagagcgggagcaccccagctgcagaggcactgccagggggtggccgccacagccgcagctccctcaatactgtggtgtagacggcctggcctgtaccccaacggtctgggagcacctgtctgttgtagaaaacaccggtccctggggagacttgaaaggcccctgtcccagcctggacgccacgcactgccgcacgtcactggcgggctcgcgtgtgtacatagagaccacagcccgccttctgccaaaagaagtgatggcctgcaccgagcttccttgagggcttcagaaacatgcatagctttggatcactgtcttctcctttataaatggcagaagagtgacaaaattcattcagaccgcacatgttagaggcagggaatgaagaaggtactgtgggccatggccacacctgatgcgtttttggtgggcttacttggtgcagtgtgctgtccagagagacctgctgacccagtctgggacaggcacagtgggagctgccacagtgccccttgctggccgccctcaggagggggcctctggaccgtcagtgtggcgtaggcagtgggtctgcttcagggaggcagcctcttgactttgtcacaacggttgcactgaagatggcccccacaagcccagttgtgaatatcaaggtgaccctgcccctggctgggagctcccctggggctctggaacctgaagccctgagaaggagagcttggaaggaggttgagctcttcactgtgtctttccatctgggctctgcagcccagctctgtggcaggaggcctgaccccaccccatcagtccctctcccagcattgctgtgcatggctccctcaggaagaagctctggagtggggccgaggccccagatgctctgctggggtctggggactgagctgcctcctgtctctccactctggagccctgggctcttgcctcctgttgaattgcccctgggcctgcccccggccccatttgtgccataaagggttgcttcattgcaggaggggtggctgaaaccaccatcctgggctgcatctatctccttaaagtccactccttacatcaccgccactactgcagctcagtgcccagcggccgcatgcacacctcccggcccctcctcagcagcgcaggggctgggggcccttcctggcacccttttgcctgacggaccctgttgcctgctcctgggcagtggttttgttgcctgacacagggcctttaacatttctgaggtttggagattaagcgggttctgtgcgatttttagcacatccatatcttttctacgttgaatgtctggatctttcctttgtatgtttgtgtctctgtgtgtgtatgtggccaagcgtctgcaggtgagggtggcacatggaacttcacgggtcactgggggcccactcttccagggtcatcgatgcatcctgggctgtgctgaggcagtgctgtctcgctcagtctttccagaccagcggggcagcacctgggaggcctgtctgaagcatgcagttctgtggtgctgctcggggatggactccatgcacagtccacttcttgacacattctcacactgtggctggagacccattttttccatcccatgtggaatgagaatcttgagttgcccacagacagacttgacctttgtgccagaactgtccagagctgtgagttttgttactgaattgcctgtccctgagcttggcctgctggagcatgatgctggaggctgtgtgcgggcaggcttgtgctccccttggagaagggctgctacttaacaaggaagtcctggccacaggagtcccctactggctgcagaggacgaagcaggaagcatgccgtggatcccacatgcactggggcagggcagccaggttccagagcagcaggcatgtgcattatgggtgccaggtggccagtgagggcccgaggaccacgcagcagagtcccccacgggcctgagcctgagagctcagaggattcctgccaggcctcagaactgtgtgtgcgggacagggtggctggcacgagatgtgtgggactgggacgcttcctttggggaccagaggaacattaggggccggtcagacacgtagggggcagtgaggaaacggggtaaagtggaccatgcaggctgcagagggtgggccttgggctggccggggttgctgggtggccccttccccatgggcctccacaagcactcaggccactggcacgttgggccaggcagaaggtccacatggcagggctgcctggaacaccgctgccactgtggctccaggaggcccttgggagcatgaggagagctggactcgctcatctgttcttgcaccaccatccagaatgccccctttgcaaggcctgctgcagtccccagtctgaccagcaagtcccggggtcacccttgctgaaccttgtgctccaggggtcctcctcctctaggaccagcttgccacggtttctcagagcccaggtgccctctgacctgccatgcggaggtgggatttgatactgtacattgtcttgatgcctgtttttttatgttttcattaagggtttttagtttttggttgggttgacactaacttttcttaagatgctgtgagaatcatttcatccaaatgccaaataaacttgtgttccggaagagg

SEQ ID NO: 11859 - protein, 186 aa, Homo sapiens; identical to SEQ ID NO: 11845

SEQ ID NO: 11860 - DNA, 3171 bp, Homo sapiens
cttgcgcgcagctggagtcggtgcctgaggttgcagccgagagtgctgcgccagcggcgccgggagcgcatcgagtccctgattggagcaaacttgcaccacttcaacctcggccgcaggatccctggctttgattacggcccagacgggtttggcacgggcctcacgccgctgcatctttctgacgacggagagggtgggactttccatttccacgaccctccacctccctacacggcatacaagtacccggacatcggccagcccgacgaccctccgccgccctacgaggcctccatccacccggacagtgtgttctatgaccctgcagacgatgatgcttttgagcctgtggaggtcagcctgccagcccctggggatggtgggagtgaaggtgcattactccggcgcctggagcagcctctgcccactgcgggggcctctctggcagacctggaagactctgccgacagcagcagcgccctgctcgtgccccctgaccctgcccagagcgggagcaccccagctgcagaggcactgccagggggtggccgccacagccgcagctccctcaatactgtggtgtagacggcctggcctgtaccccaacggtctgggagcacctgtctgttgtagaaaacaccggtccctggggagacttgaaaggcccctgtcccagcctggacgccacgcactgccgcacgtcactggcgggctcgcgtgtgtacatagagaccacagcccgccttctgccaaaagaagtgatggcctgcaccgagcttccttgagggcttcagaaacatgcatagctttggatcactgtcttctcctttataaatggcagaagagtgacaaaattcattcagaccgcacatgttagaggcagggaatgaagaaggtactgtgggccatggccacacctgatgcgtttttggtgggcttacttggtgcagtgtgctgtccagagagacctgctgacccagtctgggacaggcacagtgggagctgccacagtgccccttgctggccgccctcaggagggggcctctggaccgtcagtgtggcgtaggcagtgggtctgcttcagggaggcagcctcttgactttgtcacaacggttgcactgaagatggcccccacaagcccagttgtgaatatcaaggtgaccctgcccctggctgggagctcccctggggctctggaacctgaagccctgagaaggagagcttggaaggaggttgagctcttcactgtgtctttccatctgggctctgcagcccagctctgtggcaggaggcctgaccccaccccatcagtccctctcccagcattgctgtgcatggctccctcaggaagaagctctggagtggggccgaggccccagatgctctgctggggtctggggactgagctgcctcctgtctctccactctggagccctgggctcttgcctcctgttgaattgcccctgggcctgcccccggccccatttgtgccataaagggttgcttcattgcaggaggggtggctgaaaccaccatcctgggctgcatctatctccttaaagtccactccttacatcaccgccactactgcagctcagtgcccagcggccgcatgcacacctcccggcccctcctcagcagcgcaggggctgggggcccttcctggcacccttttgcctgacggaccctgttgcctgctcctgggcagtggttttgttgcctgacacagggcctttaacatttctgaggtttggagattaagcgggttctgtgcgatttttagcacatccatatcttttctacgttgaatgtctggatctttcctttgtatgtttgtgtctctgtgtgtgtatgtggccaagcgtctgcaggtgagggtggcacatggaacttcacgggtcactgggggcccactcttccagggtcatcgatgcatcctgggctgtgctgaggcagtgctgtctcgctcagtctttccagaccagcggggcagcacctgggaggcctgtctgaagcatgcagttctgtggtgctgctcggggatggactccatgcacagtccacttcttgacacattctcacactgtggctggagacccattttttccatcccatgtggaatgagaatcttgagttgcccacagacagacttgacctttgtgccagaactgtccagagctgtgagttttgttactgaattgcctgtccctgagcttggcctgctggagcatgatgctggaggctgtgtgcgggcaggcttgtgctccccttggagaagggctgctacttaacaaggaagtcctggccacaggagtcccctactggctgcagaggacgaagcaggaagcatgccgtggatcccacatgcactggggcagggcagccaggttccagagcagcaggcatgtgcattatgggtgccaggtggccagtgagggcccgaggaccacgcagcagagtcccccacgggcctgagcctgagagctcagaggattcctgccaggcctcagaactgtgtgtgcgggacagggtggctggcacgagatgtgtgggactgggacgcttcctttggggaccagaggaacattaggggccggtcagacacgtagggggcagtgaggaaacggggtaaagtggaccatgcaggctgcagagggtgggccttgggctggccggggttgctgggtggccccttccccatgggcctccacaagcactcaggccactggcacgttgggccaggcagaaggtccacatggcagggctgcctggaacaccgctgccactgtggctccaggaggcccttgggagcatgaggagagctggactcgctcatctgttcttgcaccaccatccagaatgccccctttgcaaggcctgctgcagtccccagtctgaccagcaagtcccggggtcacccttgctgaaccttgtgctccaggggtcctcctcctctaggaccagcttgccacggtttctcagagcccaggtgccctctgacctgccatgcggaggtgggatttgatactgtacattgtcttgatgcctgtttttttatgttttcattaagggtttttagtttttggttgggttgacactaacttttcttaagatgctgtgagaatcatttcatccaaatgccaaataaacttgtgttccggaagagg

SEQ ID NO: 11861 - protein, 186 aa, Homo sapiens; identical to SEQ ID NO: 11845

SEQ ID NO: 11862 - DNA, 2973 bp, Homo sapiens
atcttgcgcgcagctggagtcggtgcctgaggttgcagccgagagtgtgcgccagcccgcggcccagccgaagctcctccgccgccctacgaggcctccatccacccggacagtgtgttctatgaccctgcagacgatgatgcttttgagcctgtggaggtcagcctgccagcccctggggatggtgggagtgaaggtgcattactccggcgcctggagcagcctctgcccactgcgggggcctctctggcagacctggaagactctgccgacagcagcagcgccctgctcgtgccccctgaccctgcccagagcgggagcaccccagctgcagaggcactgccagggggtggccgccacagccgcagctccctcaatactgtggtgtagacggcctggcctgtaccccaacggtctgggagcacctgtctgttgtagaaaacaccggtccctggggagacttgaaaggcccctgtcccagcctggacgccacgcactgccgcacgtcactggcgggctcgcgtgtgtacatagagaccacagcccgccttctgccaaaagaagtgatggcctgcaccgagcttccttgagggcttcagaaacatgcatagctttggatcactgtcttctcctttataaatggcagaagagtgacaaaattcattcagaccgcacatgttagaggcagggaatgaagaaggtactgtgggccatggccacacctgatgcgtttttggtgggcttacttggtgcagtgtgctgtccagagagacctgctgacccagtctgggacaggcacagtgggagctgccacagtgccccttgctggccgccctcaggagggggcctctggaccgtcagtgtggcgtaggcagtgggtctgcttcagggaggcagcctcttgactttgtcacaacggttgcactgaagatggcccccacaagcccagttgtgaatatcaaggtgaccctgcccctggctgggagctcccctggggctctggaacctgaagccctgagaaggagagcttggaaggaggttgagctcttcactgtgtctttccatctgggctctgcagcccagctctgtggcaggaggcctgaccccaccccatcagtccctctcccagcattgctgtgcatggctccctcaggaagaagctctggagtggggccgaggccccagatgctctgctggggtctggggactgagctgcctcctgtctctccactctggagccctgggctcttgcctcctgttgaattgcccctgggcctgcccccggccccatttgtgccataaagggttgcttcattgcaggaggggtggctgaaaccaccatcctgggctgcatctatctccttaaagtccactccttacatcaccgccactactgcagctcagtgcccagcggccgcatgcacacctcccggcccctcctcagcagcgcaggggctgggggcccttcctggcacccttttgcctgacggaccctgttgcctgctcctgggcagtggttttgttgcctgacacagggcctttaacatttctgaggtttggagattaagcgggttctgtgcgatttttagcacatccatatcttttctacgttgaatgtctggatctttcctttgtatgtttgtgtctctgtgtgtgtatgtggccaagcgtctgcaggtgagggtggcacatggaacttcacgggtcactgggggcccactcttccagggtcatcgatgcatcctgggctgtgctgaggcagtgctgtctcgctcagtctttccagaccagcggggcagcacctgggaggcctgtctgaagcatgcagttctgtggtgctgctcggggatggactccatgcacagtccacttcttgacacattctcacactgtggctggagacccattttttccatcccatgtggaatgagaatcttgagttgcccacagacagacttgacctttgtgccagaactgtccagagctgtgagttttgttactgaattgcctgtccctgagcttggcctgctggagcatgatgctggaggctgtgtgcgggcaggcttgtgctccccttggagaagggctgctacttaacaaggaagtcctggccacaggagtcccctactggctgcagaggacgaagcaggaagcatgccgtggatcccacatgcactggggcagggcagccaggttccagagcagcaggcatgtgcattatgggtgccaggtggccagtgagggcccgaggaccacgcagcagagtcccccacgggcctgagcctgagagctcagaggattcctgccaggcctcagaactgtgtgtgcgggacagggtggctggcacgagatgtgtgggactgggacgcttcctttggggaccagaggaacattaggggccggtcagacacgtagggggcagtgaggaaacggggtaaagtggaccatgcaggctgcagagggtgggccttgggctggccggggttgctgggtggccccttccccatgggcctccacaagcactcaggccactggcacgttgggccaggcagaaggtccacatggcagggctgcctggaacaccgctgccactgtggctccaggaggcccttgggagcatgaggagagctggactcgctcatctgttcttgcaccaccatccagaatgccccctttgcaaggcctgctgcagtccccagtctgaccagcaagtcccggggtcacccttgctgaaccttgtgctccaggggtcctcctcctctaggaccagcttgccacggtttctcagagcccaggtgccctctgacctgccatgcggaggtgggatttgatactgtacattgtcttgatgcctgtttttttatgttttcattaagggtttttagtttttggttgggttgacactaacttttcttaagatgctgtgagaatcatttcatccaaatgccaaataaacttgtgttccggaagagg

SEQ ID NO: 11863 - protein, 186 aa, Homo sapiens; identical to SEQ ID NO: 11845

SEQ ID NO: 11864 - DNA, 2820 bp, Homo sapiens
ccatcttgcgcgcagctggagtcggtgcctgaggttgcagccgagagtgtgcgccagcccgcggcccagccgaagctctttcccgccgcctctctggcagacctggaagactctgccgacagcagcagcgccctgctcgtgccccctgaccctgcccagagcgggagcaccccagctgcagaggcactgccagggggtggccgccacagccgcagctccctcaatactgtggtgtagacggcctggcctgtaccccaacggtctgggagcacctgtctgttgtagaaaacaccggtccctggggagacttgaaaggcccctgtcccagcctggacgccacgcactgccgcacgtcactggcgggctcgcgtgtgtacatagagaccacagcccgccttctgccaaaagaagtgatggcctgcaccgagcttccttgagggcttcagaaacatgcatagctttggatcactgtcttctcctttataaatggcagaagagtgacaaaattcattcagaccgcacatgttagaggcagggaatgaagaaggtactgtgggccatggccacacctgatgcgtttttggtgggcttacttggtgcagtgtgctgtccagagagacctgctgacccagtctgggacaggcacagtgggagctgccacagtgccccttgctggccgccctcaggagggggcctctggaccgtcagtgtggcgtaggcagtgggtctgcttcagggaggcagcctcttgactttgtcacaacggttgcactgaagatggcccccacaagcccagttgtgaatatcaaggtgaccctgcccctggctgggagctcccctggggctctggaacctgaagccctgagaaggagagcttggaaggaggttgagctcttcactgtgtctttccatctgggctctgcagcccagctctgtggcaggaggcctgaccccaccccatcagtccctctcccagcattgctgtgcatggctccctcaggaagaagctctggagtggggccgaggccccagatgctctgctggggtctggggactgagctgcctcctgtctctccactctggagccctgggctcttgcctcctgttgaattgcccctgggcctgcccccggccccatttgtgccataaagggttgcttcattgcaggaggggtggctgaaaccaccatcctgggctgcatctatctccttaaagtccactccttacatcaccgccactactgcagctcagtgcccagcggccgcatgcacacctcccggcccctcctcagcagcgcaggggctgggggcccttcctggcacccttttgcctgacggaccctgttgcctgctcctgggcagtggttttgttgcctgacacagggcctttaacatttctgaggtttggagattaagcgggttctgtgcgatttttagcacatccatatcttttctacgttgaatgtctggatctttcctttgtatgtttgtgtctctgtgtgtgtatgtggccaagcgtctgcaggtgagggtggcacatggaacttcacgggtcactgggggcccactcttccagggtcatcgatgcatcctgggctgtgctgaggcagtgctgtctcgctcagtctttccagaccagcggggcagcacctgggaggcctgtctgaagcatgcagttctgtggtgctgctcggggatggactccatgcacagtccacttcttgacacattctcacactgtggctggagacccattttttccatcccatgtggaatgagaatcttgagttgcccacagacagacttgacctttgtgccagaactgtccagagctgtgagttttgttactgaattgcctgtccctgagcttggcctgctggagcatgatgctggaggctgtgtgcgggcaggcttgtgctccccttggagaagggctgctacttaacaaggaagtcctggccacaggagtcccctactggctgcagaggacgaagcaggaagcatgccgtggatcccacatgcactggggcagggcagccaggttccagagcagcaggcatgtgcattatgggtgccaggtggccagtgagggcccgaggaccacgcagcagagtcccccacgggcctgagcctgagagctcagaggattcctgccaggcctcagaactgtgtgtgcgggacagggtggctggcacgagatgtgtgggactgggacgcttcctttggggaccagaggaacattaggggccggtcagacacgtagggggcagtgaggaaacggggtaaagtggaccatgcaggctgcagagggtgggccttgggctggccggggttgctgggtggccccttccccatgggcctccacaagcactcaggccactggcacgttgggccaggcagaaggtccacatggcagggctgcctggaacaccgctgccactgtggctccaggaggcccttgggagcatgaggagagctggactcgctcatctgttcttgcaccaccatccagaatgccccctttgcaaggcctgctgcagtccccagtctgaccagcaagtcccggggtcacccttgctgaaccttgtgctccaggggtcctcctcctctaggaccagcttgccacggtttctcagagcccaggtgccctctgacctgccatgcggaggtgggatttgatactgtacattgtcttgatgcctgtttttttatgttttcattaagggtttttagtttttggttgggttgacactaacttttcttaagatgctgtgagaatcatttcatccaaatgccaaataaacttgtgttccggaagagg

SEQ ID NO: 11865 - protein, 160 aa, Homo sapiens [sequence omitted]

SEQ ID NO: 11866 - DNA, 4475 bp, Homo sapiens
ggggcggggcggcgcggcgcggagccgagcaggacggccgccatcttgcgcgcagctggagtcggtgcctgaggttgcagccgagagtgtgcgccagcccgcggcccagccgaagctctttcccgccgcctctccgcgcctcgcccaggttcagctccgcctgaccctccgcttggcacggtcccctgaccctcagtccggcctggtccggccttccagccgccccggggacgatgaacggaggataaatggtgcccaaggcagacagcggcgccttcctgctgctcttcctgctcgtgctcactgtcaccgagccgctgcggccagagctgcggtgcaaccctgggcagtttgcgtgtcgcagcggcaccatccagtgcatccccctcccctggcagtgtgacggctgggcgacttgcgaggatgagagcgacgaagccaactgtccagaagtgaccggggaggtgcgtcctcatcatgggaaggaggctgtggatccgcggcaggggcgggccagaggaggcgacccttcgcacttccacgcggtgaacgtggcgcagcccgttcgcttcagcaggaagtgcccgacagggtggcaccactacgaaggcacggccagctgctaccgggtctacctgagcggggagaactactgggatgccgcgcagacctgccagcgcctgaatggctctctcgccaccttctccactgaccaggagctgcgctttgtcctggcccaggaatgggaccagcccgagcggagctttggttggaaggaccagcgcaagttgtgggttggctatcagtatgttatcactggccggaaccgctccttggaaggtcgctgggaggtggcattcaaaggctcttcagaggtgttcctgcccccagaccccatctttgcctcggccatgtctgagaacgacaacgtgttctgtgcccagcttcagtgcttccatttccccaccctgcggcaccacgacctccacagctggcacgccgagagctgctacgagaagtcttcatttctgtgtaaaagaagtcaaacatgtgttgacatcaaggacaacgtggtggatgaagggttctacttcacccctaagggggacgacccatgcctgagctgcacctgccatggaggggagcctgagatgtgtgtggctgctctctgtgagaggccccagggctgccaacagtaccgcaaggaccccaaagagtgctgcaagttcatgtgtctggacccagatggcaacagtctgtttgactccatggccagcgggatgcgcctggtcgtcagctgcatctcctccttcctcatcctgtcactgctgctcttcatggtccaccggctgcgccagcggcgccgggagcgcatcgagtccctgattggagcaaacttgcaccacttcaacctcggccgcaggatccctggctttgattacggcccagacgggtttggcacgggcctcacgccgctgcatctttctgacgacggagagggtgggactttccatttccacgaccctccacctccctacacggcatacaagtacccggacatcggccagcccgacgaccctccgccgccctacgaggcctccatccacccggacagtgtgttctatgaccctgcagacgatgatgcttttgagcctgtggaggtcagcctgccagcccctggggatggtgggagtgaaggtgcattactccggcgcctggagcagcctctgcccactgcgggggcctctctggcagacctggaagactctgccgacagcagcagcgccctgctcgtgccccctgaccctgcccagagcgggagcaccccagctgcagaggcactgccagggggtggccgccacagccgcagctccctcaatactgtggtgtagacggcctggcctgtaccccaacggtctgggagcacctgtctgttgtagaaaacaccggtccctggggagacttgaaaggcccctgtcccagcctggacgccacgcactgccgcacgtcactggcgggctcgcgtgtgtacatagagaccacagcccgccttctgccaaaagaagtgatggcctgcaccgagcttccttgagggcttcagaaacatgcatagctttggatcactgtcttctcctttataaatggcagaagagtgacaaaattcattcagaccgcacatgttagaggcagggaatgaagaaggtactgtgggccatggccacacctgatgcgtttttggtgggcttacttggtgcagtgtgctgtccagagagacctgctgacccagtctgggacaggcacagtgggagctgccacagtgccccttgctggccgccctcaggagggggcctctggaccgtcagtgtggcgtaggcagtgggtctgcttcagggaggcagcctcttgactttgtcacaacggttgcactgaagatggcccccacaagcccagttgtgaatatcaaggtgaccctgcccctggctgggagctcccctggggctctggaacctgaagccctgagaaggagagcttggaaggaggttgagctcttcactgtgtctttccatctgggctctgcagcccagctctgtggcaggaggcctgaccccaccccatcagtccctctcccagcattgctgtgcatggctccctcaggaagaagctctggagtggggccgaggccccagatgctctgctggggtctggggactgagctgcctcctgtctctccactctggagccctgggctcttgcctcctgttgaattgcccctgggcctgcccccggccccatttgtgccataaagggttgcttcattgcaggaggggtggctgaaaccaccatcctgggctgcatctatctccttaaagtccactccttacatcaccgccactactgcagctcagtgcccagcggccgcatgcacacctcccggcccctcctcagcagcgcaggggctgggggcccttcctggcacccttttgcctgacggaccctgttgcctgctcctgggcagtggttttgttgcctgacacagggcctttaacatttctgaggtttggagattaagcgggttctgtgcgatttttagcacatccatatcttttctacgttgaatgtctggatctttcctttgtatgtttgtgtctctgtgtgtgtatgtggccaagcgtctgcaggtgagggtggcacatggaacttcacgggtcactgggggcccactcttccagggtcatcgatgcatcctgggctgtgctgaggcagtgctgtctcgctcagtctttccagaccagcggggcagcacctgggaggcctgtctgaagcatgcagttctgtggtgctgctcggggatggactccatgcacagtccacttcttgacacattctcacactgtggctggagacccattttttccatcccatgtggaatgagaatcttgagttgcccacagacagacttgacctttgtgccagaactgtccagagctgtgagttttgttactgaattgcctgtccctgagcttggcctgctggagcatgatgctggaggctgtgtgcgggcaggcttgtgctccccttggagaagggctgctacttaacaaggaagtcctggccacaggagtcccctactggctgcagaggacgaagcaggaagcatgccgtggatcccacatgcactggggcagggcagccaggttccagagcagcaggcatgtgcattatgggtgccaggtggccagtgagggcccgaggaccacgcagcagagtcccccacgggcctgagcctgagagctcagaggattcctgccaggcctcagaactgtgtgtgcgggacagggtggctggcacgagatgtgtgggactgggacgcttcctttggggaccagaggaacattaggggccggtcagacacgtagggggcagtgaggaaacggggtaaagtggaccatgcaggctgcagagggtgggccttgggctggccggggttgctgggtggccccttccccatgggcctccacaagcactcaggccactggcacgttgggccaggcagaaggtccacatggcagggctgcctggaacaccgctgccactgtggctccaggaggcccttgggagcatgaggagagctggactcgctcatctgttcttgcaccaccatccagaatgccccctttgcaaggcctgctgcagtccccagtctgaccagcaagtcccggggtcacccttgctgaaccttgtgctccaggggtcctcctcctctaggaccagcttgccacggtttctcagagcccaggtgccctctgacctgccatgcggaggtgggatttgatactgtacattgtcttgatgcctgtttttttatgttttcattaagggtttttagtttttggttgggttgacactaacttttcttaagatgctgtgagaatcatttcatccaaatgccaaataaacttgtgttccggaagagg

SEQ ID NO: 11867 - protein, 547 aa, Homo sapiens; identical to SEQ ID NO: 11853

SEQ ID NO: 11868 - DNA, 4865 bp, Homo sapiens
ggggcggggcggcgcggcgcggagccgagcaggacggccgccatcttgcgcgcagctggagtcggtgcctgaggttgcagccgagagtgtgcgccagcccgcggcccagccgaagctctttcccgccgcctctccgcgcctcgcccaggttcagctccgcctgaccctccgcttggcacggtcccctgaccctcagtccggcctggtccggccttccagccgccccggggacgatgaacggaggataaatggtgcccaaggcagacagcggcgccttcctgctgctcttcctgctcgtgctcactgtcaccgagccgctgcggccagagctgcggtgcaaccctgggcagtttgcgtgtcgcagcggcaccatccagtgcatccccctcccctggcagtgtgacggctgggcgacttgcgaggatgagagcgacgaagccaactgtccagaagtgaccggggaggtgcgtcctcatcatgggaaggaggctgtggatccgcggcaggggcgggccagaggaggcgacccttcgcacttccacgcggtgaacgtggcgcagcccgttcgcttcagcaggaagtgcccgacagggtggcaccactacgaaggcacggccagctgctaccgggtctacctgagcggggagaactactgggatgccgcgcagacctgccagcgcctgaatggctctctcgccaccttctccactgaccaggagctgcgctttgtcctggcccaggaatgggaccagcccgagcggagctttggttggaaggaccagcgcaagttgtgggttggctatcagtatgttatcactggccggaaccgctccttggaaggtcgctgggaggtggcattcaaagattggggtgtgagtgataccatggtacatagacgcttactatgcccatgtgtcggtaccctgcacacacatttgaagttgggagctcgtttccgcagggttcctgtgcgccttggtggagcgctctccaggcgctcccccaggcccacaccagcctgtgagccccgcctgggggccaagaccctgcaggtttgacagcaccaggtcatgatgtgccctggagacagaactgccgctgctgctgccagaagacatgaggccaggatttctgtaacatttgtgcagaaaggttgaaaaagtacagatccttgtgtagggagaatcatccacaccgccccacgtgctgctcccagggccttcccgtcagcaccagcagtgtagcttctgtctggctcttcagaggtgttcctgcccccagaccccatctttgcctcggccatgtctgagaacgacaacgtgttctgtgcccagcttcagtgcttccatttccccaccctgcggcaccacgacctccacagctggcacgccgagagctgctacgagaagtcttcatttctgtgtaaaagaagtcaaacatgtgttgacatcaaggacaacgtggtggatgaagggttctacttcacccctaagggggacgacccatgcctgagctgcacctgccatggaggggagcctgagatgtgtgtggctgctctctgtgagaggccccagggctgccaacagtaccgcaaggaccccaaagagtgctgcaagttcatgtgtctggacccagatggcaacagtctgtttgactccatggccagcgggatgcgcctggtcgtcagctgcatctcctccttcctcatcctgtcactgctgctcttcatggtccaccggctgcgccagcggcgccgggagcgcatcgagtccctgattggagcaaacttgcaccacttcaacctcggccgcaggatccctggctttgattacggcccagacgggtttggcacgggcctcacgccgctgcatctttctgacgacggagagggtgggactttccatttccacgaccctccacctccctacacggcatacaagtacccggacatcggccagcccgacgaccctccgccgccctacgaggcctccatccacccggacagtgtgttctatgaccctgcagacgatgatgcttttgagcctgtggaggtcagcctgccagcccctggggatggtgggagtgaaggtgcattactccggcgcctggagcagcctctgcccactgcgggggcctctctggcagacctggaagactctgccgacagcagcagcgccctgctcgtgccccctgaccctgcccagagcgggagcaccccagctgcagaggcactgccagggggtggccgccacagccgcagctccctcaatactgtggtgtagacggcctggcctgtaccccaacggtctgggagcacctgtctgttgtagaaaacaccggtccctggggagacttgaaaggcccctgtcccagcctggacgccacgcactgccgcacgtcactggcgggctcgcgtgtgtacatagagaccacagcccgccttctgccaaaagaagtgatggcctgcaccgagcttccttgagggcttcagaaacatgcatagctttggatcactgtcttctcctttataaatggcagaagagtgacaaaattcattcagaccgcacatgttagaggcagggaatgaagaaggtactgtgggccatggccacacctgatgcgtttttggtgggcttacttggtgcagtgtgctgtccagagagacctgctgacccagtctgggacaggcacagtgggagctgccacagtgccccttgctggccgccctcaggagggggcctctggaccgtcagtgtggcgtaggcagtgggtctgcttcagggaggcagcctcttgactttgtcacaacggttgcactgaagatggcccccacaagcccagttgtgaatatcaaggtgaccctgcccctggctgggagctcccctggggctctggaacctgaagccctgagaaggagagcttggaaggaggttgagctcttcactgtgtctttccatctgggctctgcagcccagctctgtggcaggaggcctgaccccaccccatcagtccctctcccagcattgctgtgcatggctccctcaggaagaagctctggagtggggccgaggccccagatgctctgctggggtctggggactgagctgcctcctgtctctccactctggagccctgggctcttgcctcctgttgaattgcccctgggcctgcccccggccccatttgtgccataaagggttgcttcattgcaggaggggtggctgaaaccaccatcctgggctgcatctatctccttaaagtccactccttacatcaccgccactactgcagctcagtgcccagcggccgcatgcacacctcccggcccctcctcagcagcgcaggggctgggggcccttcctggcacccttttgcctgacggaccctgttgcctgctcctgggcagtggttttgttgcctgacacagggcctttaacatttctgaggtttggagattaagcgggttctgtgcgatttttagcacatccatatcttttctacgttgaatgtctggatctttcctttgtatgtttgtgtctctgtgtgtgtatgtggccaagcgtctgcaggtgagggtggcacatggaacttcacgggtcactgggggcccactcttccagggtcatcgatgcatcctgggctgtgctgaggcagtgctgtctcgctcagtctttccagaccagcggggcagcacctgggaggcctgtctgaagcatgcagttctgtggtgctgctcggggatggactccatgcacagtccacttcttgacacattctcacactgtggctggagacccattttttccatcccatgtggaatgagaatcttgagttgcccacagacagacttgacctttgtgccagaactgtccagagctgtgagttttgttactgaattgcctgtccctgagcttggcctgctggagcatgatgctggaggctgtgtgcgggcaggcttgtgctccccttggagaagggctgctacttaacaaggaagtcctggccacaggagtcccctactggctgcagaggacgaagcaggaagcatgccgtggatcccacatgcactggggcagggcagccaggttccagagcagcaggcatgtgcattatgggtgccaggtggccagtgagggcccgaggaccacgcagcagagtcccccacgggcctgagcctgagagctcagaggattcctgccaggcctcagaactgtgtgtgcgggacagggtggctggcacgagatgtgtgggactgggacgcttcctttggggaccagaggaacattaggggccggtcagacacgtagggggcagtgaggaaacggggtaaagtggaccatgcaggctgcagagggtgggccttgggctggccggggttgctgggtggccccttccccatgggcctccacaagcactcaggccactggcacgttgggccaggcagaaggtccacatggcagggctgcctggaacaccgctgccactgtggctccaggaggcccttgggagcatgaggagagctggactcgctcatctgttcttgcaccaccatccagaatgccccctttgcaaggcctgctgcagtccccagtctgaccagcaagtcccggggtcacccttgctgaaccttgtgctccaggggtcctcctcctctaggaccagcttgccacggtttctcagagcccaggtgccctctgacctgccatgcggaggtgggatttgatactgtacattgtcttgatgcctgtttttttatgttttcattaagggtttttagtttttggttgggttgacactaacttttcttaagatgctgtgagaatcatttcatccaaatgccaaataaacttgtgttccggaagagg

SEQ ID NO: 11869 - protein, 326 aa, Homo sapiens
MSENDNVFCAQLQCFHFPTLRHHDLHSWHAESCYEKSSFLCKRSQTCVDIKDNVVDEGFYFTPKGDDPCLSCTCHGGEPEMCVAALCERPQGCQQYRKDPKECCKFMCLDPDGNSLFDSMASGMRLVVSCISSFLILSLLLFMVHRLRQRRRERIESLIGANLHHFNLGRRIPGFDYGPDGFGTGLTPLHLSDDGEGGTFHFHDPPPPYTAYKYPDIGQPDDPPPPYEASIHPDSVFYDPADDDAFEPVEVSLPAPGDGGSEGALLRRLEQPLPTAGASLADLEDSADSSSALLVPPDPAQSGSTPAAEALPGGGRHSRSSLNTVV

SEQ ID NO: 11870 - DNA, 2187 bp, Homo sapiens
ggctctggccccgccccccatcttgacggtcattggcccgcgcctgcgtcgcgggcgggaggcggggcggggcggcgcggcgcggagccgagcaggacggccgccatcttgcgcgcagctggagtcggtgcctgaggttgcagccgagagtgtgcgccagcccgcggcccagccgaagctctttcccgccgcctctccgcgcctcgcccaggttcagctccgcctgaccctccgcttggcacggtcccctgaccctcagtccggcctggtccggccttccagccgccccggggacgatgaacggaggataaatggtgcccaaggcagacagcggcgccttcctgctgctcttcctgctcgtgctcactgtcaccgagccgctgcggccagagctgcggtgcaaccctgggcagtttgcgtgtcgcagcggcaccatccagtgcatccccctcccctggcagtgtgacggctgggcgacttgcgaggatgagagcgacgaagccaactgtccagaagtgaccggggaggtgcgtcctcatcatgggaaggaggctgtggatccgcggcaggggcgggccagaggaggcgacccttcgcaccgccactactgcagctcagtgcccagcggccgcatgcacacctcccggcccctcctcagcagcgcaggggctgggggcccttcctggcacccttttgcctgacggaccctgttgcctgctcctgggcagtggttttgttgcctgacacagggcctttaacatttctgaggtttggagattaagcgggttctgtgcgatttttagcacatccatatcttttctacgttgaatgtctggatctttcctttgtatgtttgtgtctctgtgtgtgtatgtggccaagcgtctgcaggtgagggtggcacatggaacttcacgggtcactgggggcccactcttccagggtcatcgatgcatcctgggctgtgctgaggcagtgctgtctcgctcagtctttccagaccagcggggcagcacctgggaggcctgtctgaagcatgcagttctgtggtgctgctcggggatggactccatgcacagtccacttcttgacacattctcacactgtggctggagacccattttttccatcccatgtggaatgagaatcttgagttgcccacagacagacttgacctttgtgccagaactgtccagagctgtgagttttgttactgaattgcctgtccctgagcttggcctgctggagcatgatgctggaggctgtgtgcgggcaggcttgtgctccccttggagaagggctgctacttaacaaggaagtcctggccacaggagtcccctactggctgcagaggacgaagcaggaagcatgccgtggatcccacatgcactggggcagggcagccaggttccagagcagcaggcatgtgcattatgggtgccaggtggccagtgagggcccgaggaccacgcagcagagtcccccacgggcctgagcctgagagctcagaggattcctgccaggcctcagaactgtgtgtgcgggacagggtggctggcacgagatgtgtgggactgggacgcttcctttggggaccagaggaacattaggggccggtcagacacgtagggggcagtgaggaaacggggtaaagtggaccatgcaggctgcagagggtgggccttgggctggccggggttgctgggtggccccttccccatgggcctccacaagcactcaggccactggcacgttgggccaggcagaaggtccacatggcagggctgcctggaacaccgctgccactgtggctccaggaggcccttgggagcatgaggagagctggactcgctcatctgttcttgcaccaccatccagaatgccccctttgcaaggcctgctgcagtccccagtctgaccagcaagtcccggggtcacccttgctgaaccttgtgctccaggggtcctcctcctctaggaccagcttgccacggtttctcagagcccaggtgccctctgacctgccatgcggaggtgggatttgatactgtacattgtcttgatgcctgtttttttatgttttcattaagggtttttagtttttggttgggttgacactaacttttcttaagatgctgtgagaatcatttcatccaaatgccaaataaacttgtgttccggaagagg

SEQ ID NO: 11871 - protein, 129 aa, Homo sapiens; identical to SEQ ID NO: 11855

SEQ ID NO: 11872 - DNA, 624 bp, Homo sapiens
ggggcggggcggcgcggcgcggagccgagcaggacggccgccatcttgcgcgcagctggagtcggtgcctgaggttgcagccgagagtgtgcgccagcccgcggcccagccgaagctctttcccgccgcctctccgcgcctcgcccaggttcagctccgcctgaccctccgcttggcacggtcccctgaccctcagtccggcctggtccggccttccagccgccccggggacgatgaacggaggataaatggtgcccaaggcagacagcggcgccttcctgctgctcttcctgctcgtgctcactgtcaccgagccgctgcggccagagctgcggtgcaaccctgggcagtttgcgtgtcgcagcggcaccatccagtgcatccccctcccctggcagtgtgacggctgggcgacttgcgaggatgagagcgacgaagccaactgtccagaagtgaccggggaggtgcgtcctcatcatgggaaggaggctgtggatccgcggcaggggcgggccagaggaggcgacccttcgcacttccacgcggtgaacgtggcgcagcccgttcgcttcagcaacctgccagcgcctgaatggctctctcgccaccttctccactgaccag

SEQ ID NO: 11873 - protein, 123 aa, Homo sapiens
MVPKADSGAFLLLFLLVLTVTEPLRPELRCNPGQFACRSGTIQCIPLPWQCDGWATCEDESDEANCPEVTGEVRPHHGKEAVDPRQGRARGGDPSHFHAVNVAQPVRFSNLPAPEWLSRHLLH

SEQ ID NO: 11874 - DNA, 351 bp, Homo sapiens
catcttgcgcgcagctggagtcggtgcctgaggttgcagccgagagtgtgcgccagcccgcggcccagccgaagctctttcccgccgcctctccgcgcctcgcccaggttcagctccgcctgaccctccgcttggcacggtcccctgaccctcagtccggcctggtccggccttccagccgccccggggacgatgaacggaggataaatggtgcccaaggcagacagcggcgccttcctgctgctcttcctgctcgtgctcactgtcaccgagccgctgcggccagaagtgaccggggaggtgcgtcctcatcatgggaaggaggctgtggatccgcggcaggggcgggcc

SEQ ID NO: 11875 - protein, 47 aa, Homo sapiens
MVPKADSGAFLLLFLLVLTVTEPLRPEVTGEVRPHHGKEAVDPRQGR

SEQ ID NO: 11876 - DNA, 569 bp, Homo sapiens
ggggcggggcggcgcggcgcggagccgagcaggacggccgccatcttgcgcgcagctggagtcggtgcctgaggttgcagccgagagtgtgcgccagcccgcggcccagccgaagctctttcccgccgcctctccgcgcctcgcccaggttcagctccgcctgaccctccgcttggcacggtcccctgaccctcagtccggcctggtccggccttccagccgccccggggacgatgaacggaggataaatggtgcccaaggcagacagcggcgccttcctgctgctcttcctgctcgtgctcactgtcaccgagccgctgcggccagagctgcggtgcaaccctgggcagtttgcgtgtcgcagcggcaccatccagtgcatccccctcccctggcagtgtgacggctgggcgacttgcgaggatgagagcgacgaagccaactgtccagcttccagtctcaggcccagaagctcaggtggctcttcccttctccaccaagtgctgatgccccatcctagtggctgcatccctgcatcagagctaccagcgagtctgtgggtcgagtct

SEQ ID NO: 11877 - protein, 106 aa, Homo sapiens
MVPKADSGAFLLLFLLVLTVTEPLRPELRCNPGQFACRSGTIQCIPLPWQCDGWATCEDESDEANCPASSLRPRSSGGSSLLHQVLMPHPSGCIPASELPASLWVE

SEQ ID NO: 11878 - DNA, 597 bp, Homo sapiens
ggggcggggcggcgcggcgcggagccgagcaggacggccgccatcttgcgcgcagctggagtcggtgcctgaggttgcagccgagagtgtgcgccagcccgcggcccagccgaagctctttcccgccgcctctccgcgcctcgcccaggttcagctccgcctgaccctccgcttggcacggtcccctgaccctcagtccggcctggtccggccttccagccgccccggggacgatgaacggaggataaatggtgcccaaggcagacagcggcgccttcctgctgctcttcctgctcgtgctcactgtcaccgagccgctgcggccagagctgcggtgcaaccctgggcagtttgcgtgtcgcagcggcaccatccagtgcatccccctcccctggcagtgtgacggctgggcgacttgcgaggatgagagcgacgaagccaactgtccagagacagggtcttgctgtgttgcccaggctggtctccaactcctggcctcaagcaatcctcctgcctcagcctcccaaagtgttgggattacaggtgtgagccactgcacctggcctcctgttcatttgtacaagatcattttcagag

SEQ ID NO: 11879 - protein, 115 aa, Homo sapiens
MVPKADSGAFLLLFLLVLTVTEPLRPELRCNPGQFACRSGTIQCIPLPWQCDGWATCEDESDEANCPETGSCCVAQAGLQLLASSNPPASASQSVGITGVSHCTWPPVHLYKIIF

SEQ ID NO: 11880 - DNA, 1424 bp, Homo sapiens
catcttgcgcgcagctggagtcggtgcctgaggttgcagccgagagtgtgcgccagcccgcggcccagccgaagctctttcccgccgcctctccgcgcctcgcccaggttcagctccgcctgaccctccgcttggcacggtcccctgaccctcagtccggcctggtccggccttccagccgccccggggacgatgaacggaggataaatggtgcccaaggcagacagcggcgccttcctgctgctcttcctgctcgtgctcactgtcaccgagccgctgcggccagagctgcggtgcaaccctgggcagtttgcgtgtcgcagcggcaccatccagtgcatccccctcccctggcagtgtgacggctgggcgacttgcgaggatgagagcgacgaagccaactgtccaggtgagtgtgttgagtaggcggggtacacaccaccttgtctctttgttgtagctgggtgactgtgcctcttgtgaggggtggaggtgtgtgctgtcttaacacattggaaagttagtttgagccgaccccttcctctctctctgtctttctgtctttttaaaaaataagtgcccaacctaggcagatcccagaacttgcaagatggcagggctgtggggaggcccgtgagatgcccaggaggctccacttaaggaggcgctgcactccctggacttggatgatcttgagtgtgaacccctcctgaggggtggcaccttggccacctctctgaccttatccccatcctggctctggatgtgggtgcctcttgatcctgaatgtgctcttttagactggccttggcacgccctcccctcctgctcactcattcacctggaactttgcactcacaggttctctcctggccattatgtagtctcctaaagatgtatggaaaggccacaaaaaggctaaatcggagaaccaggttcttcacctggtttctgcctcagcaccctcaaggaatacagggcaccccatgaataacaatgttcactggatccgttgttctcaactttggttgggtgggaggtgtagtgagtacttgtgcatgtgtgtgtgaatgtgtgagacatacatatacatgtatccatgaattcgtttttaagactaggtggtgctgataaagccactaaggggaaagtgtgtcttaccccagcttgagaatcacaggcttaaatgctttggccagacatgcagactccttcacaagctggtttaggtctgctttgccaacctgatttatcactacttccccttcagtggctcagctgggctgtttcttgtgcccaccccattaataatcttgtagatgtgtgcttcctttatgttttcctggaattctcttgttctgtttctgcatagacaagccttaccatccttcaaggtgtagctcagatgttaccccagtgggaga

SEQ ID NO: 11881 - protein, 72 aa, Homo sapiens
MVPKADSGAFLLLFLLVLTVTEPLRPELRCNPGQFACRSGTIQCIPLPWQCDGWATCEDESDEANCPGECVE

SEQ ID NO: 11882 - DNA, 675 bp, Homo sapiens
catcttgcgcgcagctggagtcggtgcctgaggttgcagccgagagtgtgcgccagcccgcggcccagccgaagctctttcccgccgcctctccgcgcctcgcccaggttcagctccgcctgaccctccgcttggcacggtcccctgaccctcagtccggcctggtccggccttccagccgccccggggacgatgaacggaggataaatggtgcccaaggcagacagcggcgccttcctgctgctcttcctgctcgtgctcactgtcaccgagccgctgcggccagccctgtcacctggagaactgcctggcacagagtaggtgccagtgttaatgagtgatccacatcttcagttgcttccagaatagacccggcttgacagatggatcaagaagggagaaaaaccttccctattggagaacttctgacacttcattgtctgctagcagaatatgggaagattttgagctgtgcagttcattaggcatttagtgcatgcctccatgtgtggggtgttggtgacatggagtatggggcagcaataaagatgtgtccctcagccagacacagtggctcatgcctgtaatcccaaaactttgagagcataaggtgagaagattgcttgagctcaggagttcgagaccagcctgggcaacatagcaagaccttgtctt

SEQ ID NO: 11883 - protein, 37 aa, Homo sapiens
MVPKADSGAFLLLFLLVLTVTEPLRPALSPGELPGTE

SEQ ID NO: 11884 - DNA, 967 bp, Homo sapiens
gaagatggccctggcacttctgccttcatgggacctttcctccattaagaaatattaagagtcatgctttttcactgtattagtataaagatgactgtattaatatacatacgaaaacattttatttgacctaaaagttcattttttttctgctgactttaaaaaaaaataaaataacattcgaaggctactaaaagtaccgtgggcaagtgataccaggattcctgtgcctgatggatacatcggccctgcatttagggagtttgattttttggtgcagttcaaggggaggtacaccgaaataggtagaaaagggtctcctggttgccacggttctgattccccaccacagacttaagaacacactagctccgaggggagttccaaagcacggactcattcatcacatacacgcagcacggctaagggccccgcacagtggcgaggtctctgctcccgggacgctcgcgccggccacacaacgctaggctgactcctggtgcctcctctaggcccggtgggacctgaggacttccttagcgcaacgtctcactgaatgacagccacaaccaccgctgtccaggcgaggagtttccaggactgagaggctggcactaggccactgctgggaggacgtctgtgaaaccaggtgcccctgagagccactgtccccagcccgactccgacgctggactggcgagagggtgcgcccgtggcgtagctcctggccgccgccgctcccgggaagggcccagaggcaacatcctggacagcagagctgcacgaagtccgaggcgccgcgagcccagacagtagttggggtgtccccagcgggaaggagaaggaggctgtctggaaggaggagaaccaagaatgcacaaaggcctggcagtgggcagtcagcgttagggaagaaggtgaaggagcagagaaaagggggaagggccacggcaggtggggacccaac

SEQ ID NO: 11885 - protein, 101 aa, Homo sapiens
EPLSPARLRRWTGERVRPWRSSWPPPLPGRAQRQHPGQQSCTKSEAPRAQTVVGVSPAGRRRRLSGRRRTKNAQRPGSGQSALGKKVKEQRKGGRATAGGD

SEQ ID NO: 11886 - DNA, 970 bp, Homo sapiens
cgaactcctggcctcaagtgatctgcctgcttcggcctcccaaagtgctgggattacaggcatgagccaccgtgccctggctgcatatctgccttcttcccagactctaccaatgccttctccctctttttgtgcattctacttcttcacctcctgagggtctctctggttcttgggggacatgccagaagaggcaggtgtcaacattgcagaggcagaactgcccgggcatggagcgggccgcttcatccaggatgcacacacagggccggcactcctggtatgtttgacagagagctttggattcgacttggagacctccagcgttgctcctagggttgcagtcctgtgagcaagcaatgtcggttatgaagttcaaggggagagagaagaaattgatgaaaacagcggctcatccgggaccgtcttccttctctggtttgtgccttgacttcttcagagcttgggcctgaaggcgtgagctccatctcattcgccgctggcacactgggccacaaacggctcactaggttcttggagtgtgggaagtccacgcggtgctccttctggatacgcagcatcttcctgatgttggagtcgtaaggcatggagctgcagaccatgatgtagaggatcatgcccaggctccagatgtcatacaccatgggctggtaggggatgccctgcagcagctcgggggctgcatatgccaccaacccgcagaagttcttgcttaatctctgttggccactgtcatcccgcaggcagagcttggagaacctgaagtagaacagcttgatgttgaagtccttgtcgaggagaaggttctaacacttgaggttctggtgcatgatgtccaggtcgtggcagtatttaatggctgaggagagttggtggaacatcttgcacgccatgtccttgggcagggctccctggcactcaatgaactagttttttttctgcccctggc

SEQ ID NO: 11887 - protein, 56 aa, Homo sapiens [sequence omitted]

SEQ ID NO: 11888 - DNA, 2971 bp, Homo sapiens
tcaccttctcccagcacctggcttccagctcatggggtgggactatcccactcacccctctgctataggcactgcccatcttatgctgctggccctggcctcacctggtcacttccaccaacaggagctcccagataacagtgggttgctggacagatcaggctgggactcttaaggggtgggggacgtggggccttcagtgctttatcccctaggaaagggtgcacgttatcccaagggagcccccaggaagtggggagggaggggggaggagcatgtctaggtgctgaccacctggagcacttggccagcaagtgggccgcatgctttgggagcaatgggtgacccagcaggaagcacaaaagaccggccagtgtgccatcatcaagggctgctgagcagcttgaagagccactgggtggggagggcacacggggaggtctcagctggggctgcccctggaggacagggcagggaacttgagggctgaggacagaaatctcacatgactccaggaaatagaggaagaggaggatgctgagcgagggattgtgagggagtgggggtaggtcagagggggctgaactgcaggaagccagggggagtcgtggaccactggagctggccagccccagggcattggggacaaggccaggtcagagggagacagtgtgggcctggtgggtggaccctggcagaggccctcttgtcccccacaaggccaggccacactgtgattctgcctgtacctgagcatctgtcctgtgctcctaggccggagaccactgtgtgtcaggtggggcggttggctgagtcccagagaaaaacactcctcactgggcactcttgatgcttgcacacaccctgtggtttatttggtggtcagtaaggaacgtctttgctgctaagtggaagaaagctaatggaacgtaatcaaaatagtggtttaattgacgaattttacttgcacctgtgccttcttcagatcctacctgcctacttagtttacgtgaaggccgactgcaccatgccccccaaccccgacccccaccacacacaacggggccattgtcatgctaggtgcttgctttccccacctcagctccggagatgtgatggtctttggccctggaggtctcggccagcctgtcctccatcctgttctcgttctcgggcaccaccagcagccggtgctgggttttggctccaagcttgtggtcgggccggtggtcgggcctcaagcctgtcttggtgtccagtttgcactcagcgcggtacttgccctccccctccctcttgaaggaggcagaagacgtggctttgggcttggggggctgcagccacgagtggctgaggatctcatcgatgtggagccgctggctgacgtcgggctgcagcatgcggtagatgaggtccttgcactcgcaggtcaggttcttggagcgcgggaagtccacacggtgctccttctggatacgcagcatcttcctgatgtcggagtcgtcatagggcatggagccgcagaccatgatgtacaggatcacgcccaggctccagatgtcatacaccttgggctggtaggggatgctctgcagcacctcgggggctgcatatgctgccgacccgcagaaggtcttgctgaggatgatgcgcccattgctgtcccgcaggcagcgcttggagaagccaaagtcagacagcttgatgttgaagtccttgtcgaggagaaggttctcgcacttgaggtcccggtggacgatgtccaggtcgtggcagtacttgacggcggaggagagctgtcggaacatcttgcgtgccacgtcctcatgcagggctccctggcacttgatgaactcgaggagcgactggcgccgctgccgtctacatccccccgtcatgtgggccagcaggcattgtcctcatttacactaccggaggcgtctggctgggctgccctgggctgggcttcgactcaggggtggaacactcagcattgtctccgggtgacttcagccaatgaactcataaagccaaggagtgggggcggggactgggctgagggagaacagggtctctggaaccgtggaagccaggctggtctggcaggagcacccactccccgcccgctggaaggaagcctgtccccaggacaggactctggtggccctgctgctgctgcattggtttccctgtcacaagtcaagctggaggggaggcggcccacgtccagcctgtttgcatcacctggctgtggggactgaccctgcattggtctttgtcccactagggtgggtttcctgcagcttctttggctatgaagaaaagcacccccagggctgtgtccttggtgtggtaggacagttgtccctgacagtcacccagacaggcctgcatagcaccccagttacacagacagatttccacagcactgccttaccattgagcacatagttaaatctagggaaatcagtgcccagacatcaaagctagaaatgaaacatggtcagcaggagccttgcatgggcttctcttttgctggagcaagccaaaataataggaacggttttacattcctagtgccaggacccatctcgggtcgacaaaatctgaagacaagttaagggaacaggcagctgtttgaatagatcaattggatagtctaaggcagctctctggaccaagctgtaaaggagatacaatcgaaataatcactccggtaccacagtagacaggccttgaaggcactgggccccttttaatcggacttagcaagcattttttttgcctctgaccttctccttggaacaaaattagttaccagtagacttaggtgattgctgtactgcatgtaggcacataaccccaacctatataaacagtaagaaaattgtagcactttgagttggtctgctggaattatctccagccttctccctgtatccagttacagtgataaactcccttctttcct

SEQ ID NO: 11889 - protein, 395 aa, Homo sapiens
MLGACFPHLSSGDVMVFGPGGLGQPVLHPVLVLGHHQQPVLGFGSKLVVGPVVGPQACLGVQFALSAVLALPLPLEGGRRRGFGLGGLQPRVAEDLIDVEPLADVGLQHAVDEVLALAGQVLGAREVHTVLLLDTQHLPDVGVVIGHGAADHDVQDHAQAPDVIHLGLVGDALQHLGGCICCRPAEGLAEDDAPIAVPQAALGEAKVRQLDVEVLVEEKVLALEVPVDDVQVVAVLDGGGELSEHLACHVLMQGSLALDELEERLAPLPSTSPRHVGQQALSSFTLPEASGWAALGWASTQGWNTQHCLRVTSANELIKPRSGGGDWAEGEQGLWNRGSQAGLAGAPTPRPLEGSLSPGQDSGGPAAAALVSLSQVKLEGRRPTSSLFASPGCGD

SEQ ID NO: 11890 - DNA, 3419 bp, Homo sapiens
aggaaagaagggagtttatcactgtaactggatacagggagaaggctggagataattccagcagaccaactcaaagtgctacaattttcttactgtttatataggttggggttatgtgcctacatgcagtacagcaatcacctaagtctactggtaactaattttgttccaaggagaaggtcagaggcaaaaaaaatgcttgctaagtccgattaaaaggggcccagtgccttcaaggcctgtctactgtggtaccggagtgattatttcgattgtatctcctttacagcttggtccagagagctgccttagactatccaattgatctattcaaacagctgcctgttcccttaacttgtcttcagattttgtcgacccgagatgggtcctggcactaggaatgtaaaaccgttcctattattttggcttgctccagcaaaagagaagcccatgcaaggctcctgctgaccatgtttcatttctagctttgatgtctgggcactgatttccctagatttaactatgtgctcaatggtaaggcagtgctgtggaaatctgtctgtgtaactggggtgctatgcaggcctgtctgggtgactgtcagggacaactgtcctaccacaccaaggacacagccctgggggtgcttttcttcatagccaaagaagctgcaggaaacccaccctagtgggacaaagaccaatgcagggtcagtccccacagccaggtgatgcaaacaggctggacgtgggccgcctcccctccagcttgacttgtgacagggaaaccaatgcagcagcagcagggccaccagagtcctgtcctggggacaggcttccttccagcgggcggggagtgggtgctcctgccagaccagcctggcttccacggttccagagaccctgttctccctcagcccagtccccgcccccactccttggctttatgagttcattggctgaagtcacccggagacaatgctgagtgttccacccctgagtcgaagcccagcccagggcagcccagccagacgcctccggtagtgtaaatgaggacaatgcctgctggcccacatgacggggggatgtagacggcagcggcgccagtcgctcctggcaccatggacgatgccacagtcctaaggaagaagggttacatcgtaggcatcaatcttggcaagggttcctacgcaaaagtcaaatctgcctactctgagcgcctcaagttcaatgtggctgtcaagatcatcgaccgcaagaaaacacctactgactttgtggagagattccttcctcgggagatggacatcctggcaactgtcaaccacggctccatcatcaagacttacgagatctttgagacctctgacggacggatctacatcatcatggagcttggcgtccagggcgacctcctcgagttcatcaagtgccagggagccctgcatgaggacgtggcacgcaagatgttccgacagctctcctccgccgtcaagtactgccacgacctggacatcgtccaccgggacctcaagtgcgagaaccttctcctcgacaaggacttcaacatcaagctgtctgactttggcttctccaagcgctgcctgcgggacagcaatgggcgcatcatcctcagcaagaccttctgcgggtcggcagcatatgcagcccccgaggtgctgcagagcatcccctaccagcccaaggtgtatgacatctggagcctgggcgtgatcctgtacatcatggtctgcggctccatgccctatgacgactccgacatcaggaagatgctgcgtatccagaaggagcaccgtgtggacttcccgcgctccaagaacctgacctgcgagtgcaaggacctcatctaccgcatgctgcagcccgacgtcagccagcggctccacatcgatgagatcctcagccactcgtggctgcagccccccaagcccaaagccacgtcttctgcctccttcaagagggagggggagggcaagtaccgcgctgagtgcaaactggacaccaagacaggcttgaggcccgaccaccggcccgaccacaagcttggagccaaaacccagcaccggctgctggtggtgcccgagaacgagaacaggatggaggacaggctggccgagacctccagggccaaagaccatcacatctccggagctgaggtggggaaagcaagcacctagcatgacaatggccccgttgtgtgtggtgggggtcggggttggggggcatggtgcagtcggccttcacgtaaactaagtaggcaggtaggatctgaagaaggcacaggtgcaagtaaaattcgtcaattaaaccactattttgattacgttccattagctttcttccacttagcagcaaagacgttccttactgaccaccaaataaaccacagggtgtgtgcaagcatcaagagtgcccagtgaggagtgtttttctctgggactcagccaaccgccccacctgacacacagtggtctccggcctaggagcacaggacagatgctcaggtacaggcagaatcacagtgtggcctggccttgtgggggacaagagggcctctgccagggtccacccaccaggcccacactgtctccctctgacctggccttgtccccaatgccctggggctggccagctccagtggtccacgactccccctggcttcctgcagttcagccccctctgacctacccccactccctcacaatccctcgctcagcatcctcctcttcctctatttcctggagtcatgtgagatttctgtcctcagccctcaagttccctgccctgtcctccaggggcagccccagctgagacctccccgtgtgccctccccacccagtggctcttcaagctgctcagcagcccttgatgatggcacactggccggtcttttgtgcttcctgctgggtcacccattgctcccaaagcatgcggcccacttgctggccaagtgctccaggtggtcagcacctagacatgctcctcccccctccctccccacttcctgggggctcccttgggataacgtgcaccctttcctaggggataaagcactgaaggccccacgtcccccaccccttaagagtcccagcctgatctgtccagcaacccactgttatctgggagctcctgttggtggaagtgaccaggtgaggccagggccagcagcataagatgggcagtgcctatagcagaggggtgagtgggatagtcccaccccatgagctggaagccaggtgctgggagaaggtgatagctgagatcacctgatatgcagcccccacacagtcctataaccagcgcacctcacagccggcaagcccagagtggaggctgcagacctgggcccagaaccgcaggggaacctaagggtacaacttccaagggctccgtttctcc

SEQ ID NO: 11891 - protein, 358 aa, Homo sapiens
MDDATVLRKKGYIVGINLGKGSYAKVKSAYSERLKFNVAVKIIDRKKTPTDFVERFLPREMDILATVNHGSIIKTYEIFETSDGRIYIIMELGVQGDLLEFIKCQGALHEDVARKMFRQLSSAVKYCHDLDIVHRDLKCENLLLDKDFNIKLSDFGFSKRCLRDSNGRIILSKTFCGSAAYAAPEVLQSIPYQPKVYDIWSLGVILYIMVCGSMPYDDSDIRKMLRIQKEHRVDFPRSKNLTCECKDLIYRMLQPDVSQRLHIDEILSHSWLQPPKPKATSSASFKREGEGKYRAECKLDTKTGLRPDHRPDHKLGAKTQHRLLVVPENENRMEDRLAETSRAKDHHISGAEVGKAST

SEQ ID NO: 11892 - DNA, 1817 bp, Homo sapiens
tcaatggtaaggcagtgctgtggaaatctgtctgtgtaactggggtgctatgcaggcctgtctgggtgactgtcagggacaactgtcctaccacaccaaggacacagccctgggggtgcttttcttcatagccaaagaagctgcaggaaacccaccctagtgggacaaagaccaatgcagggtcagtccccacagccaggtgatgcaaacaggctggacgtgggccgcctcccctccagcttgacttgtgacagggaaaccaatgcagcagcagcagggccaccagagtcctgtcctggggacaggcttccttccagcgggcggggagtgggtgctcctgccagaccagcctggcttccacggttccagagaccctgttctccctcagcccagtccccgcccccactccttggctttatgagttcattggctgaagtcacccggagacaatgctgagtgttccacccctgagtcgaagcccagcccagggcagcccagccagacgcctccggtagtgtaaatgaggacaatgcctgctggcccacatgacggggggatgtagacggcagcggcgccagtcgctcctggcaccatggacgatgccacagtcctaaggaagaagggttacatcgtaggcatcaatcttggcaagggttcctacgcaaaagtcaaatctgcctactctgagcgcctcaagttcaatgtggctgtcaagatcatcgaccgcaagaaaacacctactgactttgtggagagattccttcctcgggagatggacatcctggcaactgtcaaccacggctccatcatcaagacttacgagatctttgagacctctgacggacggatctacatcatcatggagcttggcgtccagggcgacctcctcgagttcatcaagtgccagggagccctgcatgaggacgtggcacgcaagatgttccgacagctctcctccgccgtcaagtactgccacgacctggacatcgtccaccgggacctcaagtgcgagaaccttctcctcgacaaggacttcaacatcaagctgtctgactttggcttctccaagcgctgcctgcgggacagcaatgggcgcatcatcctcagcaagaccttctgcgggtcggcagcatatgcagcccccgaggtgctgcagagcatcccctaccagcccaaggtgtatgacatctggagcctgggcgtgatcctgtacatcatggtctgcggctccatgccctatgacgactccgacatcaggaagatgctgcgtatccagaaggagcaccgtgtggacttcccgcgctccaagaacctgacctgcgagtgcaaggacctcatctaccgcatgctgcagcccgacgtcagccagcggctccacatcgatgagatcctcagccactcgtggctgcagccccccaagcccaaagccacgtcttctgcctccttcaagagggagggggagggcaagtaccgcgctgagtgcaaactggacaccaagacaggcttgaggcccgaccaccggcccgaccacaagcttggagccaaaacccagcaccggctgctggtggtgcccgagaacgagaacaggatggaggacaggctggccgagacctccagggccaaagaccatcacatctccggagctgaggtggggaaagcaagcacctagcatgacaatggccccgttgtgtgtggtgggggtcggggttggggggcatggtgcagtcggccttcacgtaaactaagtaggcaggtaggatctgaagaaggcacaggtgcaagtaaaattcgtcaattaaaccactattttgattacg

SEQ ID NO: 11893 - protein, 358 aa, Homo sapiens; identical to SEQ ID NO: 11891

SEQ ID NO: 11894 - DNA, 2901 bp, Homo sapiens
cacagttgacttgacacaaggtcttggcaagggtcttctgagtaacagcagcagaaaaggaaaatgagccccttgagagcaaaataggccacaggcacacggggaagcgcccgaaatacagagcgccgataaagacagagatgttcactctgataatcagggaaacactaaaacagactgctttttcctgagagattgtcagaggtcatggttttgggaggaacacgaagacaggtgaggagtgctgcgccttgggcaggtcaggtggggtttggggctttccaggggcttttagtgggaggtgatgggttgtgggggttttgtaggcaacaaagagaggctggcacccaccacagtggctttctgtgtgaggggctgcctggcgtgtggcaggcctggcgcagctacccacacacctgctaccttgtagatcctggagccaggccgcagggagcggctgggtctgaagatggccaacgaggccgctgccaagaaccgggccaagaagcaggaagccttgcggagagtgacggagaatctggccagcctcacccccaaaggcctgagcccagccatgtcgccagccctacagcgccttgtgagcaggacggccagcaagtacacagaccgggccctgcgggccagctacacaccatccccagcacgctccacccacctcaagaccccggccagtgggctgcagacccccacaagcacaccggcgcctggctctgccacacgcacccctctcacacaggacccggcctccatcacggacaacctgctgcagctccctgcccggcgcaaagcttcggacttcttttagagccaggcctgggctgggctcatagacgcttcacagagcctgcagggcagctgtacacccagcagaggactccagccttctcggggcccaggcctgggccagaagctgttgaccataccaggagtcactggagaaaggggctgtgctggggccagactggcacaaggcactcgtgcccacaccacaccccagggccttgccaagctgtttgctgtttaattggccccttgaactgtcattaaagaacacctaggtacagtctggggggttgcctctccatcttgctccccacacgagccctagccttgccctggggcctgcatcacgtctcaggactgcggggcttgaagcgaggggccccccaggtgaggaagctgcaggtggggcggctgtgggagcaccgggtgactggcgttgctttctgcggcactcggaacctgtgttctgagttgagctcacatcctgcagtgctttctgcttctctggggggatatgaaggagaaacggagcccttggaagttgtacccttaggttcccctgcggttctgggcccaggtctgcagcctccactctgggcttgccggctgtgaggtgcgctggttataggactgtgtgggggctgcatatcaggtgatctcagctatcaccttctcccagcacctggcttccagctcatggggtgggactatcccactcacccctctgctataggcactgcccatcttatgctgctggccctggcctcacctggtcacttccaccaacaggagctcccagataacagtgggttgctggacagatcaggctgggactcttaaggggtgggggacgtggggccttcagtgctttatcccctaggaaagggtgcacgttatcccaagggagcccccaggaagtggggagggaggggggaggagcatgtctaggtgctgaccacctggagcacttggccagcaagtgggccgcatgctttgggagcaatgggtgacccagcaggaagcacaaaagaccggccagtgtgccatcatcaagggctgctgagcagcttgaagagccactgggtggggagggcacacggggaggtctcagctggggctgcccctggaggacagggcagggaacttgagggctgaggacagaaatctcacatgactccaggaaatagaggaagaggaggatgctgagcgagggattgtgagggagtgggggtaggtcagagggggctgaactgcaggaagccagggggagtcgtggaccactggagctggccagccccagggcattggggacaaggccaggtcagagggagacagtgtgggcctggtgggtggaccctggcagaggccctcttgtcccccacaaggccaggccacactgtgattctgcctgtacctgagcatctgtcctgtgctcctaggccggagaccactgtgtgtcaggtggggcggttggctgagtcccagagaaaaacactcctcactgggcactcttgatgcttgcacacaccctgtggtttatttggtggtcagtaaggaacgtctttgctgctaagtggaagaaagctaatggaacgtaatcaaaatagtggtttaattgacgaattttacttgcacctgtgccttcttcagatcctacctgcctacttagtttacgtgaaggccgactgcaccatgccccccaaccccgacccccaccacacacaacggggccattgtcatgctaggtgcttgctttccccacctcagctccggagatgtgatggtctttggccctggaggtctcggccagcctgtcctccatcctgttctcgttctcgggcaccaccagcagccggtgctgggttttggctccaagcttgtggtcgggccggtggtcgggcctcaagcctgtcttggtgtccagtttgcactcagcgcggtacttgccctccccctccctcttgaaggaggcagaagacgtggctttgggcttggggggctgcagccacgagtggctgaggatctcatcgatgtggagccgctggctgacgtcgggctgcagcatgcggtagatgaggtccttgcactcgcaggtca

SEQ ID NO: 11895 - protein, 286 aa, Homo sapiens
MVLGGTRRQVRSAAPWAGQVGFGAFQGLLVGGDGLWGFCRQQREAGTHHSGFLCEGLPGVWQAWRSYPHTCYLVDPGARPQGAAGSEDGQRGRCQEPGQEAGSLAESDGESGQPHPQRPEPSHVASPTAPCEQDGQQVHRPGPAGQLHTIPSTLHPPQDPGQWAADPHKHTGAWLCHTHPSHTGPGLHHGQPAAAPCPAQSFGLLLEPGLGWAHRRFTEPAGQLYTQQRTPAFSGPRPGPEAVDHTRSHWRKGLCWGQTGTRHSCPHHTPGPCQAVCCLIGPLNCH

SEQ ID NO: 11896 - DNA, 2277 bp, Homo sapiens
tcgggtgttgacactccgtctcctcgtggaagtggaggagccgggtgtggacggtcccacgagtcaagtaaacagggcagaggaagacgtctgtggtggaagaggctgtagtagtgttgtcagggaaaagagagagcggctctccatcacggacaacctgctgcagctccctgcccggcgcaaagcttcggacttcttttagagccaggcctgggctgggctcatagacgcttcacagagcctgcagggcagctgtacacccagcagaggactccagccttctcggggcccaggcctgggccagaagctgttgaccataccaggagtcactggagaaaggggctgtgctggggccagactggcacaaggcactcgtgcccacaccacaccccagggccttgccaagctgtttgctgtttaattggccccttgaactgtcattaaagaacacctaggtacagtctggggggttgcctctccatcttgctccccacacgagccctagccttgccctggggcctgcatcacgtctcaggactgcggggcttgaagcgaggggccccccaggtgaggaagctgcaggtggggcggctgtgggagcaccgggtgactggcgttgctttctgcggcactcggaacctgtgttctgagttgagctcacatcctgcagtgctttctgcttctctggggggatatgaaggagaaacggagcccttggaagttgtacccttaggttcccctgcggttctgggcccaggtctgcagcctccactctgggcttgccggctgtgaggtgcgctggttataggactgtgtgggggctgcatatcaggtgatctcagctatcaccttctcccagcacctggcttccagctcatggggtgggactatcccactcacccctctgctataggcactgcccatcttatgctgctggccctggcctcacctggtcacttccaccaacaggagctcccagataacagtgggttgctggacagatcaggctgggactcttaaggggtgggggacgtggggccttcagtgctttatcccctaggaaagggtgcacgttatcccaagggagcccccaggaagtggggagggaggggggaggagcatgtctaggtgctgaccacctggagcacttggccagcaagtgggccgcatgctttgggagcaatgggtgacccagcaggaagcacaaaagaccggccagtgtgccatcatcaagggctgctgagcagcttgaagagccactgggtggggagggcacacggggaggtctcagctggggctgcccctggaggacagggcagggaacttgagggctgaggacagaaatctcacatgactccaggaaatagaggaagaggaggatgctgagcgagggattgtgagggagtgggggtaggtcagagggggctgaactgcaggaagccagggggagtcgtggaccactggagctggccagccccagggcattggggacaaggccaggtcagagggagacagtgtgggcctggtgggtggaccctggcagaggccctcttgtcccccacaaggccaggccacactgtgattctgcctgtacctgagcatctgtcctgtgctcctaggccggagaccactgtgtgtcaggtggggcggttggctgagtcccagagaaaaacactcctcactgggcactcttgatgcttgcacacaccctgtggtttatttggtggtcagtaaggaacgtctttgctgctaagtggaagaaagctaatggaacgtaatcaaaatagtggtttaattgacgaattttacttgcacctgtgccttcttcagatcctacctgcctacttagtttacgtgaaggccgactgcaccatgccccccaaccccgacccccaccacacacaacggggccattgtcatgctaggtgcttgctttccccacctcagctccggagatgtgatggtctttggccctggaggtctcggccagcctgtcctccatcctgttctcgttctcgggcaccaccagcagccggtgctgggttttggctccaagcttgtggtcgggccggtggtcgggcctcaagcctgtcttggtgtccagtttgcactcagcgcggtacttgccctccccctccctcttgaaggaggcagaagacgtggctttgggcttggggggctgcagccacgagtggctgaggatctcatcgatgtggagccgctggctgacgtcgggctgcagcatgcggtagatgaggtccttgcactcgcaggtca

SEQ ID NO: 11897 - protein, 125 aa, Homo sapiens
MERNQNSGLIDEFYLHLCLLQILPAYLVYVKADCTMPPNPDPHHTQRGHCHARCLLSPPQLRRCDGLWPWRSRPACPPSCSRSRAPPAAGAGFWLQACGRAGGRASSLSWCPVCTQRGTCPPPPS

SEQ ID NO: 11898 - DNA, 2354 bp, Homo sapiens
gccgcgtccaggcccccgaggaagcgcgaggcgggagaggctggggctgcgacgagcaagcagcgggtcctggacgaggaagagtatatcgaggtacgacctcggtgcggacgccggcgacttctgggcccatcctctgcttcaagctcctctcaggttccctctctcgggtgttgacactccgtctcctcgtggaagtggaggagccgggtgtggacggtcccacgagtcaacctgctgcagctccctgcccggcgcaaagcttcggacttcttttagagccaggcctgggctgggctcatagacgcttcacagagcctgcagggcagctgtacacccagcagaggactccagccttctcggggcccaggcctgggccagaagctgttgaccataccaggagtcactggagaaaggggctgtgctggggccagactggcacaaggcactcgtgcccacaccacaccccagggccttgccaagctgtttgctgtttaattggccccttgaactgtcattaaagaacacctaggtacagtctggggggttgcctctccatcttgctccccacacgagccctagccttgccctggggcctgcatcacgtctcaggactgcggggcttgaagcgaggggccccccaggtgaggaagctgcaggtggggcggctgtgggagcaccgggtgactggcgttgctttctgcggcactcggaacctgtgttctgagttgagctcacatcctgcagtgctttctgcttctctggggggatatgaaggagaaacggagcccttggaagttgtacccttaggttcccctgcggttctgggcccaggtctgcagcctccactctgggcttgccggctgtgaggtgcgctggttataggactgtgtgggggctgcatatcaggtgatctcagctatcaccttctcccagcacctggcttccagctcatggggtgggactatcccactcacccctctgctataggcactgcccatcttatgctgctggccctggcctcacctggtcacttccaccaacaggagctcccagataacagtgggttgctggacagatcaggctgggactcttaaggggtgggggacgtggggccttcagtgctttatcccctaggaaagggtgcacgttatcccaagggagcccccaggaagtggggagggaggggggaggagcatgtctaggtgctgaccacctggagcacttggccagcaagtgggccgcatgctttgggagcaatgggtgacccagcaggaagcacaaaagaccggccagtgtgccatcatcaagggctgctgagcagcttgaagagccactgggtggggagggcacacggggaggtctcagctggggctgcccctggaggacagggcagggaacttgagggctgaggacagaaatctcacatgactccaggaaatagaggaagaggaggatgctgagcgagggattgtgagggagtgggggtaggtcagagggggctgaactgcaggaagccagggggagtcgtggaccactggagctggccagccccagggcattggggacaaggccaggtcagagggagacagtgtgggcctggtgggtggaccctggcagaggccctcttgtcccccacaaggccaggccacactgtgattctgcctgtacctgagcatctgtcctgtgctcctaggccggagaccactgtgtgtcaggtggggcggttggctgagtcccagagaaaaacactcctcactgggcactcttgatgcttgcacacaccctgtggtttatttggtggtcagtaaggaacgtctttgctgctaagtggaagaaagctaatggaacgtaatcaaaatagtggtttaattgacgaattttacttgcacctgtgccttcttcagatcctacctgcctacttagtttacgtgaaggccgactgcaccatgccccccaaccccgacccccaccacacacaacggggccattgtcatgctaggtgcttgctttccccacctcagctccggagatgtgatggtctttggccctggaggtctcggccagcctgtcctccatcctgttctcgttctcgggcaccaccagcagccggtgctgggttttggctccaagcttgtggtcgggccggtggtcgggcctcaagcctgtcttggtgtccagtttgcactcagcgcggtacttgccctccccctccctcttgaaggaggcagaagacgtggctttgggcttggggggctgcagccacgagtggctgaggatctcatcgatgtggagccgctggctgacgtcgggctgcagcatgcggtagatgaggtccttgcactcgcaggtca

SEQ ID NO: 11899 - protein, 125 aa, Homo sapiens; identical to SEQ ID NO: 11897

SEQ ID NO: 11900 - DNA, 3958 bp, Homo sapiens
gcgatggagacgccgggcgcatcagcgtcgtccttgttgcttcccgccgcgtccaggcccccgaggaagcgcgaggcgggagaggctggggctgcgacgagcaagcagcgggtcctggacgaggaagagtatatcgaggtacgacctcggtgcggacgccggcgacttctgggcccatcctctgcttcaagctcctctcaggttccctctctcgggtgttgacactccgtctcctcgtggaagtggaggagccgggtgtggacggtcccacgagtcaagtaaacagggcagaggaagacgtctgtggtggaagaggctgtagtagtgttgtcagggaaaagagagagcggctctctttgtatgggacgggggtcagggaaagaagattttctgttaaagtgtgagtaggagtttgacaaactggaaggatggtggcaaagagggctttctaaagagcggtggcagcaagtgtgaatgctggggttcctggaaagagaccgcagttgtgacagcatctcgagtgagtggacctgcgtcgccccaccacacgcacacagaaggaggagctgaaacggggattggcggaaggcctccagacggtcatccaaagggatttctttcctgatgtggagaagctccaggcacagaaggagtacctggaagccgaggagaatggagacttggaacggatgcgccagattgccatcaagtttggctctgccttgggcaagatgtcccgggagcccccgccaccctatgtgactccagccacatttgaaacccctgaggtgcatgcaggcactggagtggtgggcaacaagcccaggccccgcggccgaggcctggaggatggagaggctggagaggaggaggagaaggagccgctgcccagcctagatgtcttcctgagccgctacacgagtgaggacaatgcctccttccaggagatcatggaggtggccaaggagagaagccgggcacgccacgcttggctctaccaggctgaggaagagtttgagaagaggcagaaagataatctcgaactcccgtcagcagagcaccaggccatcgagagcagccaggccagtgtggagacctggaagtacaaggccaagaattccctcatgtactatccagagggtgtccctgacgaggagcagctgtttaagaagccccggcaggtggtacataagaacacgcgcttccttagggaccccttcagccaagccctgagcaggtgccagctccagcaggcagccgccctcaatgcccagcacaaacagggcaaggtgggccccgatggcaaggagctgatcccccaggagtcccctcgagtgggtggatttggatttgttgccactccttcccctgcccctggtgtgaacgagtccccgatgatgacctggggggaggttgagaacacacccttgagagttgaagggtcggaaacgccctacgtggacaggacacccggcccagcttttaagatcctggagccaggccgcagggagcggctgggtctgaagatggccaacgaggccgctgccaagaaccgggccaagaagcaggaagccttgcggagagtgacggagaatctggccagcctcacccccaaaggcctgagcccagccatgtcgccagccctacagcgccttgtgagcaggacggccagcaagtacacagaccgggccctgcgggccagctacacaccatccccagcacgctccacccacctcaagaccccggccagtgggctgcagacccccacaagcacaccggcgcctggctctgccacacgcacccctctcacacaggacccggcctccatcacggacaacctgctgcagctccctgcccggcgcaaagcttcggacttcttttagagccaggcctgggctgggctcatagacgcttcacagagcctgcagggcagctgtacacccagcagaggactccagccttctcggggcccaggcctgggccagaagctgttgaccataccaggagtcactggagaaaggggctgtgctggggccagactggcacaaggcactcgtgcccacaccacaccccagggccttgccaagctgtttgctgtttaattggccccttgaactgtcattaaagaacacctaggtacagtctggggggttgcctctccatcttgctccccacacgagccctagccttgccctggggcctgcatcacgtctcaggactgcggggcttgaagcgaggggccccccaggtgaggaagctgcaggtggggcggctgtgggagcaccgggtgactggcgttgctttctgcggcactcggaacctgtgttctgagttgagctcacatcctgcagtgctttctgcttctctggggggatatgaaggagaaacggagcccttggaagttgtacccttaggttcccctgcggttctgggcccaggtctgcagcctccactctgggcttgccggctgtgaggtgcgctggttataggactgtgtgggggctgcatatcaggtgatctcagctatcaccttctcccagcacctggcttccagctcatggggtgggactatcccactcacccctctgctataggcactgcccatcttatgctgctggccctggcctcacctggtcacttccaccaacaggagctcccagataacagtgggttgctggacagatcaggctgggactcttaaggggtgggggacgtggggccttcagtgctttatcccctaggaaagggtgcacgttatcccaagggagcccccaggaagtggggagggaggggggaggagcatgtctaggtgctgaccacctggagcacttggccagcaagtgggccgcatgctttgggagcaatgggtgacccagcaggaagcacaaaagaccggccagtgtgccatcatcaagggctgctgagcagcttgaagagccactgggtggggagggcacacggggaggtctcagctggggctgcccctggaggacagggcagggaacttgagggctgaggacagaaatctcacatgactccaggaaatagaggaagaggaggatgctgagcgagggattgtgagggagtgggggtaggtcagagggggctgaactgcaggaagccagggggagtcgtggaccactggagctggccagccccagggcattggggacaaggccaggtcagagggagacagtgtgggcctggtgggtggaccctggcagaggccctcttgtcccccacaaggccaggccacactgtgattctgcctgtacctgagcatctgtcctgtgctcctaggccggagaccactgtgtgtcaggtggggcggttggctgagtcccagagaaaaacactcctcactgggcactcttgatgcttgcacacaccctgtggtttatttggtggtcagtaaggaacgtctttgctgctaagtggaagaaagctaatggaacgtaatcaaaatagtggtttaattgacgaattttacttgcacctgtgccttcttcagatcctacctgcctacttagtttacgtgaaggccgactgcaccatgccccccaaccccgacccccaccacacacaacggggccattgtcatgctaggtgcttgctttccccacctcagctccggagatgtgatggtctttggccctggaggtctcggccagcctgtcctccatcctgttctcgttctcgggcaccaccagcagccggtgctgggttttggctccaagcttgtggtcgggccggtggtcgggcctcaagcctgtcttggtgtccagtttgcactcagcgcggtacttgccctccccctccctcttgaaggaggcagaagacgtggctttgggcttggggggctgcagccacgagtggctgaggatctcatcgatgtggagccgctggctgacgtcgggctgcagcatgcggtagatgaggtccttgcactcgcaggtca

SEQ ID NO: 11901 - protein, 397 aa, Homo sapiens
MRQIAIKFGSALGKMSREPPPPYVTPATFETPEVHAGTGVVGNKPRPRGRGLEDGEAGEEEEKEPLPSLDVFLSRYTSEDNASFQEIMEVAKERSRARHAWLYQAEEEFEKRQKDNLELPSAEHQAIESSQASVETWKYKAKNSLMYYPEGVPDEEQLFKKPRQVVHKNTRFLRDPFSQALSRCQLQQAAALNAQHKQGKVGPDGKELIPQESPRVGGFGFVATPSPAPGVNESPMMTWGEVENTPLRVEGSETPYVDRTPGPAFKILEPGRRERLGLKMANEAAAKNRAKKQEALRRVTENLASLTPKGLSPAMSPALQRLVSRTASKYTDRALRASYTPSPARSTHLKTPASGLQTPTSTPAPGSATRTPLTQDPASITDNLLQLPARRKASDFF

SEQ ID NO: 11902 - DNA, 3543 bp, Homo sapiens
cgcgcctgctgggcccgagctttttcctgggatagcgatggagacgccgggcgcatcagcgtcgtccttgttgcttcccgccgcgtccaggcccccgaggaagcgcgaggcgggagaggctggggctgcgacgagcaagcagcgggtcctggacgaggaagagtatatcgagggcctccagacggtcatccaaagggatttctttcctgatgtggagaagctccaggcacagaaggagtacctggaagccgaggagaatggagacttggaacggatgcgccagattgccatcaagtttggctctgccttgggcaagatgtcccgggagcccccgccaccctatgtgactccagccacatttgaaacccctgaggtgcatgcaggcactggagtggtgggcaacaagcccaggccccgcggccgaggcctggaggatggagaggctggagaggaggaggagaaggagccgctgcccagcctagatgtcttcctgagccgctacacgagtgaggacaatgcctccttccaggagatcatggaggtggccaaggagagaagccgggcacgccacgcttggctctaccaggctgaggaagagtttgagaagaggcagaaagataatctcgaactcccgtcagcagagcaccaggccatcgagagcagccaggccagtgtggagacctggaagtacaaggccaagaattccctcatgtactatccagagggtgtccctgacgaggagcagctgtttaagaagccccggcaggtggtacataagaacacgcgcttccttagggaccccttcagccaagccctgagcaggtgccagctccagcaggcagccgccctcaatgcccagcacaaacagggcaaggtgggccccgatggcaaggagctgatcccccaggagtcccctcgagtgggtggatttggatttgttgccactccttcccctgcccctggtgtgaacgagtccccgatgatgacctggggggaggttgagaacacacccttgagagttgaagggtcggaaacgccctacgtggacaggacacccggcccagcttttaagatcctggagccaggccgcagggagcggctgggtctgaagatggccaacgaggccgctgccaagaaccgggccaagaagcaggaagccttgcggagagtgacggagaatctggccagcctcacccccaaaggcctgagcccagccatgtcgccagccctacagcgccttgtgagcaggacggccagcaagtacacagaccgggccctgcgggccagctacacaccatccccagcacgctccacccacctcaagaccccggccagtgggctgcagacccccacaagcacaccggcgcctggctctgccacacgcacccctctcacacaggacccggcctccatcacggacaacctgctgcagctccctgcccggcgcaaagcttcggacttcttttagagccaggcctgggctgggctcatagacgcttcacagagcctgcagggcagctgtacacccagcagaggactccagccttctcggggcccaggcctgggccagaagctgttgaccataccaggagtcactggagaaaggggctgtgctggggccagactggcacaaggcactcgtgcccacaccacaccccagggccttgccaagctgtttgctgtttaattggccccttgaactgtcattaaagaacacctaggtacagtctggggggttgcctctccatcttgctccccacacgagccctagccttgccctggggcctgcatcacgtctcaggactgcggggcttgaagcgaggggccccccaggtgaggaagctgcaggtggggcggctgtgggagcaccgggtgactggcgttgctttctgcggcactcggaacctgtgttctgagttgagctcacatcctgcagtgctttctgcttctctggggggatatgaaggagaaacggagcccttggaagttgtacccttaggttcccctgcggttctgggcccaggtctgcagcctccactctgggcttgccggctgtgaggtgcgctggttataggactgtgtgggggctgcatatcaggtgatctcagctatcaccttctcccagcacctggcttccagctcatggggtgggactatcccactcacccctctgctataggcactgcccatcttatgctgctggccctggcctcacctggtcacttccaccaacaggagctcccagataacagtgggttgctggacagatcaggctgggactcttaaggggtgggggacgtggggccttcagtgctttatcccctaggaaagggtgcacgttatcccaagggagcccccaggaagtggggagggaggggggaggagcatgtctaggtgctgaccacctggagcacttggccagcaagtgggccgcatgctttgggagcaatgggtgacccagcaggaagcacaaaagaccggccagtgtgccatcatcaagggctgctgagcagcttgaagagccactgggtggggagggcacacggggaggtctcagctggggctgcccctggaggacagggcagggaacttgagggctgaggacagaaatctcacatgactccaggaaatagaggaagaggaggatgctgagcgagggattgtgagggagtgggggtaggtcagagggggctgaactgcaggaagccagggggagtcgtggaccactggagctggccagccccagggcattggggacaaggccaggtcagagggagacagtgtgggcctggtgggtggaccctggcagaggccctcttgtcccccacaaggccaggccacactgtgattctgcctgtacctgagcatctgtcctgtgctcctaggccggagaccactgtgtgtcaggtggggcggttggctgagtcccagagaaaaacactcctcactgggcactcttgatgcttgcacacaccctgtggtttatttggtggtcagtaaggaacgtctttgctgctaagtggaagaaagctaatggaacgtaatcaaaatagtggtttaattgacgaattttacttgcacctgtgccttcttcagatcctacctgcctacttagtttacgtgaaggccgactgcaccatgccccccaaccccgacccccaccacacacaacggggccattgtcatgctaggtgcttgctttccccacctcagctccggagatgtgatggtctttggccctggaggtctcggccagcctgtcctccatcctgttctcgttctcgggcaccaccagcagccggtgctgggttttggctccaagcttgtggtcgggccggtggtcgggcctcaagcctgtcttggtgtccagtttgcactcagcgcggtacttgccctccccctccctcttgaaggaggcagaagacgtggctttgggcttggggggctgcagccacgagtggctgaggatctcatcgatgtggagccgctggctgacgtcgggctgcagcatgcggtagatgaggtccttgcactcgcaggtca

SEQ ID NO: 11903 - protein, 476 aa, Homo sapiens; identical to SEQ ID NO: 1974

SEQ ID NO: 11904 - DNA, 3624 bp, Homo sapiens
cctgtgacgcgcctgctgggcccgagctttttcctgggatagcgatggagacgccgggcgcatcagcgtcgtccttgttgcttcccgccgcgtccaggcccccgaggaagcgcgaggcgggagaggctggggctgcgacgagcaagcagcgggtcctggacgaggaagagtatatcgagggcctccagacggtcatccaaagggatttctttcctgatgtggagaagctccaggcacagaaggagtacctggaagccgaggagaatggagacttggaacggatgcgccagattgccatcaagtttggctctgccttgggcaagatgtcccgggagcccccgccaccctatgtgactccagccacatttgaaacccctgaggtgcatgcaggcactggagtggtgggcaacaagcccaggccccgcggccgaggcctggaggatggagaggctggagaggaggaggagaaggagccgctgcccagcctagatgtcttcctgagccgctacacgagtgaggacaatgcctccttccaggagatcatggaggtggccaaggagagaagccgggcacgccacgcttggctctaccaggctgaggaagagtttgagaagaggcagaaagataatctcgaactcccgtcagcagagcaccaggccatcgagagcagccaggccagtgtggagacctggaagtacaaggccaagaattccctcatgtactatccagagggtgtccctgacgaggagcagctgtttaagaagccccggcaggtggtacataagaacacgcgcttccttagggaccccttcagccaagccctgagcaggtgccagctccagcaggcagccgccctcaatgcccaggggccctccctctctttctccaagaaggctgccaaccccagagccccagccttgccctgaggagaggaagtgtttccagcatgttcccacgtgtttgcccaccggccagctgtcgagcgtgggctgcggtccccctgatgccagcctctctgcttgttccagcacaaacagggcaaggtgtgaacgagtccccgatgatgacctggggggaggttgagaacacacccttgagagttgaagggtcggaaacgccctacgtggacaggacacccggcccagcttttaagatcctggagccaggccgcagggagcggctgggtctgaagatggccaacgaggccgctgccaagaaccgggccaagaagcaggaagccttgcggagagtgacggagaatctggccagcctcacccccaaaggcctgagcccagccatgtcgccagccctacagcgccttgtgagcaggacggccagcaagtacacagaccgggccctgcgggccagctacacaccatccccagcacgctccacccacctcaagaccccggccagtgggctgcagacccccacaagcacaccggcgcctggctctgccacacgcacccctctcacacaggacccggcctccatcacggacaacctgctgcagctccctgcccggcgcaaagcttcggacttcttttagagccaggcctgggctgggctcatagacgcttcacagagcctgcagggcagctgtacacccagcagaggactccagccttctcggggcccaggcctgggccagaagctgttgaccataccaggagtcactggagaaaggggctgtgctggggccagactggcacaaggcactcgtgcccacaccacaccccagggccttgccaagctgtttgctgtttaattggccccttgaactgtcattaaagaacacctaggtacagtctggggggttgcctctccatcttgctccccacacgagccctagccttgccctggggcctgcatcacgtctcaggactgcggggcttgaagcgaggggccccccaggtgaggaagctgcaggtggggcggctgtgggagcaccgggtgactggcgttgctttctgcggcactcggaacctgtgttctgagttgagctcacatcctgcagtgctttctgcttctctggggggatatgaaggagaaacggagcccttggaagttgtacccttaggttcccctgcggttctgggcccaggtctgcagcctccactctgggcttgccggctgtgaggtgcgctggttataggactgtgtgggggctgcatatcaggtgatctcagctatcaccttctcccagcacctggcttccagctcatggggtgggactatcccactcacccctctgctataggcactgcccatcttatgctgctggccctggcctcacctggtcacttccaccaacaggagctcccagataacagtgggttgctggacagatcaggctgggactcttaaggggtgggggacgtggggccttcagtgctttatcccctaggaaagggtgcacgttatcccaagggagcccccaggaagtggggagggaggggggaggagcatgtctaggtgctgaccacctggagcacttggccagcaagtgggccgcatgctttgggagcaatgggtgacccagcaggaagcacaaaagaccggccagtgtgccatcatcaagggctgctgagcagcttgaagagccactgggtggggagggcacacggggaggtctcagctggggctgcccctggaggacagggcagggaacttgagggctgaggacagaaatctcacatgactccaggaaatagaggaagaggaggatgctgagcgagggattgtgagggagtgggggtaggtcagagggggctgaactgcaggaagccagggggagtcgtggaccactggagctggccagccccagggcattggggacaaggccaggtcagagggagacagtgtgggcctggtgggtggaccctggcagaggccctcttgtcccccacaaggccaggccacactgtgattctgcctgtacctgagcatctgtcctgtgctcctaggccggagaccactgtgtgtcaggtggggcggttggctgagtcccagagaaaaacactcctcactgggcactcttgatgcttgcacacaccctgtggtttatttggtggtcagtaaggaacgtctttgctgctaagtggaagaaagctaatggaacgtaatcaaaatagtggtttaattgacgaattttacttgcacctgtgccttcttcagatcctacctgcctacttagtttacgtgaaggccgactgcaccatgccccccaaccccgacccccaccacacacaacggggccattgtcatgctaggtgcttgctttccccacctcagctccggagatgtgatggtctttggccctggaggtctcggccagcctgtcctccatcctgttctcgttctcgggcaccaccagcagccggtgctgggttttggctccaagcttgtggtcgggccggtggtcgggcctcaagcctgtcttggtgtccagtttgcactcagcgcggtacttgccctccccctccctcttgaaggaggcagaagacgtggctttgggcttggggggctgcagccacgagtggctgaggatctcatcgatgtggagccgctggctgacgtcgggctgcagcatgcggtagatgaggtccttgcactcgcaggtca

SEQ ID NO: 11905 - protein, 293 aa, Homo sapiens
METPGASASSLLLPAASRPPRKREAGEAGAATSKQRVLDEEEYIEGLQTVIQRDFFPDVEKLQAQKEYLEAEENGDLERMRQIAIKFGSALGKMSREPPPPYVTPATFETPEVHAGTGVVGNKPRPRGRGLEDGEAGEEEEKEPLPSLDVFLSRYTSEDNASFQEIMEVAKERSRARHAWLYQAEEEFEKRQKDNLELPSAEHQAIESSQASVETWKYKAKNSLMYYPEGVPDEEQLFKKPRQVVHKNTRFLRDPFSQALSRCQLQQAAALNAQGPSLSFSKKAANPRAPALP

SEQ ID NO: 11906 - DNA, 1087 bp, Homo sapiens
cacagttgacttgacacaaggtcttggcaagggtcttctgagtaacagcagcagaaaaggaaaatgagccccttgagagcaaaataggccacaggcacacggggaagcgcccgaaatacagagcgccgataaagacagagatgttcactctgataatcagggaaacactaaaacagactgctttttcctgagagattgtcagaggtcatggttttgggaggaacacgaagacaggtgaggagtgctgcgccttgggcaggtcaggtggggtttggggctttccaggggcttttagtgggaggtgatgggttgtgggggttttgtaggcaacaaagagaggctggcacccaccacagtggctttctgtgtgaggggctgcctggcgtgtggcaggcctggcgcagctacccacacacctgctaccttgtagatcctggagccaggccgcagggagcggctgggtctgaagatggccaacgaggccgctgccaagaaccgggccaagaagcaggaagccttgcggagagtgacggagaatctggccagcctcacccccaaaggcctgagcccagccatgtcgccagccctacagcgccttgtgagcaggacggccagcaagtacacagaccgggccctgcgggccagctacacaccatccccagcacgctccacccacctcaagaccccggccagtgggctgcagacccccacaagcacaccggcgcctggctctgccacacgcacccctctcacacaggacccggcctccatcacggacaacctgctgcagctccctgcccggcgcaaagcttcggacttcttttagagccaggcctgggctgggctcatagacgcttcacagagcctgcagggcagctgtacacccagcagaggactccagccttctcggggcccaggcctgggccagaagctgttgaccataccaggagtcactggagaaaggggctgtgctggggccagactggcacaaggcactcgtgcccacaccacaccccagggccttgccaagctgtttgctgtttaattggccccttgaactgtcattaaagaacacctaggtacagtc

SEQ ID NO: 11907 - protein, 286 aa, Homo sapiens; identical to SEQ ID NO: 11895

SEQ ID NO: 11908 - DNA, 463 bp, Homo sapiens
tcgggtgttgacactccgtctcctcgtggaagtggaggagccgggtgtggacggtcccacgagtcaagtaaacagggcagaggaagacgtctgtggtggaagaggctgtagtagtgttgtcagggaaaagagagagcggctctccatcacggacaacctgctgcagctccctgcccggcgcaaagcttcggacttcttttagagccaggcctgggctgggctcatagacgcttcacagagcctgcagggcagctgtacacccagcagaggactccagccttctcggggcccaggcctgggccagaagctgttgaccataccaggagtcactggagaaaggggctgtgctggggccagactggcacaaggcactcgtgcccacaccacaccccagggccttgccaagctgtttgctgtttaattggccccttgaactgtcattaaagaacacctaggtacagtc

SEQ ID NO: 11909 - protein, 109 aa, Homo sapiens
CCQGKERAALHHGQPAAAPCPAQSFGLLLEPGLGWAHRRFTEPAGQLYTQQRTPAFSGPRPGPEAVDHTRSHWRKGLCWGQTGTRHSCPHHTPGPCQAVCCLIGPLNCH

SEQ ID NO: 11910 - DNA, 540 bp, Homo sapiens
gccgcgtccaggcccccgaggaagcgcgaggcgggagaggctggggctgcgacgagcaagcagcgggtcctggacgaggaagagtatatcgaggtacgacctcggtgcggacgccggcgacttctgggcccatcctctgcttcaagctcctctcaggttccctctctcgggtgttgacactccgtctcctcgtggaagtggaggagccgggtgtggacggtcccacgagtcaacctgctgcagctccctgcccggcgcaaagcttcggacttcttttagagccaggcctgggctgggctcatagacgcttcacagagcctgcagggcagctgtacacccagcagaggactccagccttctcggggcccaggcctgggccagaagctgttgaccataccaggagtcactggagaaaggggctgtgctggggccagactggcacaaggcactcgtgcccacaccacaccccagggccttgccaagctgtttgctgtttaattggccccttgaactgtcattaaagaacacctaggtacagtc

SEQ ID NO: 11911 - protein, 172 aa, Homo sapiens
RVQAPEEARGGRGWGCDEQAAGPGRGRVYRGTTSVRTPATSGPILCFKLLSGSLSRVLTLRLLVEVEEPGVDGPTSQPAAAPCPAQSFGLLLEPGLGWAHRRFTEPAGQLYTQQRTPAFSGPRPGPEAVDHTRSHWRKGLCWGQTGTRHSCPHHTPGPCQAVCCLIGPLNCH

SEQ ID NO: 11912 - DNA, 2144 bp, Homo sapiens
gcgatggagacgccgggcgcatcagcgtcgtccttgttgcttcccgccgcgtccaggcccccgaggaagcgcgaggcgggagaggctggggctgcgacgagcaagcagcgggtcctggacgaggaagagtatatcgaggtacgacctcggtgcggacgccggcgacttctgggcccatcctctgcttcaagctcctctcaggttccctctctcgggtgttgacactccgtctcctcgtggaagtggaggagccgggtgtggacggtcccacgagtcaagtaaacagggcagaggaagacgtctgtggtggaagaggctgtagtagtgttgtcagggaaaagagagagcggctctctttgtatgggacgggggtcagggaaagaagattttctgttaaagtgtgagtaggagtttgacaaactggaaggatggtggcaaagagggctttctaaagagcggtggcagcaagtgtgaatgctggggttcctggaaagagaccgcagttgtgacagcatctcgagtgagtggacctgcgtcgccccaccacacgcacacagaaggaggagctgaaacggggattggcggaaggcctccagacggtcatccaaagggatttctttcctgatgtggagaagctccaggcacagaaggagtacctggaagccgaggagaatggagacttggaacggatgcgccagattgccatcaagtttggctctgccttgggcaagatgtcccgggagcccccgccaccctatgtgactccagccacatttgaaacccctgaggtgcatgcaggcactggagtggtgggcaacaagcccaggccccgcggccgaggcctggaggatggagaggctggagaggaggaggagaaggagccgctgcccagcctagatgtcttcctgagccgctacacgagtgaggacaatgcctccttccaggagatcatggaggtggccaaggagagaagccgggcacgccacgcttggctctaccaggctgaggaagagtttgagaagaggcagaaagataatctcgaactcccgtcagcagagcaccaggccatcgagagcagccaggccagtgtggagacctggaagtacaaggccaagaattccctcatgtactatccagagggtgtccctgacgaggagcagctgtttaagaagccccggcaggtggtacataagaacacgcgcttccttagggaccccttcagccaagccctgagcaggtgccagctccagcaggcagccgccctcaatgcccagcacaaacagggcaaggtgggccccgatggcaaggagctgatcccccaggagtcccctcgagtgggtggatttggatttgttgccactccttcccctgcccctggtgtgaacgagtccccgatgatgacctggggggaggttgagaacacacccttgagagttgaagggtcggaaacgccctacgtggacaggacacccggcccagcttttaagatcctggagccaggccgcagggagcggctgggtctgaagatggccaacgaggccgctgccaagaaccgggccaagaagcaggaagccttgcggagagtgacggagaatctggccagcctcacccccaaaggcctgagcccagccatgtcgccagccctacagcgccttgtgagcaggacggccagcaagtacacagaccgggccctgcgggccagctacacaccatccccagcacgctccacccacctcaagaccccggccagtgggctgcagacccccacaagcacaccggcgcctggctctgccacacgcacccctctcacacaggacccggcctccatcacggacaacctgctgcagctccctgcccggcgcaaagcttcggacttcttttagagccaggcctgggctgggctcatagacgcttcacagagcctgcagggcagctgtacacccagcagaggactccagccttctcggggcccaggcctgggccagaagctgttgaccataccaggagtcactggagaaaggggctgtgctggggccagactggcacaaggcactcgtgcccacaccacaccccagggccttgccaagctgtttgctgtttaattggccccttgaactgtcattaaagaacacctaggtacagtc

SEQ ID NO: 11913 - protein, 397 aa, Homo sapiens; identical to SEQ ID NO: 11901

SEQ ID NO: 11914 - DNA, 1729 bp, Homo sapiens
cgcgcctgctgggcccgagctttttcctgggatagcgatggagacgccgggcgcatcagcgtcgtccttgttgcttcccgccgcgtccaggcccccgaggaagcgcgaggcgggagaggctggggctgcgacgagcaagcagcgggtcctggacgaggaagagtatatcgagggcctccagacggtcatccaaagggatttctttcctgatgtggagaagctccaggcacagaaggagtacctggaagccgaggagaatggagacttggaacggatgcgccagattgccatcaagtttggctctgccttgggcaagatgtcccgggagcccccgccaccctatgtgactccagccacatttgaaacccctgaggtgcatgcaggcactggagtggtgggcaacaagcccaggccccgcggccgaggcctggaggatggagaggctggagaggaggaggagaaggagccgctgcccagcctagatgtcttcctgagccgctacacgagtgaggacaatgcctccttccaggagatcatggaggtggccaaggagagaagccgggcacgccacgcttggctctaccaggctgaggaagagtttgagaagaggcagaaagataatctcgaactcccgtcagcagagcaccaggccatcgagagcagccaggccagtgtggagacctggaagtacaaggccaagaattccctcatgtactatccagagggtgtccctgacgaggagcagctgtttaagaagccccggcaggtggtacataagaacacgcgcttccttagggaccccttcagccaagccctgagcaggtgccagctccagcaggcagccgccctcaatgcccagcacaaacagggcaaggtgggccccgatggcaaggagctgatcccccaggagtcccctcgagtgggtggatttggatttgttgccactccttcccctgcccctggtgtgaacgagtccccgatgatgacctggggggaggttgagaacacacccttgagagttgaagggtcggaaacgccctacgtggacaggacacccggcccagcttttaagatcctggagccaggccgcagggagcggctgggtctgaagatggccaacgaggccgctgccaagaaccgggccaagaagcaggaagccttgcggagagtgacggagaatctggccagcctcacccccaaaggcctgagcccagccatgtcgccagccctacagcgccttgtgagcaggacggccagcaagtacacagaccgggccctgcgggccagctacacaccatccccagcacgctccacccacctcaagaccccggccagtgggctgcagacccccacaagcacaccggcgcctggctctgccacacgcacccctctcacacaggacccggcctccatcacggacaacctgctgcagctccctgcccggcgcaaagcttcggacttcttttagagccaggcctgggctgggctcatagacgcttcacagagcctgcagggcagctgtacacccagcagaggactccagccttctcggggcccaggcctgggccagaagctgttgaccataccaggagtcactggagaaaggggctgtgctggggccagactggcacaaggcactcgtgcccacaccacaccccagggccttgccaagctgtttgctgtttaattggccccttgaactgtcattaaagaacacctaggtacagtc

SEQ ID NO: 11915 - protein, 476 aa, Homo sapiens; identical to SEQ ID NO: 1974

SEQ ID NO: 11916 - DNA, 1810 bp, Homo sapiens
cctgtgacgcgcctgctgggcccgagctttttcctgggatagcgatggagacgccgggcgcatcagcgtcgtccttgttgcttcccgccgcgtccaggcccccgaggaagcgcgaggcgggagaggctggggctgcgacgagcaagcagcgggtcctggacgaggaagagtatatcgagggcctccagacggtcatccaaagggatttctttcctgatgtggagaagctccaggcacagaaggagtacctggaagccgaggagaatggagacttggaacggatgcgccagattgccatcaagtttggctctgccttgggcaagatgtcccgggagcccccgccaccctatgtgactccagccacatttgaaacccctgaggtgcatgcaggcactggagtggtgggcaacaagcccaggccccgcggccgaggcctggaggatggagaggctggagaggaggaggagaaggagccgctgcccagcctagatgtcttcctgagccgctacacgagtgaggacaatgcctccttccaggagatcatggaggtggccaaggagagaagccgggcacgccacgcttggctctaccaggctgaggaagagtttgagaagaggcagaaagataatctcgaactcccgtcagcagagcaccaggccatcgagagcagccaggccagtgtggagacctggaagtacaaggccaagaattccctcatgtactatccagagggtgtccctgacgaggagcagctgtttaagaagccccggcaggtggtacataagaacacgcgcttccttagggaccccttcagccaagccctgagcaggtgccagctccagcaggcagccgccctcaatgcccaggggccctccctctctttctccaagaaggctgccaaccccagagccccagccttgccctgaggagaggaagtgtttccagcatgttcccacgtgtttgcccaccggccagctgtcgagcgtgggctgcggtccccctgatgccagcctctctgcttgttccagcacaaacagggcaaggtgtgaacgagtccccgatgatgacctggggggaggttgagaacacacccttgagagttgaagggtcggaaacgccctacgtggacaggacacccggcccagcttttaagatcctggagccaggccgcagggagcggctgggtctgaagatggccaacgaggccgctgccaagaaccgggccaagaagcaggaagccttgcggagagtgacggagaatctggccagcctcacccccaaaggcctgagcccagccatgtcgccagccctacagcgccttgtgagcaggacggccagcaagtacacagaccgggccctgcgggccagctacacaccatccccagcacgctccacccacctcaagaccccggccagtgggctgcagacccccacaagcacaccggcgcctggctctgccacacgcacccctctcacacaggacccggcctccatcacggacaacctgctgcagctccctgcccggcgcaaagcttcggacttcttttagagccaggcctgggctgggctcatagacgcttcacagagcctgcagggcagctgtacacccagcagaggactccagccttctcggggcccaggcctgggccagaagctgttgaccataccaggagtcactggagaaaggggctgtgctggggccagactggcacaaggcactcgtgcccacaccacaccccagggccttgccaagctgtttgctgtttaattggccccttgaactgtcattaaagaacacctaggtacagtc

SEQ ID NO: 11917 - protein, 293 aa, Homo sapiens; identical to SEQ ID NO: 11905

SEQ ID NO: 11918 - DNA, 537 bp, Homo sapiens
atctggacctgtagaataagaaggtcgcaggagcgattccaggagcccctccacagtcccttcaccttcgagcctcgcgctgatactgagaaactagcaacttcaaataccacagaagccgcccagagtctcaagtccaccttggctccactcccacacccaacaaggagctgtcccttcttcttccttcccagcgagggggtatttagggtacagctgtctttgagaggagcacagctcagcgatcctcagtctctgcaccagggtgctccccagcagaggggactgctccacggatggtggccttggacccctggggtccagccctggcctctaggctactgtgaacctgcccatgggtgagggtcccctgcttcctcctggggttttcatgctgtgggctcggactccctcacagcaatctgtgccatcctagggtagggcaagaggaggttggactggggagaccccgcccctgaggaagtcagttttactgtttatcaataaatcaataaatcccagaatctctccagctct

SEQ ID NO: 11919 - protein, 32 aa, Homo sapiens
GRARGGWTGETPPLRKSVLLFINKSINPRISP

SEQ ID NO: 11920 - DNA, 1033 bp, Homo sapiens
atggcggcagcggctgggggcgcggcgagccgccggggtgccgggcggccctgccccttctccatcgagcacatcctctccagcctgcccgagcggagcctcccggcccgggccgcctgcccaccgcagcccgccggtcgccagagccccgcgaagccagaggagcccggggcgcccgaggctgcgccctgcgcctgctgctgctgctgcggcccccgcgcggcgccctgcgggcccccagaggcggccgccgggctgggcgctcgtctggcgtggccgctgaggctgggaccggcggtgcccttgtctctgggtgcgccagccggaggttccggggcgctcccgggcgcggtcggcccgggttcgcagcggcgcacgaggcgccaccgcaccatcttcagcgaagagcagctgcaggcgctcgaggcgcttttcgtgcagaaccagtatcctgacgtgagtacgcgcgagcgcctggccggccgcatccgccttcgcgaggagcgcgtggaggtctggttcaagaaccgccgggccaaatggcgacaccagaagcgcgcgtcggcttccgcgaggctcctgcccggcgtcaagaagtccccgaaggggagctgctgatgactctaggagctgcccctgggctcggccaccctttttgggatctttggagttggcgctgagagaagacaggtctacccgaaaaggagctgggagagtacaccggccgcctccacccgtctccacagcccttgcctcctgcagctcgtgctgccgtggcgctggggacgggcccccggtgcttggtgttccacggcagtgggagtggcgagtcccttgggggtgggctggggcatagagcagtttcctcagctccctaccccccgagagacactaactccaccgcaggaggggaaccaccccgtatcaacacgggacccagaatcctacgcagtggagcgtctctccgcaccctgggacatgctggccaccctcttctcaatgtggacattgacctaacttgacctggctcgtc

SEQ ID NO: 11921 - protein, 205 aa, Homo sapiens; identical to SEQ ID NO: 1976

SEQ ID NO: 11922 - DNA, 4157 bp, Homo sapiens
cccgcgcgcgggcagctcacttccgcccggcaggtgacagccgcggggctccgagccgccggcagcccggacgcaccgggagagcgagaggtggaggccgcggacattttggtgccaagccgaaccgagccggggcgccgggagctattgggacctgcggaagcctggctacagataagggaccaaaatgactgactcaaaatatttcaccacgaccaagaaaggggagatcttcgagctgaaggcagagctcaacagtgacaagaaggagaagaagaaggaggcagtgaagaaagtgattgcatcgatgaccgtgggcaaagatgtcagtgccctcttccccgatgtggtcaactgcatgcagacggacaacctggagctgaagaagctagtatacctctacttgatgaattacgccaagagtcagcctgacatggccattatggccgtcaacacctttgtgaaggactgtgaggaccccaaccccctcatccgagccctggcagtgcggaccatgggctgcatccgcgttgacaagatcacagagtacctgtgcgagccactccggaagtgcctgaaggacgaggatccatatgtgcgcaagacagcagctgtgtgcgtggccaagctccacgacatcaacgcccagctggtggaggaccagggcttcctggacacccttaaagacctcatctccgactctaaccccatggtggtggccaatgcagtggcagcgctctcagaaattgccgagtctcaccccagcagcaacctgctcgatctgaacccacagtccatcaacaagctgctgacagccctcaatgagtgcaccgagtggggccagatcttcatcctggactgcctcgccaactatatgcccaaggacgaccgcgaggcccagagcatctgtgagcgggtcacccccaggctctcccatgccaactccgctgtggtgctctctgctgtgaaggtgctgatgaagttcatggagatgttgtctaaggacttggactactacggcacactgctcaagaagctggccccacccctggtcacactgctgtcagccgagccagagctgcagtatgtggccctgcgcaacatcaatctcatcgtgcagaaaaggcctgagatcctgaagcatgagatgaaggtgttcttcgtgaagtacaacgaccctatctacgtgaagctggagaagctggacatcatgatccgcctggcctctcaggccaacatcgcccaggtgttggcagagctgaaagagtacgcaacagaagtggatgtggactttgtacggaaggctgtgcgtgctattggccgctgcgccatcaaggtggagcaatctgcggagcgctgtgtgagcacgctgctcgacctcatccagaccaaggtcaactatgtggtccaggaggccatcgtggtcatcaaggacatcttccgcaagtaccccaacaagtatgagagtgtgattgccacactgtgtgagaatctggactccctggatgagcctgaggcccgggctgccatgatctggattgtgggcgagtacgcggaacggatcgacaacgcagatgagctgctggagagcttcctcgagggcttccatgacgagagcacacaggtccagctgcagctgctgacagccattgtgaaactctttctaaagaagccaacagagacccaggagctggtgcagcaggtcctcagtttggccactcaggactcagataacccagacctgcgggaccgtggctacatctactggcgcctgctgtccacggacccggtggcagccaaggaggtggtgttggctgagaagccactcatctctgaagagacggacctcatcgagcccacactgttagacgagcttatctgctacatcggcacgctggcttccgtctaccataagcctcccagtgcctttgtggaggggggccggggcgtcgtgcacaagagcctgccacctcgcacggcctcgagtgagagcgcagagagccctgagacagcccctactggagcacctcctggggagcagccagatgtcatccccgcccagggcgacctgctgggtgacctcctcaacctggacctcggccccccagtgagcggcccacccctggccacctcctcggtgcagatgggagctgtggaccttcttggcggtggccttgacagcctgattgggggcaccaacttcgtggcacctccaacagcagcagtaccagccaatcttggagcacccatcggcagtggcctgagtgacctctttgacctgaccagtggcgtgggcaccctgtcaggatcatatgtggcccccaaagcagtctggctcccagccatgaaggctaaggggctggagatctcaggcaccttcacccgccaggtgggctccatctccatggacctgcagctgaccaacaaggccttgcaggtcatgaccgactttgccatccagttcaaccgcaacagctttggcctggcccccgccacccccctccaggtccacgcgccactcagccccaaccagacagtggagatctccctgcctctcagcacggtgggctcggtcatgaagatggagcctctgaacaacctccaggtggccgtgaagaacaacatcgatgtcttctacttcagcaccttgtacccactgcacatcctctttgtggaggacgggaagatggaccggcagatgttcctggccacatggaaggatattcccaatgagaatgaggcccagttccagatcagagactgccccctcaatgcagaggctgcgagcagcaagctgcagagcagcaacatcttcactgtcgccaagaggaacgtggagggccaggacatgctctaccagtccctgaagctgaccaacggcatctgggtgctggcggagctgcggatccagccgggcaaccccagctgcacggacttagagctgtccctgaagtgtcgagcaccagaggtgtcccagcacgtgtaccaggcctacgagaccatcctcaagaactgagaccccggccagcgcccaccccagccttctgcccgccccatcgaggaggcccctcgggggcagcacatcttcctcctcgcaggagggaccaggcggggctccaggccactcagtgggctccctggtcctgatggcagaacccacccgatccctggggtagggcaccaccccctcctggggtgagagcgcagtgcactcccgtgctctgggacacccctgctcctgtggctgtgatgtggggttaagtgaggtggggaccaaaggaaacagagccagagcagccacagaagctgtgcctgaagggtgagtgtggagcttgcccctccggctcacagccccggcagcccctggctccttggtctctccggttggtgttaaagggccctccactgccacctctcatgggatggaccctgccaacctggcctgggtgtgcagggaggggttccccttggtaccaggagagctgctcacttagggcctggggctcaaggagctgtaggtgccggcagaggggcagagctaggctgggaggagcccagggcctgcaccacccacttgcaaccaccaggctggtgccctgcagctgtgccagttgggccacagcctcccgagtgctgacccacatggtcaagaccaggcagaagctcccagagcccctgtctcgggctccccaccgactggcagctgcactatccccaactccccacttctgccccaagggtggtcactgcctgtgatacattcctcagtgtcgcctctgagcccaggcctcctgccacaaagactgggccgagagatggggctgggtaagcgggtgcgcctcctgtttgggtttcttcggggtttctctgtagtgtctgctgccctcctcctggcctcccaggtttcagttgtgtctgacagagcattaggttttcctgttactgctgtgtaataataaagaaagattcggcttttggcaatcacggacacttttttcccctccaccgaatgtcaggattgaaagctgcctccgagtggttggggatggttttctgaccctacggtaactagatctaatatatatcatcagaaaatatatattgtatgtttactcttattttcagaaagagaaaatgaataaaaatgatgacatcaa

SEQ ID NO: 11923 - protein, 942 aa, Homo sapiens; identical to SEQ ID NO: 1980

SEQ ID NO: 11924 - DNA, 4178 bp, Homo sapiens
cccgcgcgcgggcagctcacttccgcccggcaggtgacagccgcggggctccgagccgccggcagcccggacgcaccgggagagcgagaggtggaggccgcggacattttggtgccaagccgaaccgagccggggcgccgggagctattgggacctgcggaagcctggctacagataagggaccaaaatgactgactcaaaatatttcaccacgaccaagaaaggggagatcttcgagctgaaggcagagctcaacagtgacaagaaggagaagaagaaggaggcagtgaagaaagtgattgcatcgatgaccgtgggcaaagatgtcagtgccctcttccccgatgtggtcaactgcatgcagacggacaacctggagctgaagaagctagtatacctctacttgatgaattacgccaagagtcagcctgacatggccattatggccgtcaacacctttgtgaaggactgtgaggaccccaaccccctcatccgagccctggcagtgcggaccatgggctgcatccgcgttgacaagatcacagagtacctgtgcgagccactccggaagtgcctgaaggacgaggatccatatgtgcgcaagacagcagctgtgtgcgtggccaagctccacgacatcaacgcccagctggtggaggaccagggcttcctggacacccttaaagacctcatctccgactctaaccccatggtggtggccaatgcagtggcagcgctctcagaaattgccgagtctcaccccagcagcaacctgctcgatctgaacccacagtccatcaacaagctgctgacagccctcaatgagtgcaccgagtggggccagatcttcatcctggactgcctcgccaactatatgcccaaggacgaccgcgaggcccagagcatctgtgagcgggtcacccccaggctctcccatgccaactccgctgtggtgctctctgctgtgaaggtgctgatgaagttcatggagatgttgtctaaggacttggactactacggcacactgctcaagaagctggccccacccctggtcacactgctgtcagccgagccagagctgcagtatgtggccctgcgcaacatcaatctcatcgtgcagaaaaggcctgagatcctgaagcatgagatgaaggtgttcttcgtgaagtacaacgaccctatctacgtgaagctggagaagctggacatcatgatccgcctggcctctcaggccaacatcgcccaggtgttggcagagctgaaagagtacgcaacagaagtggatgtggactttgtacggaaggctgtgcgtgctattggccgctgcgccatcaaggtggagcaatctgcggagcgctgtgtgagcacgctgctcgacctcatccagaccaaggtcaactatgtggtccaggaggccatcgtggtcatcaaggacatcttccgcaagtaccccaacaagtatgagagtgtgattgccacactgtgtgagaatctggactccctggatgagcctgaggcccgggctgccatgatctggattgtgggcgagtacgcggaacggatcgacaacgcagatgagctgctggagagcttcctcgagggcttccatgacgagagcacacaggtccagctgcagctgctgacagccattgtgaaactctttctaaagaagccaacagagacccaggagctggtgcagcaggtcctcagtttggccactcaggactcagataacccagacctgcgggaccgtggctacatctactggcgcctgctgtccacggacccggtggcagccaaggaggtggtgttggctgagaagccactcatctctgaagagacggacctcatcgagcccacactgttagacgagcttatctgctacatcggcacgctggcttccgtctaccataagcctcccagtgcctttgtggaggggggccggggcgtcgtgcacaagagcctgccacctcgcacggcctcgagtgagagcgcagagagccctgagacagcccctactggagcacctcctggggagcagccagatgtcatccccgcccagggcgacctgctgggtgacctcctcaacctggacctcggccccccagtgagcggcccacccctggccacctcctcggtgcagatgggagctgtggaccttcttggcggtggccttgacagcctgatgggggatgagcctgaagggattgggggcaccaacttcgtggcacctccaacagcagcagtaccagccaatcttggagcacccatcggcagtggcctgagtgacctctttgacctgaccagtggcgtgggcaccctgtcaggatcatatgtggcccccaaagcagtctggctcccagccatgaaggctaaggggctggagatctcaggcaccttcacccgccaggtgggctccatctccatggacctgcagctgaccaacaaggccttgcaggtcatgaccgactttgccatccagttcaaccgcaacagctttggcctggcccccgccacccccctccaggtccacgcgccactcagccccaaccagacagtggagatctccctgcctctcagcacggtgggctcggtcatgaagatggagcctctgaacaacctccaggtggccgtgaagaacaacatcgatgtcttctacttcagcaccttgtacccactgcacatcctctttgtggaggacgggaagatggaccggcagatgttcctggccacatggaaggatattcccaatgagaatgaggcccagttccagatcagagactgccccctcaatgcagaggctgcgagcagcaagctgcagagcagcaacatcttcactgtcgccaagaggaacgtggagggccaggacatgctctaccagtccctgaagctgaccaacggcatctgggtgctggcggagctgcggatccagccgggcaaccccagctgcacggacttagagctgtccctgaagtgtcgagcaccagaggtgtcccagcacgtgtaccaggcctacgagaccatcctcaagaactgagaccccggccagcgcccaccccagccttctgcccgccccatcgaggaggcccctcgggggcagcacatcttcctcctcgcaggagggaccaggcggggctccaggccactcagtgggctccctggtcctgatggcagaacccacccgatccctggggtagggcaccaccccctcctggggtgagagcgcagtgcactcccgtgctctgggacacccctgctcctgtggctgtgatgtggggttaagtgaggtggggaccaaaggaaacagagccagagcagccacagaagctgtgcctgaagggtgagtgtggagcttgcccctccggctcacagccccggcagcccctggctccttggtctctccggttggtgttaaagggccctccactgccacctctcatgggatggaccctgccaacctggcctgggtgtgcagggaggggttccccttggtaccaggagagctgctcacttagggcctggggctcaaggagctgtaggtgccggcagaggggcagagctaggctgggaggagcccagggcctgcaccacccacttgcaaccaccaggctggtgccctgcagctgtgccagttgggccacagcctcccgagtgctgacccacatggtcaagaccaggcagaagctcccagagcccctgtctcgggctccccaccgactggcagctgcactatccccaactccccacttctgccccaagggtggtcactgcctgtgatacattcctcagtgtcgcctctgagcccaggcctcctgccacaaagactgggccgagagatggggctgggtaagcgggtgcgcctcctgtttgggtttcttcggggtttctctgtagtgtctgctgccctcctcctggcctcccaggtttcagttgtgtctgacagagcattaggttttcctgttactgctgtgtaataataaagaaagattcggcttttggcaatcacggacacttttttcccctccaccgaatgtcaggattgaaagctgcctccgagtggttggggatggttttctgaccctacggtaactagatctaatatatatcatcagaaaatatatattgtatgtttactcttattttcagaaagagaaaatgaataaaaatgatgacatcaa

SEQ ID NO: 11925 - protein, 949 aa, Homo sapiens; identical to SEQ ID NO: 1978

SEQ ID NO: 11926 - DNA, 3910 bp, Homo sapiens
cccgcgcgcgggcagctcacttccgcccggcaggtgacagccgcggggctccgagccgccggcagcccggacgcaccgggagagcgagaggtggaggccgcggacattttggtgccaagccgaaccgagccggggcgccgggagctattgggacctgcggaagcctggctacagataagggaccaaaatgactgactcaaaatatttcaccacgaccaagaaaggggagatcttcgagctgaaggcagagctcaacagtgacaagaaggagaagaagaaggaggcagtgaagaaagtgattgcatcgatgaccgtgggcaaagatgtcagtgccctcttccccgatgtggtcaactgcatgcagacggacaacctggagctgaagaagctagtatacctctacttgatgaattacgccaagagtcagcctgacatggccattatggccgtcaacacctttgtgaaggactgtgaggaccccaaccccctcatccgagccctggcagtgcggaccatgggctgcatccgcgttgacaagatcacagagtacctgtgcgagccactccggaagtgcctgaaggacgaggatccatatgtgcgcaagacagcagctgtgtgcgtggccaagctccacgacatcaacgcccagctggtggaggaccagggcttcctggacacccttaaagacctcatctccgactctaaccccatggtggtggccaatgcagtggcagcgctctcagaaattgccgagtctcaccccagcagcaacctgctcgatctgaacccacagtccatcaacaagctgctgacagccctcaatgagtgcaccgagtggggccagatcttcatcctggactgcctcgccaactatatgcccaaggacgaccgcgaggcccagagcatctgtgagcgggtcacccccaggctctcccatgccaactccgctgtggtgctctctgctgtgaaggtgctgatgaagttcatggagatgttgtctaaggacttggactactacggcacactgctcaagaagctggccccacccctggtcacactgctgtcagccgagccagagctgcagtatgtggccctgcgcaacatcaatctcatcgtgcagaaaaggcctgagatcctgaagcatgagatgaaggtgttcttcgtgaagtacaacgaccctatctacgtgaagctggagaagctggacatcatgatccgcctggcctctcaggccaacatcgcccaggtgttggcagagctgaaagagtacgcaacagaagtggatgtggactttgtacggaaggctgtgcgtgctattggccgctgcgccatcaaggtggagcaatctgcggagcgctgtgtgagcacgctgctcgacctcatccagaccaaggtcaactatgtggtccaggaggccatcgtggtcatcaaggacatcttccgcaagtaccccaacaagtatgagagtgtgattgccacactgtgtgagaatctggactccctggatgagcctgaggcccgggctgccatgatctggattgtgggcgagtacgcggaacggatcgacaacgcagatgagctgctggagagcttcctcgagggcttccatgacgagagcacacaggtccagctgcagctgctgacagccattgtgaaactctttctaaagaagccaacagagacccaggagctggtgcagcaggtcctcagtttggccactcaggactcagataacccagacctgcgggaccgtggctacatctactggcgcctgctgtccacggacccggtggcagccaaggaggtggtgttggctgagaagccactcatctctgaagagacggacctcatcgagcccacactgttagacgagcttatctgctacatcggcacgctggcttccgtctaccataagcctcccagtgcctttgtggaggggggccggggcgtcgtgcacaagagcctgccacctcgcacggcctcgagtgagagcgcagagagccctgagacagcccctactggagcacctcctggggagcagccagatgtcatccccgcccagggcgacctgctgggtgacctcctcaacctggacctcggccccccagtgagcggcccacccctggccacctcctcggtgcagatgggagctgtggaccttcttggcggtggccttgacagcctgattgggggcaccaacttcgtggcacctccaacagcagcagtaccagccaatcttggagcacccatcggcagtggcctgagtgacctctttgacctgaccagtggcgtgggcaccctgtcaggatcatatgtggcccccaaagcagtgggctccatctccatggacctgcagctgaccaacaaggccttgcaggtcatgaccgactttgccatccagttcaaccgcaacagctttggcctggcccccgccacccccctccaggtccacgcgccactcagccccaaccagacagtggagatctccctgcctctcagcacggtgggctcggtcatgaagatggagcctctgaacaacctccaggtggccgtgaagaacaacatcgatgtcttctacttcagcaccttgtacccactgcacatcctctttgtggaggacgggaagatggaccggcagatgttcctggccacatggaaggatattcccaatgagaatgaggcccagttccagatcagagactgccccctcaatgcagaggctgcgagcagcaagctgcagagcagcaacatcttcactgtcgccaagaggaacgtggagggccaggacatgctctaccagtccctgaagctgaccaacggcatctgggtgctggcggagctgcggatccagccgggcaaccccagctgcacgctgtccctgaagtgtcgagcaccagaggtgtcccagcacgtgtaccaggcctacgagaccatcctcaagaactgagaccccggccagcgcccaccccagccttctgcccgccccatcgaggaggcccctcgggggcagcacatcttcctcctcgcaggagggaccaggcggggctccaggccactcagtgggctccctggtcctgatggcagaacccacccgatccctggggtagggcaccaccccctcctggggtgagagcgcagtgcactcccgtgctctgggacacccctgctcctgtggctgtgatgtggggttaagtgaggtggggaccaaaggaaacagagccagagcagccacagaagctgtgcctgaagggtgagtgtggagcttgcccctccggctcacagccccggcagcccctggctccttggtctctccggttggtgttaaagggccctccactgccacctctcatgggatggaccctgccaacctggcctgggtgtgcagggaggggttccccttggtaccaggagagctgctcacttagggcctggggctcaaggagctgtaggtgccggcagaggggcagagctaggctgggaggagcccagggcctgcaccacccacttgcaaccaccaggctggtgccctgcagctgtgccagttgggccacagcctcccgagtgctgacccacatggtcaagaccaggcagaagctcccagagcccctgtctcgggctccccaccgactggcagctgcactatccccaactccccacttctgccccaagggtggtcactgcctgtgatacattcctcagtgtcgcctctgagcccaggcctcctgccacaaagactgggccgagagatggggctgggtaagcgggtgcgcctcctgtttgggtttcttcggggtttctctgtagtgtctgctgccctcctcctggcctcccaggtttcagttgtgtctgacagagcattaggttttcctgttactgctgtgtaataataaagaaagattcggcttttggc

SEQ ID NO: 11927 - protein, 919 aa, Homo sapiens
MTDSKYFTTTKKGEIFELKAELNSDKKEKKKEAVKKVIASMTVGKDVSALFPDVVNCMQTDNLELKKLVYLYLMNYAKSQPDMAIMAVNTFVKDCEDPNPLIRALAVRTMGCIRVDKITEYLCEPLRKCLKDEDPYVRKTAAVCVAKLHDINAQLVEDQGFLDTLKDLISDSNPMVVANAVAALSEIAESHPSSNLLDLNPQSINKLLTALNECTEWGQIFILDCLANYMPKDDREAQSICERVTPRLSHANSAVVLSAVKVLMKFMEMLSKDLDYYGTLLKKLAPPLVTLLSAEPELQYVALRNINLIVQKRPEILKHEMKVFFVKYNDPIYVKLEKLDIMIRLASQANIAQVLAELKEYATEVDVDFVRKAVRAIGRCAIKVEQSAERCVSTLLDLIQTKVNYVVQEAIVVIKDIFRKYPNKYESVIATLCENLDSLDEPEARAAMIWIVGEYAERIDNADELLESFLEGFHDESTQVQLQLLTAIVKLFLKKPTETQELVQQVLSLATQDSDNPDLRDRGYIYWRLLSTDPVAAKEVVLAEKPLISEETDLIEPTLLDELICYIGTLASVYHKPPSAFVEGGRGVVHKSLPPRTASSESAESPETAPTGAPPGEQPDVIPAQGDLLGDLLNLDLGPPVSGPPLATSSVQMGAVDLLGGGLDSLIGGTNFVAPPTAAVPANLGAPIGSGLSDLFDLTSGVGTLSGSYVAPKAVGSISMDLQLTNKALQVMTDFAIQFNRNSFGLAPATPLQVHAPLSPNQTVEISLPLSTVGSVMKMEPLNNLQVAVKNNIDVFYFSTLYPLHILFVEDGKMDRQMFLATWKDIPNENEAQFQIRDCPLNAEAASSKLQSSNIFTVAKRNVEGQDMLYQSLKLTNGIWVLAELRIQPGNPSCTLSLKCRAPEVSQHVYQAYETILKN

SEQ ID NO: 11928 - DNA, 705 bp, Homo sapiens
gccgccggcagcccggacgcaccgggagagcgagaggtggaggccgcggacattttggtgccaagccgaaccgagccggggcgccgggagctattgggacctgcggaagcctggctacagataagggaccaaaatgactgactcaaaatatttcaccacgaccaagaaaggggagatcttcgagctgaaggcagagctcaacagtgacaagaaggagaagaagaaggaggcagtgaagaaagtgattgcatcgatgaccgtgggcaaagatgtcagtgccctcttccccgatgtggtcaactgcatgcagacggacaacctggagctgaagaagctagtatacctctacttgatgaattacgccaagagtcagcctgacatggccattatggccgtcaacacctttgtgaaggtgagcagacgcttggtgggcgtggggacattgggtgcttaaggctctgtctcccctcagtctctttggggcggggccctgtggcactggatggagtccagaccttcagactgcccgcgcccgcccagcctgcaggcctcttcctccagcagagggctcccactctccagaaaatcagatgctaaggaccctgcgtaactcatcctgtgtgaggtcctgccaggcctgttgatcccctcactgccctgattggaccctgccctgcatgctttgctagggcaggaatcagcagg

SEQ ID NO: 11929 - protein, 106 aa, Homo sapiens
MTDSKYFTTTKKGEIFELKAELNSDKKEKKKEAVKKVIASMTVGKDVSALFPDVVNCMQTDNLELKKLVYLYLMNYAKSQPDMAIMAVNTFVKVSRRLVGVGTLGA

SEQ ID NO: 11930 - DNA, 584 bp, Homo sapiens
agccttcagtagctggtagtggaaggaggagctctgactacactctcacgactgttttttgcctcttggttcttgttatgtccctttctttttgaaataagacagaaggtccccaccttcatagacatagagagatcccatcttatttgtttttaaaaataaattgaaaagtgaggcggagccttgtgaggatgatgggagagggcttccagagaggaatttcttctttggaattcctgaaatgggaacaaacttgttttgggaaaaggacagaaagacacaaaggtggctgcagcagagtgaaatgaatatgatgggctaaggcctcgtacacgtagtgagcattgacaaagaatatggactttagttgagatgggaaaccactggaggattacagcctggggattactgttaattctccaagaagaagactgaccagcggctgtgtgagaatgtcctgtaatgcaggcaagggtggaagcagggagaccagctaggaggctggtggcgaagtgcaggtttggacgcccgctccaagcgctggttaaaaataatatggagacggcacgggatttggcctctag

SEQ ID NO: 11931 - protein, 39 aa, Homo sapiens
MQARVEAGRPARRLVAKCRFGRPLQALVKNNMETARDLA

SEQ ID NO: 11932 - DNA, 5115 bp, Homo sapiens
tgggggcttatttggcctccccaggatggactggagcatcagtagtgcccgggtttatcacaggacagatactcaagacactcttatcaccattaggtggacttggaggagcaaaaaacaagtgcagtggctcctcagcagagacactcctgaatgtatagacatgggaaccaccttcagcatcaaaaaaggaaacgttctgcatgcccatatccagaaaaatccccactcgctgtaacttgcggtctacgaagaggaaagtcagcggcaccgtgctggcagagaggcggcttccatccctcaaactcacagtccagaatccacgctctgtggtcagatggatcctccctttgcggtgaacagattctctgcagactcccaggtcccattctgtgcttgttcccacgtccacctcccagtagtggcggccacaggtaaagcgaggggagcccaggatgcaaatggacacgtcaaatctctcggcaaggtcttgccgattctgtgtgatgcacccacttcggacgctcctgaggtcgtcagaaatgaggaggaagttgttggctgtgtcggcatccaaggtcatatccactgtgaaaaggaaaaaaagttgatcagaaaatggacagaagccaaccccatgcctctcctctacttcaaaggcccaaatatctcttgactttggtttctttaattctcttcttcccccaaaatcaaaacttttcatgaggcaacttccctgactagttcaaattctcataggtatgctttgtggcaatacccaactcttattcacagtagcaattattttactttatgtcacgtgtttgcttcattggacttttcttcatttagagtggagggtctctgaaggcagacaccatgaccccctttctaccaccttgatgcatgaaaaaatgaatgataattaagacaatgcaaatggtcgatgttaaatatgtttctgcttccatcttgtattgctcaactcagtatatagagcatgattccaggcctttgttttccatgtttgtaagcaaattaattgtgcatggttctgacagcaggtagggtatctctgcagctgacaatgtgatgacagaggtgccggtcctggacattaggaggctccaaggccaggaggaagaggggggccttagatgaaagaatgttttccatcctacatgggaggtgaaaccttaagcaaaacaatggtaaattttggagtgaagagaaaggtatttgaaagttgtttgttggctgagcgcggtggctcacacctgtaatcccagcactttgggaggccgagacgggtggatcacgaggtcaggagatcgagaccatcctggctaacacgtgaaaccctgtctctactaaaaaacatacaaaaaaattagccggacatggtggcgggtgcctgtagtcctagctactcggtagactgaggcaggagaatggcatgaacccaggaggcggagcttgcaatgagcagagatcatgccactgcacctccagcctaggcggcagagcgagactccatctcaaaaaataaaaaaaaaaagaaagttgttcgtcataactgactgatcgtagagaataagggcagtaaatacaaaggtcaataatttaatgcattgggtatgtggttgataggtgaagctgccaattctcatggaggaggcagtgtgatctggcctaaagaaaattaattgtccagagcattctgaaaaaaaaatctacagaacatatgatccttcaagtcaaaaaactgatgatcaccaatatagattttatagattacagtaagacttgaggagactgattgctgtttgatggtgaattagggaatgaaatgagatgagtggacatggacaaggaaggaggaagagggttccaaacatgacttaggcagggtgaatctgtcctccatatttcagcagagacacagtcaggtatgggtaggtggatgagtagagatcatgggtgtcagggcagaagccaccaccatttataggtgtaattctttgcccaggctgaccataacctcttcatttaaatgtccctattccccagagttatggagagtgatagtattttctgtagccaggacccctgttgaagtccatggcacaccgatgaggagaccagcgtctgcaactcgccccactcacagaaacaaacaccataggtgctccattccaaactcttcccaaccctggggtgaggttgtttggtacagtgggtgccaatactcactgtgcattagaattaccaggcccatttaaatgtcagagtcctgggaacctttgctagagagaaattcaaattaagttgctctgtgtttttgctactcagcaaagtccccaagccagcgggatcaatcctgagacttcccagttcagcatctgcattttaacaagatccccaggtaatctgagcacactaagtttagagaatcccttgtctaacccatgacatagacatcaggtttttttttttgagacggagtctcactctgtcacccaggctggagtgcagtggtgcaatcttggctcactgcaagctccgccccccccaggttaacgccattctcctgcctcaacccccaagtagctgggactacaggcacccaccaccaagcctggctaattttttgtatttttagtagagacagggtttcaccgtgttatccaggatggtcccgatctcctgacctcgtgatccacccgcctcggcctcccaaagtgctgacattacaggcatgagccaccatgcccagccagccttttttttggagatcaccaggtgattctgtatgttgtcagggctgagaatctgatgatgaagaagcatctcaattttaggtgccagacagcagctaatccccatatggaatgaggggccagttgcacagatgatttttcctggtctggtcgtaggaagggggcagtgtatacagatccctcaccttggaacttccgcatccttgggttcatctgcagaatcttcttcagcttgggctccagttccttgatgtgggaagccagcctctctagctgccaactgggcctgattttgttcttctgagagaccatggaacagcaacagcaaagtagatcctccccatggggctccttctgcagtgaattgatgcacttgaagcagacagcgcatccacactccagggacattggtttctctagatagtctgagcagacgggacagctgcttgcttcttggaagagtgcagccatgtccactgccaggggaaaagtgcacaagggaagaaaatttccgtgaggtgaaagcctgttagttgtgacaagtgacaaccttttcatgcataaaggtattgtgtcccagctttgtcacttctagaacaagaccatgagtacaaacactcaagcacatccccccaccccccgtcttcagagatttgaagttctattgggaaagaaagtcacgaatcatcactgtgctctgaactgaggtggaggaagggtccattctactggtgacccagcaactgagcctgagccagtgacacggcagcacccatgtgaggaacagcgagctggggtcatttcacctcctcctaggggaaccccagcaagagattgattgatgaacataagaattaggggctgggaggccgggcgtggtggctcaggcctataatcccagcactttgggaggctgacgtgagtggatcatctgaggtcgtcaaaagttcgagaccagcctgatgggtgaaaccccatctctactgaaaatacaaaagaattagccaggcgtggtggcacacgcctgtaatcccagatacttgggaggctgaggcaggagaattgcttgaacctgggaggcaaaggttgcagtgagccaagatccagccattgcactccggcctggacaacagagtgagacaccatctcaaaaaaaaaaaaaaaaaaaaagagagggactggatgcagtagctcacatctgtaatcccagcactttgcgaggccaaggctggaagatcccttgagccaaggagtttgagatcagcctgggcaacacaggaagaccccctctctacaaataatagaaaaattagcagtgagcagagatcacaccaggtcactccaacctggacaacagagttaagaccctgtctcaccaaaaaaaaaaaaaaaaaaatcacatccttctccagccttggaaatgaataccaaattgactgccaccactcctagactggagatctggggatccagggtgactggttttcaactctgaggcagcactcagacagcctttgttgaattcattaattacgaatttctctcattcatcccccaaggcataacccccatttctaggcatctaaggaggaaaaacacacacacaggcatgggctcacctcttctgctggaagctcctctgtcctccagctgcttccactgggcgctcaggtcttgtgcggaaggggcacatgagggcgttttattggtgagattcccacctcccactgggtcatgcccttccacaccctctaacctaatgaggctttgatttaattataacagggaattaggtttttactggtgatatatctccagttaattgtaactttagtaaatccttcatcctgacagtgtatttttctttcatatgaagataagattaaattgcctttatattaaattaggcttaatgtactaacttcaaaagcttattttagagatgtttccatcagttgtcagtaaagataattcctgtaatatgttgtaggcttcaagctttgcttggaaacctgaagtattaagtatgattggatttgcaattttacaaaatggtttaaattcatatacatcagactcaaaggtaataggggcatgcattccattgaggaaattctagggaatttttatttattttcattggtttatttctggttttgaaaaaatttcataattcataggaaaaaattggataattactattttgacaaatgaccattaagcttcttggaccttgagtacttcacacagtgttaagataaaagtcacaatttaaaaaaaaaagatgattttcttgtgaaacttgtgttctcaaataaaaattgttacccgtgaa

SEQ ID NO: 11933 - protein, 112 aa, Homo sapiens
MDPPFAVNRFSADSQVPFCACSHVHLPVVAATGKARGAQDANGHVKSLGKVLPILCDAPTSDAPEVVRNEEEVVGCVGIQGHIHCEKEKKLIRKWTEANPMPLLYFKGPNIS

SEQ ID NO: 11934 - DNA, 4190 bp, Homo sapiens
ggttttgcatgaagcagcagaacatgatgaagcatttttcccccatctaaagatccagtcgtgctccagtttgcagagggcaaggggctggttgcaggtggtgctgggaggatggagtagagatggggtttcaccgtgttaaccaggaatgtctcgatctcctgacctcgtgatccacccgcctcagcctcccaaagtgttgggattacaggcgtgagctaccacgcccggccctaggctccacaactctaagaagctttgtgggggcttatttggcctccccaggatggactggagcatcagtagtgcccgggtttatcacaggacagatactcaagacactcttatcaccattaggtggacttggaggagcaaaaaacaagtgcagtggctcctcagcagagacactcctgaatgtatagacatgggaaccaccttcagcatcaaaaaaggaaacgttctgcatgcccatatccagaaaaatccccactcgctgtaacttgcggtctacgaagaggaaagtcagcggcaccgtgctggcagagaggcggcttccatccctcaaactcacagtccagaatccacgctctgtggtcagatggatcctccctttgcggtgaacagattctctgcagactcccaggtcccattctgtgcttgttcccacgtccacctcccagtagtggcggccacaggtaaagcgaggggagcccaggatgcaaatggacacgtcaaatctctcggcaaggtcttgccgattctgtgtgatgcacccacttcggacgctcctgaggtcgtcagaaatgaggaggaagttgttggctgtgtcggcatccaaggtcatatccactgtgaaaaggaaaaaaagttgatcagaaaatggacagaagccaaccccatgcctctcctctacttcaaaggcccaaatatctcttgactttggtttctttaattctcttcttcccccaaaatcaaaacttttcatgaggcaacttccctgactagttcaaattctcataggtatgctttgtggcaatacccaactcttattcacagtagcaattattttactttatgtcacgtgtttgcttcattggacttttcttcatttagagtggagggtctctgaaggcagacaccatgaccccctttctaccaccttgatgcatgaaaaaatgaatgataattaagacaatgcaaatggtcgatgttaaatatgtttctgcttccatcttgtattgctcaactcagtatatagagcatgattccaggcctttgttttccatgtttgtaagcaaattaattgtgcatggttctgacagcaggtagggtatctctgcagctgacaatgtgatgacagaggtgccggtcctggacattaggaggctccaaggccaggaggaagaggggggccttagatgaaagaatgttttccatcctacatgggaggtgaaaccttaagcaaaacaatggtaaattttggagtgaagagaaaggtatttgaaagttgtttgttggctgagcgcggtggctcacacctgtaatcccagcactttgggaggccgagacgggtggatcacgaggtcaggagatcgagaccatcctggctaacacgtgaaaccctgtctctactaaaaaacatacaaaaaaattagccggacatggtggcgggtgcctgtagtcctagctactcggtagactgaggcaggagaatggcatgaacccaggaggcggagcttgcaatgagcagagatcatgccactgcacctccagcctaggcggcagagcgagactccatctcaaaaaataaaaaaaaaaagaaagttgttcgtcataactgactgatcgtagagaataagggcagtaaatacaaaggtcaataatttaatgcattgggtatgtggttgataggtgaagctgccaattctcatggaggaggcagtgtgatctggcctaaagaaaattaattgtccagagcattctgaaaaaaaaatctacagaacatatgatccttcaagtcaaaaaactgatgatcaccaatatagattttatagattacagtaagacttgaggagactgattgctgtttgatggtgaattagggaatgaaatgagatgagtggacatggacaaggaaggaggaagagggttccaaacatgacttaggcagggtgaatctgtcctccatatttcagcagagacacagtcaggtatgggtaggtggatgagtagagatcatgggtgtcagggcagaagccaccaccatttataggtgtaattctttgcccaggctgaccataacctcttcatttaaatgtccctattccccagagttatggagagtgatagtattttctgtagccaggacccctgttgaagtccatggcacaccgatgaggagaccagcgtctgcaactcgccccactcacagaaacaaacaccataggtgctccattccaaactcttcccaaccctggggtgaggttgtttggtacagtgggtgccaatactcactgtgcattagaattaccaggcccatttaaatgtcagagtcctgggaacctttgctagagagaaattcaaattaagttgctctgtgtttttgctactcagcaaagtccccaagccagcgggatcaatcctgagacttcccagttcagcatctgcattttaacaagatccccaggtaatctgagcacactaagtttagagaatcccttgtctaacccatgacatagacatcaggtttttttttttgagacggagtctcactctgtcacccaggctggagtgcagtggtgcaatcttggctcactgcaagctccgccccccccaggttaacgccattctcctgcctcaacccccaagtagctgggactacaggcacccaccaccaagcctggctaattttttgtatttttagtagagacagggtttcaccgtgttatccaggatggtcccgatctcctgacctcgtgatccacccgcctcggcctcccaaagtgctgacattacaggcatgagccaccatgcccagccagccttttttttggagatcaccaggtgattctgtatgttgtcagggctgagaatctgatgatgaagaagcatctcaattttaggtgccagacagcagctaatccccatatggaatgaggggccagttgcacagatgatttttcctggtctggtcgtaggaagggggcagtgtatacagatccctcaccttggaacttccgcatccttgggttcatctgcagaatcttcttcagcttgggctccagttccttgatgtgggaagccagcctctctagctgccaactgggcctgattttgttcttctgagagaccatggaacagcaacagcaaagtagatcctccccatggggctccttctgcagtgaattgatgcacttgaagcagacagcgcatccacactccagggacattggtttctctagatagtctgagcagacgggacagctgcttgcttcttggaagagtgcagccatgtccactgccaggggaaaagtgcacaagggaagaaaatttccgtgaggtgaaagcctgttagttgtgacaagtgacaaccttttcatgcataaaggtattgtgtcccagctttgtcacttctagaacaagaccatgagtacaaacactcaagcacatccccccaccccccgtcttcagagatttgaagttctattgggaaagaaagtcacgaatcatcactgtgctctgaactgaggtggaggaagggtccattctactggtgacccagcaactgagcctgagccagtgacacggcagcacccatgtgaggaacagcgagctggggtcatttcacctcctcctaggggaaccccagcaagagattgattgatgaacataagaattaggggctgggaggccgggcgtggtggctcaggcctataatcccagcactttgggaggctgacgtgagtggatcatctgaggtcgtcaaaagttcgagaccagcctgatgggtgaaaccccatctctactgaaaatacaaaagaattagccaggcgtggtggcacacgcctgtaatcccagatacttgggaggctgaggcaggagaattgcttgaacctgggaggcaaaggttgcagtgagccaagatccagccattgcactccggcctggacaacagagtgagacaccatctc

SEQ ID NO: 11935 - protein, 112 aa, Homo sapiens; identical to SEQ ID NO: 11933

SEQ ID NO: 11936 - DNA, 1770 bp, Homo sapiens
agtatctgggattacaggcgtgtgccaccacgcctggctaattcttttgtattttcagtagagatggggtttcacccatcaggctggtctcgaacttttgacgacctcagatgatccactcacgtcagcctcccaaagtgctgggattataggcctgagccaccacgcccggcctcccagcccctaattcttatgttcatcaatcaatctcttgctggggttcccctaggaggaggtgaaatgaccccagctcgctgttcctcacatgggtgctgccgtgtcactggctcaggctcagttgctgggtcaccagtagaatggacccttcctccacctcagttcagagcacagtgatgattcgtgactttctttcccaatagaacttcaaatctctgaagacggggggtggggggatgtgcttgagtgtttgtactcatggtcttgttctagaagtgacaaagctgggacacaatacctttatgcatgaaaaggttgtcacttgtcacaactaacaggctttcacctcacggaaattttcttcccttgtgcacttttcccctggcagtggacatggctgcactcttccaagaagcaagcagctgtcccgtctgctcagactatctagagaaaccaatgtccctggagtgtggatgcgctgtctgcttcaagtgcatcaattcactgcagaaggagccccatggggaggatctactttgctgttgctgttccatggtctctcagaagaacaaaatcaggcccagttggcagctagagaggctggcttcccacatcaaggaactggagcccaagctgaagaagattctgcagatgaacccaaggatgcggaagttccaagtggatatgaccttggatgccgacacagccaacaacttcctcctcatttctgacgacctcaggagcgtccgaagtgggtgcatcacacagaatcggcaagaccttgccgagagatttgacgtgtccatttgcatcctgggctcccctcgctttacctgtggccgccactactgggaggtggacgtgggaacaagcacagaatgggacctgggagtctgcagagaatctgttcaccgcaaagggaggatccatctgaccacagagcgtggattctggactgtgagtttgagggatggaagccgcctctctgccagcacggtgccgctgactttcctcttcgtagaccgcaagttacagcgagtggggatttttctggatatgggcatgcagaacgtttccttttttgatgctgaaggtggttcccatgtctatacattcaggagtgtctctgctgaggagccactgcacttgttttttgctcctccaagtccacctaatggtgataagagtgtcttgagtatctgtcctgtgataaacccgggcactactgatgctccagtccatcctggggaggccaaataagcccccactgcaaaaaaacaaaaaacaggttaagaaaattacttgggtgggcagacttaggaacgctctactcggtaaaagcgttatacaaagtcataggagaaaaatatgggacaattcatgattatacttaatctaatttgattagtttataaattgagtcctaagtattaattattgccaccatccaactcattgagtcttatggttcacatcttgtttcctatagaaatattctgtattctgggatcaatttccaaatgcttttttatttctgtaagttcaaattaatgtattatagaagttatgagttaaataaacattggaatatca

SEQ ID NO: 11937 - protein, 317 aa, Homo sapiens; identical to SEQ ID NO: 1983

SEQ ID NO: 11938 - DNA, 382 bp, Homo sapiens
caggcatttctgagtcctgaccaccctgagctgctgttttttcaccatttctttgttcagctcacctgtcattatccgttctcaaaaccagatcctgagcttccaaccactaagacaggagcatagctcacacctgtgatcccagtactttgggaggctgaggcaggcagatcacgagatgaagaaccagcctgggcaacatagcaagaccctgtctcaaaaaaaaaaaaaaaaattagccaggcgtggtggtgcgcacctgtaatcccagctactcgggaggctgaggcaggagaattgcttgaacccaggaggcggaggttgtagtgagctgagatcacgccactgcactccagcctgggcaacagagcaagactgtctc

SEQ ID NO: 11939 - protein, 40 aa, Homo sapiens
QDPVSKKKKKISQAWWCAPVIPATREAEAGELLEPRRRRL

SEQ ID NO: 11940 - DNA, 585 bp, Homo sapiens
agtcgtgctccagtttgcagagggcaaggggctggttgcaggtggtgctgggaggatggagtagagatggggtttcaccgtgttaaccaggaatgtctcgatctcctgacctcgtgatccacccgcctcagcctcccaaagtgttgggattacaggcgtgagctaccacgcccggccctaggctccacaactctaagaagctttggtgagtaaacaggcctgaagaggtgaaatcatttgccaagcacagaaccaggattcaaaactttgcagtctggctctagaatgccaccccgtcccacctcaggactggccctctcctgggaattcctttctccctcatcctccatgtcctttctctgtggagccgtgtgccctgcccatatctaagtacatgtcctgggatccaggggatgacatatactggagtccctggtgcccatgccttctgactcctcctagaccatgagctgaggggacagagagtggctcttgcacctggggggctcagggtgtgtacagtgggtgaacaaatggggggacatttgaggcccaggcagaaggacacagaatgttccctggtgg

SEQ ID NO: 11941 - protein, 34 aa, Homo sapiens
MPPRPTSGLALSWEFLSPSSSMSFLCGAVCPAHI

SEQ ID NO: 11942 - DNA, 3719 bp, Homo sapiens
ataaaagggccggcgccctggtgctgccgcagtgcctcccgccccgtcccggcctcgcgcacctgctcaggccatgatgagcttcggcggcgcggacgcgctgctgggcgccccgttcgcgccgctgcatggcggcggcagcctccactacgcgctagcccgaaagggtggcgcaggcgggacgcgctccgccgctggctcctccagcggcttccactcgtggacacggacgtccgtgagctccgtgtccgcctcgcccagccgcttccgtggcgcaggcgccgcctcaagcaccgactcgctggacacgctgagcaacgggccggagggctgcatggtggcggtggccacctcacgcagtgagaaggagcagctgcaggcgctgaacgaccgcttcgccgggtacatcgacaaggtgcggcagctggaggcgcacaaccgcagcctggagggcgaggctgcggcgctgcggcagcagcaggcgggccgctccgctatgggcgagctgtacgagcgcgaggtccgcgagatgcgcggcgcggtgctgcgcctgggcgcggcgcgcggtcagctacgcctggagcaggagcacctgctcgaggacatcgcgcacgtgcgccagcgcctagacgacgaggcccggcagcgagaggaggccgaggcggcggcccgcgcgctggcgcgcttcgcgcaggaggccgaggcggcgcgcgtggacctgcagaagaaggcgcaggcgctgcaggaggagtgcggctacctgcggcgccaccaccaggaagaggtgggcgagctgctcggccagatccagggctccggcgccgcgcaggcgcagatgcaggccgagacgcgcgacgccctgaagtgcgacgtgacgtcggcgctgcgcgagattcgcgcgcagcttgaaggccacgcggtgcagagcacgctgcagtccgaggagtggttccgagtgaggctggaccgactgtcggaggcagccaaggtgaacacagacgctatgcgctcagcgcaggaggagataactgagtaccggcgtcagctgcaggccaggaccacagagctggaggcactgaaaagcaccaaggactcactggagaggcagcgctctgagctggaggaccgtcatcaggccgacattgcctcctaccaggaagccattcagcagctggacgctgagctgaggaacaccaagtgggagatggccgcccagctgcgagaataccaggacctgctcaatgtcaagatggctctggatatagagatagccgcttacagaaaactcctggaaggtgaagagtgtcggattggctttggcccaattcctttctcgcttccagaaggactccccaaaattccctctgtgtccactcacataaaggtgaaaagcgaagagaagatcaaagtggtggagaagtctgagaaagaaactgtgattgtggaggaacagacagaggagacccaagtgactgaagaagtgactgaagaagaggagaaagaggccaaagaggaggagggcaaggaggaagaagggggtgaagaagaggaggcagaagggggagaagaagaaacaaagtctcccccagcagaagaggctgcatccccagagaaggaagccaagtcaccagtaaaggaagaggcaaagtcaccggctgaggccaagtccccagagaaggaggaagcaaaatccccagccgaagtcaagtcccctgagaaggccaagtctccagcaaaggaagaggcaaagtcaccgcctgaggccaagtccccagagaaggaggaagcaaaatctccagctgaggtcaagtcccccgagaaggccaagtccccagcaaaggaagaggcaaagtcaccggctgaggccaagtctccagagaaggccaagtccccagtgaaggaagaagcaaagtcaccggctgaggccaagtccccagtgaaggaagaagcaaaatctccagctgaggtcaagtccccggaaaaggccaagtctccaacgaaggaggaagcaaagtcccctgagaaggccaagtccccagagaaggaagaggccaagtcccctgagaaggccaagtccccagtgaaggcagaagcaaagtcccctgagaaggccaagtccccagtgaaggcagaagcaaagtcccctgagaaggccaagtccccagtgaaggaagaagcaaagtcccctgagaaggccaagtccccagtgaaggaagaagcaaagtcccctgagaaggccaagtccccagtgaaggaagaagcaaagacccccgagaaggccaagtccccagtgaaggaagaagctaagtccccagagaaggccaagtccccagagaaggccaagactcttgatgtgaagtctccagaagccaagactccagcgaaggaggaagcaaggtcccctgcagacaaattccctgaaaaggccaaaagccctgtcaaggaggaggtcaagtccccagagaaggcgaaatctcccctgaaggaggatgccaaggcccctgagaaggagatcccaaaaaaggaagaggtgaagtccccagtgaaggaggaggagaagccccaggaggtgaaagtcaaagagcccccaaagaaggcagaggaagagaaagcccctgccacaccaaaaacagaggagaagaaggacagcaagaaagaggaggcacccaagaaggaggctccaaagcccaaggtggaggagaagaaggaacctgctgtcgaaaagcccaaagaatccaaagttgaagccaagaaggaagaggctgaagataagaaaaaagtccccaccccagagaaggaggctcctgccaaggtggaggtgaaggaagacgctaaacccaaagaaaagacagaggtagccaagaaggaaccagatgatgccaaggccaaggaacccagcaaaccagcagagaagaaggaggcagcaccggagaaaaaagacaccaaggaggagaaggccaagaagcctgaggagaaacccaagacagaggccaaagccaaggaagatgacaagaccctctcaaaagagcctagcaagcctaaggcagaaaaggctgaaaaatcctccagcacagaccaaaaagacagcaagcctccagagaaggccacagaagacaaggccgccaaggggaagtaaggcagggagaaaggaacatccggaacagccaaagaaactcagaagagtcccggagctcaaggatcagagtaacacaattttcactttttctgtctttatgtaagaagaaactgcttagatgacggggcctccttcttcaaacaggaatttctgttagcaatatgttagcaagagagggcactcccaggcccctgcccccaggccctccccaggcgatggacaattatgatagcttatgtagctgaatgtgatacatgccgaatgccacacgtaaacacttgactataaaaactgcccccctcctttccaaataagtgcatttattgcctctatgtgcaactgacagatgaccgcaataatgaatgagcagttagaaatacattatgcttgagatgtcttaacctattcccaaatgccttctgttttccaaaggagtggtcaagcccttgcccagagctctctattctggaagagcggtccaggtggggccggggactggccactgaattatgccagggcgcactttccactggagttcactttcaattgcttctgtgcaataaaaccaagtgcttataaaatg

SEQ ID NO: 11943 - protein, 1020 aa, Homo sapiens; identical to SEQ ID NO: 1985

SEQ ID NO: 11944 - DNA, 3617 bp, Homo sapiens
ataaaagggccggcgccctggtgctgccgcagtgcctcccgccccgtcccggcctcgcgcacctgctcaggccatgatgagcttcggcggcgcggacgcgctgctgggcgccccgttcgcgccgctgcatggcggcggcagcctccactacgcgctagcccgaaagggtggcgcaggcgggacgcgctccgccgctggctcctccagcggcttccactcgtggacacggacgtccgtgagctccgtgtccgcctcgcccagccgcttccgtggcgcaggcgccgcctcaagcaccgactcgctggacacgctgagcaacgggccggagggctgcatggtggcggtggccacctcacgcagtgagaaggagcagctgcaggcgctgaacgaccgcttcgccgggtacatcgacaaggtgcggcagctggaggcgcacaaccgcagcctggagggcgaggctgcggcgctgcggcagcagcaggcgggccgctccgctatgggcgagctgtacgagcgcgaggtccgcgagatgcgcggcgcggtgctgcgcctgggcgcggcgcgcggtcagctacgcctggagcaggagcacctgctcgaggacatcgcgcacgtgcgccagcgcctagacgacgaggcccggcagcgagaggaggccgaggcggcggcccgcgcgctggcgcgcttcgcgcaggaggccgaggcggcgcgcgtggacctgcagaagaaggcgcaggcgctgcaggaggagtgcggctacctgcggcgccaccaccaggaagaggtgggcgagctgctcggccagatccagggctccggcgccgcgcaggcgcagatgcaggccgagacgcgcgacgccctgaagtgcgacgtgacgtcggcgctgcgcgagattcgcgcgcagcttgaaggccacgcggtgcagagcacgctgcagtccgaggagtggttccgagtgaggctggaccgactgtcggaggcagccaaggtgaacacagacgctatgcgctcagcgcaggaggagataactgagtaccggcgtcagctgcaggccaggaccacagagctggaggcactgaaaagcaccaaggactcactggagaggcagcgctctgagctggaggaccgtcatcaggccgacattgcctcctaccaggaagccattcagcagctggacgctgagctgaggaacaccaagtgggagatggccgcccagctgcgagaataccaggacctgctcaatgtcaagatggctctggatatagagatagccgcttacagaaaactcctggaaggtgaagagtgtcggattggctttggcccaattcctttctcgcttccagaaggactccccaaaattccctctgtgtccactcacataaaggtgaaaagcgaagagaagatcaaagtggtggagaagtctgagaaagaaactgtgattgtggaggaacagacagaggagacccaaacaaagtctcccccagcagaagaggctgcatccccagagaaggaagccaagtcaccagtaaaggaagaggcaaagtcaccggctgaggccaagtccccagagaaggaggaagcaaaatccccagccgaagtcaagtcccctgagaaggccaagtctccagcaaaggaagaggcaaagtcaccgcctgaggccaagtccccagagaaggaggaagcaaaatctccagctgaggtcaagtcccccgagaaggccaagtccccagcaaaggaagaggcaaagtcaccggctgaggccaagtctccagagaaggccaagtccccagtgaaggaagaagcaaagtcaccggctgaggccaagtccccagtgaaggaagaagcaaaatctccagctgaggtcaagtccccggaaaaggccaagtctccaacgaaggaggaagcaaagtcccctgagaaggccaagtccccagagaaggaagaggccaagtcccctgagaaggccaagtccccagtgaaggcagaagcaaagtcccctgagaaggccaagtccccagtgaaggcagaagcaaagtcccctgagaaggccaagtccccagtgaaggaagaagcaaagtcccctgagaaggccaagtccccagtgaaggaagaagcaaagtcccctgagaaggccaagtccccagtgaaggaagaagcaaagacccccgagaaggccaagtccccagtgaaggaagaagctaagtccccagagaaggccaagtccccagagaaggccaagactcttgatgtgaagtctccagaagccaagactccagcgaaggaggaagcaaggtcccctgcagacaaattccctgaaaaggccaaaagccctgtcaaggaggaggtcaagtccccagagaaggcgaaatctcccctgaaggaggatgccaaggcccctgagaaggagatcccaaaaaaggaagaggtgaagtccccagtgaaggaggaggagaagccccaggaggtgaaagtcaaagagcccccaaagaaggcagaggaagagaaagcccctgccacaccaaaaacagaggagaagaaggacagcaagaaagaggaggcacccaagaaggaggctccaaagcccaaggtggaggagaagaaggaacctgctgtcgaaaagcccaaagaatccaaagttgaagccaagaaggaagaggctgaagataagaaaaaagtccccaccccagagaaggaggctcctgccaaggtggaggtgaaggaagacgctaaacccaaagaaaagacagaggtagccaagaaggaaccagatgatgccaaggccaaggaacccagcaaaccagcagagaagaaggaggcagcaccggagaaaaaagacaccaaggaggagaaggccaagaagcctgaggagaaacccaagacagaggccaaagccaaggaagatgacaagaccctctcaaaagagcctagcaagcctaaggcagaaaaggctgaaaaatcctccagcacagaccaaaaagacagcaagcctccagagaaggccacagaagacaaggccgccaaggggaagtaaggcagggagaaaggaacatccggaacagccaaagaaactcagaagagtcccggagctcaaggatcagagtaacacaattttcactttttctgtctttatgtaagaagaaactgcttagatgacggggcctccttcttcaaacaggaatttctgttagcaatatgttagcaagagagggcactcccaggcccctgcccccaggccctccccaggcgatggacaattatgatagcttatgtagctgaatgtgatacatgccgaatgccacacgtaaacacttgactataaaaactgcccccctcctttccaaataagtgcatttattgcctctatgtgcaactgacagatgaccgcaataatgaatgagcagttagaaatacattatgcttgagatgtcttaacctattcccaaatgccttctgttttccaaaggagtggtcaagcccttgcccagagctctctattctggaagagcggtccaggtggggccggggactggccactgaattatgccagggcgcactttccactggagttcactttcaattgcttctgtgcaataaaaccaagtgcttataaaatgaaa

SEQ ID NO: 11945 - protein, 985 aa, Homo sapiens
MMSFGGADALLGAPFAPLHGGGSLHYALARKGGAGGTRSAAGSSSGFHSWTRTSVSSVSASPSRFRGAGAASSTDSLDTLSNGPEGCMVAVATSRSEKEQLQALNDRFAGYIDKVRQLEAHNRSLEGEAAALRQQQAGRSAMGELYEREVREMRGAVLRLGAARGQLRLEQEHLLEDIAHVRQRLDDEARQREEAEAAARALARFAQEAEAARVDLQKKAQALQEECGYLRRHHQEEVGELLGQIQGSGAAQAQMQAETRDALKCDVTSALREIRAQLEGHAVQSTLQSEEWFRVRLDRLSEAAKVNTDAMRSAQEEITEYRRQLQARTTELEALKSTKDSLERQRSELEDRHQADIASYQEAIQQLDAELRNTKWEMAAQLREYQDLLNVKMALDIEIAAYRKLLEGEECRIGFGPIPFSLPEGLPKIPSVSTHIKVKSEEKIKVVEKSEKETVIVEEQTEETQTKSPPAEEAASPEKEAKSPVKEEAKSPAEAKSPEKEEAKSPAEVKSPEKAKSPAKEEAKSPPEAKSPEKEEAKSPAEVKSPEKAKSPAKEEAKSPAEAKSPEKAKSPVKEEAKSPAEAKSPVKEEAKSPAEVKSPEKAKSPTKEEAKSPEKAKSPEKEEAKSPEKAKSPVKAEAKSPEKAKSPVKAEAKSPEKAKSPVKEEAKSPEKAKSPVKEEAKSPEKAKSPVKEEAKTPEKAKSPVKEEAKSPEKAKSPEKAKTLDVKSPEAKTPAKEEARSPADKFPEKAKSPVKEEVKSPEKAKSPLKEDAKAPEKEIPKKEEVKSPVKEEEKPQEVKVKEPPKKAEEEKAPATPKTEEKKDSKKEEAPKKEAPKPKVEEKKEPAVEKPKESKVEAKKEEAEDKKKVPTPEKEAPAKVEVKEDAKPKEKTEVAKKEPDDAKAKEPSKPAEKKEAAPEKKDTKEEKAKKPEEKPKTEAKAKEDDKTLSKEPSKPKAEKAEKSSSTDQKDSKPPEKATEDKAAKGK

SEQ ID NO: 11946 - DNA, 3823 bp, Homo sapiens
ataaaagggccggcgccctggtgctgccgcagtgcctcccgccccgtcccggcctcgcgcacctgctcaggccatgatgagcttcggcggcgcggacgcgctgctgggcgccccgttcgcgccgctgcatggcggcggcagcctccactacgcgctagcccgaaagggtggcgcaggcgggacgcgctccgccgctggctcctccagcggcttccactcgtggacacggacgtccgtgagctccgtgtccgcctcgcccagccgcttccgtggcgcaggcgccgcctcaagcaccgactcgctggacacgctgagcaacgggccggagggctgcatggtggcggtggccacctcacgcagtgagaaggagcagctgcaggcgctgaacgaccgcttcgccgggtacatcgacaaggtgcggcagctggaggcgcacaaccgcagcctggagggcgaggctgcggcgctgcggcagcagcaggcgggccgctccgctatgggcgagctgtacgagcgcgaggtccgcgagatgcgcggcgcggtgctgcgcctgggcgcggcgcgcggtcagctacgcctggagcaggagcacctgctcgaggacatcgcgcacgtgcgccagcgcctagacgacgaggcccggcagcgagaggaggccgaggcggcggcccgcgcgctggcgcgcttcgcgcaggaggccgaggcggcgcgcgtggacctgcagaagaaggcgcaggcgctgcaggaggagtgcggctacctgcggcgccaccaccaggaagaggtgggcgagctgctcggccagatccagggctccggcgccgcgcaggcgcagatgcaggccgagacgcgcgacgccctgaagtgcgacgtgacgtcggcgctgcgcgagattcgcgcgcagcttgaaggccacgcggtgcagagcacgctgcagtccgaggagtggttccgagtgaggctggaccgactgtcggaggcagccaaggtgaacacagacgctatgcgctcagcgcaggaggagataactgagtaccggcgtcagctgcaggccaggaccacagagctggaggcactgaaaagcaccaaggactcactggagaggcagcgctctgagctggaggaccgtcatcaggccgacattgcctcctaccaggaagccattcagcagctggacgctgagctgaggaacaccaagtgggagatggccgcccagctgcgagaataccaggacctgctcaatgtcaagatggctctggatatagagatagccgcttacagaaaactcctggaaggtgaagagtgtcggattggctttggcccaattcctttctcgcttccagaaggactccccaaaattccctctgtgtccactcacataaaggtgaaaagcgaagagaagatcaaagtggtggagaagtctgagaaagaaactgtgattgtggaggaacagacagaggagacccaagtgactgaagaagtgactgaagaagaggagaaagaggccaaagaggaggagggcaaggaggaagaagggggtgaagaagaggaggcagaagggggagaagaagaaacaaagtctcccccagcagaagaggctgcatccccagagaaggaagccaagtcaccagtaaaggaagaggcaaagtcaccggctgaggccaagtccccagagaaggaggaagcaaaatccccagccgaagtcaagtcccctgagaaggccaagtctccagcaaaggaagaggcaaagtcaccgcctgaggccaagtccccagagaaggaggaagcaaaatctccagctgaggtcaagtcccccgagaaggccaagtccccagcaaaggaagaggcaaagtcaccggctgaggccaagtctccagagaaggccaagtccccagtgaaggaagaagcaaagtcaccggctgaggccaagtccccagtgaaggaagaagcaaaatctccagctgaggtcaagtccccggaaaaggccaagtctccaacgaaggaggaagcaaagtcccctgagaaggccaagtccccagagaaggaagaggccaagtcccctgagaaggccaagtccccagtgaaggcagaagcaaagtcccctgagaaggccaagtccccagtgaaggcagaagcaaagtcccctgagaaggccaagtccccagtgaaggaagaagcaaagtcccctgagaaggccaagtccccagtgaaggaagaagcaaagtcccctgagaaggccaagtccccagtgaaggaagaagcaaagacccccgagaaggccaagtccccagtgaaggaagaagctaagtccccagagaaggccaagtccccagagaaggccaagactcttgatgtgaagtctccagaagccaagactccagcgaaggaggaagcaaggtcccctgcagacaaattccctgaaaaggccaaaagccctgtcaaggaggaggtcaagtccccagagaaggcgaaatctcccctgaaggaggatgccaaggcccctgagaaggagatcccaaaaaaggaagaggtgaagtccccagtgaaggaggaggagaagccccaggaggtgaaagtcaaagagcccccaaagaaggcagaggaagagaaagcccctgccacaccaaaaacagaggagaagaaggacagcaagaaagaggaggcacccaagaaggaggctccaaagcccaaggtggaggagaagaaggaacctgctgtcgaaaagcccaaagaatccaaagttgaagccaagaaggaagaggctgaagataagaaaaaagtccccaccccagagaaggaggctcctgccaaggtggaggtgaaggaagacgctaaacccaaagaaaagacagaggtagccaagaaggaaccagatgatgccaaggccaaggaacccagcaaaccagcagagaagaaggaggcagcaccggagaaaaaagacaccaaggaggagaaggccaagaagcctgaggagaaacccaagacagaggccaaagccaaggaagatgacaagaccctctcaaaagagcctagcaagcctaaggcagaaaaggctgaaaaatcctccagcacagaccaaaaagacagcaagcctccagagaaggccacagaagacaaggccgccaaggggaagtaaggcagggagaaaggaacatccggaacagccaaagaaactcagaagagtcccggagctcaaggatcagagtaacacaattttcactttttctgtctttatgtaagaagaaactgcttagatgacggggcctccttcttcaaacaggaatttctgttagcaatatgttagcaagagagggcactcccaggcccctgcccccaggccctccccaggcgatggacaattatgatagcttatgtagctgaatgtgatacatgccgaatgccacacgtaaacacttgactataaaaactgcccccctcctttccaaataagtgcatttattgcctctatgtgcaactgacagatgaccgcaataatgaatgagcagttagaaatacattatgcttgagatgtcttaacctattcccaaatgccttctgttttccaaaggagtggtcaagcccttgcccagagctctctattctggaagagcggtccaggtggggccggggactggccactgaattatgccagggcgcactttccactggagttcactttcaattgcttctgtgcaataaaaccaagtgcttataaaatgaaaatgttgctgctgttattctctttccctgggaaggctgggggcagggcaggggaggtctggatgtgacaccccagactgcatgggactgagcaagcatcagt

SEQ ID NO: 11947 - protein, 1020 aa, Homo sapiens; identical to SEQ ID NO: 1985

SEQ ID NO: 11948 - DNA, 593 bp, Homo sapiens
cttcactggggacttggccttctcaggggactttgcttcttccttcactggggacttggccttctcaggggactttgcttcttccttcactggggacttggccttctcaggggattggccttctcaggggactttgcttcctccttcgttggagacttggccttttccggggacttgacctcagctggagattttgcttcttccttcactggggacttggcctcagccggtgactttgcttcttccttcactggggacttggccttctctggagacttggcctcagccggtgactttgcctcttcctttgctggggacttggccttctcgggggacttgacctcagctggagattttgcttcctccttctctggggacttggcctcaggcggtgactttgcctcttcctttgctggagacttggccttctcaggggacttgacttcggctggggattttgcttcctccttctctggggacttggcctcagccggtgactttgcctcttcctttactggtgacttggcttccttctctggggatgcagcctcttctgctgggggagactttgtttcttcttctcccccttctgc

SEQ ID NO: 11949 - protein, 196 aa, Homo sapiens
LHWGLGLLRGLCFFLHWGLGLLRGLCFFLHWGLGLLRGLAFSGDFASSFVGDLAFSGDLTSAGDFASSFTGDLASAGDFASSFTGDLAFSGDLASAGDFASSFAGDLAFSGDLTSAGDFASSFSGDLASGGDFASSFAGDLAFSGDLTSAGDFASSFSGDLASAGDFASSFTGDLASFSGDAASSAGGDFVSSSPP

SEQ ID NO: 11950 - DNA, 1704 bp, Homo sapiens
gtcaccagtaaaggaagaggcaaagtcaccggctgaggccaagtccccagagaaggaggaagcaaaatccccagccgaagtcaagtcccctgagaaggccaagtctccagcaaaggaagaggcaaagtcaccgcctgaggccaagtccccagagaaggaggaagccaagtctccagagaaggccaatcccctgagaaggccaagtccccagagaaggaagaggccaagtcccctgagaaggccaagtccccagtgaaggcagaagcaaagtcccctgagaaggccaagtccccagtgaaggcagaagcaaagtcccctgagaaggccaagtccccagtgaaggaagaagcaaagtcccctgagaaggccaagtccccagtgaaggaagaagcaaagtcccctgagaaggccaagtccccagtgaaggaagaagcaaagacccccgagaaggccaagtccccagtgaaggaagaagctaagcccctgagaaggagatcccaaaaaaggaagaggtgaagtccccagtgaaggaggaggagaagccccaggaggtgaaagtcaaagagcccccaaagaaggcagaggaagagaaagcccctgccacaccaaaaacagaggagaagaaggacagcaagaaagaggaggcacccaagaaggaggctccaaagcccaaggtggaggagaagaaggaacctgctgtcgaaaagcccaaagaatccaaagttgaagccaagaaggaagaggctgaagataagaaaaaagtccccaccccagagaaggaggctcctgccaaggtggaggtgaaggaagacgctaaacccaaagaaaagacagaggtagccaagaaggaaccagatgatgccaaggccaaggaacccagcaaaccagcagagaagaaggaggcagcaccggagaaaaaagacaccaaggaggagaaggccaagaagcctgaggagaaacccaagacagaggccaaagccaaggaagatgacaagaccctctcaaaagagcctagcaagcctaaggcagaaaaggctgaaaaatcctccagcacagaccaaaaagacagcaagcctccagagaaggccacagaagacaaggccgccaaggggaagtaaggcagggagaaaggaacatccggaacagccaaagaaactcagaagagtcccggagctcaaggatcagagtaacacaattttcactttttctgtctttatgtaagaagaaactgcttagatgacggggcctccttcttcaaacaggaatttctgttagcaatatgttagcaagagagggcactcccaggcccctgcccccaggccctccccaggcgatggacaattatgatagcttatgtagctgaatgtgatacatgccgaatgccacacgtaaacacttgactataaaaactgcccccctcctttccaaataagtgcatttattgcctctatgtgcaactgacagatgaccgcaataatgaatgagcagttagaaatacattatgcttgagatgtcttaacctattcccaaatgccttctgttttccaaaggagtggtcaagcccttgcccagagctctctattctggaagagcggtccaggtggggccggggactggccactgaattatgccagggcgcactttccactggagttcactttcaattgcttctgtgcaataaaaccaagtgcttataaaatgaaa

SEQ ID NO: 11951 - protein, 121 aa, Homo sapiens
MMPRPRNPANQQRRRRQHRRKKTPRRRRPRSLRRNPRQRPKPRKMTRPSQKSLASLRQKRLKNPPAQTKKTASLQRRPQKTRPPRGSKAGRKEHPEQPKKLRRVPELKDQSNTIFTFSVFM

SEQ ID NO: 11952 - DNA, 2006 bp, Homo sapiens
gtcaccagtaaaggaagaggcaaagtcaccggctgaggccaagtccccagagaaggaggaagcaaaatccccagccgaagtcaagtcccctgagaaggccaagtctccagcaaaggaagaggcaaagtcaccgcctgaggccaagtccccagagaaggaggaagcaaaatctccagctgaggtcaagtcccccgagaaggccaagtccccagcaaaggaagaggcaaagtcaccggctgaggccaagtctccagagaaggccaagtccccagtgaaggaagaagcaaagtcaccggctgaggccaagtccccagtgaaggaagaagcaaaatctccagctgaggtcaagtccccggaaaaggccaagtctccaacgaaggaggaagcaaagtcccctgagaaggccaagtccccagagaaggaagaggccaagtcccctgagaaggccaagtccccagtgaaggcagaagcaaagtcccctgagaaggccaagtccccagtgaaggcagaagcaaagtcccctgagaaggccaagtccccagtgaaggaagaagcaaagtcccctgagaaggccaagtccccagtgaaggaagaagcaaagtcccctgagaaggccaagtccccagtgaaggaagaagcaaagacccccgagaaggccaagtccccagtgaaggaagaagctaagtccccagagaaggccaagtccccagagaaggccaagactcttgatgtgaagtctccagaagccaagactccagcgaaggaggaagcaaggtcccctgcagacaaattccctgaaaaggccaaaagccctgtcaaggaggaggtcaagtccccagagaaggcgaaatctcccctgaaggaggatgccaaggcccctgagaaggagatcccaaaaaaggaagaggtgaagtccccagagaagaaggacagcaagaaagaggaggcacccaagaaggaggctccaaagcccaaggtggaggagaagaaggaacctgctgtcgaaaagcccaaagaatccaaagttgaagccaagaaggaagaggctgaagataagaaaaaagtccccaccccagagaaggaggctcctgccaaggtggaggtgaaggaagacgctaaacccaaagaaaagacagaggtagccaagaaggaaccagatgatgccaaggccaaggaacccagcaaaccagcagagaagaaggaggcagcaccggagaaaaaagacaccaaggaggagaaggccaagaagcctgaggagaaacccaagacagaggccaaagccaaggaagatgacaagaccctctcaaaagagcctagcaagcctaaggcagaaaaggctgaaaaatcctccagcacagaccaaaaagacagcaagcctccagagaaggccacagaagacaaggccgccaaggggaagtaaggcagggagaaaggaacatccggaacagccaaagaaactcagaagagtcccggagctcaaggatcagagtaacacaattttcactttttctgtctttatgtaagaagaaactgcttagatgacggggcctccttcttcaaacaggaatttctgttagcaatatgttagcaagagagggcactcccaggcccctgcccccaggccctccccaggcgatggacaattatgatagcttatgtagctgaatgtgatacatgccgaatgccacacgtaaacacttgactataaaaactgcccccctcctttccaaataagtgcatttattgcctctatgtgcaactgacagatgaccgcaataatgaatgagcagttagaaatacattatgcttgagatgtcttaacctattcccaaatgccttctgttttccaaaggagtggtcaagcccttgcccagagctctctattctggaagagcggtccaggtggggccggggactggccactgaattatgccagggcgcactttccactggagttcactttcaattgcttctgtgcaataaaaccaagtgcttataaaatgaaa

SEQ ID NO: 11953 - protein, 121 aa, Homo sapiens; identical to SEQ ID NO: 11951

SEQ ID NO: 11954 - DNA, 1709 bp, Homo sapiens
gcaaagtcaccggctgaggccaagtccccagagaaggaggaagaagcaaaatctccagctgaggtcaagtcccccgagaaggccaagtccccagcaaaggaagaggcaaagtcaccggctgaggccaagtctccagagaaggccaagtccccagtgaaggaagaagcaaagtcaccggctgagaagcaaagtcccctgagaaggccaagtccccagagaaggaagaggccaagtcccctgagaaggccaagtccccagtgaaggcagaagcaaagtcccctgagaaggccaagtccccagtgaaggcagaagcaaagtcccctgagaaggccaagtccccagtgaaggaagaagcaaagtcccctgagaaggccaagtccccagtgaaggaagaagcaaagtcccctgagaaggccaagtccccagtgaaggaagaagcaaagacccccgagaaggccaagtccccagtgaaggaagaagctaagcccctgagaaggagatcccaaaaaaggaagaggtgaagtccccagtgaaggaggaggagaagccccaggaggtgaaagtcaaagagcccccaaagaaggcagaggaagagaaagcccctgccacaccaaaaacagaggagaagaaggacagcaagaaagaggaggcacccaagaaggaggctccaaagcccaaggtggaggagaagaaggaacctgctgtcgaaaagcccaaagaatccaaagttgaagccaagaaggaagaggctgaagataagaaaaaagtccccaccccagagaaggaggctcctgccaaggtggaggtgaaggaagacgctaaacccaaagaaaagacagaggtagccaagaaggaaccagatgatgccaaggccaaggaacccagcaaaccagcagagaagaaggaggcagcaccggagaaaaaagacaccaaggaggagaaggccaagaagcctgaggagaaacccaagacagaggccaaagccaaggaagatgacaagaccctctcaaaagagcctagcaagcctaaggcagaaaaggctgaaaaatcctccagcacagaccaaaaagacagcaagcctccagagaaggccacagaagacaaggccgccaaggggaagtaaggcagggagaaaggaacatccggaacagccaaagaaactcagaagagtcccggagctcaaggatcagagtaacacaattttcactttttctgtctttatgtaagaagaaactgcttagatgacggggcctccttcttcaaacaggaatttctgttagcaatatgttagcaagagagggcactcccaggcccctgcccccaggccctccccaggcgatggacaattatgatagcttatgtagctgaatgtgatacatgccgaatgccacacgtaaacacttgactataaaaactgcccccctcctttccaaataagtgcatttattgcctctatgtgcaactgacagatgaccgcaataatgaatgagcagttagaaatacattatgcttgagatgtcttaacctattcccaaatgccttctgttttccaaaggagtggtcaagcccttgcccagagctctctattctggaagagcggtccaggtggggccggggactggccactgaattatgccagggcgcactttccactggagttcactttcaattgcttctgtgcaataaaaccaagtgcttataaaatgaaa

SEQ ID NO: 11955 - protein, 121 aa, Homo sapiens; identical to SEQ ID NO: 11951

SEQ ID NO: 11956 - DNA, 890 bp, Homo sapiens
tggcccacatgtgactcttgatattctccaaagacaccagccaattaaaaagcgtcacctgaccagtggcctttgtctgtggttcctggcaaggtggctttgcagtctggaagggcaggtgggagctgtgacacagtgtgaaaaagcatttgtagagagactttttctcagcagccaataaaagcagagtggaaaaagattccaattctgcagagagatgctcacctcttgtctacgcacaccctatttgtgctttgcggggtgaggtcctcatgatcttgtatttattatcccaagttcctgctgttaagaggtggtaggagaagccaaaggcagcagagcacaaaaagcaaaactcttccctccccacccgctcttcccattagtcctgtcagggttgccgatggacaaattgtctctgatcgttggatgttataaatgtctgacagtgcagtgcaaacagaagacaaactcagttgatccttgaacaactcaggggttaggggcaccaacaccccctgccctgcacagttgaaaaatccgtgtataacttttgactccctaaaaacttaactaatagcctgctgttgaccagtagtatgctattagtagttacttactgctaacatagtcagtacatattttcagtatatattttgtatcttatacactgtattcttacaatacagtaaactagagaaaagaaaatgttataaggaaagtcacaagggggcctgagtgcagtggctcaagtgatccacctgcctcagcctcccaagtgctaggattataggcatgaaccactgtgcccagccctaattaaggcttttttatttttatttatttttaattcatttattattattactttttgagatggagtctcactc

SEQ ID NO: 11957 - protein, 31 aa, Homo sapiens [sequence omitted]

SEQ ID NO: 11958 - DNA, 6103 bp, Homo sapiens
ctggagtcggagtttgcagtgagcggggattgcgccactgcacttcagcctgggtgagagagcaaaactctgtctcaaataaaaataaaaataaaaaagagccagtattttcctccttgctcctgggaaggagaaggaactggccccgtacaaccagggattcaggacacgtgttactagctccagatgaggatttacacgaaaaaatcctgggccttgtttgtacagttcatgccaggggtaggaaatacctgaagctttcaaatactgcgttagagttgtgactctgtcctgggcaagtcaggcctaaaatggagaaactggtgatgcactcctcaaaaagccaagtgtaaaatgaggttaatgccctccctgacttgttgccttcactggcgtggcatattatggtaaaaataataattaagaagtaaggttatgcaggcaaatcctctagcgccgaaatcttccccgccgcgctaccaggttctttcgtgttatcttggacataacacaacattaattcaactactcggtggagcgcccactagctgctggacactctcttaggccctgggcacagtgaacgagaagcatgtgtctttgtttttacagtctcaccacgccaccacctccctcgggggcctccgcgctgagcttccggcctctacgcctcgcttccggtcggccgccccttccttacttccggttctctatggtgcgcgggcaagctttgctccgcctccggcagtggcttactcccggtgccaggttcttggagctgtgaggaggaacaaccatgtcatcagaatcgagcaaaaaacggaagcccaaagtgatccgaagcgatggagccccagctgaaggaaagcggaatcgatctgacaccgagcaggaaggtaaatactacagtgaggaggccgaggtggatctgcgggaccctggcagagactatgagttatacaagtacacctgccaggagctacagaggctgatggctgagatccaagacctgaagagcaggggtggcaaggatgtggcaatagaaatagaagaacggaggatccagagctgtgtgcatttcatgactctaaagaagcttaaccgattagcccacatcaggttgaagaaaggaagagatcagacccacgaggctaagcagaaagtagatgcctatcatctgcagctccagaacctgttgtatgaggtgatgcacctacagaaggagatcaccaaatgtttggagtttaagtcaaagcatgaagaaattgatctggtcagtttagaggagttttataaggaggctccaccagatatcagcaaggccgaagtcaccatgggagaccctcaccagcaaacactggcacgtctggactgggagctggagcagcggaaaaggctggcagagaagtaccgagagtgcctatctaacaaggagaagattctcaaggagattgaggtgaagaaggagtacctgagcagcctccagccccgcctcaacagcatcatgcaggcttcccttccggtgcaggagtacctgtttatgccattcgaccaggctcacaagcagtatgagacagccagacacctgccgcctcccctctatgtcctctttgttcaggccactgcgtatgggcaggcctgtgataagacgttatctgtggcaatcgaaggcagtgtggatgaagccaaggctctgttcaaacctccagaggactcccaagatgacgagagtgactcagatgccgaggaggagcagactacgaagcgccggagacccacactgggggttcagttggacgacaaacgcaaggagatgctgaagaggcacccactgtctgtcatgctcgacctgaagtgcaaagatgacagtgtgcttcacctgactttctactacctcatgaacctcaacatcatgacagtaaaagccaaagtgacaactgccatggagctgatcacccccatcagtgcaggtgacttgctgtctcctgactcagtcctgagttgcttgtatcctggggatcatggaaagaaaactccgaatccagccaatcagtatcagtttgataaagttggcatcctgactttgagcgactatgtacttgagctaggtcacccctatttgtgggtgcagaagctgggtggcctccacttccccaaagagcagccccagcaaacagtgattgctgaccactcgctgagcgccagccacatggagaccaccatgaaacttctgaagaccagggtgcagtcccgcctggccctccacaaacagtttgcatccctagaacatggcattgtgccagttaccagtgattgccagtacctcttccctgccaaggttgtctctcgcctggtgaaatgggtgacagttgcccatgaggattacatggagctgcacttcaccaaagacattgtggatgcgggactggctggggacaccaatctctactacatggcgctcatcgaaaggggcacagccaaactgcaggccgctgtggtgttgaaccctggctactcctccatcccacctgttttccagctctgtttgaactggaaaggggagaaaaccaacagcaacgatgacaacattcgggccatggagggcgaagtcaatgtgtgctacaaggagctgtgtggcccttggcccagccaccagctgttgaccaaccagctgcagcggctgtgtgtgctgctggatgtttacctggagaccgagagccatgacgacagtgtggaggggcccaaggaatttccccaggagaagatgtgtctgcggctcttcaggggtcctagcaggatgaagccatttaaatacaaccatcctcagggattcttcagccatcgctgatctcccgcgcagaccgttgtttcccccaaggcctcaccctgagcactgggcttctgctttctgctctggcccacatgtgactcttgatattctccaaagacaccagccaattaaaaagcgtcacctgaccagtggcctttgtctgtggttcctggcaaggtggctttgcagtctggaagggcaggtgggagctgtgacacagtgtgaaaaagcatttgtagagagactttttctcagcagccaataaaagcagagtggaaaaagattccaattctgcagagagatgctcacctcttgtctacgcacaccctatttgtgctttgcggggtgaggtcctcatgatcttgtatttattatcccaagttcctgctgttaagaggtggtaggagaagccaaaggcagcagagcacaaaaagcaaaactcttccctccccacccgctcttcccattagtcctgtcagggttgccgatggacaaattgtctctgatcgttggatgttataaatgtctgacagtgcagtgcaaacagaagacaaactcagttgatccttgaacaactcaggggttaggggcaccaacaccccctgccctgcacagttgaaaaatccgtgtataacttttgactccctaaaaacttaactaatagcctgctgttgaccagtagtatgctattagtagttacttactgctaacatagtcagtacatattttcagtatatattttgtatcttatacactgtattcttacaatacagtaaactagagaaaagaaaatgttataaggaaagtcacaagggggcctgagtgcagtggctcacgtctgtaatcccagcactttgggaggccaaggcgggtggatcacttgaggtcaggagtttgagaccagcctggccgacatggtgaaaccctgtctctactaaaaacatggaaattagccaagcgtggtggcgcatgcctgtagtcccagttactcaggaggctgaggcagaattacttgaacccatgaggcagaggttgcagtaagccaagatcacgctcctgcgctccggcttgggcgagagtgagactccgtctcaaaaataaataaataagaaagccataaggaagaaaatatatatctactattaagtagaagtggatcaccataaaggtcttcacatactgtctcagggttgaatagtctaaggaagaggaggggttggtcttggtgtctcagggatggcagaggcagaaaaagtgggggaggtggagggggaggcaggcaccactgttatttttattgaacaaaatctgtgcagggactcatgactgtaatcctagtactttggaaagctaaggcgggaggatcccttgaggccaggagttcaggtccagcctgggcaacgtagtgagagaccctgtatctacaaaaaatttaaaaatcagccaggtgtggtggtatgcaccaatagtcccagttactcagaaggctgaggtgggcggatgactggagtccaggagttcaaggtagcagtgagctattcatcgtgcctgtactgtactccagcctgggaaacaatgcgagtccctatctctaaaaaattttaaaaaaagaaatctgcatataatagacccacagagtccaaactattgttcagagatcaactgtacttcacagagagtaattctaagtcttacaggatttcatggagatggcgagagtggtgttggagaatcaatcacatacagagatacaggacagtgagaccaggtaacatttgaggagaatattttttttttattgagacagggtcttgctctgttgtccaggctggagtgcagtggcacgaacacagctcactgccgcctcaacctctcctgggttcaagtgatcctcctgcctcagcctcccaagtagctgggaccacaggtgtgtgccaccatttctggctaatttttaaattttttgtagaggcgggatcccactatttttcccaggctggtctcaaactcctgggctcaaatgatcctcccacctcggcctcccaaagtgctaggattataggcatgagccaccacacccggcctgagtagagtctttaaggtaatgacaaaagtgcctcaaaatataattatttgattaagagaagtcttgggaagataggtaacaacctttaaaatgttcataaaattacatcctttgtaatactcctgcaagtcaaagtaaaggatggcatagactattcttggacagttttgtcaaaaagtgtatcttgaccccaccatcagtactccattcttcattttaaaaaataagatgggctgggcacagtggcttacgcctttaatatcagtactttgggaggctggtgggcggatcacctgagatcaggagttcaagaccagcctggccaacatggtgaaaccccgtctctactaaaaatacaaaaattagctgggcatggtggtgcgcgcctgtaatcccagccactcgggaggctgaggcaggagaattgcttgaatccccgaggcggaggttgcactgagccgagatggtgccactgcaccatctggacaacagagcaagactccgtcttggaaaaaaaaaaaaagatgtagaaatgtaaaaatatttgagaattattacatagttgcagatatagtttgctaactccaagaggaaacacattttattttttgtgattgtcctgatgaaactttatccccccacaacatgctgttaagcttggttcccatcataagcatattccccctaagtggacttttactgattttccatggataatgcagacctccagtataaaagctattcctccaggtctctctgccgaccactgagtatcccagggataaggattttaagagtaagagctaagtaataaattcctgcccctagcagggccgttcattttacggatgaaaacctgatccttgctgggcgtggtggctcatgcctataatccaagccattcagaaggctgaggcaggaggattgcttgagcccaggagttcaagaccagcctgtgtaatatagtgagtccccattcagaaaaagaaaagaaacctgagcctagcaaggagaagagaatggtacctttggtggctgttaaatcaccaccgctaccctcagtccacatcagtcctttgaattccaaaggcaggtactctctagctcagaggtcctcgaacttcagcctgtgtgggagtcacccatcctggcacctgattagaaacacagacacccaagtcccattc

SEQ ID NO: 11959 - protein, 683 aa, Homo sapiens; identical to SEQ ID NO: 1987

SEQ ID NO: 11960 - DNA, 1096 bp, Homo sapiens
gtctagcttgatctgatggcctagcccctggcccagcccctgcagaggcatcagcgctcgggcccatccagggacggaagcctggccagtgtggtcccccacatgcaggaaggtagtgctgagatgctggctttcctatcacacaggccatggagggcgaagtcaatgtgtgctacaaggagctgtgtggcccttggcccagccaccagctgttgaccaaccagctgcagcggctgtgtgtgctgctggatgtttacctggagaccgagagccatgacgacagtgtggaggggcccaaggaatttccccaggagaagatgtgtctgcggctcttcaggggtcctagcaggatgaagccatttaaatacaaccatcctcagggattcttcagccatcgctgatctcccgcgcagaccgttgtttcccccaaggcctcaccctgagcactgggcttctgctttctgctctggcccacatgtgactcttgatattctccaaagacaccagccaattaaaaagcgtcacctgaccagtggcctttgtctgtggttcctggcaaggtggctttgcagtctggaagggcaggtgggagctgtgacacagtgtgaaaaagcatttgtagagagactttttctcagcagccaataaaagcagagtggaaaaagattccaattctgcagagagatgctcacctcttgtctacgcacaccctatttgtgctttgcggggtgaggtcctcatgatcttgtatttattatcccaagttcctgctgttaagaggtggtaggagaagccaaaggcagcagagcacaaaaagcaaaactcttccctccccacccgctcttcccattagtcctgtcagggttgccgatggacaaattgtctctgatcgttggatgttataaatgtctgacagtgcagtgcaaacagaagacaaactcagttgatccttgaacaactcaggggttaggggcaccaacaccccctgccctgcacagttgaaaaatccgtgtataacttttgactccctaaaaacttaactaatagcctgctgttgaccagtagtatgctattagtagttacttactgctaacat

SEQ ID NO: 11961 - protein, 83 aa, Homo sapiens [sequence omitted]

SEQ ID NO: 11962 - DNA, 3432 bp, Homo sapiens
aaaaaatcctgggccttgtttgtacagttcatgccaggggtaggaaatacctgaagctttcaaatactgcgttagagttgtgactctgtcctgggcaagtcaggcctaaaatggagaaactggtgatgcactcctcaaaaagccaagtgtaaaatgaggttaatgccctccctgacttgttgccttcactggcgtggcatattatggtaaaaataataattaagaagtaaggttatgcaggcaaatcctctagcgccgaaatcttccccgccgcgctaccaggttctttcgtgttatcttggacataacacaacacgccaccacctccctcgggggcctccgcgctgagcttccggcctctacgcctcgcttccggtcggccgccccttccttacttccggttctctatggtgcgcgggcaagctttgctccgcctccggcagtggcttactcccggtgccaggttcttggagctgtgaggtgcagtcccaggtcatcttcatcaccttccccagtggaatgcctcctgtgttaaagcccacaacaacccctgtggaggaacaaccatgtcatcagaatcgagcaaaaaacggaagcccaaagtgatccgaagcgatggagccccagctgaaggaaagcggaatcgatctgacaccgagcaggaaggtaaatactacagtgaggaggccgaggtggatctgcgggaccctggcagagactatgagttatacaagtacacctgccaggagctacagaggctgatggctgagatccaagacctgaagagcaggggtggcaaggatgtggcaatagaaatagaagaacggaggatccagagctgtgtgcatttcatgactctaaagaagcttaaccgattagcccacatcaggttgaagaaaggaagagatcagacccacgaggctaagcagaaagtagatgcctatcatctgcagctccagaacctgttgtatgaggtgatgcacctacagaaggagatcaccaaatgtttggagtttaagtcaaagcatgaagaaattgatctggtcagtttagaggagttttataaggaggctccaccagatatcagcaaggccgaagtcaccatgggagaccctcaccagcaaacactggcacgtctggactgggagctggagcagcggaaaaggctggcagagaagtaccgagagtgcctatctaacaaggagaagattctcaaggagattgaggtgaagaaggagtacctgagcagcctccagccccgcctcaacagcatcatgcaggcttcccttccggtgcaggagtacctgtttatgccattcgaccaggctcacaagcagtatgagacagccagacacctgccgcctcccctctatgtcctctttgttcaggccactgcgtatgggcaggcctgtgctcatatgaaatcctcccagccccctagacaggataagacgttatctgtggcaatcgaaggcagtgtggatgaagccaaggctctgttcaaacctccagaggactcccaagatgacgagagtgactcagatgccgaggaggagcagactacggtgccgtcctccctagaagcagaagaggtgtgaaagaaggtgctgctgggaggggagtctgacaacccagctagctgaagcagcagaagcgccggagacccacactgggggttcagttggacgacaaacgcaaggagatgctgaagaggcacccactgtctgtcatgctcgacctgaagtgcaaagatgacagtgtgcttcacctgactttctactacctcatgaacctcaacatcatgacagtaaaagccaaagtgacaactgccatggagctgatcacccccatcagtgcaggtgacttgctgtctcctgactcagtcctgagttgcttgtatcctggggatcatggaaagaaaactccgaatccagccaatcagtatcagtttgataaagttggcatcctgactttgagcgactatgtacttgagctaggtcacccctatttgtgggtgcagaagctgggtggcctccacttccccaaagagcagccccagcaaacagtgattgctgaccactcgctgagcgccagccacatggagaccaccatgaaacttctgaagaccagggtgcagtcccgcctggccctccacaaacagtttgcatccctagaacatggcattgtgccagttaccagtgattgccagtacctcttccctgccaaggttgtctctcgcctggtgaaatgggtgacagttgcccatgaggattacatggagctgcacttcaccaaagacattgtggatgcgggactggctggggacaccaatctctactacatggcgctcatcgaaaggggcacagccaaactgcaggccgctgtggtgttgaaccctggctactcctccatcccacctgttttccagctctgtttgaactggaaaggggagaaaaccaacagcaacgatgacaacattcgggccatggagggcgaagtcaatgtgtgctacaaggagctgtgtggcccttggcccagccaccagctgttgaccaaccagctgcagcggctgtgtgtgctgctggatgtttacctggagaccgagagccatgacgacagtgtggaggggcccaaggaatttccccaggagaagatgtgtctgcggctcttcaggggtcctagcaggatgaagccatttaaatacaaccatcctcagggattcttcagccatcgctgatctcccgcgcagaccgttgtttcccccaaggcctcaccctgagcactgggcttctgctttctgctctggcccacatgtgactcttgatattctccaaagacaccagccaattaaaaagcgtcacctgaccagtggcctttgtctgtggttcctggcaaggtggctttgcagtctggaagggcaggtgggagctgtgacacagtgtgaaaaagcatttgtagagagactttttctcagcagccaataaaagcagagtggaaaaagattccaattctgcagagagatgctcacctcttgtctacgcacaccctatttgtgctttgcggggtgaggtcctcatgatcttgtatttattatcccaagttcctgctgttaagaggtggtaggagaagccaaaggcagcagagcacaaaaagcaaaactcttccctccccacccgctcttcccattagtcctgtcagggttgccgatggacaaattgtctctgatcgttggatgttataaatgtctgacagtgcagtgcaaacagaagacaaactcagttgatccttgaacaactcaggggttaggggcaccaacaccccctgccctgcacagttgaaaaatccgtgtataacttttgactccctaaaaacttaactaatagcctgctgttgaccagtagtatgctattagtagttacttactgctaacat

SEQ ID NO: 11963 - protein, 344 aa, Homo sapiens
MLKRHPLSVMLDLKCKDDSVLHLTFYYLMNLNIMTVKAKVTTAMELITPISAGDLLSPDSVLSCLYPGDHGKKTPNPANQYQFDKVGILTLSDYVLELGHPYLWVQKLGGLHFPKEQPQQTVIADHSLSASHMETTMKLLKTRVQSRLALHKQFASLEHGIVPVTSDCQYLFPAKVVSRLVKWVTVAHEDYMELHFTKDIVDAGLAGDTNLYYMALIERGTAKLQAAVVLNPGYSSIPPVFQLCLNWKGEKTNSNDDNIRAMEGEVNVCYKELCGPWPSHQLLTNQLQRLCVLLDVYLETESHDDSVEGPKEFPQEKMCLRLFRGPSRMKPFKYNHPQGFFSHR

SEQ ID NO: 11964 - DNA, 2676 bp, Homo sapiens
gggcagtggggctgggagatggggcggggctgggcgctccgggactgaggtgctgatcgcccaaagggcgcccctgggctggggtctgacccggcttctcctccctcactacccgcggtccccggcctctcggcgctgcgctgttacctcatccgaaaagtgttcgctgcagcatcctcaggcttcacgttggagcctcttgattgtggtgttcagcattatttaagatcacctatgcatcatctgaagccacagtcccaggtcatcttcatcaccttccccagtggaatgcctcctgtgttaaagcccacaacaacccctgtggaggaacaaccatgtcatcagaatcgagcaaaaaacggaagcccaaagtgatccgaagcgatggagccccagctgaaggaaagcggaatcgatctgacaccgagcaggaaggtaaatactacagtgaggaggccgaggtggatctgcgggaccctggcagagactatgagttatacaagtacacctgccaggagctacagaggctgatggctgagatccaagacctgaagagcaggggtggcaaggatgtggcaatagaaatagaagaacggaggatccagagctgtgtgcatttcatgactctaaagaagcttaaccgattagcccacatcaggttgaagaaaggaagagatcagacccacgaggctaagcagaaagtagatgcctatcatctgcagctccagaacctgttgtatgaggtgatgcacctacagaaggagatcaccaaatgtttggagtttaagtcaaagcatgaagaaattgatctggtcagtttagaggagttttataaggaggctccaccagatatcagcaaggccgaagtcaccatgggagaccctcaccagcaaacactggcacgtctggactgggagctggagcagcggaaaaggctggcagagaagtaccgagagtgcctatctaacaaggagaagattctcaaggagattgaggtgaagaaggagtacctgagcagcctccagccccgcctcaacagcatcatgcaggcttcccttccggtgcaggagtacctgtttatgccattcgaccaggctcacaagcagtatgagacagccagacacctgccgcctcccctctatgtcctctttgttcaggccactgcgtatgggcaggcctgtgataagacgttatctgtggcaatcgaaggcagtgtggatgaagccaaggctctgttcaaacctccagaggactcccaagatgacgagagtgactcagatgccgaggaggagcagactacgaagcgccggagacccacactgggggttcagttggacgacaaacgcaaggagatgctgaagaggcacccactgtctgtcatgctcgacctgaagtgcaaagatgacagtgtgcttcacctgactttctactacctcatgaacctcaacatcatgacagtaaaagccaaagtgacaactgccatggagctgatcacccccatcagtgcaggtgacttgctgtctcctgactcagtcctgagttgcttgtatcctggggatcatggaaagaaaactccgaatccagccaatcagtatcagtttgataaagttggcatcctgactttgagcgactatgtacttgagctaggtcacccctatttgtgggtgcagaagctgggtggcctccacttccccaaagagcagccccagcaaacagtgattgctgaccactcgctgagcgccagccacatggagaccaccatgaaacttctgaagaccagggtgcagtcccgcctggccctccacaaacagtttgcatccctagaacatggcattgtgccagttaccagtgattgccagtacctcttccctgccaaggttgtctctcgcctggtgaaatgggtgacagttgcccatgaggattacatggagctgcacttcaccaaagacattgtggatgcgggactggctggggacaccaatctctactacatggcgctcatcgaaaggggcacagccaaactgcaggccgctgtggtgttgaaccctggctactcctccatcccacctgttttccagctctgtttgaactggaaaggggagaaaaccaacagcaacgatgacaacattcgggccatggagggcgaagtcaatgtgtgctacaaggagctgtgtggcccttggcccagccaccagctgttgaccaaccagctgcagcggctgtgtgtgctgctggatgtttacctggagaccgagagccatgacgacagtgtggaggggcccaaggaatttccccaggagaagatgtgtctgcggctcttcaggggtcctagcaggatgaagccatttaaatacaaccatcctcagggattcttcagccatcgctgatctcccgcgcagaccgttgtttcccccaaggcctcaccctgagcactgggcttctgctttctgctctggcccacatgtgactcttgatattctccaaagacaccagccaattaaaaagcgtcacctgaccagtggcctttgtctgtggttcctggcaaggtggctttgcagtctggaagggcaggtgggagctgtgacacagtgtgaaaaagcatttgtagagagactttttctcagcagccaataaaagcagagtggaaaaagattccaattctgcagagagatgctc

SEQ ID NO: 11965 - protein, 683 aa, Homo sapiens; identical to SEQ ID NO: 1987

SEQ ID NO: 11966 - DNA, 3026 bp, Homo sapiens
aaaaaatcctgggccttgtttgtacagttcatgccaggggtaggaaatacctgaagctttcaaatactgcgttagagttgtgactctgtcctgggcaagtcaggcctaaaatggagaaactggtgatgcactcctcaaaaagccaagtgtaaaatgaggttaatgccctccctgacttgttgccttcactggcgtggcatattatggtaaaaataataattaagaagtaaggttatgcaggcaaatcctctagcgccgaaatcttccccgccgcgctaccaggttctttcgtgttatcttggacataacacaacacgccaccacctccctcgggggcctccgcgctgagcttccggcctctacgcctcgcttccggtcggccgccccttccttacttccggttctctatggtgcgcgggcaagctttgctccgcctccggcagtggcttactcccggtgccaggttcttggagctgtgaggtgcagtcccaggtcatcttcatcaccttccccagtggaatgcctcctgtgttaaagcccacaacaacccctgtggaggaacaaccatgtcatcagaatcgagcaaaaaacggaagcccaaagtgatccgaagcgatggagccccagctgaaggaaagcggaatcgatctgacaccgagcaggaaggtaaatactacagtgaggaggccgaggtggatctgcgggaccctggcagagactatgagttatacaagtacacctgccaggagctacagaggctgatggctgagatccaagacctgaagagcaggggtggcaaggatgtggcaatagaaatagaagaacggaggatccagagctgtgtgcatttcatgactctaaagaagcttaaccgattagcccacatcaggttgaagaaaggaagagatcagacccacgaggctaagcagaaagtagatgcctatcatctgcagctccagaacctgttgtatgaggtgatgcacctacagaaggagatcaccaaatgtttggagtttaagtcaaagcatgaagaaattgatctggtcagtttagaggagttttataaggaggctccaccagatatcagcaaggccgaagtcaccatgggagaccctcaccagcaaacactggcacgtctggactgggagctggagcagcggaaaaggctggcagagaagtaccgagagtgcctatctaacaaggagaagattctcaaggagattgaggtgaagaaggagtacctgagcagcctccagccccgcctcaacagcatcatgcaggcttcccttccggtgcaggagtacctgtttatgccattcgaccaggctcacaagcagtatgagacagccagacacctgccgcctcccctctatgtcctctttgttcaggccactgcgtatgggcaggcctgtgctcatatgaaatcctcccagccccctagacaggataagacgttatctgtggcaatcgaaggcagtgtggatgaagccaaggctctgttcaaacctccagaggactcccaagatgacgagagtgactcagatgccgaggaggagcagactacggtgccgtcctccctagaagcagaagaggtgtgaaagaaggtgctgctgggaggggagtctgacaacccagctagctgaagcagcagaagcgccggagacccacactgggggttcagttggacgacaaacgcaaggagatgctgaagaggcacccactgtctgtcatgctcgacctgaagtgcaaagatgacagtgtgcttcacctgactttctactacctcatgaacctcaacatcatgacagtaaaagccaaagtgacaactgccatggagctgatcacccccatcagtgcaggtgacttgctgtctcctgactcagtcctgagttgcttgtatcctggggatcatggaaagaaaactccgaatccagccaatcagtatcagtttgataaagttggcatcctgactttgagcgactatgtacttgagctaggtcacccctatttgtgggtgcagaagctgggtggcctccacttccccaaagagcagccccagcaaacagtgattgctgaccactcgctgagcgccagccacatggagaccaccatgaaacttctgaagaccagggtgcagtcccgcctggccctccacaaacagtttgcatccctagaacatggcattgtgccagttaccagtgattgccagtacctcttccctgccaaggttgtctctcgcctggtgaaatgggtgacagttgcccatgaggattacatggagctgcacttcaccaaagacattgtggatgcgggactggctggggacaccaatctctactacatggcgctcatcgaaaggggcacagccaaactgcaggccgctgtggtgttgaaccctggctactcctccatcccacctgttttccagctctgtttgaactggaaaggggagaaaaccaacagcaacgatgacaacattcgggccatggagggcgaagtcaatgtgtgctacaaggagctgtgtggcccttggcccagccaccagctgttgaccaaccagctgcagcggctgtgtgtgctgctggatgtttacctggagaccgagagccatgacgacagtgtggaggggcccaaggaatttccccaggagaagatgtgtctgcggctcttcaggggtcctagcaggatgaagccatttaaatacaaccatcctcagggattcttcagccatcgctgatctcccgcgcagaccgttgtttcccccaaggcctcaccctgagcactgggcttctgctttctgctctggcccacatgtgactcttgatattctccaaagacaccagccaattaaaaagcgtcacctgaccagtggcctttgtctgtggttcctggcaaggtggctttgcagtctggaagggcaggtgggagctgtgacacagtgtgaaaaagcatttgtagagagactttttctcagcagccaataaaagcagagtggaaaaagattccaattctgcagagagatgctc

SEQ ID NO: 11967 - protein, 344 aa, Homo sapiens; identical to SEQ ID NO: 11963

SEQ ID NO: 11968 - DNA, 3159 bp, Homo sapiens
aaaaaatcctgggccttgtttgtacagttcatgccaggggtaggaaatacctgaagctttcaaatactgcgttagagttgtgactctgtcctgggcaagtcaggcctaaaatggagaaactggtgatgcactcctcaaaaagccaagtgtaaaatgaggttaatgccctccctgacttgttgccttcactggcgtggcatattatggtaaaaataataattaagaagtaaggttatgcaggcaaatcctctagcgccgaaatcttccccgccgcgctaccaggttctttcgtgttatcttggacataacacaacattaattcaactactcggtggagcgcccactagctgctggacactctcttaggccctgggcacagtgaacgagaagcatgtgtctttgtttttacagtctcaccacgccaccacctccctcgggggcctccgcgctgagcttccggcctctacgcctcgcttccggtcggccgccccttccttacttccggttctctatggtgcgcgggcaagctttgctccgcctccggcagtggcttactcccggtgccaggttcttggagctgtgaggtgaggaggggacaagggcagtggggctgggagatggggcggggctgggcgctccgggactgaggtgctgatcgcccaaagggcgcccctgggctggggtctgacccggcttctcctccctcactacccgcggtccccggcctctcggcgctgcgctgttacctcatccgaaaagtgttcgctgcagcatcctcaggcttcacgttggagcctcttgattgtggaggaacaaccatgtcatcagaatcgagcaaaaaacggaagcccaaagtgatccgaagcgatggagccccagctgaaggaaagcggaatcgatctgacaccgagcaggaaggtaaatactacagtgaggaggccgaggtggatctgcgggaccctggcagagactatgagttatacaagtacacctgccaggagctacagaggctgatggctgagatccaagacctgaagagcaggggtggcaaggatgtggcaatagaaatagaagaacggaggatccagagctgtgtgcatttcatgactctaaagaagcttaaccgattagcccacatcaggttgaagaaaggaagagatcagacccacgaggctaagcagaaagtagatgcctatcatctgcagctccagaacctgttgtatgaggtgatgcacctacagaaggagatcaccaaatgtttggagtttaagtcaaagcatgaagaaattgatctggtcagtttagaggagttttataaggaggctccaccagatatcagcaaggccgaagtcaccatgggagaccctcaccagcaaacactggcacgtctggactgggagctggagcagcggaaaaggctggcagagaagtaccgagagtgcctatctaacaaggagaagattctcaaggagattgaggtgaagaaggagtacctgagcagcctccagccccgcctcaacagcatcatgcaggcttcccttccggtgcaggagtacctgtttatgccattcgaccaggctcacaagcagtatgagacagccagacacctgccgcctcccctctatgtcctctttgttcaggccactgcgtatgggcaggcctgtgataagacgttatctgtggcaatcgaaggcagtgtggatgaagccaaggctctgttcaaacctccagaggactcccaagatgacgagagtgactcagatgccgaggaggagcagactacgaagcgccggagacccacactgggggttcagttggacgacaaacgcaaggagatgctgaagaggcacccactgtctgtcatgctcgacctgaagtgcaaagatgacagtgtgcttcacctgactttctactacctcatgaacctcaacatcatgacagtaaaagccaaagtgacaactgccatggagctgatcacccccatcagtgcaggtgacttgctgtctcctgactcagtcctgagttgcttgtatcctggggatcatggaaagaaaactccgaatccagccaatcagtatcagtttgataaagttggcatcctgactttgagcgactatgtacttgagctaggtcacccctatttgtgggtgcagaagctgggtggcctccacttccccaaagagcagccccagcaaacagtgattgctgaccactcgctgagcgccagccacatggagaccaccatgaaacttctgaagaccagggtgcagtcccgcctggccctccacaaacagtttgcatccctagaacatggcattgtgccagttaccagtgattgccagtacctcttccctgccaaggttgtctctcgcctggtgaaatgggtgacagttgcccatgaggattacatggagctgcacttcaccaaagacattgtggatgcgggactggctggggacaccaatctctactacatggcgctcatcgaaaggggcacagccaaactgcaggccgctgtggtgttgaaccctggctactcctccatcccacctgttttccagctctgtttgaactggaaaggggagaaaaccaacagcaacgatgacaacattcgggccatggagggcgaagtcaatgtgtgctacaaggagctgtgtggcccttggcccagccaccagctgttgaccaaccagctgcagcggctgtgtgtgctgctggatgtttacctggagaccgagagccatgacgacagtgtggaggggcccaaggaatttccccaggagaagatgtgtctgcggctcttcaggggtcctagcaggatgaagccatttaaatacaaccatcctcagggattcttcagccatcgctgatctcccgcgcagaccgttgtttcccccaaggcctcaccctgagcactgggcttctgctttctgctctggcccacatgtgactcttgatattctccaaagacaccagccaattaaaaagcgtcacctgaccagtggcctttgtctgtggttcctggcaaggtggctttgcagtctggaagggcaggtgggagctgtgacacagtgtgaaaaagcatttgtagagagactttttctcagcagccaataaaagcagagtggaaaaagattccaattctgcagagagatgctc

SEQ ID NO: 11969 - protein, 683 aa, Homo sapiens; identical to SEQ ID NO: 1987

SEQ ID NO: 11970 - DNA, 3137 bp, Homo sapiens
ctggagtcggagtttgcagtgagcggggattgcgccactgcacttcagcctgggtgagagagcaaaactctgtctcaaataaaaataaaaataaaaaagagccagtattttcctccttgctcctgggaaggagaaggaactggccccgtacaaccagggattcaggacacgtgttactagctccagatgaggatttacacgaaaaaatcctgggccttgtttgtacagttcatgccaggggtaggaaatacctgaagctttcaaatactgcgttagagttgtgactctgtcctgggcaagtcaggcctaaaatggagaaactggtgatgcactcctcaaaaagccaagtgtaaaatgaggttaatgccctccctgacttgttgccttcactggcgtggcatattatggtaaaaataataattaagaagtaaggttatgcaggcaaatcctctagcgccgaaatcttccccgccgcgctaccaggttctttcgtgttatcttggacataacacaacattaattcaactactcggtggagcgcccactagctgctggacactctcttaggccctgggcacagtgaacgagaagcatgtgtctttgtttttacagtctcaccacgccaccacctccctcgggggcctccgcgctgagcttccggcctctacgcctcgcttccggtcggccgccccttccttacttccggttctctatggtgcgcgggcaagctttgctccgcctccggcagtggcttactcccggtgccaggttcttggagctgtgaggaggaacaaccatgtcatcagaatcgagcaaaaaacggaagcccaaagtgatccgaagcgatggagccccagctgaaggaaagcggaatcgatctgacaccgagcaggaaggtaaatactacagtgaggaggccgaggtggatctgcgggaccctggcagagactatgagttatacaagtacacctgccaggagctacagaggctgatggctgagatccaagacctgaagagcaggggtggcaaggatgtggcaatagaaatagaagaacggaggatccagagctgtgtgcatttcatgactctaaagaagcttaaccgattagcccacatcaggttgaagaaaggaagagatcagacccacgaggctaagcagaaagtagatgcctatcatctgcagctccagaacctgttgtatgaggtgatgcacctacagaaggagatcaccaaatgtttggagtttaagtcaaagcatgaagaaattgatctggtcagtttagaggagttttataaggaggctccaccagatatcagcaaggccgaagtcaccatgggagaccctcaccagcaaacactggcacgtctggactgggagctggagcagcggaaaaggctggcagagaagtaccgagagtgcctatctaacaaggagaagattctcaaggagattgaggtgaagaaggagtacctgagcagcctccagccccgcctcaacagcatcatgcaggcttcccttccggtgcaggagtacctgtttatgccattcgaccaggctcacaagcagtatgagacagccagacacctgccgcctcccctctatgtcctctttgttcaggccactgcgtatgggcaggcctgtgataagacgttatctgtggcaatcgaaggcagtgtggatgaagccaaggctctgttcaaacctccagaggactcccaagatgacgagagtgactcagatgccgaggaggagcagactacgaagcgccggagacccacactgggggttcagttggacgacaaacgcaaggagatgctgaagaggcacccactgtctgtcatgctcgacctgaagtgcaaagatgacagtgtgcttcacctgactttctactacctcatgaacctcaacatcatgacagtaaaagccaaagtgacaactgccatggagctgatcacccccatcagtgcaggtgacttgctgtctcctgactcagtcctgagttgcttgtatcctggggatcatggaaagaaaactccgaatccagccaatcagtatcagtttgataaagttggcatcctgactttgagcgactatgtacttgagctaggtcacccctatttgtgggtgcagaagctgggtggcctccacttccccaaagagcagccccagcaaacagtgattgctgaccactcgctgagcgccagccacatggagaccaccatgaaacttctgaagaccagggtgcagtcccgcctggccctccacaaacagtttgcatccctagaacatggcattgtgccagttaccagtgattgccagtacctcttccctgccaaggttgtctctcgcctggtgaaatgggtgacagttgcccatgaggattacatggagctgcacttcaccaaagacattgtggatgcgggactggctggggacaccaatctctactacatggcgctcatcgaaaggggcacagccaaactgcaggccgctgtggtgttgaaccctggctactcctccatcccacctgttttccagctctgtttgaactggaaaggggagaaaaccaacagcaacgatgacaacattcgggccatggagggcgaagtcaatgtgtgctacaaggagctgtgtggcccttggcccagccaccagctgttgaccaaccagctgcagcggctgtgtgtgctgctggatgtttacctggagaccgagagccatgacgacagtgtggaggggcccaaggaatttccccaggagaagatgtgtctgcggctcttcaggggtcctagcaggatgaagccatttaaatacaaccatcctcagggattcttcagccatcgctgatctcccgcgcagaccgttgtttcccccaaggcctcaccctgagcactgggcttctgctttctgctctggcccacatgtgactcttgatattctccaaagacaccagccaattaaaaagcgtcacctgaccagtggcctttgtctgtggttcctggcaaggtggctttgcagtctggaagggcaggtgggagctgtgacacagtgtgaaaaagcatttgtagagagactttttctcagcagccaataaaagcagagtggaaaaagattccaattctgcagagagatgctc

SEQ ID NO: 11971 - protein, 683 aa, Homo sapiens; identical to SEQ ID NO: 1987

SEQ ID NO: 11972 - DNA, 3585 bp, Homo sapiens
cagtccccctggtgcgacacatggagtctaggatcatgatccccttgaagatctcgcctctgcagtgatgctgcctacacctccacctccttccccttctccctcaggcaaccccgacagacagtggcactcctggtcctgctgtcttggttttgtcttggctctgggaggactctgaggggcagtgctcagttcagacaagggggaactgaaggctgacaagttctgaggattacagctctgcccaggccctttctactttccctgcctgcctccctccccctgctagaagtagtttctgatttccctgaatgaaagatagtgatcttttaggccttcatttatcttctaaaattcctcatctcaaggccaccagtccccagttatcacccttggaaatcctctgtttagcttagttgcacaaaaggtagtatgtccagtggctagaggtggggtgggaagagaggaggccaggccaggccctcaggaattccctggtttccactgggccacccacttgctggacagtctgagccaagtccctcctgctggagaaaagcctggaactgccaaaacaaaaaaacaaatacaaacaaacctcgtcaccacggtcaggaggaggttcagacattctgcccagaggggctggggaaagggatgggagccaggaaagatttaggggcaggagacagacacgtaacaggaactcggaaggtagaacttagaattcagaacttgggtttcaattgtagaatttggaatctggaatacagaattgggaagaagaacagagatgacaaaagaccacttgaagagaggttcctaatactagacagatggagagtggcttggctgtttccccctgcatattggggttgaaaacttaaatgtgtagttccagtccttctatgcagagtctctcctgccctccctccttcctgcagtctcaccacgccaccacctccctcgggggcctccgcgctgagcttccggcctctacgcctcgcttccggtcggccgccccttccttacttccggttctctatggtgcgcgggcaagctttgctccgcctccggcagtggcttactcccggtgccaggttcttggagctgtgaggtgttcagcattatttaagatcacctatgcatcatctgaagccacagtcccaggtcatcttcatcaccttccccagtggaatgcctcctgtgttaaagcccacaacaacccctgtggaggaacaaccatgtcatcagaatcgagcaaaaaacggaagcccaaagtgatccgaagcgatggagccccagctgaaggaaagcggaatcgatctgacaccgagcaggaaggtaaatactacagtgaggaggccgaggtggatctgcgggaccctggcagagactatgagttatacaagtacacctgccaggagctacagaggctgatggctgagatccaagacctgaagagcaggggtggcaaggatgtggcaatagaaatagaagaacggaggatccagagctgtgtgcatttcatgactctaaagaagcttaaccgattagcccacatcaggttgaagaaaggaagagatcagacccacgaggctaagcagaaagtagatgcctatcatctgcagctccagaacctgttgtatgaggtgatgcacctacagaaggagatcaccaaatgtttggagtttaagtcaaagcatgaagaaattgatctggtcagtttagaggagttttataaggaggctccaccagatatcagcaaggccgaagtcaccatgggagaccctcaccagcaaacactggcacgtctggactgggagctggagcagcggaaaaggctggcagagaagtaccgagagtgcctatctaacaaggagaagattctcaaggagattgaggtgaagaaggagtacctgagcagcctccagccccgcctcaacagcatcatgcaggcttcccttccggtgcaggagtacctgtttatgccattcgaccaggctcacaagcagtatgagacagccagacacctgccgcctcccctctatgtcctctttgttcaggccactgcgtatgggcaggcctgtgataagacgttatctgtggcaatcgaaggcagtgtggatgaagccaaggctctgttcaaacctccagaggactcccaagatgacgagagtgactcagatgccgaggaggagcagactacgaagcgccggagacccacactgggggttcagttggacgacaaacgcaaggagatgctgaagaggcacccactgtctgtcatgctcgacctgaagtgcaaagatgacagtgtgcttcacctgactttctactacctcatgaacctcaacatcatgacagtaaaagccaaagtgacaactgccatggagctgatcacccccatcagtgcaggtgacttgctgtctcctgactcagtcctgagttgcttgtatcctggggatcatggaaagaaaactccgaatccagccaatcagtatcagtttgataaagttggcatcctgactttgagcgactatgtacttgagctaggtcacccctatttgtgggtgcagaagctgggtggcctccacttccccaaagagcagccccagcaaacagtgattgctgaccactcgctgagcgccagccacatggagaccaccatgaaacttctgaagaccagggtgcagtcccgcctggccctccacaaacagtttgcatccctagaacatggcattgtgccagttaccagtgattgccagtacctcttccctgccaaggttgtctctcgcctggtgaaatgggtgacagttgcccatgaggattacatggagctgcacttcaccaaagacattgtggatgcgggactggctggggacaccaatctctactacatggcgctcatcgaaaggggcacagccaaactgcaggccgctgtggtgttgaaccctggctactcctccatcccacctgttttccagctctgtttgaactggaaaggggagaaaaccaacagcaacgatgacaacattcgggccatggagggcgaagtcaatgtgtgctacaaggagctgtgtggcccttggcccagccaccagctgttgaccaaccagctgcagcggctgtgtgtgctgctggatgtttacctggagaccgagagccatgacgacagtgtggaggggcccaaggaatttccccaggagaagatgtgtctgcggctcttcaggggtcctagcaggatgaagccatttaaatacaaccatcctcagggattcttcagccatcgctgatctcccgcgcagaccgttgtttcccccaaggcctcaccctgagcactgggcttctgctttctgctctggcccacatgtgactcttgatattctccaaagacaccagccaattaaaaagcgtcacctgaccagtggcctttgtctgtggttcctggcaaggtggctttgcagtctggaagggcaggtgggagctgtgacacagtgtgaaaaagcatttgtagagagactttttctcagcagccaataaaagcagagtggaaaaagattccaattctgcagagagatgctc

SEQ ID NO: 11973 - protein, 802 aa, Homo sapiens
MCSSSPSMQSLSCPPSFLQSHHATTSLGGLRAELPASTPRFRSAAPSLLPVLYGARASFAPPPAVAYSRCQVLGAVRCSALFKITYASSEATVPGHLHHLPQWNASCVKAHNNPCGGTTMSSESSKKRKPKVIRSDGAPAEGKRNRSDTEQEGKYYSEEAEVDLRDPGRDYELYKYTCQELQRLMAEIQDLKSRGGKDVAIEIEERRIQSCVHFMTLKKLNRLAHIRLKKGRDQTHEAKQKVDAYHLQLQNLLYEVMHLQKEITKCLEFKSKHEEIDLVSLEEFYKEAPPDISKAEVTMGDPHQQTLARLDWELEQRKRLAEKYRECLSNKEKILKEIEVKKEYLSSLQPRLNSIMQASLPVQEYLFMPFDQAHKQYETARHLPPPLYVLFVQATAYGQACDKTLSVAIEGSVDEAKALFKPPEDSQDDESDSDAEEEQTTKRRRPTLGVQLDDKRKEMLKRHPLSVMLDLKCKDDSVLHLTFYYLMNLNIMTVKAKVTTAMELITPISAGDLLSPDSVLSCLYPGDHGKKTPNPANQYQFDKVGILTLSDYVLELGHPYLWVQKLGGLHFPKEQPQQTVIADHSLSASHMETTMKLLKTRVQSRLALHKQFASLEHGIVPVTSDCQYLFPAKVVSRLVKWVTVAHEDYMELHFTKDIVDAGLAGDTNLYYMALIERGTAKLQAAVVLNPGYSSIPPVFQLCLNWKGEKTNSNDDNIRAMEGEVNVCYKELCGPWPSHQLLTNQLQRLCVLLDVYLETESHDDSVEGPKEFPQEKMCLRLFRGPSRMKPFKYNHPQGFFSHR

SEQ ID NO: 11974 - DNA, 2867 bp, Homo sapiens
aaaaaatcctgggccttgtttgtacagttcatgccaggggtaggaaatacctgaagctttcaaatactgcgttagagttgtgactctgtcctgggcaagtcaggcctaaaatggagaaactggtgatgcactcctcaaaaagccaagtgtaaaatgaggttaatgccctccctgacttgttgccttcactggcgtggcatattatggtaaaaataataattaagaagtaaggttatgcaggcaaatcctctagcgccgaaatcttccccgccgcgctaccaggttctttcgtgttatcttggacataacacaacacgccaccacctccctcgggggcctccgcgctgagcttccggcctctacgcctcgcttccggtcggccgccccttccttacttccggttctctatggtgcgcgggcaagctttgctccgcctccggcagtggcttactcccggtgccaggttcttggagctgtgaggtgcagtcccaggtcatcttcatcaccttccccagtggaatgcctcctgtgttaaagcccacaacaacccctgtggaggaacaaccatgtcatcagaatcgagcaaaaaacggaagcccaaagtgatccgaagcgatggagccccagctgaaggaaagcggaatcgatctgacaccgagcaggaaggtaaatactacagtgaggaggccgaggtggatctgcgggaccctggcagagactatgagttatacaagtacacctgccaggagctacagaggctgatggctgagatccaagacctgaagagcaggggtggcaaggatgtggcaatagaaatagaagaacggaggatccagagctgtgtgcatttcatgactctaaagaagcttaaccgattagcccacatcaggttgaagaaaggaagagatcagacccacgaggctaagcagaaagtagatgcctatcatctgcagctccagaacctgttgtatgaggtgatgcacctacagaaggagatcaccaaatgtttggagtttaagtcaaagcatgaagaaattgatctggtcagtttagaggagttttataaggaggctccaccagatatcagcaaggccgaagtcaccatgggagaccctcaccagcaaacactggcacgtctggactgggagctggagcagcggaaaaggctggcagagaagtaccgagagtgcctatctaacaaggagaagattctcaaggagattgaggtgaagaaggagtacctgagcagcctccagccccgcctcaacagcatcatgcaggcttcccttccggtgcaggagtacctgtttatgccattcgaccaggctcacaagcagtatgagacagccagacacctgccgcctcccctctatgtcctctttgttcaggccactgcgtatgggcaggcctgtgctcatatgaaatcctcccagccccctagacaggataagacgttatctgtggcaatcgaaggcagtgtggatgaagccaaggctctgttcaaacctccagaggactcccaagatgacgagagtgactcagatgccgaggaggagcagactacggtgccgtcctccctagaagcagaagaggtgtgaaagaaggtgctgctgggaggggagtctgacaacccagctagctgaagcagcagaagcgccggagacccacactgggggttcagttggacgacaaacgcaaggagatgctgaagaggcacccactgtctgtcatgctcgacctgaagtgcaaagatgacagtgtgcttcacctgactttctactacctcatgaacctcaacatcatgacagtaaaagccaaagtgacaactgccatggagctgatcacccccatcagtgcaggtgacttgctgtctcctgactcagtcctgagttgcttgtatcctggggatcatggaaagaaaactccgaatccagccaatcagtatcagtttgataaagttggcatcctgactttgagcgactatgtacttgagctaggtcacccctatttgtgggtgcagaagctgggtggcctccacttccccaaagagcagccccagcaaacagtgattgctgaccactcgctgagcgccagccacatggagaccaccatgaaacttctgaagaccagggtgcagtcccgcctggccctccacaaacagtttgcatccctagaacatggcattgtgccagttaccagtgattgccagtacctcttccctgccaaggttgtctctcgcctggtgaaatgggtgacagttgcccatgaggattacatggagctgcacttcaccaaagacattgtggatgcgggactggctggggacaccaatctctactacatggcgctcatcgaaaggggcacagccaaactgcaggccgctgtggtgttgaaccctggctactcctccatcccacctgttttccagctctgtttgaactggaaaggggagaaaaccaacagcaacgatgacaacattcgggccatggagggcgaagtcaatgtgtgctacaaggagctgtgtggcccttggcccagccaccagctgttgaccaaccagctgcagcggctgtgtgtgctgctggatgtttacctggagaccgagagccatgacgacagtgtggaggggcccaaggaatttccccaggagaagatgtgtctgcggctcttcaggggtcctagcaggatgaagccatttaaatacaaccatcctcagggattcttcagccatcgctgatctcccgcgcagaccgttgtttcccccaaggcctcaccctgagcactgggcttctgctttctgctctggcccacatgtgactcttgatattctccaaagacaccagccaattaaaaagcgtcacctgacc

SEQ ID NO: 11975 - protein, 344 aa, Homo sapiens; identical to SEQ ID NO: 11963

SEQ ID NO: 11976 - DNA, 2978 bp, Homo sapiens
ctggagtcggagtttgcagtgagcggggattgcgccactgcacttcagcctgggtgagagagcaaaactctgtctcaaataaaaataaaaataaaaaagagccagtattttcctccttgctcctgggaaggagaaggaactggccccgtacaaccagggattcaggacacgtgttactagctccagatgaggatttacacgaaaaaatcctgggccttgtttgtacagttcatgccaggggtaggaaatacctgaagctttcaaatactgcgttagagttgtgactctgtcctgggcaagtcaggcctaaaatggagaaactggtgatgcactcctcaaaaagccaagtgtaaaatgaggttaatgccctccctgacttgttgccttcactggcgtggcatattatggtaaaaataataattaagaagtaaggttatgcaggcaaatcctctagcgccgaaatcttccccgccgcgctaccaggttctttcgtgttatcttggacataacacaacattaattcaactactcggtggagcgcccactagctgctggacactctcttaggccctgggcacagtgaacgagaagcatgtgtctttgtttttacagtctcaccacgccaccacctccctcgggggcctccgcgctgagcttccggcctctacgcctcgcttccggtcggccgccccttccttacttccggttctctatggtgcgcgggcaagctttgctccgcctccggcagtggcttactcccggtgccaggttcttggagctgtgaggaggaacaaccatgtcatcagaatcgagcaaaaaacggaagcccaaagtgatccgaagcgatggagccccagctgaaggaaagcggaatcgatctgacaccgagcaggaaggtaaatactacagtgaggaggccgaggtggatctgcgggaccctggcagagactatgagttatacaagtacacctgccaggagctacagaggctgatggctgagatccaagacctgaagagcaggggtggcaaggatgtggcaatagaaatagaagaacggaggatccagagctgtgtgcatttcatgactctaaagaagcttaaccgattagcccacatcaggttgaagaaaggaagagatcagacccacgaggctaagcagaaagtagatgcctatcatctgcagctccagaacctgttgtatgaggtgatgcacctacagaaggagatcaccaaatgtttggagtttaagtcaaagcatgaagaaattgatctggtcagtttagaggagttttataaggaggctccaccagatatcagcaaggccgaagtcaccatgggagaccctcaccagcaaacactggcacgtctggactgggagctggagcagcggaaaaggctggcagagaagtaccgagagtgcctatctaacaaggagaagattctcaaggagattgaggtgaagaaggagtacctgagcagcctccagccccgcctcaacagcatcatgcaggcttcccttccggtgcaggagtacctgtttatgccattcgaccaggctcacaagcagtatgagacagccagacacctgccgcctcccctctatgtcctctttgttcaggccactgcgtatgggcaggcctgtgataagacgttatctgtggcaatcgaaggcagtgtggatgaagccaaggctctgttcaaacctccagaggactcccaagatgacgagagtgactcagatgccgaggaggagcagactacgaagcgccggagacccacactgggggttcagttggacgacaaacgcaaggagatgctgaagaggcacccactgtctgtcatgctcgacctgaagtgcaaagatgacagtgtgcttcacctgactttctactacctcatgaacctcaacatcatgacagtaaaagccaaagtgacaactgccatggagctgatcacccccatcagtgcaggtgacttgctgtctcctgactcagtcctgagttgcttgtatcctggggatcatggaaagaaaactccgaatccagccaatcagtatcagtttgataaagttggcatcctgactttgagcgactatgtacttgagctaggtcacccctatttgtgggtgcagaagctgggtggcctccacttccccaaagagcagccccagcaaacagtgattgctgaccactcgctgagcgccagccacatggagaccaccatgaaacttctgaagaccagggtgcagtcccgcctggccctccacaaacagtttgcatccctagaacatggcattgtgccagttaccagtgattgccagtacctcttccctgccaaggttgtctctcgcctggtgaaatgggtgacagttgcccatgaggattacatggagctgcacttcaccaaagacattgtggatgcgggactggctggggacaccaatctctactacatggcgctcatcgaaaggggcacagccaaactgcaggccgctgtggtgttgaaccctggctactcctccatcccacctgttttccagctctgtttgaactggaaaggggagaaaaccaacagcaacgatgacaacattcgggccatggagggcgaagtcaatgtgtgctacaaggagctgtgtggcccttggcccagccaccagctgttgaccaaccagctgcagcggctgtgtgtgctgctggatgtttacctggagaccgagagccatgacgacagtgtggaggggcccaaggaatttccccaggagaagatgtgtctgcggctcttcaggggtcctagcaggatgaagccatttaaatacaaccatcctcagggattcttcagccatcgctgatctcccgcgcagaccgttgtttcccccaaggcctcaccctgagcactgggcttctgctttctgctctggcccacatgtgactcttgatattctccaaagacaccagccaattaaaaagcgtcacctgacc

SEQ ID NO: 11977 - protein, 683 aa, Homo sapiens; identical to SEQ ID NO: 1987

SEQ ID NO: 11978 - DNA, 529 bp, Homo sapiens
gtctagcttgatctgatggcctagcccctggcccagcccctgcagaggcatcagcgctcgggcccatccagggacggaagcctggccagtgtggtcccccacatgcaggaaggtagtgctgagatgctggctttcctatcacacaggccatggagggcgaagtcaatgtgtgctacaaggagctgtgtggcccttggcccagccaccagctgttgaccaaccagctgcagcggctgtgtgtgctgctggatgtttacctggagaccgagagccatgacgacagtgtggaggggcccaaggaatttccccaggagaagatgtgtctgcggctcttcaggggtcctagcaggatgaagccatttaaatacaaccatcctcagggattcttcagccatcgctgatctcccgcgcagaccgttgtttcccccaaggcctcaccctgagcactgggcttctgctttctgctctggcccacatgtgactcttgatattctccaaagacaccagccaattaaaaagcgtcacctga

SEQ ID NO: 11979 - protein, 83 aa, Homo sapiens [sequence omitted]

SEQ ID NO: 11980 - DNA, 361 bp, Homo sapiens
cttcagaatgcagcaaagcatgagagagtattagaaggccgctgagaaagacaaacaagttttaggattacagaagtattcaacaaccaaccattgaaggtgcaagaactgggccatcccatgggtccaccagggctttgacaaggcaggtgctggggcagagcactctggccaggaagcaaaagatgaaggttcccatcttggccccagcctggatctgtgcccagtgatagtcatcagcctggatctgtgcccattgcattgtgtggacataccacgccatgtttctccatcaccttttgaggaaacttctgttgtttccaccttctaaccgtcatcagtaaagctgctgtgaaccttc

SEQ ID NO: 11981 - protein, 77 aa, Homo sapiens
RCKNWAIPWVHQGFDKAGAGAEHSGQEAKDEGSHLGPSLDLCPVIVISLDLCPLHCVDIPRHVSPSPFEETSVVSTF

SEQ ID NO: 11982 - DNA, 1961 bp, Homo sapiens
gcataacctcggtaaggggaagtctcagttccaggctcttctaggctatgttctctgtctccacaccttcctctcagacagcagctggagccccagaacctgggagcctcacagagaaagtcctgatgtgggacctggttttccacccgagacccaggatccaataaagaagtgtttccataaatgatgcatcctcccaagtatctgggattacaggcgtgtgccaccacgcctggctaattcttttgtattttcagtagagatggggtttcacccatcaggctggtctcgaacttttgatgacctcagatgatccacccaccttggcctcccgaagtgctgggattacaggcatgagccatcgtgcccagcctctcagctcctaattcttatgttcatcaatcagtctcttgctggggttcccctaggaggtggtgaaatgaccccagctcgctgttcctcacatgggtgctgccacgtcactggctcaggctcagctgctgggtcaccaggagaatggacccttcctccacctcagctcagagcacagtgatgattcgtgactttcccaatagaacttcaaatctctgaggacggggggtggggggatgtgcttgagtgtttgtactcatggtcttgttctcggagtgacaaagctggaacacaatacctctatgcatgaaaaggttgtcacttgtcacaactaacaggctttcacctcaaggaaattttcttcccttgtgtacttttcccctggcagtggacatggctgcactcttccaagaagcaagcagctgtcccgtctgctcagactatctggaaaaaccaatgtccctggagtgtggatgcaccgtctgcctcaagtgcatcaattcgctgcagaaggagccccatggggaggatctgctttgctgttgctgttccatggtctctcagaggaacaaaatcaggcccaatcggcagctagagaggctggtttcccacatcaaggaactggagcccaagctgaagaagattctacagatgaacccaaggatgcggaagttccaagtggatatgaccttggatgccgacacagccaacaacttcctcctcatttctgacgacctcaggagcgtccgaagtgggctcatcacacagaatcggcaagaccttgccgagagatttgacgtgtccgtttgcatcctgggctcccctcgctttacctgtggccgccactactgggaggtggacgtgggaacaagcacagaatgggacctgggagtctgcagagaatctgttcactgcaaagggaagatccagctgaccacagagcttggattctggactgtgagtttgagggatggaagccgcctctctgccagcacggtgccgctgactttcctcttagtagaccgcaagttacagcgagtggggatttttctggatatgggcatgcagaacgtttccttttttgatgctgaaagtggttcccatgtctatacattcaggagcgtctctgctgaggagccactgcgcccatttttggctccttcaattccacctaatggtgatcaaggtgtcttgagcatctgtcctttgatgaactcaggcactactgatgctccagtccgtcctggggaggccaaataagccgccactgcaaaaaaaaacagggtcagaaaattacttgggtgggtagacttaggaattttctacttggtaaaagcattatacagtcataggagaaagatatgggacatttctataatctatattctaatttgattcgattattgagtcgtaagtattaattattgccaccatccaactcattgagtcttatggttcacatcttgtttcctatagaaatgttctgtattctcggatcaatttccaaatgctttactttttcatttctgtaagttcaaatcaatgtttaaattatagaagttatgaggtaaataaacatttggatatca

SEQ ID NO: 11983 - protein, 317 aa, Homo sapiens
MKRLSLVTTNRLSPQGNFLPLCTFPLAVDMAALFQEASSCPVCSDYLEKPMSLECGCTVCLKCINSLQKEPHGEDLLCCCCSMVSQRNKIRPNRQLERLVSHIKELEPKLKKILQMNPRMRKFQVDMTLDADTANNFLLISDDLRSVRSGLITQNRQDLAERFDVSVCILGSPRFTCGRHYWEVDVGTSTEWDLGVCRESVHCKGKIQLTTELGFWTVSLRDGSRLSASTVPLTFLLVDRKLQRVGIFLDMGMQNVSFFDAESGSHVYTFRSVSAEEPLRPFLAPSIPPNGDQGVLSICPLMNSGTTDAPVRPGEAK

SEQ ID NO: 11984 - DNA, 1117 bp, Homo sapiens
caaagttcatagcaggttgaacatgcttgctgtcattttcacagattctggtctttcttatggggaacctgagttcctgcattaaagttcccccagaagatcaatggaaggtggattccaaagagtgggcaagtgaggaccccttctctgttaccaaggtgaccccaaggaacacagtaaatgtggcggcttatttggcctccccaggacggactggagcatcagtagtgcctgagttcatcaaaggacagatgctcaagacaccttgatcaccattaggtggaattgaaggagccaaaaatgggcgcagtggctcctcagcagagacgctcctgaatgtatagacatgggaaccactttcagcatcaaaaaaggaaacgttctgcatgcccatatccagaaaaatccccactcgctgtaacttgcggtctactaagaggaaagtcagcggcaccgtgctggcagagaggcggcttccatccctcaaactcacagtccagaatccaagctctgtggtcagctggatcttccctttgcagtgaacagattctctgcagactcccaggtcccattctgtgcttgttcccacgtccacctcccagtagtggcggccacaggtaaagcgaggggagcccaggatgcaaacggacacgtcaaatctctcggcaaggtcttgccgattctgtgtgatgagcccacttcggacgctcctgaggtcgtcagaaatgaggaggaagttgttggctgtgtcggcatccaaggtcatatccactgtgaaaaggaaaacaagttgctcagcaagtggacagaagccaaccccatgcctctcttctacttcaaaggcccaaatatctcctgactttagtttctttaattctgtttcttcctccaaaatcaaaacttttcatgaggaaacttccctatttcaaattttcataggtatgctttgtggcaatacgtgactcttattcacagtagcaattcttattttactttacgtcacgtgtttgcttcactgaacttttcttcatttagagtggagggtctctgaaggcagacaccatgcccccctttctaccaccttgatgtgtgaacaaataaatgataattaagacaa

SEQ ID NO: 11985 - protein, 69 aa, Homo sapiens
MGNLSSCIKVPPEDQWKVDSKEWASEDPFSVTKVTPRNTVNVAAYLASPGRTGASVVPEFIKGQMLKTP

SEQ ID NO: 11986 - DNA, 1295 bp, Homo sapiens
tgagacgttgatgatgctcctatcaccatggttatgtgattgggtatatcttgccctcggtcctaactgccactgtctgtgctgagtttttcaaagttcatagcaggttgaacatgcttgctgtcattttcacagattctggtctttcttatggggaacctgagttcctgcattaaagttcccccagaagatcaatggaaggtggattccaaagagtgggcaagtgaggaccccttctctgttaccaaggtgaccccaaggaacacagtaaatgaaattttaagaagatatagcctctacaccaagaggcacatgacacaacctggactctgggcaaaccaccgggtgcactcacatgaagtggcggcttatttggcctccccaggacggactggagcatcagtagtgcctgagttcatcaaaggacagatgctcaagacaccttgatcaccattaggtggaattgaaggagccaaaaatgggcgcagtggctcctcagcagagacgctcctgaatgtatagacatgggaaccactttcagcatcaaaaaaggaaacgttctgcatgcccatatccagaaaaatccccactcgctgtaacttgcggtctactaagaggaaagtcagcggcaccgtgctggcagagaggcggcttccatccctcaaactcacagtccagaatccaagctctgtggtcagctggatcttccctttgcagtgaacagattctctgcagactcccaggtcccattctgtgcttgttcccacgtccacctcccagtagtggcggccacaggtaaagcgaggggagcccaggatgcaaacggacacgtcaaatctctcggcaaggtcttgccgattctgtgtgatgagcccacttcggacgctcctgaggtcgtcagaaatgaggaggaagttgttggctgtgtcggcatccaaggtcatatccactgtgaaaaggaaaacaagttgctcagcaagtggacagaagccaaccccatgcctctcttctacttcaaaggcccaaatatctcctgactttagtttctttaattctgtttcttcctccaaaatcaaaacttttcatgaggaaacttccctatttcaaattttcataggtatgctttgtggcaatacgtgactcttattcacagtagcaattcttattttactttacgtcacgtgtttgcttcactgaacttttcttcatttagagtggagggtctctgaaggcagacaccatgcccccctttctaccaccttgatgtgtgaacaaataaatgataattaagacaa

SEQ ID NO: 11987 - protein, 98 aa, Homo sapiens [sequence omitted]

SEQ ID NO: 11988 - DNA, 1179 bp, Homo sapiens
acaaccacagggctccccatgaggtgatgtcatcgaattttcctggctgaagagtcgtcctttgtgtacacacatgggagtttattttttcatctgcatatggacgattctggtctttcttatggggaacctgagttcctgcattaaagttcccccagaagatcaatggaaggtggattccaaagagtgggcaagtgaggaccccttctctgttaccaaggtgaccccaaggaacacagtaaatgtggcggcttatttggcctccccaggacggactggagcatcagtagtgcctgagttcatcaaaggacagatgctcaagacaccttgatcaccattaggtggaattgaaggagccaaaaatgggcgcagtggctcctcagcagagacgctcctgaatgtatagacatgggaaccactttcagcatcaaaaaaggaaacgttctgcatgcccatatccagaaaaatccccactcgctgtaacttgcggtctactaagaggaaagtcagcggcaccgtgctggcagagaggcggcttccatccctcaaactcacagtccagaatccaagctctgtggtcagctggatcttccctttgcagtgaacagattctctgcagactcccaggtcccattctgtgcttgttcccacgtccacctcccagtagtggcggccacaggtaaagcgaggggagcccaggatgcaaacggacacgtcaaatctctcggcaaggtcttgccgattctgtgtgatgagcccacttcggacgctcctgaggtcgtcagaaatgaggaggaagttgttggctgtgtcggcatccaaggtcatatccactgtgaaaaggaaaacaagttgctcagcaagtggacagaagccaaccccatgcctctcttctacttcaaaggcccaaatatctcctgactttagtttctttaattctgtttcttcctccaaaatcaaaacttttcatgaggaaacttccctatttcaaattttcataggtatgctttgtggcaatacgtgactcttattcacagtagcaattcttattttactttacgtcacgtgtttgcttcactgaacttttcttcatttagagtggagggtctctgaaggcagacaccatgcccccctttctaccaccttgatgtgtgaacaaataaatgataattaagacaa

SEQ ID NO: 11989 - protein, 85 aa, Homo sapiens
MGVYFFICIWTILVFLMGNLSSCIKVPPEDQWKVDSKEWASEDPFSVTKVTPRNTVNVAAYLASPGRTGASVVPEFIKGQMLKTP

SEQ ID NO: 11990 - DNA, 545 bp, Homo sapiens
caggtacaaccacagggctccccatgaggtgatgtcatcgaattttcctggctgaagagtcgtcctttgtgtacacacatgggagtttattttttcatctgcatatggacgcattcctgagacttcagaaacattctatggagaattgagaagagagtattttttgagccagaaagtgctttcctgtgaagtttgtatatattctggtctttcttatggggaacctgagttcctgcattaaagttcccccagaagatcaatggaaggtggattccaaagagtgggcaagtgaggaccccttctctgttaccaaggtgaccccaaggaacacagtaaatgaaattttaagaagatatagcctctacaccaagaggcacatgacacaacctggactctgggcaaaccaccgggtgcactcacatgaagtttgggtggttatagataaagctgctgtaaacattcctgtgcaggctttgtgtggacgtaacttttcatctcaactgagaacacacatccaggaaaatgttacccacactgagcaatga

SEQ ID NO: 11991 - protein, 109 aa, Homo sapiens [sequence omitted]

SEQ ID NO: 11992 - DNA, 1555 bp, Homo sapiens
agaagggctgtgtccaccatggctcctgtcctcctgctgctcctctctcacttcccagaatgtttctgaagtctcaggaatgctgaaaacaaaaacaaaaacctcctgatacactgcggtgttgcccggttatctagatgagcaaaactcagagcctgtggagttgacttttttattattattattttttggaagaagagaaatgagcctttcctagttttcttttcggccagaggccggagaccattcaagcaggtagacagtcgctacagcatggactactgtctttgagggatcagagcagaaacctccttgtccctctccagtcacctccctccaaccccgatcatctgtgcttggggctgcctgaggctccccgtgacccagggatgaggcactaaggtgtgaaatgagtgaggacacaggtcccaggggagttccagcgaagatgtggccagagtcactcacaggcgaagacacaacctgaagtctgcagtctgccacacagaagacagtcctcaccagggcccaaccaggctggcaccctgatatccgacttccagcctccagaactgggagaaatacaattctgtctgccctggggatgagctccccaggctatggctctttgctctaacagcctgaactagcatagaagtgctatcccatcatctgggttgtattctattcagaaaggcgtcactaacccctcagtgctgtgatccttgcggacgctgcccaccataggctgagatgaggcacagggtctggttctaaatagaatcagaaggcactggaaagtgcaatgtcagaggacgatgagggctgaatttcatataatctcagcctctactggtgcgcatggaaaacgaggcccagagcaaaaatgcctttctcgagatcacactgtggaccccaagcccattggagttgtattccatgctacctctcacccctcacttcttcttgaaattcttccatctctaagcgtgtgcagtatctacaggggacaccaaacaatgagttttataagatttatctcaaagacacctgatgagttcaccaggaaggagatgctagcaaaaccccattgtgcatgttgcagggctggggaggccccaaaacaccagaaaacttctctagggtcacagaactggtaagatcaaggaggtttggcccagcactgtctcctcaaacctagggccttagttgcctccaggtcttcccagggtgacgagggggcactttttttgcataatttggaacaggtaagaagttggtaggaacaggtaagaatagggggttggtgagtggtcagaagcccagtggggcctttgagtaggtcttatggacggaaggagcataggggattggacctggaagaagtgagtctcctctcagatcctgggccttgtgatgggctttctcccaccctggagtcttccggcattttccccctgccaagggctgaaatggccttagctgtttctccagactccctttgatgttaaaggatgaaatccaattatattcctttaagttaaagcattcttct

SEQ ID NO: 11993 - protein, 113 aa, Homo sapiens
MRAEFHIISASTGAHGKRGPEQKCLSRDHTVDPKPIGVVFHATSHPSLLLEILPSLSVCSIYRGHQTMSFIRFISKTPDEFTRKEMLAKPHCACCRAGEAPKHQKTSLGSQNW

SEQ ID NO: 11994 - DNA, 444 bp, Homo sapiens
ctacaggggacaccaaacaatgagttttataagatttatctcaaagacacctgatgagttcaccaggaaggagatgctagcaaaaccccattgtgcatgttgcagggctggggaggccccaaaacaccagaaaacttctctagggtcacagaactggtaagatcaaggaggtttggcccagcactgtctcctcaaacctagggccttagttgcctccaggtcttcccagggtgacgagggggcactttttttgcataatttggaacagtatgaaaatgaggagacttacagggtgcgaacattccagataggtacaggggagaaactggtgaaggccctggttccagcctttctgggtagaaccatctcctcctatgccacctgtttgggcccctcctgggactttatcaccgtgccagacttcatggaggaactgtttaccag

SEQ ID NO: 11995 - protein, 46 aa, Homo sapiens
MSFIRFISKTPDEFTRKEMLAKPHCACCRAGEAPKHQKTSLGSQNW

SEQ ID NO: 11996 - DNA, 1231 bp, Homo sapiens
tttgagtcttgttttttcacccaggctggagtccagtggtgcaatcttggctcactgcaacctccaactcccgggttcatgtgattcttctgcttcagcctctcgagtagctgggactacaggcacatgccgccaagcccagctaattttttttttttttttagtagagacagggtttcaccatattggccacgctggcctcaaattcctgatctcgtgatccgcccgcctcagcctcccaaagtgctgggattacaggcgtgagccaccacgccctattctccactcttatgtcaaattttaaagtctagaaccttttccaccatgggaacccatgtcctccacatccacaagtctccaaagggttggggattccttgtgtgagctccagatcccaatcctctggtggttcatggtgttgtcaatgacaggtctctccttgtcaccccagtatgaaaatgaggagacttacagggtgcgaacattccagataggtacaggggagaaactggtgaaggccctggttccagcctttctgggtagaaccatctcctcctatgccacctgtttgggcccctcctgggactttatcaccgtgccagacttcatggaggaactgtttaccagagaaagaacagtggtcccttgggtcctgaaggaggggccccaggctcactcagagcttggtgtgaagaagatcaatctgatggctaaagatcagtatgactgcgtaaggcagtttgacatctacccatccctaacagattttcctaaaactctgtggaacaaccaaggagaaggcatattcctccctttccaaaggtgggcaatgtgcctcttcctggaaggttattttacaagcacgggcccctgaaagcagcagcctccccatcagccattttggcgtgagcagttacagctgcacactttgcaacttgtcccgccttgagtctgatgtcagaagagcatgtcagtccacttccacttcagagagggttggtggtgtcaggcagccctgctgtccaaggttctatcctttgatcacagcaattggtctcagtttaatggctttcttgctgattccagcatcatggcaggtatttaccacatctgtcacattcttataggactcaggagcctgcaggagaggaatttaaacattgtacaagtccactgaaaacacagtctttacaagcaccaaacttcacttgtgatgaaataaatgcacact

SEQ ID NO: 11997 - protein, 179 aa, Homo sapiens
MSSTSTSLQRVGDSLCELQIPILWWFMVLSMTGLSLSPQYENEETYRVRTFQIGTGEKLVKALVPAFLGRTISSYATCLGPSWDFITVPDFMEELFTRERTVVPWVLKEGPQAHSELGVKKINLMAKDQYDCVRQFDIYPSLTDFPKTLWNNQGEGIFLPFQRWAMCLFLEGYFTSTGP

SEQ ID NO: 11998 - DNA, 877 bp, Homo sapiens
ccaaggtcttcaacacaacccctgatgacttggacctacatgtgatctatgatgtttctcacaacattgccaaagtggagcagcatgtggtggacggaaaggaacggacactgttagtacacaggaagggatccacccgcgctttccctcctcaccatcccctcattgctgttgattaccaagtactgaacagggcatgactgagacctttggaacaacctgtcatggagcgggccgtgcattgtcccgagcaaaatctcgacgtaatttagatttccaggatgtcttagacaaattggcagatatgggaattgcgatccgtgttgcctcacccaaactggttatggaagaggctcctgagtcctataagaatgtgacagatgtggtaaatacctgccatgatgctggaatcagcaagaaagccattaaactgagaccaattgctgtgatcaaaggatagaaccttggacagcagggctgcctgacaccaccaaccctctctgaagtggaagtggactgacatgctcttctgacatcagactcaaggcgggacaagttgcaaagtgtgcagctgtaactgctcacgccaaaatggctgatggggaggctgctgctttcaggggcccgtgcttgtaaaataaccttccaggaagaggcacattgcccacctttggaaagggaggaatatgccttctccttggttgttccacagagttttaggaaaatctgttagggatgggtagatgtcaaactgccttacgcagtcatactgatctttagccatcagattgatcttcttcacaccaagctctgtttacattccgagaggtgtcatgaagaaagttctgttcaataaggttttggaatgtttcctttc

SEQ ID NO: 11999 - protein, 87 aa, Homo sapiens [sequence omitted]

SEQ ID NO: 12000 - DNA, 489 bp, Homo sapiens
ggttgaaggtgttttctatgtgaatgatgctctggagaaattgatgtttgaggaattaaggaatgcctgtcgaggtggtggtaacagggctgcctgacaccaccaaccctctctgaagtggaagtggactgacatgctcttctgacatcagactcaaggcgggacaagttgcaaagtgtgcagctgtaactgctcacgccaaaatggctgatggggaggctgctgctttcaggggcccgtgcttgtaaaataaccttccaggaagaggcacattgcccacctttggaaagggaggaatatgccttctccttggttgttccacagagttttaggaaaatctgttagggatgggtagatgtcaaactgccttacgcagtcatactgatctttagccatcagattgatcttcttcacaccaagctctgtttacattccgagaggtgtcatgaagaaagttctgttcaataaggttttggaatgtttcctttc

SEQ ID NO: 12001 - protein, 44 aa, Homo sapiens
MGRLLLSGARACKITFQEEAHCPPLEREEYAFSLVVPQSFRKIC

SEQ ID NO: 12002 - DNA, 818 bp, Homo sapiens
ggttcttggaaggcggtgctctgagaagccggactacgcggcagcggctcttcaaagcggagccgggagtttttgctacagttttcgccaccatgagtcgcagctataatgatgagctgcagttcttggagaagatcaataaaaactgctggaggatcaagaagggcttcgtgcccaacatgcaggttgaaggtgttttctatgtgaatgatgctctggagaaattgatgtttgaggaattaaggaatgcctggaattgttcatcgatctattgggcttcctgatgtccattcaggatatgggtttgctattgggaacatggcagcctttgatatgaatgaccctgaagcagtagtatccccaggtggtgtcgggtttgacatcaactgtggtgtccgcttgctaagaaccaatttagatgaaagtgatcaccaaccctctctgaagtggaagtggactgacatgctcttctgacatcagactcaaggcgggacaagttgcaaagtgtgcagctgtaactgctcacgccaaaatggctgatggggaggctgctgctttcaggggcccgtgcttgtaaaataaccttccaggaagaggcacattgcccacctttggaaagggaggaatatgccttctccttggttgttccacagagttttaggaaaatctgttagggatgggtagatgtcaaactgccttacgcagtcatactgatctttagccatcagattgatcttcttcacaccaagctctgtttacattccgagaggtgtcatgaagaaagttctgttcaataaggttttggaatgtttcctttc

SEQ ID NO: 12003 - protein, 75 aa, Homo sapiens
MPGIVHRSIGLPDVHSGYGFAIGNMAAFDMNDPEAVVSPGGVGFDINCGVRLLRTNLDESDHQPSLKWKWTDMLF

SEQ ID NO: 12004 - DNA, 891 bp, Homo sapiens
gctttggttcttggaaggcggtgctctgagaagccggactacgcggcagcggctcttcaaagcggagccgggagtttttgctacagttttcgccaccatgagtcgcagctataatgatgagctgcagttcttggagaagatcaataaaaactgctggaggatcaagaagggcttcgtgcccaacatgcaggttgaaggtgttttctatgtgaatgatgctctggagaaattgatgtttgaggaattaaggaatgcctgtcgaggtggtggtgttggtggcttcctgccagccatgaaacagattggcaatgtggcagccctgcctggaattgttcatcgatctattgggcttcctgatgtccattcaggatatgggtttgctattgggaacatggcagcctttgatatgaatgaccctgaagcagtagtatccccaggtggtgtcgggtttgacatcaactgtggtgtccgcttgctaagaaccaatttagatgaaagtgatcaccaaccctctctgaagtggaagtggactgacatgctcttctgacatcagactcaaggcgggacaagttgcaaagtgtgcagctgtaactgctcacgccaaaatggctgatggggaggctgctgctttcaggggcccgtgcttgtaaaataaccttccaggaagaggcacattgcccacctttggaaagggaggaatatgccttctccttggttgttccacagagttttaggaaaatctgttagggatgggtagatgtcaaactgccttacgcagtcatactgatctttagccatcagattgatcttcttcacaccaagctctgtttacattccgagaggtgtcatgaagaaagttctgttcaataaggttttggaatgtttcctttc

SEQ ID NO: 12005 - protein, 149 aa, Homo sapiens
MSRSYNDELQFLEKINKNCWRIKKGFVPNMQVEGVFYVNDALEKLMFEELRNACRGGGVGGFLPAMKQIGNVAALPGIVHRSIGLPDVHSGYGFAIGNMAAFDMNDPEAVVSPGGVGFDINCGVRLLRTNLDESDHQPSLKWKWTDMLF

SEQ ID NO: 12006 - DNA, 2032 bp, Homo sapiens
gctttggttcttggaaggcggtgctctgagaagccggactacgcggcagcggctcttcaaagcggagccgggagtttttgctacagttttcgccaccatgagtcgcagctataatgatgagctgcagttcttggagaagatcaataaaaactgctggaggatcaagaagggcttcgtgcccaacatgcaggttgaaggtgttttctatgtgaatgatgctctggagaaattgatgtttgaggaattaaggaatgcctgtcgaggtggtggtgttggtggcttcctgccagccatgaaacagattggcaatgtggcagccctgcctggaattgttcatcgatctattgggcttcctgatgtccattcaggatatgggtttgctattgggaacatggcagcctttgatatgaatgaccctgaagcagtagtatccccaggtggtgtcgggtttgacatcaactgtggtgtccgcttgctaagaaccaatttagatgaaagtgatgtccagcctgtgaaggagcaacttgcccaagctatgtttgaccacattcctgttggggtggggtcaaaaggtgtcatcccaatgaatgccaaagacttggaggaggccttggagatgggggtggactggtccttaagagaagggtatgcctgggctgaagacaaggagcactgcgaggagtacggaaggatgctgcaggctgaccccaataaagtttctgcaagggcgaagaaaagaggccttcctcagttggggaccctgggagcaggcaaccattatgcagaaatccaggttgtggatgagattttcaatgagtatgctgctaaaaaaatgggcatcgaccataagggacaggtgtgtgtgatgatccacagtggaagcagaggcttgggccaccaagtagccacagatgcgctggtagctatggagaaggccatgaagagagacaagattatagtcaatgatcggcagttggcttgtgctcgaatcgcttccccagagggtcaagactatctgaagggaatggcagctgctgggaactatgcctgggtcaaccgctcttccatgaccttcttaacccgtcaggctttcgccaaggtcttcaacacaacccctgatgacttggacctacatgtgatctatgatgtttctcacaacattgccaaagtggagcagcatgtggtggacggaaaggaacggacactgttagtacacaggaagggatccacccgcgctttccctcctcaccatcccctcattgctgttgattaccaactcactggacagccagtgctcattggtggcaccatgggaacctgtagttatgttcttactggcactgaacagggcatgactgagacctttggaacaacctgtcatggagcgggccgtgcattgtcccgagcaaaatctcgacgtaatttagatttccaggatgtcttagacaaattggcagatatgggaattgcgatccgtgttgcctcacccaaactggttatggaagaggctcctgagtcctataagaatgtgacagatgtggtaaatacctgccatgatgctggaatcagcaagaaagccattaaactgagaccaattgctgtgatcaaaggatagaaccttggacagcagggctgcctgacaccaccaaccctctctgaagtggaagtggactgacatgctcttctgacatcagactcaaggcgggacaagttgcaaagtgtgcagctgtaactgctcacgccaaaatggctgatggggaggctgctgctttcaggggcccgtgcttgtaaaataaccttccaggaagaggcacattgcccacctttggaaagggaggaatatgccttctccttggttgttccacagagttttaggaaaatctgttagggatgggtagatgtcaaactgccttacgcagtcatactgatctttagccatcagattgatcttcttcacaccaagctctgtttacattccgagaggtgtcatgaagaaagttctgttcaataaggttttggaatgtttcctttc

SEQ ID NO: 12007 - protein, 505 aa, Homo sapiens; identical to SEQ ID NO: 1999

SEQ ID NO: 12008 - DNA, 597 bp, Homo sapiens
gctttggttcttggaaggcggtgctctgagaagccggactacgcggcagcggctcttcaaagcggagccgggagtttttgctacagttttcgccaccatgagtcgcagctataatgatgagctgcagttcttggagaagatcaataaaaactgctggaggatcaagaagggcttcgtgcccaacatgcaggttgaaggtgttttctatgtgaatgatgctctggagaaattgatgtttgaggaattaaggaatgcctgtcgaggtggtggtgttggtggcttcctgccagccatgaaacagattggcaatgtggcagccctgcctggaattgttcatcgatctattgggcttcctgatgtccattcaggatatgggtttgctattgggaacatggcagcctttgatatgaatgaccctgaagcagtagtatccccaggtggtgtcgggtttgacatcaactgtggtgtccgcttgctaagaaccaatttagatgaaagtgatcaggcaaccattatgcagaaatccaggttgtggatgagattttcaatgagtatgctgctaaaaaaatgggcatcgaccataagggacaggtgtgt

SEQ ID NO: 12009 - protein, 165 aa, Homo sapiens
MSRSYNDELQFLEKINKNCWRIKKGFVPNMQVEGVFYVNDALEKLMFEELRNACRGGGVGGFLPAMKQIGNVAALPGIVHRSIGLPDVHSGYGFAIGNMAAFDMNDPEAVVSPGGVGFDINCGVRLLRTNLDESDQATIMQKSRLWMRFSMSMLLKKWASTIRDR

SEQ ID NO: 12010 - DNA, 2031 bp, Homo sapiens
gctttggttcttggaaggcggtgctctgagaagccggactacgcggcagcggctcttcaaagcggagccgggagtttttgctacagttttcgccaccatgagtcgcagctataatgatgagctgcagttcttggagaagatcaataaaaactgctggaggatcaagaagggcttcgtgcccaacatgcaggttgaaggtgttttctatgtgaatgatgctctggagaaattgatgtttgaggaattaaggaatgcctgtcgaggtggtggtgttggtggcttcctgccagccatgaaacagattggcaatgtggcagccctgcctggaattgttcatcgatctattgggcttcctgatgtccattcaggatatgggtttgctattgggaacatggcacctgtgaaggagcaacttgcccaagctatgtttgaccacattcctgttggggtggggtcaaaaggtgtcatcccaatgaatgccaagtaagagcacacgtttccagtacatggtatgggagggataataaccacatgaccttcagcttcctttccagtgcagtacacttgagagatgaggattgttcagttacttttcaggaagtagtaagaactgtttttttaagcatgaggtacagcccatttattggagacattagtcaaccgatgttataacagcctttgacatagagtagtatttataataacatcatatccaccaacgtttattgagcactttctatgtgtaaggtgctgagcatcatatcatttcatccagacaataaccctattatcttccctaacttacaagaaagaaaactgaggtttagagaggtaataagcttagtgccaggtgtggttgggtttacagaatcccaacactttgggaggccaaggcaggaggatcacttgagtccaggagtaaaagatgaacctaggcaacatagatctcgtctctaaaaaaaaaaaattaactaggcatgatggcttgtgactgtagtcccacctactcaggaggctgaagcagaaggatcccttgagagaccaggagttcaaggcggcagtgtgctgagatctcagtactgcaccccagcgtgggcaacagagtgaccctgtctcaattaaaaaaaaaaaaaaaaaaacttagtaggtgatatcaggattcaaaccaaagatcctttgacttcagaagctgtattctgaatcctactgccttttgtcattaagcctatttaaccccaaccttcctctttgaatgatagcactggatgtgttctttggtaagtagaggattaaatataatgctatagtgtatctctcagatggccatagattttaccgtgtcatagcttatgcaaagcagtgcaccctaaactttgcagagtacttcagtagcagaatagtgtgctagctatgtttctttaatattttgctttatccttcaaatttatgtgaactttgcattataattaatagaaaaaaatgtttttagctgttacttgtaatgttatttaactccccctaaccaaaaaaaatacctaagtaaaatcaatatacttggatgatgcgtggtctgtgatttcacatgatccctgacatgcagccccaatttgaaaagcatacgtggaacacacaaattccaaacatctttataaacattttagataggaattttgtctactaatactgaaatgggtctactctgggcacactgcctatggggtgaccctgctctgcaaggagcagtaaaaaataataacaaaatgaaataatgatagtgaaatgggctgtcatctggggtagtggggagagaacattgaaaagtgtagtttttcctggcagtgttttagaagagagctggaccttggatgaagattaaagcttgtaccctctaagggtttaatgtacgtgtacctcagcttcaaaatggaggtgccgtaagccactcagaacttctgtgaagatgggaaaacagcttaaaatttaacctgtgttgcctgaggaattctagataccttcatttatttgaccgta

SEQ ID NO: 12011 - protein, 129 aa, Homo sapiens
MSRSYNDELQFLEKINKNCWRIKKGFVPNMQVEGVFYVNDALEKLMFEELRNACRGGGVGGFLPAMKQIGNVAALPGIVHRSIGLPDVHSGYGFAIGNMAPVKEQLAQAMFDHIPVGVGSKGVIPMNAK

SEQ ID NO: 12012 - DNA, 2142 bp, Homo sapiens
gctttggttcttggaaggcggtgctctgagaagccggactacgcggcagcggctcttcaaagcggagccgggagtttttgctacagttttcgccaccatgagtcgcagctataatgatgagctgcagttcttggagaagatcaataaaaactgctggaggatcaagaagggcttcgtgcccaacatgcaggttgaaggtgttttctatgtgaatgatgctctggagaaattgatgtttgaggaattaaggaatgcctgtcgaggtggtggtgttggtggcttcctgccagccatgaaacagattggcaatgtggcagccctgcctggaattgttcatcgatctattgggcttcctgatgtccattcaggatatgggtttgctattgggaacatggcagcctttgatatgaatgaccctgaagcagtagtatccccaggtggtgtcgggtttgacatcaactgtggtgtccgcttgctaagaaccaatttagatgaaagtgatgtccagcctgtgaaggagcaacttgcccaagctatgtttgaccacattcctgttggggtggggtcaaaaggtgtcatcccaatgaatgccaagtaagagcacacgtttccagtacatggtatgggagggataataaccacatgaccttcagcttcctttccagtgcagtacacttgagagatgaggattgttcagttacttttcaggaagtagtaagaactgtttttttaagcatgaggtacagcccatttattggagacattagtcaaccgatgttataacagcctttgacatagagtagtatttataataacatcatatccaccaacgtttattgagcactttctatgtgtaaggtgctgagcatcatatcatttcatccagacaataaccctattatcttccctaacttacaagaaagaaaactgaggtttagagaggtaataagcttagtgccaggtgtggttgggtttacagaatcccaacactttgggaggccaaggcaggaggatcacttgagtccaggagtaaaagatgaacctaggcaacatagatctcgtctctaaaaaaaaaaaattaactaggcatgatggcttgtgactgtagtcccacctactcaggaggctgaagcagaaggatcccttgagagaccaggagttcaaggcggcagtgtgctgagatctcagtactgcaccccagcgtgggcaacagagtgaccctgtctcaattaaaaaaaaaaaaaaaaaaacttagtaggtgatatcaggattcaaaccaaagatcctttgacttcagaagctgtattctgaatcctactgccttttgtcattaagcctatttaaccccaaccttcctctttgaatgatagcactggatgtgttctttggtaagtagaggattaaatataatgctatagtgtatctctcagatggccatagattttaccgtgtcatagcttatgcaaagcagtgcaccctaaactttgcagagtacttcagtagcagaatagtgtgctagctatgtttctttaatattttgctttatccttcaaatttatgtgaactttgcattataattaatagaaaaaaatgtttttagctgttacttgtaatgttatttaactccccctaaccaaaaaaaatacctaagtaaaatcaatatacttggatgatgcgtggtctgtgatttcacatgatccctgacatgcagccccaatttgaaaagcatacgtggaacacacaaattccaaacatctttataaacattttagataggaattttgtctactaatactgaaatgggtctactctgggcacactgcctatggggtgaccctgctctgcaaggagcagtaaaaaataataacaaaatgaaataatgatagtgaaatgggctgtcatctggggtagtggggagagaacattgaaaagtgtagtttttcctggcagtgttttagaagagagctggaccttggatgaagattaaagcttgtaccctctaagggtttaatgtacgtgtacctcagcttcaaaatggaggtgccgtaagccactcagaacttctgtgaagatgggaaaacagcttaaaatttaacctgtgttgcctgaggaattctagataccttcatttatttgaccgta

SEQ ID NO: 12013 - protein, 166 aa, Homo sapiens
MSRSYNDELQFLEKINKNCWRIKKGFVPNMQVEGVFYVNDALEKLMFEELRNACRGGGVGGFLPAMKQIGNVAALPGIVHRSIGLPDVHSGYGFAIGNMAAFDMNDPEAVVSPGGVGFDINCGVRLLRTNLDESDVQPVKEQLAQAMFDHIPVGVGSKGVIPMNAK

SEQ ID NO: 12014 - DNA, 628 bp, Homo sapiens
ggttcttggaaggcggtgctctgagaagccggactacgcggcagcggctcttcaaagcggagccgggagtttttgctacagttttcgccaccatgagtcgcagctataatgatgagctgcagttcttggagaagatcaataaaaactgctggaggatcaagaagggcttcgtgcccaacatgcaggttgaaggtgttttctatgtgaatgatgctctggagaaattgatgtttgaggaattaaggaatgcctgtcgaggtggtggtgttggtggcttcctgccagccatgaaacagattggcaatgtggcagccctgcctggaattgttcatgtgagtcagagttcagaactttaatcatttatatttcttaaagtccattgaatggatgaatggccatgcctgatagtggtgtcatttagacaatgacctttggacagccagacataaccatgaagccaggctcagtggctcatgccacccgcaacactttgagagaccaagatggaaggattgcatgagcccaggaattcaagactagtctgggcaacatggcaagaccctgtctataccaaaaaaattagtcaggtgtgatgtcacatgcttgttgtcccagctacttagaatgc

SEQ ID NO: 12015 - protein, 87 aa, Homo sapiens
MSRSYNDELQFLEKINKNCWRIKKGFVPNMQVEGVFYVNDALEKLMFEELRNACRGGGVGGFLPAMKQIGNVAALPGIVHVSQSSEL

SEQ ID NO: 12016 - DNA, 1980 bp, Homo sapiens
atgtgtacaaagacaatcccagtcctctggggatgtttcctcctgtggaatctctatgtctcatcctctcagaccatttaccctggaatcaaggcaaggattactcagagggcacttgactatggtgttcaagctggaatgaagatgattgagcaaatgctaaaagaaaagaaactcccagatttaagcggttctgagtctcttgaatttctaaaagttgattatgtaaactacaatttttcaaatataaaaatcagtgccttttcatttccaaatacctcattggcttttgtgcctggagtgggaatcaaagcgctaaccaaccatggcactgccaacatcagcacagactgggggttcgagtctccacttttccaagacacaggaggggctgatctgtttctctccggagtctactttaccggtatcattatcctaacccgaaatgactttggtcatcctaccctgaagctccaagattgctacgcccaactgagccatgcccacgtctcattttccggagaactcagtgttctgtataactcctttgctgagcccatggagaaacccattttaaagaacttaaatgaaatgctctgtcccattattgcaagtgaagtcaaagcgctaaatgccaacctcagcacactggaggttttaaccaagattgacaactacactctgctggattactccctaatcagttctccagaaattactgagaactaccttgacctgaacttgaagggtgtattctacccactggaaaacctcaccgacccccccttctcaccagttccttttgtgctcccagaacgcagcaactccatgctctacattggaatcgccgagtatttctttaaatctgcgtcctttgctcatttcacagctggggttttcaatgtcactctctccaccgaagagatttccaaccattttgttcaaaactctcaaggccttggcaacgtgctctcccggattgcagagatctacatcttgtcccagcccttcatggtgaggatcatggccacagagcctcccataatcaatctacaaccaggcaatttcaccctggacatccctgcctccatcatgatgctcacccaacccaagaactccacagttgaaaccatcgtttccatggacttcgttgctagtaccagtgttggcctggttattttgggacaaagactggtctgctccttgtctctgaacagattccgccttgctttgccagagtccaatcgcagcaacattgaggtcttgaggtttgaaaatattctatcgtccattcttcactttggagtcctcccactggccaatgcaaaattgcagcaaggatttcctctgtccaatccacacaaattcttattcgtcaattcagatattgaagttcttgagggtttccttttgatttccaccgacctgaagtatgaaacatcctcaaagcagcagccaagtttccacgtatgggaaggtctgaacctgataagcagacagtggagggggaagtcagccccttgattgccggtttgcaattcaccccaggaagtaaatggtccttaatcctacaactactgtaaacccagaagggaaagacagtacacactggaattgtaaagcccttgtgaattgcttaggcagaaagttttctttcttaagccttcaggaacccagaataaggcagactctgttaaagggataaatagaggtgtctgaatgtgagtgtatgcatgctgcgtgtgtctgtgtttatgtttgtttgtttgtttggggcaagaaagattctaggacaagagctaggcatgtacttctgaccaggtgggtaagcaactctaagtctgtatttgtattggtcattctcagtggaaatcccttaggccctctagtggttttcccctacctgcatattggttttcatgttttatattcactgttactatcttctgtgtttaattaaaattgttttctatcaacttc

SEQ ID NO: 12017 - protein, 507 aa, Homo sapiens; identical to SEQ ID NO: 2001

SEQ ID NO: 12018 - DNA, 371 bp, Homo sapiens
agcacaaccagttccagtgttttctctttcttttatcaatgctgaatattgaaaaagggcatgctgcctgtttcaacttagcgtgactccatgcttatgggtttcctcttccaggcaagggtataaagctcagacccagctaaggcatcagagcaccagaagtctgcccagcggagaatttccaggagactgctgggcaacagacaacaagccagaggtcctaatttcagggttcatgttcatgaggtcaaagaactctgtggactgtaggaagccaagagaatgaattcacacatttccgggatgatgtaaatttatcggcttaaaacagttttttctattactcccataaataaacataacagccattg

SEQ ID NO: 12019 - protein, 47 aa, Homo sapiens [sequence omitted]

SEQ ID NO: 12020 - DNA, 2454 bp, Homo sapiens
gctcccgggacccggagcggatcgactggcgggcgccgcgccgaggcaccaccgggcgccgagttcctggcggctcgcacgcaggtaaataaaggcagctaaagctgactgctggttgcgcaaaatccccctggctcttctggctaaagtcctaccactccctgtacctggcagcagcctgtcttctgggcctcacctacacacgtctgggtaggagccagtcatctccatccatccacagccatgaatttcctccggcgacgtctctctgacagcagcttcatggccaacctgcctaatggctatatgacggacctgcaacgcccagatagctccaccagctcacctgcttcccccgccatggagaggaggcacccccagcccctggctgcctccttctcctctccaggatccagcctttttagctccctctccagtgccatgaagcaggcccctcaggccacctcaggactgatggagcctccaggtccctccacgcccattgttcaaagacccaggatcctgttggtgatcgatgatgcccatacagactggtcgaagtatttccatgggaagaaggtgaatggagagattgagatccgagtggagcaggctgaattctcagagttgaacctagctgcctatgtgaccgggggctgcatggtggacatgcaggtcgtgagaaatgggaccaaagtggtgagcagatccttcaagccagacttcatcctggtccgccagcatgcctacagcatggccctgggggaagactaccgcagcctggtcatcggcctgcagtatggagggctgcctgctgtcaactctctctactccgtctacaacttctgcagcaagccctgggtgttctctcagctcattaagatcttccattccctgggtcctgagaagttcccgcttgtggagcaaacatttttccccaaccataagccaatggtcacagccccacacttcccggtggtagtcaagctgggacatgcccacgctggaatgggaaagatcaaagtggaaaaccagcttgacttccaggacatcaccagcgtggtcgccatggccaaaacctacgccaccaccgaggccttcatcgactccaagtacgacatccgcatccagaaaattggatccaactacaaggcttacatgagaacctccatctctgggaactggaaggccaacacaggctctgccatgctggagcaggtggccatgacagagaggtacaggctgtgggtggacagctgctcggaaatgtttggcggcctggacatctgtgccgtcaaggctgtccacagcaaggatggcagagattacatcatcgaggtaatggacagctcaatgccgctgattggagagcatgtggaagaggacagacagctgatggccgaccttgttgtctccaaaatgagccagctcccgatgccaggaggcacagcgccctcccccctcagaccttgggctccacagattaaatcagcgaaatccccagggcaagcccagctggggcctcagctaggccagccccagccacgcccacctccgcaaggaggccctcgccaagctcagtctcctcagccccagagatctggaagcccctcccaacagaggctctccccacaaggccagcagcccctgagcccccagtccggatctccacagcagcaaaggtcaccaggctctccgcagctatcccgggcatccagtggcagctccccaaaccaggcctccaagccaggtgccaccctcgcctcacagccccggccccctgtgcagggccgtagtacctcccagcagggtgaagagtccaagaagccagcaccaccccatccgcatctcaacaaatctcagtccctgactaacagcctcagcacatccgacacctcccagcgtgggaccccaagtgaagacgaggccaaggctgaaaccatccgcaacctgaggaagtcttttgccagcctgttctctgactaacgccatccaggctgggaggggaagagtgctctgctacactcgtccccctcctgcctcatcttccttctcagccttggttcctgatgggaacagaatggagggcctgagaacatactttctaaatgcctttgacccaggaaccgattatctatatttgttcccattttccttcaccgtgacattccagcattgtctgactgtgaggtgggcctttgagagcctccaggttcctcaaaacaggcctgagcgatgggcatcacaccctctgcctacccacgtgcctgcttacctgccagataaccaagtgagatgtctgcgagtggctagttttcacattcttactagtgtttggctcacctttgggcaaaggccccctctaggccttgccccacctccatcaaacgcagacactgtagtcagacctcagcaatataggaggcaataatcttttaacagtgttttgcaaac

SEQ ID NO: 12021 - protein, 580 aa, Homo sapiens
MNFLRRRLSDSSFMANLPNGYMTDLQRPDSSTSSPASPAMERRHPQPLAASFSSPGSSLFSSLSSAMKQAPQATSGLMEPPGPSTPIVQRPRILLVIDDAHTDWSKYFHGKKVNGEIEIRVEQAEFSELNLAAYVTGGCMVDMQVVRNGTKVVSRSFKPDFILVRQHAYSMALGEDYRSLVIGLQYGGLPAVNSLYSVYNFCSKPWVFSQLIKIFHSLGPEKFPLVEQTFFPNHKPMVTAPHFPVVVKLGHAHAGMGKIKVENQLDFQDITSVVAMAKTYATTEAFIDSKYDIRIQKIGSNYKAYMRTSISGNWKANTGSAMLEQVAMTERYRLWVDSCSEMFGGLDICAVKAVHSKDGRDYIIEVMDSSMPLIGEHVEEDRQLMADLVVSKMSQLPMPGGTAPSPLRPWAPQIKSAKSPGQAQLGPQLGQPQPRPPPQGGPRQAQSPQPQRSGSPSQQRLSPQGQQPLSPQSGSPQQQRSPGSPQLSRASSGSSPNQASKPGATLASQPRPPVQGRSTSQQGEESKKPAPPHPHLNKSQSLTNSLSTSDTSQRGTPSEDEAKAETIRNLRKSFASLFSD

SEQ ID NO: 12022 - DNA, 4954 bp, Homo sapiens
agtctgctcctgccccgccgccgcgccggagcccgggcgcccgaagctgggggcgcggccgcgctcgtctcgccgggctgttcgcgggcaggccctgccctgaagggacgaatcggcttggagcgcgggaggtggagtcggccccggcggtcgctccctggacccaacccgaggctgacccaggcccctgcccatgcggggcgcccctggctcggaagagtcccccgggccgggagcagctccaggcagcggccccggaggaagaggaagaagggacagtgctcagcttgggggacccggaccctcgccgcggcatttggagccgggggcagtcccgaactctgtgcttggcaccgccgctccgagtagggcagcgcctgccgggaccctgacccggaccccctgcgcctcgtaggcggcggcgccgccgcgccaccctgttcttccgtgtctccctctgcctggcggcagtcacggccaagaacctacattaagaaacgcattcagatgcatcagccgtttgtaaagcacctgtcgtgagccagagagtattatgagggaggccgaggacttcatgctccggacagagaaacggcgctgggattagggattgccacttctgagaggatgctgggaatctgcagggggagacggaaattcttggctgcctcgttgagtcttctctgcatcccagccatcacctggatttacctgttttctgggagcttcgaagatggaaagcccgtgtctctgtcaccgctggagtcccaggcacacagccccaggtacacggcctccagccagcgggagcgcgagagcctggaggtgcgcatgcgcgaggtggaggaggagaaccgcgccctccgcaggcagctcagcctggcccagggccgagccccatcccatcgccgaggcaaccactccaagacctactccatggaggagggcactggagacagcgagaaccttcgggctggcatcgtggcaggcaacagctccgagtgtgggcagcagccggtcgtggagaaatgcgagacaatccacgttgctattgtctgcgccggatacaatgccagccgggatgtcgtcaccctggtcaaatccgtcctgttccatagacggaaccctctgcacttccaccttattgctgactccattgcggagcagatcctggccacgctcttccagacctggatggtgcccgctgtgcgtgtggacttctacaatgcagacgagctcaagtctgaagtttcctggatccccaataaacattactctgggatttatggtctgatgaagcttgtcctgaccaagactcttcctgccaacctggagagagtcatcgtccttgacacggatatcacctttgccactgacattgcagagctgtgggctgtgttccacaagttcaaaggtcagcaagtcctgggcttggtggagaaccagagtgactggtaccttggaaacctgtggaaaaatcaccgcccatggccagcccttggaagaggctacaacacaggggtgatcctgttacttctggataagctgcggaagatgaaatgggagcagatgtggaggctgaccgcagagagggagctcatgggcatgctctctacatccttagctgaccaggatattttcaatgccgtcatcaaacaaaaccccttccttgtgtaccagctcccctgcttctggaatgtgcagctgtcagaccacacccgctccgagcagtgctacagagacgtgtctgatctaaaggtcattcactggaactcccccaagaagctccgggtgaagaacaagcatgtggagttttttcgcaacctctacctgaccttcctggagtatgacggcaatcttctgaggcgggaactgtttggctgccccagtgaggctgatgtcaacagtgaaaacctccagaagcagctgtctgagctggacgaggacgacctgtgctatgagttccggcgagagcgcttcactgtccaccgcacccacctgtacttcctgcactacgagtatgagcctgcagcagacagcacggacgtcaccctggtcgctcagctgtccatggacaggctccagatgctggaggccatctgcaagcactgggaggggcccatcagcctggccctctacctgtcagacgccgaggcccagcagttcctccgctacgcacagggctctgaggtgcttatgagccgccacaacgtgggctaccacatcgtgtacaaggagggccagttctaccccgtgaacctgctgcgcaacgtggccatgaagcacatcagcactccctacatgttcctgtctgacattgacttcctgcccatgtatgggctctatgagtacctcaggaagtctgtcatccagctcgatcttgccaacaccaagaaagcaatgattgtccccgcgttcgagacactgcgctaccggctgtccttccccaagtcaaaagcggagttgctgtcaatgctggacatggggaccctcttcacattcaggtaccacgtctggacgaaaggccacgcacccacaaacttcgccaagtggcggaccgccaccacgccttaccgggttgagtgggaggccgattttgagccgtatgttgttgtgagacgtgactgcccggagtacgaccggaggtttgtaggctttggctggaacaaagtggctcatatcatggagctggatgtgcaggagtatgagttcattgtgctgcccaacgcctacatgatccacatgcctcatgcccccagcttcgacattaccaagttccgttccaacaagcaataccgcatctgtctcaaaaccctcaaggaagagtttcagcaggacatgtcccgccgctacggctttgctgccctgaaatatctcacagccgagaacaacagctagcaccaagaagcccaccactagggggagacatgctgtaggggaagtgccactcgctgtttggggcccggccttcaaattcaaaattgagccatgctttttcggtttgtttttatttatctctttggcccagccaagctgccctcactacagagaccttggacaaggatccagccagtccctctctgccccacaaccctgcattcccagaggttagctatgcagcccacctagatgagtctcttcaagaatgggaaatcaaggggtgacagggagtaaaagggttatcatcttactgcaaagccacaagatcagggcagggctttaggatgttctggatgctttttaataattatgcttcccatcataactggggagaaagggaagtcagggttctaggggttattcgtcccaggaaatagaagtgaaattgtctttattaagtgaaaactttcccctttgccctgcaatgtagctgggcattcaaacggagggcaaaccgatgatctaaaccaaccacttggaaaaacccaatggggacattgtaaccagagggtcctggaggtggggttgatgggtttccttatccccaaagtcactcctgttttgttttgtttttctttgggggttttgtttatttttggggctggcaatccaaaatagaaaatctgatcctttgaggctctaaaggaaaatcagctgcctctaccaaccaccctctatcagcagtggcccaggaaggaggtcaagcatcttcggccgatatttaaacatgggcagcttccttcaggatgatcaccgaggctcccgtgactttgaactccctactctccagaatccaggggctatagcgatggggactgcggaattacgagggctggctgttttacaccggtcacattttctattggcagtgactgattcatgggaaagggctttgaaggaactacttcagtgcacacacaaggtacgaacctctcaggcctttcgaagaactttcataattcatgaaagcccagttctgaagattcacgtatccatctggagacctacaggaagaaagtgattgggttcctctggttcttgcctgcttcactgtggatgggaagaggtgacaacctcagtctccctttgggacctgtccaagggtaggcaaccaccttcaccttcacacagattgaggagacactggactttttacccattttctttaatcttcaatattaatattgtgtttacattgatgagaacaagagttaatgccctaccctctgctgggctgtttgtattgagttgcaatgtgaccagcgaaagctgcatttaataaatgaaagtacagactgtttcttccccattcccctcccactcttgcaggaagctactgagacacaccttgacatagagagctaaattgcagtggataaacagcaacttcacactttctgttcccccattctatttttctcatcatttgaactttagccttttttttccccttttgcctgaagttagatcccactctgtctctaactcaaaccatcttcaagttttccattccgcatctttctcaacactggagccagatgttgtcttctaccagatgtgggctaggagggtaaatcctggtaatcaattgtaaagggaacatcccatccttgggcctggtagtcatgtgggaccctatagcaatccggtttgtgagatcactcacgatgttacatgctcaagtggatgttacacggaaatttatacaagaattaggaaaattaccattaggactaatttttgcatagatctagctaggcttatgtatgtatgtaaatatatatgtagacagagcatacaagtatatagcctatatacaaagcatttataaataaaaagtgacatatatgtataaagcagaacaaaaattttgaaagtacatgtcaaagtccaatttgttcagtggtgtgccaggccagcttctacatgctcacaaggcctttttgggcatatttccagtttccacgttcagtgattcctctgtccccatccccaagagctagttgttaaatat

SEQ ID NO: 12023 - protein, 756 aa, Homo sapiens; identical to SEQ ID NO: 2007

SEQ ID NO: 12024 - DNA, 4307 bp, Homo sapiens
agtctgctcctgccccgccgccgcgccggagcccgggcgcccgaagctgggggcgcggccgcgctcgtctcgccgggctgttcgcgggcaggccctgccctgaagggacgaatcggcttggagcgcgggaggtggagtcggccccggcggtcgctccctggacccaacccgaggctgacccaggcccctgcccatgcggggcgcccctggctcggaagagtcccccgggccgggagcagctccaggcagcggccccggaggaagaggaagaagggacagtgctcagcttgggggacccggaccctcgccgcggcatttggagccgggggcagtcccgaactctgtgcttggcaccgccgctccgagtagggcagcgcctgccgggaccctgacccggaccccctgcgcctcgtaggcggcggcgccgccgcgccaccctgttcttccgtgtctccctctgcctggcggcagtcacggccaagagagtattatgagggaggccgaggacttcatgctccggacagagaaacggcgctgggattagggattgccacttctgagaggatgctgggaatctgcagggggagacggaaattcttggctgcctcgttgagtcttctctgcatcccagccatcacctggatttacctgttttctgggagcttcgaagatggaaagcccgtgtctctgtcaccgctggagtcccaggcacacagccccaggtacacggcctccagccagcgggagcgcgagagcctggaggtgcgcatgcgcgaggtggaggaggagaaccgcgccctccgcaggcagctcagcctggcccagggccgagccccatcccatcgccgaggcaaccactccaagacctactccatggaggagggcactggagacagcgagaaccttcgggctggcatcgtggcaggcaacagctccgagtgtgggcagcagccggtcgtggagaaatgcgagacaatccacgttgctattgtctgcgccggatacaatgccagccgggatgtcgtcaccctggtcaaatccgtcctgttccatagacggaaccctctgcacttccaccttattgctgactccattgcggagcagatcctggccacgctcttccagacctggatggtgcccgctgtgcgtgtggacttctacaatgcagacgagctcaagtctgaagtttcctggatccccaataaacattactctgggatttatggtctgatgaagcttgtcctgaccaagactcttcctgccaacctggagagagtcatcgtccttgacacggatatcacctttgccactgacattgcagagctgtgggctgtgttccacaagttcaaaggtcagcaagtcctgggcttggtggagaaccagagtgactggtaccttggaaacctgtggaaaaatcaccgcccatggccagcccttggaagaggctacaacacaggggtgatcctgttacttctggataagctgcggaagatgaaatgggagcagatgtggaggctgaccgcagagagggagctcatgggcatgctctctacatccttagctgaccaggatattttcaatgccgtcatcaaacaaaaccccttccttgtgtaccagctcccctgcttctggaatgtgcagctgtcagaccacacccgctccgagcagtgctacagagacgtgtctgatctaaaggtcattcactggaactcccccaagaagctccgggtgaagaacaagcatgtggagttttttcgcaacctctacctgaccttcctggagtatgacggcaatcttctgaggcgggaactgtttggctgccccagtgaggctgatgtcaacagtgaaaacctccagaagcagctgtctgagctggacgaggacgacctgtgctatgagttccggcgagagcgcttcactgtccaccgcacccacctgtacttcctgcactacgagtatgagcctgcagcagacagcacggacgtcaccctggtcgctcagctgtccatggacaggctccagatgctggaggccatctgcaagcactgggaggggcccatcagcctggccctctacctgtcagacgccgaggcccagcagttcctccgctacgcacagggctctgaggtgcttatgagccgccacaacgtgggctaccacatcgtgtacaaggagggccagttctaccccgtgaacctgctgcgcaacgtggccatgaagcacatcagcactccctacatgttcctgtctgacattgacttcctgcccatgtatgggctctatgagtacctcaggaagtctgtcatccagctcgatcttgccaacaccaagaaagcaatgattgtccccgcgttcgagacactgcgctaccggctgtccttccccaagtcaaaagcggagttgctgtcaatgctggacatggggaccctcttcacattcaggtaccacgtctggacgaaaggccacgcacccacaaacttcgccaagtggcggaccgccaccacgccttaccgggttgagtgggaggccgattttgagccgtatgttgttgtgagacgtgactgcccggagtacgaccggaggtttgtaggctttggctggaacaaagtggctcatatcatggagctggatgtgcaggagtatgagttcattgtgctgcccaacgcctacatgatccacatgcctcatgcccccagcttcgacattaccaagttccgttccaacaagcaataccgcatctgtctcaaaaccctcaaggaagagtttcagcaggacatgtcccgccgctacggctttgctgccctgaaatatctcacagccgagaacaacagctagcaccaagaagcccaccactagggggagacatgctgtaggggaagtgccactcgctgtttggggcccggccttcaaattcaaaattgagccatgctttttcggtttgtttttatttatctctttggcccagccaagctgccctcactacagagaccttggacaaggatccagccagtccctctctgccccacaaccctgcattcccagaggttagctatgcagcccacctagatgagtctcttcaagaatgggaaatcaaggggtgacagggagtaaaagggttatcatcttactgcaaagccacaagatcagggcagggctttaggatgttctggatgctttttaataattatgcttcccatcataactggggagaaagggaagtcagggttctaggggttattcgtcccaggaaatagaagtgaaattgtctttattaagtgaaaactttcccctttgccctgcaatgtagctgggcattcaaacggagggcaaaccgatgatctaaaccaaccacttggaaaaacccaatggggacattgtaaccagagggtcctggaggtggggttgatgggtttccttatccccaaagtcactcctgttttgttttgtttttctttgggggttttgtttatttttggggctggcaatccaaaatagaaaatctgatcctttgaggctctaaaggaaaatcagctgcctctaccaaccaccctctatcagcagtggcccaggaaggaggtcaagcatcttcggccgatatttaaacatgggcagcttccttcaggatgatcaccgaggctcccgtgactttgaactccctactctccagaatccaggggctatagcgatggggactgcggaattacgagggctggctgttttacaccggtcacattttctattggcagtgactgattcatgggaaagggctttgaaggaactacttcagtgcacacacaaggtacgaacctctcaggcctttcgaagaactttcataattcatgaaagcccagttctgaagattcacgtatccatctggagacctacaggaagaaagtgattgggttcctctggttcttgcctgcttcactgtggatgggaagaggtgacaacctcagtctccctttgggacctgtccaagggtaggcaaccaccttcaccttcacacagattgaggagacactggactttttacccattttctttaatcttcaatattaatattgtgtttacattgatgagaacaagagttaatgccctaccctctgctgggctgtttgtattgagttgcaatgtgaccagcgaaagctgcatttaataaatgaaagtacagactgtttcttccccattcccctcccactcttgcaggaagctactgagacacaccttgacatagagagctaaattgcagtggataaacagcaacttcacactttctgttcccccattctatttttctcatcatttga

SEQ ID NO: 12025 - protein, 756 aa, Homo sapiens; identical to SEQ ID NO: 2007

SEQ ID NO: 12026 - DNA, 4151 bp, Homo sapiens
agtctgctcctgccccgccgccgcgccggagcccgggcgcccgaagctgggggcgcggccgcgctcgtctcgccgggctgttcgcgggcaggccctgccctgaagggacgaatcggcttggagcgcgggaggtggagtcggccccggcggtcgctccctggacccaacccgaggctgacccaggcccctgcccatgcggggcgcccctggctcggaagagtcccccgggccgggagcagctccaggcagcggccccggaggaagaggaagaagggacagtgctcagcttgggggacccggaccctcgccgcggcatttggagccgggggcagtcccgaactctgtgcttggcaccgccgctccgagtagggcagcgcctgccgggaccctgacccggaccccctgcgcctcgtaggcggcggcgccgccgcgccaccctgttcttccgtgtctccctctgcctggcggcagtcacggccaagagagtattatgagggaggccgaggacttcatgctccggacagagaaacggcgctgggattagggattgccacttctgagaggatgctgggaatctgcagggggagacggaaattcttggctgcctcgttgagtcttctctgcatcccagccatcacctggatttacctgttttctgggagcttcgaagatggaaagcccgtgtctctgtcaccgctggagtcccaggcacacagccccaggtacacggcctccagccagcgggagcgcgagagcctggaggtgcgcatgcgcgaggtggaggaggagaaccgcgccctccgcaggcagctcagcctggcccagggccgagccccatcccatcgccgaggcaaccactccaagacctactccatggaggagggcactggagacagcgagaaccttcgggctggcatcgtggcaggcaacagctccgagtgtgggcagcagccggtcgtggagaaatgcgagacaatccacgttgctattgtctgcgccggatacaatgccagccgggatgtcgtcaccctggtcaaatccgtcctgttccatagacggaaccctctgcacttccaccttattgctgactccattgcggagcagatcctggccacgctcttccagacctggatggtgcccgctgtgcgtgtggacttctacaatgcagacgagctcaagtctgaagtttcctggatccccaataaacattactctgggatttatggtctgatgaagcttgtcctgaccaagactcttcctgccaacctggagagagtcatcgtccttgacacggatatcacctttgccactgacattgcagagctgtgggctgtgttccacaagttcaaaggtcagcaagtcctgggcttggtggagaaccagagtgactggtaccttggaaacctgtggaaaaatcaccgcccatggccagcccttggaagaggctacaacacaggggtgatcctgttacttctggataagctgcggaagatgaaatgggagcagatgtggaggctgaccgcagagagggagctcatgggcatgctctctacatccttagctgaccaggatattttcaatgccgtcatcaaacaaaaccccttccttgtgtaccagctcccctgcttctggaatgtgcagctgtcagaccacacccgctccgagcagtgctacagagacgtgtctgatctaaagctccagaagcagctgtctgagctggacgaggacgacctgtgctatgagttccggcgagagcgcttcactgtccaccgcacccacctgtacttcctgcactacgagtatgagcctgcagcagacagcacggacgtcaccctggtcgctcagctgtccatggacaggctccagatgctggaggccatctgcaagcactgggaggggcccatcagcctggccctctacctgtcagacgccgaggcccagcagttcctccgctacgcacagggctctgaggtgcttatgagccgccacaacgtgggctaccacatcgtgtacaaggagggccagttctaccccgtgaacctgctgcgcaacgtggccatgaagcacatcagcactccctacatgttcctgtctgacattgacttcctgcccatgtatgggctctatgagtacctcaggaagtctgtcatccagctcgatcttgccaacaccaagaaagcaatgattgtccccgcgttcgagacactgcgctaccggctgtccttccccaagtcaaaagcggagttgctgtcaatgctggacatggggaccctcttcacattcaggtaccacgtctggacgaaaggccacgcacccacaaacttcgccaagtggcggaccgccaccacgccttaccgggttgagtgggaggccgattttgagccgtatgttgttgtgagacgtgactgcccggagtacgaccggaggtttgtaggctttggctggaacaaagtggctcatatcatggagctggatgtgcaggagtatgagttcattgtgctgcccaacgcctacatgatccacatgcctcatgcccccagcttcgacattaccaagttccgttccaacaagcaataccgcatctgtctcaaaaccctcaaggaagagtttcagcaggacatgtcccgccgctacggctttgctgccctgaaatatctcacagccgagaacaacagctagcaccaagaagcccaccactagggggagacatgctgtaggggaagtgccactcgctgtttggggcccggccttcaaattcaaaattgagccatgctttttcggtttgtttttatttatctctttggcccagccaagctgccctcactacagagaccttggacaaggatccagccagtccctctctgccccacaaccctgcattcccagaggttagctatgcagcccacctagatgagtctcttcaagaatgggaaatcaaggggtgacagggagtaaaagggttatcatcttactgcaaagccacaagatcagggcagggctttaggatgttctggatgctttttaataattatgcttcccatcataactggggagaaagggaagtcagggttctaggggttattcgtcccaggaaatagaagtgaaattgtctttattaagtgaaaactttcccctttgccctgcaatgtagctgggcattcaaacggagggcaaaccgatgatctaaaccaaccacttggaaaaacccaatggggacattgtaaccagagggtcctggaggtggggttgatgggtttccttatccccaaagtcactcctgttttgttttgtttttctttgggggttttgtttatttttggggctggcaatccaaaatagaaaatctgatcctttgaggctctaaaggaaaatcagctgcctctaccaaccaccctctatcagcagtggcccaggaaggaggtcaagcatcttcggccgatatttaaacatgggcagcttccttcaggatgatcaccgaggctcccgtgactttgaactccctactctccagaatccaggggctatagcgatggggactgcggaattacgagggctggctgttttacaccggtcacattttctattggcagtgactgattcatgggaaagggctttgaaggaactacttcagtgcacacacaaggtacgaacctctcaggcctttcgaagaactttcataattcatgaaagcccagttctgaagattcacgtatccatctggagacctacaggaagaaagtgattgggttcctctggttcttgcctgcttcactgtggatgggaagaggtgacaacctcagtctccctttgggacctgtccaagggtaggcaaccaccttcaccttcacacagattgaggagacactggactttttacccattttctttaatcttcaatattaatattgtgtttacattgatgagaacaagagttaatgccctaccctctgctgggctgtttgtattgagttgcaatgtgaccagcgaaagctgcatttaataaatgaaagtacagactgtttcttccccattcccctcccactcttgcaggaagctactgagacacaccttgacatagagagctaaattgcagtggataaacagcaacttcacactttctgttcccccattctatttttctcatcatttga

SEQ ID NO: 12027 - protein, 704 aa, Homo sapiens
MLGICRGRRKFLAASLSLLCIPAITWIYLFSGSFEDGKPVSLSPLESQAHSPRYTASSQRERESLEVRMREVEEENRALRRQLSLAQGRAPSHRRGNHSKTYSMEEGTGDSENLRAGIVAGNSSECGQQPVVEKCETIHVAIVCAGYNASRDVVTLVKSVLFHRRNPLHFHLIADSIAEQILATLFQTWMVPAVRVDFYNADELKSEVSWIPNKHYSGIYGLMKLVLTKTLPANLERVIVLDTDITFATDIAELWAVFHKFKGQQVLGLVENQSDWYLGNLWKNHRPWPALGRGYNTGVILLLLDKLRKMKWEQMWRLTAERELMGMLSTSLADQDIFNAVIKQNPFLVYQLPCFWNVQLSDHTRSEQCYRDVSDLKLQKQLSELDEDDLCYEFRRERFTVHRTHLYFLHYEYEPAADSTDVTLVAQLSMDRLQMLEAICKHWEGPISLALYLSDAEAQQFLRYAQGSEVLMSRHNVGYHIVYKEGQFYPVNLLRNVAMKHISTPYMFLSDIDFLPMYGLYEYLRKSVIQLDLANTKKAMIVPAFETLRYRLSFPKSKAELLSMLDMGTLFTFRYHVWTKGHAPTNFAKWRTATTPYRVEWEADFEPYVVVRRDCPEYDRRFVGFGWNKVAHIMELDVQEYEFIVLPNAYMIHMPHAPSFDITKFRSNKQYRICLKTLKEEFQQDMSRRYGFAALKYLTAENNS

SEQ ID NO: 12028 - DNA, 4248 bp, Homo sapiens
agtctgctcctgccccgccgccgcgccggagcccgggcgcccgaagctgggggcgcggccgcgctcgtctcgccgggctgttcgcgggcaggccctgccctgaagggacgaatcggcttggagcgcgggaggtggagtcggccccggcggtcgctccctggacccaacccgaggctgacccaggcccctgcccatgcggggcgcccctggctcggaagagtcccccgggccgggagcagctccaggcagcggccccggaggaagaggaagaagggacagtgctcagcttgggggacccggaccctcgccgcggcatttggagccgggggcagtcccgaactctgtgcttggcaccgccgctccgagtagggcagcgcctgccgggaccctgacccggaccccctgcgcctcgtaggcggcggcgccgccgcgccaccctgttcttccgtgtctccctctgcctggcggcagtcacggccaagaacctacattaagaaacgcattcagatgcatcagccgtttgtaaagcacctgtcgtgagccagagagtattatgagggaggccgaggacttcatgctccggacagagaaacggcgctgggattagggattgccacttctgagaggatgctgggaatctgcagggggagacggaaattcttggctgcctcgttgagtcttctctgcatcccagccatcacctggatttacctgttttctgggagcttcgaagatggaaagcccgtgtctctgtcaccgctggagtcccaggcacacagccccaggtacacggcctccagccagcgggagcgcgagagcctggaggtgcgcatgcgcgaggtggaggaggagaaccgcgccctccgcaggcagctcagcctggcccagggccgagccccatcccatcgccgaggcaaccactccaagacctactccatggaggagggcactggagacagcgagaaccttcgggctggcatcgtggcaggcaacagctccgagtgtgggcagcagccggtcgtggagaaatgcgagacaatccacgttgctattgtctgcgccggatacaatgccagccgggatgtcgtcaccctggtcaaatccgtcctgttccatagacggaaccctctgcacttccaccttattgctgactccattgcggagcagatcctggccacgctcttccagacctggatggtgcccgctgtgcgtgtggacttctacaatgcagacgagctcaagtctgaagtttcctggatccccaataaacattactctgggatttatggtctgatgaagcttgtcctgaccaagactcttcctgccaacctggagagagtcatcgtccttgacacggatatcacctttgccactgacattgcagagctgtgggctgtgttccacaagttcaaaggtcagcaagtcctgggcttggtggagaaccagagtgactggtaccttggaaacctgtggaaaaatcaccgcccatggccagcccttggaagaggctacaacacaggggtgatcctgttacttctggataagctgcggaagatgaaatgggagcagatgtggaggctgaccgcagagagggagctcatgggcatgctctctacatccttagctgaccaggatattttcaatgccgtcatcaaacaaaaccccttccttgtgtaccagctcccctgcttctggaatgtgcagctgtcagaccacacccgctccgagcagtgctacagagacgtgtctgatctaaaggtcattcactggaactcccccaagaagctccgggtgaagaacaagcatgtggagttttttcgcaacctctacctgaccttcctggagtatgacggcaatcttctgaggcgggaactgtttggctgccccagtgaggctgatgtcaacagtgaaaacctccagaagcagctgtctgagctggacgaggacgacctgtgctatgagttccggcgagagcgcttcactgtccaccgcacccacctgtacttcctgcactacgagtatgagcctgcagcagacagcacggacgtcaccctggtcgctcagctgtccatggacaggctccagatgctggaggccatctgcaagcactgggaggggcccatcagcctggccctctacctgtcagacgccgaggcccagcagttcctccgctacgcacagggctctgaggtgcttatgagccgccacaacgtgggctaccacatcgtgtacaaggagggccagttctaccccgtgaacctgctgcgcaacgtggccatgaagcacatcagcactccctacatgttcctgtctgacattgacttcctgcccatgtatgggctctatgagtacctcaggaagtctgtcatccagctcgatcttgccaacaccaagaaagcaatgattgtccccgcgttcgagacactgcgctaccggctgtccttccccaagtcaaaagcggagttgctgtcaatgctggacatggggaccctcttcacattcaggtaccacgtctggacgaaaggccacgcacccacaaacttcgccaagtggcggaccgccaccacgccttaccgggttgagtgggaggccgattttgagccgtatgttgttgtgagacgtgactgcccggagtacgaccggaggtttgtaggctttggctggaacaaagtggctcatatcatggagctggatgtgcaggagtatgagttcattgtgctgcccaacgcctacatgatccacatgcctcatgcccccagcttcgacattaccaagttccgttccaacaagcaataccgcatctgtctcaaaaccctcaaggaagagtttcagcaggacatgtcccgccgctacggctttgctgccctgaaatatctcacagccgagaacaacagctagcaccaagaagcccaccactagggggagacatgctgtaggggaagtgccactcgctgtttggggcccggccttcaaattcaaaattgagccatgctttttcggtttgtttttatttatctctttggcccagccaagctgccctcactacagagaccttggacaaggatccagccagtccctctctgccccacaaccctgcattcccagaggttagctatgcagcccacctagatgagtctcttcaagaatgggaaatcaaggggtgacagggagtaaaagggttatcatcttactgcaaagccacaagatcagggcagggctttaggatgttctggatgctttttaataattatgcttcccatcataactggggagaaagggaagtcagggttctaggggttattcgtcccaggaaatagaagtgaaattgtctttattaagtgaaaactttcccctttgccctgcaatgtagctgggcattcaaacggagggcaaaccgatgatctaaaccaaccacttggaaaaacccaatggggacattgtaaccagagggtcctggaggtggggttgatgggtttccttatccccaaagtcactcctgttttgttttgtttttctttgggggttttgtttatttttggggctggcaatccaaaatagaaaatctgatcctttgaggctctaaaggaaaatcagctgcctctaccaaccaccctctatcagcagtggcccaggaaggaggtcaagcatcttcggccgatatttaaacatgggcagcttccttcaggatgatcaccgaggctcccgtgactttgaactccctactctccagaatccaggggctatagcgatggggactgcggaattacgagggctggctgttttacaccggtcacattttctattggcagtgactgattcatgggaaagggctttgaaggaactacttcagtgcacacacaaggtacgaacctctcaggcctttcgaagaactttcataattcatgaaagcccagttctgaagattcacgtatccatctggagacctacaggaagaaagtgattgggttcctctggttcttgcctgcttcactgtggatgggaagaggtgacaacctcagtctccctttgggacctgtccaagggtaggcaaccaccttcaccttcacacagattgaggagacactggactttttacccattttctttaatcttcaatattaatattgtgtttacattgatgagaacaagagttaatgccctaccctctgctgggctgtttgtattgagttgcaatgtgaccagcgaaagctgcatttaataaatgaaagtacagactgtttcttcccc

SEQ ID NO: 12029 - protein, 756 aa, Homo sapiens; identical to SEQ ID NO: 2007

SEQ ID NO: 12030 - DNA, 4029 bp, Homo sapiens
agtctgctcctgccccgccgccgcgccggagcccgggcgcccgaagctgggggcgcggccgcgctcgtctcgccgggctgttcgcgggcaggccctgccctgaagggacgaatcggcttggagcgcgggaggtggagtcggccccggcggtcgctccctggacccaacccgaggctgacccaggcccctgcccatgcggggcgcccctggctcggaagagtcccccgggccgggagcagctccaggcagcggccccggaggaagaggaagaagggacagtgctcagcttgggggacccggaccctcgccgcggcatttggagccgggggcagtcccgaactctgtgcttggcaccgccgctccgagtagggcagcgcctgccgggaccctgacccggaccccctgcgcctcgtaggcggcggcgccgccgcgccaccctgttcttccgtgtctccctctgcctggcggcagtcacggccaagagagtattatgagggaggccgaggacttcatgctccggacagagaaacggcgctgggattagggattgccacttctgagaggatgctgggaatctgcagggggagacggaaattcttggctgcctcgttgagtcttctctgcatcccagccatcacctggatttacctgttttctgggagcttcgaagatggaaagcccgtgtctctgtcaccgctggagtcccaggcacacagccccaggtacacggcctccagccagcgggagcgcgagagcctggaggtgcgcatgcgcgaggtggaggaggagaaccgcgccctccgcaggcagctcagcctggcccagggccgagccccatcccatcgccgaggcaaccactccaagacctactccatggaggagggcactggagacagcgagaaccttcgggctggcatcgtggcaggcaacagctccgagtgtgggcagcagccggtcgtggagaaatgcgagacaatccacgttgctattgtctgcgccggatacaatgccagccgggatgtcgtcaccctggtcaaatccgtcctgttccatagacggaaccctctgcacttccaccttattgctgactccattgcggagcagatcctggccacgctcttccagacctggatggtgcccgctgtgcgtgtggacttctacaatgcagacgagctcaagtctgaagtttcctggatccccaataaacattactctgggatttatggtctgatgaagcttgtcctgaccaagactcttcctgccaacctggagagagtcatcgtccttgacacggatatcacctttgccactgacattgcagagctgtgggctgtgttccacaagttcaaaggtcagcaagtcctgggcttggtggagaaccagagtgactggtaccttggaaacctgtggaaaaatcaccgcccatggccagcccttggaagaggctacaacacaggggtgatcctgttacttctggataagctgcggaagatgaaatgggagcagatgtggaggctgaccgcagagagggagctcatgggcatgctctctacatccttagctgaccaggatattttcaatgccgtcatcaaacaaaaccccttccttgtgtaccagctcccctgcttctggaatgtgcagctgtcagaccacacccgctccgagcagtgctacagagacgtgtctgatctaaagctccagaagcagctgtctgagctggacgaggacgacctgtgctatgagttccggcgagagcgcttcactgtccaccgcacccacctgtacttcctgcactacgagtatgagcctgcagcagacagcacggacgtcaccctggtcgctcagctgtccatggacaggctccagatgctggaggccatctgcaagcactgggaggggcccatcagcctggccctctacctgtcagacgccgaggcccagcagttcctccgctacgcacagggctctgaggtgcttatgagccgccacaacgtgggctaccacatcgtgtacaaggagggccagttctaccccgtgaacctgctgcgcaacgtggccatgaagcacatcagcactccctacatgttcctgtctgacattgacttcctgcccatgtatgggctctatgagtacctcaggaagtctgtcatccagctcgatcttgccaacaccaagaaagcaatgattgtccccgcgttcgagacactgcgctaccggctgtccttccccaagtcaaaagcggagttgctgtcaatgctggacatggggaccctcttcacattcaggtaccacgtctggacgaaaggccacgcacccacaaacttcgccaagtggcggaccgccaccacgccttaccgggttgagtgggaggccgattttgagccgtatgttgttgtgagacgtgactgcccggagtacgaccggaggtttgtaggctttggctggaacaaagtggctcatatcatggagctggatgtgcaggagtatgagttcattgtgctgcccaacgcctacatgatccacatgcctcatgcccccagcttcgacattaccaagttccgttccaacaagcaataccgcatctgtctcaaaaccctcaaggaagagtttcagcaggacatgtcccgccgctacggctttgctgccctgaaatatctcacagccgagaacaacagctagcaccaagaagcccaccactagggggagacatgctgtaggggaagtgccactcgctgtttggggcccggccttcaaattcaaaattgagccatgctttttcggtttgtttttatttatctctttggcccagccaagctgccctcactacagagaccttggacaaggatccagccagtccctctctgccccacaaccctgcattcccagaggttagctatgcagcccacctagatgagtctcttcaagaatgggaaatcaaggggtgacagggagtaaaagggttatcatcttactgcaaagccacaagatcagggcagggctttaggatgttctggatgctttttaataattatgcttcccatcataactggggagaaagggaagtcagggttctaggggttattcgtcccaggaaatagaagtgaaattgtctttattaagtgaaaactttcccctttgccctgcaatgtagctgggcattcaaacggagggcaaaccgatgatctaaaccaaccacttggaaaaacccaatggggacattgtaaccagagggtcctggaggtggggttgatgggtttccttatccccaaagtcactcctgttttgttttgtttttctttgggggttttgtttatttttggggctggcaatccaaaatagaaaatctgatcctttgaggctctaaaggaaaatcagctgcctctaccaaccaccctctatcagcagtggcccaggaaggaggtcaagcatcttcggccgatatttaaacatgggcagcttccttcaggatgatcaccgaggctcccgtgactttgaactccctactctccagaatccaggggctatagcgatggggactgcggaattacgagggctggctgttttacaccggtcacattttctattggcagtgactgattcatgggaaagggctttgaaggaactacttcagtgcacacacaaggtacgaacctctcaggcctttcgaagaactttcataattcatgaaagcccagttctgaagattcacgtatccatctggagacctacaggaagaaagtgattgggttcctctggttcttgcctgcttcactgtggatgggaagaggtgacaacctcagtctccctttgggacctgtccaagggtaggcaaccaccttcaccttcacacagattgaggagacactggactttttacccattttctttaatcttcaatattaatattgtgtttacattgatgagaacaagagttaatgccctaccctctgctgggctgtttgtattgagttgcaatgtgaccagcgaaagctgcatttaataaatgaaagtacagactgtttcttcccc

SEQ ID NO: 12031 - protein, 704 aa, Homo sapiens; identical to SEQ ID NO: 12027

SEQ ID NO: 12032 - DNA, 4185 bp, Homo sapiens
agtctgctcctgccccgccgccgcgccggagcccgggcgcccgaagctgggggcgcggccgcgctcgtctcgccgggctgttcgcgggcaggccctgccctgaagggacgaatcggcttggagcgcgggaggtggagtcggccccggcggtcgctccctggacccaacccgaggctgacccaggcccctgcccatgcggggcgcccctggctcggaagagtcccccgggccgggagcagctccaggcagcggccccggaggaagaggaagaagggacagtgctcagcttgggggacccggaccctcgccgcggcatttggagccgggggcagtcccgaactctgtgcttggcaccgccgctccgagtagggcagcgcctgccgggaccctgacccggaccccctgcgcctcgtaggcggcggcgccgccgcgccaccctgttcttccgtgtctccctctgcctggcggcagtcacggccaagagagtattatgagggaggccgaggacttcatgctccggacagagaaacggcgctgggattagggattgccacttctgagaggatgctgggaatctgcagggggagacggaaattcttggctgcctcgttgagtcttctctgcatcccagccatcacctggatttacctgttttctgggagcttcgaagatggaaagcccgtgtctctgtcaccgctggagtcccaggcacacagccccaggtacacggcctccagccagcgggagcgcgagagcctggaggtgcgcatgcgcgaggtggaggaggagaaccgcgccctccgcaggcagctcagcctggcccagggccgagccccatcccatcgccgaggcaaccactccaagacctactccatggaggagggcactggagacagcgagaaccttcgggctggcatcgtggcaggcaacagctccgagtgtgggcagcagccggtcgtggagaaatgcgagacaatccacgttgctattgtctgcgccggatacaatgccagccgggatgtcgtcaccctggtcaaatccgtcctgttccatagacggaaccctctgcacttccaccttattgctgactccattgcggagcagatcctggccacgctcttccagacctggatggtgcccgctgtgcgtgtggacttctacaatgcagacgagctcaagtctgaagtttcctggatccccaataaacattactctgggatttatggtctgatgaagcttgtcctgaccaagactcttcctgccaacctggagagagtcatcgtccttgacacggatatcacctttgccactgacattgcagagctgtgggctgtgttccacaagttcaaaggtcagcaagtcctgggcttggtggagaaccagagtgactggtaccttggaaacctgtggaaaaatcaccgcccatggccagcccttggaagaggctacaacacaggggtgatcctgttacttctggataagctgcggaagatgaaatgggagcagatgtggaggctgaccgcagagagggagctcatgggcatgctctctacatccttagctgaccaggatattttcaatgccgtcatcaaacaaaaccccttccttgtgtaccagctcccctgcttctggaatgtgcagctgtcagaccacacccgctccgagcagtgctacagagacgtgtctgatctaaaggtcattcactggaactcccccaagaagctccgggtgaagaacaagcatgtggagttttttcgcaacctctacctgaccttcctggagtatgacggcaatcttctgaggcgggaactgtttggctgccccagtgaggctgatgtcaacagtgaaaacctccagaagcagctgtctgagctggacgaggacgacctgtgctatgagttccggcgagagcgcttcactgtccaccgcacccacctgtacttcctgcactacgagtatgagcctgcagcagacagcacggacgtcaccctggtcgctcagctgtccatggacaggctccagatgctggaggccatctgcaagcactgggaggggcccatcagcctggccctctacctgtcagacgccgaggcccagcagttcctccgctacgcacagggctctgaggtgcttatgagccgccacaacgtgggctaccacatcgtgtacaaggagggccagttctaccccgtgaacctgctgcgcaacgtggccatgaagcacatcagcactccctacatgttcctgtctgacattgacttcctgcccatgtatgggctctatgagtacctcaggaagtctgtcatccagctcgatcttgccaacaccaagaaagcaatgattgtccccgcgttcgagacactgcgctaccggctgtccttccccaagtcaaaagcggagttgctgtcaatgctggacatggggaccctcttcacattcaggtaccacgtctggacgaaaggccacgcacccacaaacttcgccaagtggcggaccgccaccacgccttaccgggttgagtgggaggccgattttgagccgtatgttgttgtgagacgtgactgcccggagtacgaccggaggtttgtaggctttggctggaacaaagtggctcatatcatggagctggatgtgcaggagtatgagttcattgtgctgcccaacgcctacatgatccacatgcctcatgcccccagcttcgacattaccaagttccgttccaacaagcaataccgcatctgtctcaaaaccctcaaggaagagtttcagcaggacatgtcccgccgctacggctttgctgccctgaaatatctcacagccgagaacaacagctagcaccaagaagcccaccactagggggagacatgctgtaggggaagtgccactcgctgtttggggcccggccttcaaattcaaaattgagccatgctttttcggtttgtttttatttatctctttggcccagccaagctgccctcactacagagaccttggacaaggatccagccagtccctctctgccccacaaccctgcattcccagaggttagctatgcagcccacctagatgagtctcttcaagaatgggaaatcaaggggtgacagggagtaaaagggttatcatcttactgcaaagccacaagatcagggcagggctttaggatgttctggatgctttttaataattatgcttcccatcataactggggagaaagggaagtcagggttctaggggttattcgtcccaggaaatagaagtgaaattgtctttattaagtgaaaactttcccctttgccctgcaatgtagctgggcattcaaacggagggcaaaccgatgatctaaaccaaccacttggaaaaacccaatggggacattgtaaccagagggtcctggaggtggggttgatgggtttccttatccccaaagtcactcctgttttgttttgtttttctttgggggttttgtttatttttggggctggcaatccaaaatagaaaatctgatcctttgaggctctaaaggaaaatcagctgcctctaccaaccaccctctatcagcagtggcccaggaaggaggtcaagcatcttcggccgatatttaaacatgggcagcttccttcaggatgatcaccgaggctcccgtgactttgaactccctactctccagaatccaggggctatagcgatggggactgcggaattacgagggctggctgttttacaccggtcacattttctattggcagtgactgattcatgggaaagggctttgaaggaactacttcagtgcacacacaaggtacgaacctctcaggcctttcgaagaactttcataattcatgaaagcccagttctgaagattcacgtatccatctggagacctacaggaagaaagtgattgggttcctctggttcttgcctgcttcactgtggatgggaagaggtgacaacctcagtctccctttgggacctgtccaagggtaggcaaccaccttcaccttcacacagattgaggagacactggactttttacccattttctttaatcttcaatattaatattgtgtttacattgatgagaacaagagttaatgccctaccctctgctgggctgtttgtattgagttgcaatgtgaccagcgaaagctgcatttaataaatgaaagtacagactgtttcttcccc

SEQ ID NO: 12033 - protein, 756 aa, Homo sapiens; identical to SEQ ID NO: 2007

SEQ ID NO: 12034 - DNA, 3801 bp, Homo sapiens
gaggaaaggctgtctccacccacctctcgcactctcccttctcctttataaaggccggaacagctgaaagggtggcaacttctcctcctgcagccgggagcggcctgcctgcctccctgcgcacccgcagcctcccccgctgcctccctagggctcccctccggccgccagcgcccatttttcattccctagatagagatactttgcgcgcacacacatacatacgcgcgcaaaaaggaaaaaaaaaaaaaaaagcccaccctccagcctcgctgcaaagagaaaaccggagcagccgcagctcgcagctcgcagctcgcagcccgcagcccgcagaggacgcccagagcggcgagcgggcgggcagacggaccgacggactcgcgccgcgtccacctgtcggccgggcccagccgagcgcgcagcgggcacgccgcgcgcgcggagcagccgtgcccgccgcccgggccccgcgccagggcgcacacgctcccgcccccctacccggcccgggcgggagtttgcacctctccctgcccgggtgctcgagctgccgttgcaaagccaactttggaaaaagttttttgggggagacttgggccttgaggtgcccagctccgcgctttccgattttgggggcctttccagaaaatgttgcaaaaaagctaagccggcgggcagaggaaaacgcctgtagccggcgagtgaagacgaaccatcgactgccgtgttccttttcctcttggaggttggagtcccctgggcgcccccacacggctagacgcctcggctggttcgcgacgcagccccccggccgtggatgctcactcgggctcgggatccgcccaggtagcggcctcggacccaggtcctgcgcccaggtcctcccctgccccccagcgacggagccggggccgggggcggcggcgcccgggggccatgcgggtgagccgcggctgcagaggcctgagcgcctgatcgccgcggacccgagccgagcccacccccctccccagccccccaccctggccgcgggggcggcgcgctcgatctacgcgtccggggccccgcggggccgggcccggagtcggcatgaatcgctgctgggcgctcttcctgtctctctgctgctacctgcgtctggtcagcgccgagggggaccccattcccgaggagctttatgagatgctgagtgaccactcgatccgctcctttgatgatctccaacgcctgctgcacggagaccccggagaggaagatggggccgagttggacctgaacatgacccgctcccactctggaggcgagctggagagcttggctcgtggaagaaggagcctgggttccctgaccattgctgagccggccatgatcgccgagtgcaagacgcgcaccgaggtgttcgagatctcccggcgcctcatagaccgcaccaacgccaacttcctggtgtggccgccctgtgtggaggtgcagcgctgctccggctgctgcaacaaccgcaacgtgcagtgccgccccacccaggtgcagctgcgacctgtccaggtgagaaagatcgagattgtgcggaagaagccaatctttaagaaggccacggtgacgctggaagaccacctggcatgcaagtgtgagacagtggcagctgcacggcctgtgacccgaagcccggggggttcccaggagcagcgagccaaaacgccccaaactcgggtgaccattcggacggtgcgagtccgccggccccccaagggcaagcaccggaaattcaagcacacgcatgacaagacggcactgaaggagacccttggagcctaggggcatcggcaggagagtgtgtgggcagggttatttaatatggtatttgctgtattgcccccatggggtccttggagtgataatattgtttccctcgtccgtctgtctcgatgcctgattcggacggccaatggtgcttcccccacccctccacgtgtccgtccacccttccatcagcgggtctcctcccagcggcctccggcgtcttgcccagcagctcaagaagaaaaagaaggactgaactccatcgccatcttcttcccttaactccaagaacttgggataagagtgtgagagagactgatggggtcgctctttgggggaaacgggctccttcccctgcacctggcctgggccacacctgagcgctgtggactgtcctgaggagccctgaggacctctcagcatagcctgcctgatccctgaacccctggccagctctgaggggaggcacctccaggcaggccaggctgcctcggactccatggctaagaccacagacgggcacacagactggagaaaacccctcccacggtgcccaaacaccagtcacctcgtctccctggtgcctctgtgcacagtggcttcttttcgttttcgttttgaagacgtggactcctcttggtgggtgtggccagcacaccaagtggctgggtgccctctcaggtgggttagagatggagtttgctgttgaggtggctgtagatggtgacctgggtatcccctgcctcctgccaccccttcctccccacactccactctgattcacctcttcctctggttcctttcatctctctacctccaccctgcattttcctcttgtcctggcccttcagtctgctccaccaaggggctcttgaaccccttattaaggccccagatgatcccagtcactcctctctagggcagaagactagaggccagggcagcaagggacctgctcatcatattccaacccagccacgactgccatgtaaggttgtgcagggtgtgtactgcacaaggacattgtatgcagggagcactgttcacatcatagataaagctgatttgtatatttattatgacaatttctggcagatgtaggtaaagaggaaaaggatccttttcctaattcacacaaagactccttgtggactggctgtgcccctgatgcagcctgtggcttggagtggccaaataggagggagactgtggtaggggcagggaggcaacactgctgtccacatgacctccatttcccaaagtcctctgctccagcaactgcccttccaggtgggtgtgggacacctgggagaaggtctccaagggagggtgcagccctcttgcccgcacccctccctgcttgcacacttccccatctttgatccttctgagctccacctctggtggctcctcctaggaaaccagctcgtgggctgggaatgggggagagaagggaaaagatccccaagaccccctggggtgggatctgagctcccacctcccttcccacctactgcactttcccccttcccgccttccaaaacctgcttccttcagtttgtaaagtcggtgattatatttttgggggctttccttttattttttaaatgtaaaatttatttatattccgtatttaaagttgtaaaaaaaaataaccacaaaacaaaaccaaatgaatccgccggaggtctgtctgttggcatcgtgcgtgacaattaacctttctgccttggcaggatgtgccgacagcttgcggcgtgttcctctcactctgggagcctcaggcgtgatctcacacactggcgtgcacatacacacacacacacatacatgctcacacatgcgtgcacatacacgcaggcctgcaacttgggggaggcctctgtctggcgggaagaagagacacacaggctactctgttggtcttggtcctggcacagctcctgacacgtggacttgtgcgtgtctctggcagtgacgagagatgggtttctgcag

SEQ ID NO: 12035 - protein, 241 aa, Homo sapiens; identical to SEQ ID NO: 2011

SEQ ID NO: 12036 - DNA, 2542 bp, Homo sapiens
gtgtgtgtgtgtgtgcgcatctgagagagagagagagagagactgactgagcaggaatggtgagatgtttatcatgggcctcggggaccccattcccgaggagctttatgagatgctgagtgaccactcgatccgctcctttgatgatctccaacgcctgctgcacggagaccccggagaggaagatggggccgagttggacctgaacatgacccgctcccactctggaggcgagctggagagcttggctcgtggaagaaggagcctgggttccctgaccattgctgagccggccatgatcgccgagtgcaagacgcgcaccgaggtgttcgagatctcccggcgcctcatagaccgcaccaacgccaacttcctggtgtggccgccctgtgtggaggtgcagcgctgctccggctgctgcaacaaccgcaacgtgcagtgccgccccacccaggtgcagctgcgacctgtccaggtgagaaagatcgagattgtgcggaagaagccaatctttaagaaggccacggtgacgctggaagaccacctggcatgcaagtgtgagacagtggcagctgcacggcctgtgacccgaagcccggggggttcccaggagcagcgagccaaaacgccccaaactcgggtgaccattcggacggtgcgagtccgccggccccccaagggcaagcaccggaaattcaagcacacgcatgacaagacggcactgaaggagacccttggagcctaggggcatcggcaggagagtgtgtgggcagggttatttaatatggtatttgctgtattgcccccatggggtccttggagtgataatattgtttccctcgtccgtctgtctcgatgcctgattcggacggccaatggtgcttcccccacccctccacgtgtccgtccacccttccatcagcgggtctcctcccagcggcctccggcgtcttgcccagcagctcaagaagaaaaagaaggactgaactccatcgccatcttcttcccttaactccaagaacttgggataagagtgtgagagagactgatggggtcgctctttgggggaaacgggctccttcccctgcacctggcctgggccacacctgagcgctgtggactgtcctgaggagccctgaggacctctcagcatagcctgcctgatccctgaacccctggccagctctgaggggaggcacctccaggcaggccaggctgcctcggactccatggctaagaccacagacgggcacacagactggagaaaacccctcccacggtgcccaaacaccagtcacctcgtctccctggtgcctctgtgcacagtggcttcttttcgttttcgttttgaagacgtggactcctcttggtgggtgtggccagcacaccaagtggctgggtgccctctcaggtgggttagagatggagtttgctgttgaggtggctgtagatggtgacctgggtatcccctgcctcctgccaccccttcctccccacactccactctgattcacctcttcctctggttcctttcatctctctacctccaccctgcattttcctcttgtcctggcccttcagtctgctccaccaaggggctcttgaaccccttattaaggccccagatgatcccagtcactcctctctagggcagaagactagaggccagggcagcaagggacctgctcatcatattccaacccagccacgactgccatgtaaggttgtgcagggtgtgtactgcacaaggacattgtatgcagggagcactgttcacatcatagataaagctgatttgtatatttattatgacaatttctggcagatgtaggtaaagaggaaaaggatccttttcctaattcacacaaagactccttgtggactggctgtgcccctgatgcagcctgtggcttggagtggccaaataggagggagactgtggtaggggcagggaggcaacactgctgtccacatgacctccatttcccaaagtcctctgctccagcaactgcccttccaggtgggtgtgggacacctgggagaaggtctccaagggagggtgcagccctcttgcccgcacccctccctgcttgcacacttccccatctttgatccttctgagctccacctctggtggctcctcctaggaaaccagctcgtgggctgggaatgggggagagaagggaaaagatccccaagaccccctggggtgggatctgagctcccacctcccttcccacctactgcactttcccccttcccgccttccaaaacctgcttccttcagtttgtaaagtcggtgattatatttttgggggctttccttttattttttaaatgtaaaatttatttatattccgtatttaaagttgtaaaaaaaaataaccacaaaacaaaaccaaatgaatccgccggaggtctgtctgttggcatcgtgcgtgacaattaacctttctgccttggcaggatgtgccgacagcttgcggcgtgttcctctcactctgggagcctcaggcgtgatctcacacactggcgtgcacat

SEQ ID NO: 12037 - protein, 226 aa, Homo sapiens; identical to SEQ ID NO: 2013

SEQ ID NO: 12038 - DNA, 2405 bp, Homo sapiens
gtgtgtgtgtgtgtgcgcatctgagagagagagagagagagactgactgagcaggaatggtgagatgtttatcatgggcctcggggaccccattcccgaggagctttatgagatgctgagtgaccactcgatccgctcctttgatgatctccaacgcctgctgcacggagaccccggagaggaagatggggccgagttggacctgaacatgacccgctcccactctggaggcgagctggagagcttggctcgtggaagaaggagcctgggttccctgaccattgctgagccggccatgatcgccgagtgcaagacgcgcaccgaggtgttcgagatctcccggcgcctcatagaccgcaccaacgccaacttcctggtgtggccgccctgtgtggaggtgcagcgctgctccggctgctgcaacaaccgcaacgtgcagtgccgccccacccaggtgcagctgcgacctgtccaggtgagaaagatcgagattgtgcggaagaagccaatctttaagaaggccacggtgacgctggaagaccacctggcatgcaagtgtgagacagtggcagctgcacggcctgtgacccgaagcccggggggttcccaggagcagcgagccaaaacgccccaaactcgggtgaccattcggacggtgcgagtccgccggccccccaagggcaagcaccggaaattcaagcacacgcatgacaagacggcactgaaggagacccttggagcctaggggcatcggcaggagagtgtgtgggcagggttatttaatatggtatttgctgtattgcccccatggggtccttggagtgataatattgtttccctcgtccgtctgtctcgatgcctgattcggacggccaatggtgcttcccccacccctccacgtgtccgtccacccttccatcagcgggtctcctcccagcggcctccggcgtcttgcccagcagctcaagaagaaaaagaaggactgaactccatcgccatcttcttcccttaactccaagaacttgggataagagtgtgagagagactgatggggtcgctctttgggggaaacgggctccttcccctgcacctggcctgggccacacctgagcgctgtggactgtcctgaggagccctgaggacctctcagcatagcctgcctgatccctgaacccctggccagctctgaggggaggcacctccaggcaggccaggctgcctcggactccatggctaagaccacagacgggcacacagactggagaaaacccctcccacggtgcccaaacaccagtcacctcgtctccctggtgcctctgtgcacagtggcttcttttcgttttcgttttgaagacgtggactcctcttggtgggtgtggccagcacaccaagtggctgggtgccctctcaggtgggttagagatggagtttgctgttgaggtggctgtagatggtgacctgggtatcccctgcctcctgccaccccttcctccccacactccactctgattcacctcttcctctggttcctttcatctctctacctccaccctgcattttcctcttgtcctggcccttcagtctgctccaccaaggggctcttgaaccccttattaaggccccagatgatcccagtcactcctctctagggcagaagactagaggccagggcagcaagggacctgctcatcatattccaacccagccacgactgccatgtaaggttgtgcagggtgtgtactgcacaaggacattgtatgcagggagcactgttcacatcatagataaagctgatttgtatatttattatgacaatttctggcagatgtaggtaaagaggaaaaggatccttttcctaattcacacaaagactccttgtggactggctgtgcccctgatgcagcctgtggcttggagtggccaaataggagggagactgtggtaggggcagggaggcaacactgctgtccacatgacctccatttcccaaagtcctctgctccagcaactgcccttccaggtgggtgtgggacacctgggagaaggtctccaagggagggtgcagccctcttgcccgcacccctccctgcttgcacacttccccatctttgatccttctgagctccacctctggtggctcctcctaggaaaccagctcgtgggctgggaatgggggagagaagggaaaagatccccaagaccccctggggtgggatctgagctcccacctcccttcccacctactgcactttcccccttcccgccttccaaaacctgcttccttcagtttgtaaagtcggtgattatatttttgggggctttccttttattttttaaatgtaaaatttatttatattccgtatttaaagttgtaaaaaaaaataaccacaaaacaaaaccaaatg

SEQ ID NO: 12039 - protein, 226 aa, Homo sapiens; identical to SEQ ID NO: 2013

SEQ ID NO: 12040 - DNA, 3408 bp, Homo sapiens
ggtggcaacttctcctcctgcagccgggagcggcctgcctgcctccctgcgcacccgcagcctcccccgctgcctccctagggctcccctccggccgccagcgcccatttttcattccctagatagagatactttgcgcgcacacacatacatacgcgcgcaaaaaggaaaaaaaaaaaaaaaagcccaccctccagcctcgctgcaaagagaaaaccggagcagccgcagctcgcagctcgcagctcgcagcccgcagcccgcagaggacgcccagagcggcgagcgggcgggcagacggaccgacggactcgcgccgcgtccacctgtcggccgggcccagccgagcgcgcagcgggcacgccgcgcgcgcggagcagccgtgcccgccgcccgggccccgcgccagggcgcacacgctcccgcccccctacccggcccgggcgggagtttgcacctctccctgcccgggtgctcgagctgccgttgcaaagccaactttggaaaaagttttttgggggagacttgggccttgaggtgcccagctccgcgctttccgattttgggggcctttccagaaaatgttgcaaaaaagctaagccggcgggcagaggaaaacgcctgtagccggcgagtgaagacgaaccatcgactgccgtgttccttttcctcttggaggttggagtcccctgggcgcccccacacggctagacgcctcggctggttcgcgacgcagccccccggccgtggatgctcactcgggctcgggatccgcccaggtagcggcctcggacccaggtcctgcgcccaggtcctcccctgccccccagcgacggagccggggccgggggcggcggcgcccgggggccatgcgggtgagccgcggctgcagaggcctgagcgcctgatcgccgcggacccgagccgagcccacccccctccccagccccccaccctggccgcgggggcggcgcgctcgatctacgcgtccggggccccgcggggccgggcccggagtcggcatgaatcgctgctgggcgctcttcctgtctctctgctgctacctgcgtctggtcagcgccgagggggaccccattcccgaggagctttatgagatgctgagtgaccactcgatccgctcctttgatgatctccaacgcctgctgcacggagaccccggagaggaagatggggccgagttggacctgaacatgacccgctcccactctggaggcgagctggagagcttggctcgtggaagaaggagcctgggttccctgaccattgctgagccggccatgatcgccgagtgcaagacgcgcaccgaggtgttcgagatctcccggcgcctcatagaccgcaccaacgccaacttcctggtgtggccgccctgtgtggaggtgcagcgctgctccggctgctgcaacaaccgcaacgtgcagtgccgccccacccaggtgcagctgcgacctgtccaggtgagaaagatcgagattgtgcggaagaagccaatctttaagaaggccacggtgacgctggaagaccacctggcatgcaagtgtgagacagtggcagctgcacggcctgtgacccgaagcccggggggttcccaggagcagcgagccaaaacgccccaaactcgggtgaccattcggacggtgcgagtccgccggccccccaagggcaagcaccggaaattcaagcacacgcatgacaagacggcactgaaggagacccttggagcctaggggcatcggcaggagagtgtgtgggcagggttatttaatatggtatttgctgtattgcccccatggggtccttggagtgataatattgtttccctcgtccgtctgtctcgatgcctgattcggacggccaatggtgcttcccccacccctccacgtgtccgtccacccttccatcagcgggtctcctcccagcggcctccggcgtcttgcccagcagctcaagaagaaaaagaaggactgaactccatcgccatcttcttcccttaactccaagaacttgggataagagtgtgagagagactgatggggtcgctctttgggggaaacgggctccttcccctgcacctggcctgggccacacctgagcgctgtggactgtcctgaggagccctgaggacctctcagcatagcctgcctgatccctgaacccctggccagctctgaggggaggcacctccaggcaggccaggctgcctcggactccatggctaagaccacagacgggcacacagactggagaaaacccctcccacggtgcccaaacaccagtcacctcgtctccctggtgcctctgtgcacagtggcttcttttcgttttcgttttgaagacgtggactcctcttggtgggtgtggccagcacaccaagtggctgggtgccctctcaggtgggttagagatggagtttgctgttgaggtggctgtagatggtgacctgggtatcccctgcctcctgccaccccttcctccccacactccactctgattcacctcttcctctggttcctttcatctctctacctccaccctgcattttcctcttgtcctggcccttcagtctgctccaccaaggggctcttgaaccccttattaaggccccagatgatcccagtcactcctctctagggcagaagactagaggccagggcagcaagggacctgctcatcatattccaacccagccacgactgccatgtaaggttgtgcagggtgtgtactgcacaaggacattgtatgcagggagcactgttcacatcatagataaagctgatttgtatatttattatgacaatttctggcagatgtaggtaaagaggaaaaggatccttttcctaattcacacaaagactccttgtggactggctgtgcccctgatgcagcctgtggcttggagtggccaaataggagggagactgtggtaggggcagggaggcaacactgctgtccacatgacctccatttcccaaagtcctctgctccagcaactgcccttccaggtgggtgtgggacacctgggagaaggtctccaagggagggtgcagccctcttgcccgcacccctccctgcttgcacacttccccatctttgatccttctgagctccacctctggtggctcctcctaggaaaccagctcgtgggctgggaatgggggagagaagggaaaagatccccaagaccccctggggtgggatctgagctcccacctcccttcccacctactgcactttcccccttcccgccttccaaaacctgcttccttcagtttgtaaagtcggtgattatatttttgggggctttccttttattttttaaatgtaaaatttatttatattccgtatttaaagttgtaaaaaaaaataaccacaaaacaaaaccaaatg

SEQ ID NO: 12041 - protein, 241 aa, Homo sapiens; identical to SEQ ID NO: 2011

SEQ ID NO: 12042 - DNA, 1968 bp, Homo sapiens
ggcaacttctcctcctgcagccgggagcggcctgcctgcctccctgcgcacccgcagcctcccccgctgcctccctagggctcccctccggccgccagcgcccatttttcattccctagatagagatactttgcgcgcacacacatacatacgcgcgcaaaaaggaaaaaaaaaaaaaaaagcccaccctccagcctcgctgcaaagagaaaaccggagcagccgcagctcgcagctcgcagctcgcagcccgcagcccgcagaggacgcccagagcggcgagcgggcgggcagacggaccgacggactcgcgccgcgtccacctgtcggccgggcccagccgagcgcgcagcgggcacgccgcgcgcgcggagcagccgtgcccgccgcccgggccccgcgccagggcgcacacgctcccgcccccctacccggcccgggcgggagtttgcacctctccctgcccgggtgctcgagctgccgttgcaaagccaactttggaaaaagttttttgggggagacttgggccttgaggtgcccagctccgcgctttccgattttgggggcctttccagaaaatgttgcaaaaaagctaagccggcgggcagaggaaaacgcctgtagccggcgagtgaagacgaaccatcgactgccgtgttccttttcctcttggaggttggagtcccctgggcgcccccacacggctagacgcctcggctggttcgcgacgcagccccccggccgtggatgctcactcgggctcgggatccgcccaggtagcggcctcggacccaggtcctgcgcccaggtcctcccctgccccccagcgacggagccggggccgggggcggcggcgcccgggggccatgcgggtgagccgcggctgcagaggcctgagcgcctgatcgccgcggacccgagccgagcccacccccctccccagccccccaccctggccgcgggggcggcgcgctcgatctacgcgtccggggccccgcggggccgggcccggagtcggcatgaatcgctgctgggcgctcttcctgtctctctgctgctacctgcgtctggtcagcgccgagggggaccccattcccgaggagctttatgagatgctgagtgaccactcgatccgctcctttgatgatctccaacgcctgctgcacggagaccccggagaggaagatggggccgagttggacctgaacatgacccgctcccactctggaggcgagctggagagcttggctcgtggaagaaggagcctgggttccctgaccattgctgagccggccatgatcgccgagtgcaagacgcgcaccgaggtgttcgagatctcccggcgcctcatagaccgcaccaacgccaacttcctggtgtggccgccctgtgtggaggtgcagcgctgctccggctgctgcaacaaccgcaacgtgcagtgccgccccacccaggtgcagctgcgacctgtccaggtgagaaagatcgagattgtgcggaagaagccaatctttaagaaggccacggtgacgctggaagaccacctggcatgcaagtgtgagacagtggcagctgcacggcctgtgacccgaagcccggggggttcccaggagcagcgagccaaaacgccccaaactcgggtgaccattcggacggtgcgagtccgccggccccccaagggcaagcaccggaaattcaagcacacgcatgacaagacggcactgaaggagacccttggagcctaggggcatcggcaggagagtgtgtgggcagggttatttaatatggtatttgctgtattgcccccatggggtccttggagtgataatattgtttccctcgtccgtctgtctcgatgcctgattcggacggccaatggtgcttcccccacccctccacgtgtccgtccacccttccatcagcgggtctcctcccagcggcctccggcgtcttgcccagcagctcaag

SEQ ID NO: 12043 - protein, 241 aa, Homo sapiens; identical to SEQ ID NO: 2011

SEQ ID NO: 12044 - DNA, 1697 bp, Homo sapiens
cgaatcggacagtgtagaaccattctctactgccttccttctgagaacagccttgtggtcagaagtggctgggatagcggagggccaggggacaacttcttaacacgttcctggaccctttgctctttgtagcctactgataactgcaaaggggagcttggaattatgttagtcagtccctgtgaatgggggagcttaaactaatggatgccttaaaaagcacccattcagaattgagttcagggtgacacccccagagcctatccagcttgacaggggagacctgtgggtaatgcacatgaaataatcttatcactccctcagatgacccagccatggttggtaattgctgagtagcaggaaggggtcagtgggaggtgctgggcgctgaggtgaagtaatgtgtatccattccaggggtcaccagtcgttggcacaccaagaagctgccccgcaagacccaccgaggcctgcgcaaggtggcctgtattggggcatggcatcctgctcgtgtagccttctctgtggcacgcgctgggcagaaaggctaccatcaccgcactgagatcaacaagaagatttataagattggccagggctaccttatcaaggacggcaagctgatcaagaacaatgcctccactgactatgacctatctgacaagagcatcaaccctctggtaagtaatgggtgttctgctctgtgaggccatcccaggcctcgtgcttttggggataggctgcttcctaggggctgctagcaggatcgttaactgaagccaacacaacacctagctgtgtcccttgtaagtggcatgttgtcatctgagtccactcgtcggggttggctggtgagaagtggggtctcaggctcagctgttcagtgatgaggcctggaatgtgcgctgggcacagcgcccgagacagactgcggaaccgttccttgttgccttccttctgagaacagccctgtggtcagggagggcctgaacctggaggggtcatctgcacgacaatcccctcctgggcctgtgctgatccgatgctcgttttccagggtggctttgtccactatggtgaagtgaccaatgactttgtcatgctgaaaggctgtgtggtgggaaccaagaagcgggtgctcaccctccgcaaggtgaggcaggtcctgacttgtcatgggggggctcttgtagagggaggatccaaggccacagacgctggtggccctgtggtgggagaggaaaggaaggagagggtgttggcagtcctttcacactggctttgaagtcctgagatgaggaaattcccagtctggccttgctgggctgtttgctgctttgagtgtgtcctcatctgccggatggtgggggaggctgaattgatcgtgtggcttcccagatgcaggggcgctgtgaacagtgctgaggaaagcctggctcctcgtaatcctaaatcccttcccctcttggcccatagtccttgctggtgcagacgaagcggcgggctctggagaagattgaccttaagttcattgacaccacctccaagtttggccatggccgcttccagaccatggaggagaagaaagcattcatgggaccactgaagaaagaccgaattgcaaaggaagaaggagcttaatgccaggaacagattttgcagttggtggggtctcaataaaagttattttccactga

SEQ ID NO: 12045 - protein, 103 aa, Homo sapiens
MRKFPVWPCWAVCCFECVLICRMVGEAELIVWLPRCRGAVNSAEESLAPRNPKSLPLLAHSPCWCRRSGGLWRRLTLSSLTPPPSLAMAASRPWRRRKHSWDH

SEQ ID NO: 12046 - DNA, 1690 bp, Homo sapiens
ggtgaacaagaaggaggtggtggaggctgtgaccattgtagagacaccacccatggtggttgtgggcattgtgggctacgtggaaacccctcgaggcctccggaccttcaagactgtctttgctgagcacatcagtgatgaatgcaagaggcgtttctataagaattggtaagggaggaggccatgcagtccctagcttgggagcttgggagctggagagcagggagcagcgtgtgcatggtttctcagctctgtagcaggcagggagctgctgtcttgggtttagtttgcctctcgaacagaaaaatacctgggatcagacttggccagccatctggtttcagccggaagctaacaccctcattctgagtccaggctagtgggtggtggctgaggacccagttggttgaggagtccaactagaaaccaggagaggtagcagaataattaaacccctataggggtggcaagggcctctggccctgggtggaatgtcccatttccttcatcactgagtgggcttccccagggcagaaaggtttgtcccggagcaagaattttgtttgaatgcgtgtaacttaaattaaccttgtggacctctgctcagctccgctcggctctgcccgatgagctccatccaggctccgcttgctggtggaaaaggctccttagaagccggcaatgagctccatccccacgcggtgccagtgtgccttccgctcacccctcggaggggtgatgaaggcctgcacctggtcccctccccaactctgctctgctcctgaaggcataaatctaagaagaaggcctttaccaagtactgcaagaaatggcaggatgaggatggcaagaagcagctggagaaggacttcagcagcatgaagaagtactgccaagtcatccgtgtcattgcccacacccagatgcgcctgcttcctctgcgccagaagaaggcccacctgatggagatccaggtgaacggaggcactgtggccgagaagctggactgggcccgcgagaggcttgagcagcaggtacctgtgaaccaagtgtttgggcaggatgagatgatcgacgtcatcggggtgaccaagggcaaaggctacaaaggggtcaccagtcgttggcacaccaagaagctgccccgcaagacccaccgaggcctgcgcaaggtggcctgtattggggcatggcatcctgctcgtgtagccttctctgtggcacgcgctgggcagaaaggctaccatcaccgcactgagatcaacaagaagatttataagattggccagggctaccttatcaaggacggcaagctgatcaagaacaatgcctccactgactatgacctatctgacaagagcatcaaccctctgggtggctttgtccactatggtgaagtgaccaatgactttgtcatgctgaaaggctgtgtggtgggaaccaagaagcgggtgctcaccctccgcaagtccttgctggtgcagacgaagcggcgggctctggagaagattgaccttaagttcattgacaccacctccaagtttggccatggccgcttccagaccatggaggagaagaaagcattcatgggaccactgaagaaagaccgaattgcaaaggaagaaggagcttaatgccaggaacagattttgcagttggtggggtctcaataaaagttattttccactga

SEQ ID NO: 12047 - protein, 251 aa, Homo sapiens
MKKYCQVIRVIAHTQMRLLPLRQKKAHLMEIQVNGGTVAEKLDWARERLEQQVPVNQVFGQDEMIDVIGVTKGKGYKGVTSRWHTKKLPRKTHRGLRKVACIGAWHPARVAFSVARAGQKGYHHRTEINKKIYKIGQGYLIKDGKLIKNNASTDYDLSDKSINPLGGFVHYGEVTNDFVMLKGCVVGTKKRVLTLRKSLLVQTKRRALEKIDLKFIDTTSKFGHGRFQTMEEKKAFMGPLKKDRIAKEEGA

SEQ ID NO: 12048 - DNA, 3157 bp, Homo sapiens
aggtgaacaagaaggaggtggtggaggctgtgaccattgtagagacaccacccatggtggttgtgggcattgtgggctacgtggaaacccctcgaggcctccggaccttcaagactgtctttgctgagcacatcagtgatgaatgcaagaggcgtttctataagaattgctccgctcggctctgcccgatgagctccatccaggctccgcttgctggtggaaaaggctccttagaagccggcaatgagctccatccccacgcggtgccagtgtgccttccgctcacccctcggaggggtgatgaaggcctgcacctggtcccctccccaactctgctctgctcctgaaggcataaatctaagaagaaggcctttaccaagtactgcaagaaatggcaggatgaggatggcaagaagcagctggagaaggacttcagcagcatgaagaagtactgccaagtcatccgtgtcattgcccacacccagatgcgcctgcttcctctgcgccagaagaaggcccacctgatggagatccaggtgaacggaggcactgtggccgagaagctggactgggcccgcgagaggcttgagcagcaggtacctgtgaaccaagtgtttgggcaggatgagatgatcgacgtcatcggggtgaccaagggcaaaggctacaaaggtgagctttgcggtggcttgagttgctgtgcaaacctgggggagaagtggtttcaggcccagctgttcgttgatgaggctcagagtgagcgctgggtacagcgcccgaatcggacagtgtagaaccattctctactgccttccttctgagaacagccttgtggtcagaagtggctgggatagcggagggccaggggacaacttcttaacacgttcctggaccctttgctctttgtagcctactgataactgcaaaggggagcttggaattatgttagtcagtccctgtgaatgggggagcttaaactaatggatgccttaaaaagcacccattcagaattgagttcagggtgacacccccagagcctatccagcttgacaggggagacctgtgggtaatgcacatgaaataatcttatcactccctcagatgacccagccatggttggtaattgctgagtagcaggaaggggtcagtgggaggtgctgggcgctgaggtgaagtaatgtgtatccattccaggggtcaccagtcgttggcacaccaagaagctgccccgcaagacccaccgaggcctgcgcaaggtggcctgtattggggcatggcatcctgctcgtgtagccttctctgtggcacgcgctgggcagaaaggctaccatcaccgcactgagatcaacaagaaggtgaggttctgagagtggctccctgggggtgggaagaggcccccgtgatggggagtggggtttctgtgcctgtcagtgctgcttcactgactgtagcttatgcatcacgtggacatcagtggcttgcttctcatggtcagttctggcccatcttgatgatttgtaaggtgccatcctgtagagtggctgtggtggggctgactggtgtggctggggatactagtcttattggtccctgatgccaccaccaggggggtgacaggcctgtgttgtacagcaggatctttagttttagcccagccgccttacagaaaggaacctggagggccagccagctttttgctctgaccttgggatacgctgtgactgggactgaggcctcagctgccttctagcgtgctttgcaggtcagcacactggcatgtctgggttatttgtccctaatgccccagccttacacccttcttgttcattcagatttataagattggccagggctaccttatcaaggacggcaagctgatcaagaacaatgcctccactgactatgacctatctgacaagagcatcaaccctctggtaagtaatgggtgttctgctctgtgaggccatcccaggcctcgtgcttttggggataggctgcttcctaggggctgctagcaggatcgttaactgaagccaacacaacacctagctgtgtcccttgtaagtggcatgttgtcatctgagtccactcgtcggggttggctggtgagaagtggggtctcaggctcagctgttcagtgatgaggcctggaatgtgcgctgggcacagcgcccgagacagactgcggaaccgttccttgttgccttccttctgagaacagccctgtggtcagggagggcctgaacctggaggggtcatctgcacgacaatcccctcctgggcctgtgctgatccgatgctcgttttccagggtggctttgtccactatggtgaagtgaccaatgactttgtcatgctgaaaggctgtgtggtgggaaccaagaagcgggtgctcaccctccgcaaggtgaggcaggtcctgacttgtcatgggggggctcttgtagagggaggatccaaggccacagacgctggtggccctgtggtgggagaggaaaggaaggagagggtgttggcagtcctttcacactggctttgaagtcctgagatgaggaaattcccagtctggccttgctgggctgtttgctgctttgagtgtgtcctcatctgccggatggtgggggaggctgaattgatcgtgtggcttcccagatgcaggggcgctgtgaacagtgctgaggaaagcctggctcctcgtaatcctaaatcccttcccctcttggcccatagtccttgctggtgcagacgaagcggcgggctctggagaagattgaccttaagttcattgacaccacctccaagtttggccatggccgcttccagaccatggaggagaagaaagcattcatggtgagcacctctgcctgcccccctcgctgggtgtggtggcttgggcagccgcctgcctttggctccagccggggtaggggtggtcttgatgccttaggcctctcttgtggctgtggagactggcccagagtcttggtctcctctagagtgggcatctgctgtcacctgtcatcttctacctctgaccactgcctctctccccacagggaccactgaagaaagaccgaattgcaaaggaagaaggagcttaatgccaggaacagattttgcagttggtggggtctcaataaaagttattttccactga

SEQ ID NO: 12049 - protein, 117 aa, Homo sapiens
MKKYCQVIRVIAHTQMRLLPLRQKKAHLMEIQVNGGTVAEKLDWARERLEQQVPVNQVFGQDEMIDVIGVTKGKGYKGELCGGLSCCANLGEKWFQAQLFVDEAQSERWVQRPNRTV

SEQ ID NO: 12050 - DNA, 2158 bp, Homo sapiens
aggtgaacaagaaggaggtggtggaggctgtgaccattgtagagacaccacccatggtggttgtgggcattgtgggctacgtggaaacccctcgaggcctccggaccttcaagactgtctttgctgagcacatcagtgatgaatgcaagaggcgtttctataagaattgctccgctcggctctgcccgatgagctccatccaggctccgcttgctggtggaaaaggctccttagaagccggcaatgagctccatccccacgcggtgccagtgtgccttccgctcacccctcggaggggtgatgaaggcctgcacctggtcccctccccaactctgctctgctcctgaaggcataaatctaagaagaaggcctttaccaagtactgcaagaaatggcaggatgaggatggcaagaagcagctggagaaggacttcagcagcatgaagaagtactgccaagtcatccgtgtcattgcccacacccagatgcgcctgcttcctctgcgccagaagaaggcccacctgatggagatccaggtgaacggaggcactgtggccgagaagctggactgggcccgcgagaggcttgagcagcaggtacctgtgaaccaagtgtttgggcaggatgagatgatcgacgtcatcggggtgaccaagggcaaaggctacaaaggggtcaccagtcgttggcacaccaagaagctgccccgcaagacccaccgaggcctgcgcaaggtggcctgtattggggcatggcatcctgctcgtgtagccttctctgtggcacgcgctgggcagaaaggctaccatcaccgcactgagatcaacaagaagatttataagattggccagggctaccttatcaaggacggcaagctgatcaagaacaatgcctccactgactatgacctatctgacaagagcatcaaccctctggtaagtaatgggtgttctgctctgtgaggccatcccaggcctcgtgcttttggggataggctgcttcctaggggctgctagcaggatcgttaactgaagccaacacaacacctagctgtgtcccttgtaagtggcatgttgtcatctgagtccactcgtcggggttggctggtgagaagtggggtctcaggctcagctgttcagtgatgaggcctggaatgtgcgctgggcacagcgcccgagacagactgcggaaccgttccttgttgccttccttctgagaacagccctgtggtcagggagggcctgaacctggaggggtcatctgcacgacaatcccctcctgggcctgtgctgatccgatgctcgttttccagggtggctttgtccactatggtgaagtgaccaatgactttgtcatgctgaaaggctgtgtggtgggaaccaagaagcgggtgctcaccctccgcaaggtgaggcaggtcctgacttgtcatgggggggctcttgtagagggaggatccaaggccacagacgctggtggccctgtggtgggagaggaaaggaaggagagggtgttggcagtcctttcacactggctttgaagtcctgagatgaggaaattcccagtctggccttgctgggctgtttgctgctttgagtgtgtcctcatctgccggatggtgggggaggctgaattgatcgtgtggcttcccagatgcaggggcgctgtgaacagtgctgaggaaagcctggctcctcgtaatcctaaatcccttcccctcttggcccatagtccttgctggtgcagacgaagcggcgggctctggagaagattgaccttaagttcattgacaccacctccaagtttggccatggccgcttccagaccatggaggagaagaaagcattcatggtgagcacctctgcctgcccccctcgctgggtgtggtggcttgggcagccgcctgcctttggctccagccggggtaggggtggtcttgatgccttaggcctctcttgtggctgtggagactggcccagagtcttggtctcctctagagtgggcatctgctgtcacctgtcatcttctacctctgaccactgcctctctccccacagggaccactgaagaaagaccgaattgcaaaggaagaaggagcttaatgccaggaacagattttgcagttggtggggtctcaataaaagttattttccactga

SEQ ID NO: 12051 - protein, 173 aa, Homo sapiens
MKKYCQVIRVIAHTQMRLLPLRQKKAHLMEIQVNGGTVAEKLDWARERLEQQVPVNQVFGQDEMIDVIGVTKGKGYKGVTSRWHTKKLPRKTHRGLRKVACIGAWHPARVAFSVARAGQKGYHHRTEINKKIYKIGQGYLIKDGKLIKNNASTDYDLSDKSINPLVSNGCSAL

SEQ ID NO: 12052 - DNA, 1537 bp, Homo sapiens
ggtgaacaagaaggaggtggtggaggctgtgaccattgtagagacaccacccatggtggttgtgggcattgtgggctacgtggaaacccctcgaggcctccggaccttcaagactgtctttgctgagcacatcagtgatgaatgcaagaggcgtttctataagaattggtaagggaggaggccatgcagtccctagcttgggagcttgggagctggagagcagggagcagcgtgtgcatggtttctcagctctgtagcaggcagggagctgctgtcttgggtttagtttgcctctcgaacagaaaaatacctgggatcagacttggccagccatctggtttcagccggaagctaacaccctcattctgagtccaggctagtgggtggtggctgaggacccagttggttgaggagtccaactagaaaccaggagaggtagcagaataattaaacccctataggggtggcaagggcctctggccctgggtggaatgtcccatttccttcatcactgagtgggcttccccagggcagaaaggtttgtcccggagcaagaattttgtttgaatgcgtgtaacttaaattaaccttgtggacctctgctcagctccgctcggctctgcccgatgagctccatccaggctccgcttgctggtggaaaaggctccttagaagccggcaatgagctccatccccacgcggtgccagtgtgccttccgctcacccctcggaggggtgatgaaggcctgcacctggtcccctccccaactctgctctgctcctgaaggcataaatctaagaagaaggcctttaccaagtactgcaagaaatggcaggatgaggatggcaagaagcagctggagaaggacttcagcagcatgaagaagtactgccaagtcatccgtgtcattgcccacacccagatgcgcctgcttcctctgcgccagaagaaggcccacctgatggagatccaggtgaacggaggcactgtggccgagaagctggactgggcccgcgagaggcttgagcagcaggtacctgtgaaccaagtgtttgggcaggatgagatgatcgacgtcatcggggtgaccaagggcaaaggctacaaaggggtcaccagtcgttggcacaccaagaagctgccccgcaagacccaccgaggcctgcgcaaggtggcctgtattggggcatggcatcctgctcgtgtagccttctctgtggcacgcgctgggcagaaaggctaccatcaccgcactgagatcaacaagaagatttataagattggccagggctaccttatcaaggacggcaagctgatcaagaacaatgcctccactgactatgacctatctgacaagagcatcaaccctctgggtggctttgtccactatggtgaagtgaccaatgactttgtcatgctgaaaggctgtgtggtgggaaccaagaagcgggtgctcaccctcctcctgagatgagacgaagcggcgggctctggagaagattgaccttaagttcattgacaccacctccaagtttg

SEQ ID NO: 12053 - protein, 198 aa, Homo sapiens
MKKYCQVIRVIAHTQMRLLPLRQKKAHLMEIQVNGGTVAEKLDWARERLEQQVPVNQVFGQDEMIDVIGVTKGKGYKGVTSRWHTKKLPRKTHRGLRKVACIGAWHPARVAFSVARAGQKGYHHRTEINKKIYKIGQGYLIKDGKLIKNNASTDYDLSDKSINPLGGFVHYGEVTNDFVMLKGCVVGTKKRVLTLLLR

SEQ ID NO: 12054 - DNA, 1155 bp, Homo sapiens
ctctaccggcgggatttgatggcgtgatggtatgtgttgtaatggcggccgtttcattgtcaccggcgtcggcacggctgaatccgcgacgcatcgccgccatcccgtcttggccggcgccgggggtttgctttaggggcacgggcgacccagcggggacttcagtctggcctattttctggaaagtcgagaggcttgtgaagagcttccctaaggatgacccgtccaagccggtgaacaagaaggaggtggtggaggctgtgaccattgtagagacaccacccatggtggttgtgggcattgtgggctacgtggaaacccctcgaggcctccggaccttcaagactgtctttgctgagcacatcagtgatgaatgcaagaggcgtttctataagaattggtaagggaggaggccatgcagtccctagcttgggagcttgggagctggagagcagggagcagcgtgtgcatggtttctcagctctgtagcaggcagggagctgctgtcttgggtttagtttgcctctcgaacagaaaaatacctgggatcagacttggccagccatctggtttcagccggaagctaacaccctcattctgagtccaggctagtgggtggtggctgaggacccagttggttgaggagtccaactagaaaccaggagaggtagcagaataattaaacccctataggggtggcaagggcctctggccctgggtggaatgtcccatttccttcatcactgagtgggcttccccagggcagaaaggtttgtcccggagcaagaattttgtttgaatgcgtgtaacttaaattaaccttgtggacctctgctcagctccgctcggctctgcccgatgagctccatccaggctccgcttgctggtggaaaaggctccttagaagccggcaatgagctccatccccacgcggtgccagtgtgccttccgctcacccctcggaggggtgatgaaggcctgcacctggtcccctccccaactctgctctgctcctgaaggcataaatctaagaagaaggcctttaccaagtactgcaagaaatggcaggatgaggatggcaagaagcagctggagaaggacttcagcagcatgaagaagtactgccaagtcatccgtgtcattgcccacacccag

SEQ ID NO: 12055 - protein, 125 aa, Homo sapiens
MVCVVMAAVSLSPASARLNPRRIAAIPSWPAPGVCFRGTGDPAGTSVWPIFWKVERLVKSFPKDDPSKPVNKKEVVEAVTIVETPPMVVVGIVGYVETPRGLRTFKTVFAEHISDECKRRFYKNW

SEQ ID NO: 12056 - DNA, 881 bp, Homo sapiens
aggggagggggcgggggcgccgcgcacgcgcacgggccggcggcgcgcgccgagcggggggcaccgcgcgggtgcagccacgatggaagggggtgcgtacggagcgggcaaagccgggggcgccttcgacccctacaccctggtccggcagccgcacaccatcctgcgcgtcgtgtcttggctgttctccatagtggtgttcggctccatcgtgaacgagggctacctcaacagcgcctccgagggggaggagttctgcatctacaaccgcaaccccaacgcctgcagctatggcgtggccgtgggcgtgctcgccttcctcacctgcctgctgtacctggccctggacgtgtacttcccgcagatcagcagcgtcaaggaccgcaagaaagccgtcctgtccgacatcggtgtctcggccttctgggctttcctctggttcgtgggattctgctacctggccaaccagtggcaggtctccaagcccaaggacaacccactgaacgaagggacggacgcagcccgggccgccatcgccttctcctttttctccatcttcacctggagcctgaccgcagccctggccgtgcggagattcaaggacctaagcttccaggaggagtacagcacactgttccctgcctcggcacagccgtaggcctccccggcttgcagaggccggcagccctgtatcacccctggcagtgaggtggcaggagcagcctagtgccagaaatgtccaagatgccagggcatgcagggcagtggaaggctggcttgaggaaccaattcaggttctccactgactcattcattccttcaccgcctccttcattgattcttcatgcgttcattcattcagtaaacatttattgagcagc

SEQ ID NO: 12057 - protein, 191 aa, Homo sapiens; identical to SEQ ID NO: 2025

SEQ ID NO: 12058 - DNA, 1348 bp, Homo sapiens
aggggagggggcgggggcgccgcgcacgcgcacgggccggcggcgcgcgccgagcggggggcaccgcgcgggtgcagccacgatggaagggggtgcgtacggagcgggcaaagccgggggcgccttcgacccctacaccctggtccggcagccgcacaccatcctgcgcgtcgtgtcttggctgttctccatagtggtgttcggctccatcgtgaacgagggctacctcaacagcgcctccgagggggaggagttctgcatctacaaccgcaaccccaacgcctgcagctatggcgtggccgtgggcgtgctcgccttcctcacctgcctgctgtacctggccctggacgtgtacttcccgcagatcagcagcgtcaaggaccgcaagaaagccgtcctgtccgacatcggtgtctcggccttctgggctttcctctggttcgtgggattctgctacctggccaaccagtggcaggtctccaagcccaaggacaacccactgaacgaagggacggacgcagcccgggccgccatcgccttctcctttttctccatcttcacctggagcctgaccgcagccctggccgtgcggagattcaaggacctaagcttccaggaggagtacagcacactgttccctgcctcggcacagccgtaggcctccccggcttgcagaggccggcagccctgtatcacccctggcagtgaggtggcaggagcagcctagtgccagaaatgtccaagatgccagggcatgcagggcagtggaaggctggcttgaggaaccaattcaggttctccactgactcattcattccttcaccgcctccttcattgattcttcatgcgttcattcattcagtaaacatttattgagcagctgttttgtgcctagtgatgaattaggtggggtccttggctccaggagcccacaggctggggaggagaaaacaaacacatcaatatctcttccaaatggacagccgtggacagttaccaggtaggtagcggccccatacatgggctgcctagaggcgttcatggtccccattgctgagctgtgggtgcagagcaatagcctctcccttcacagcggtgtgaagagtgacctcactgtccttagggttagcatcctggccgaggatgtcacagggctcctggtctggctctgtcctcatgtgctatgtgaccctgacaaacccgtgcacctctctcagcctcagtccacttacctgaactgaggggtgataatggaccaacctctcaaggctgttgtgccaatgaaacaaaggccagcccagggcttagcacaagcatgctcaataaatgtaagctcttttgttcattc

SEQ ID NO: 12059 - protein, 191 aa, Homo sapiens; identical to SEQ ID NO: 2025

SEQ ID NO: 12060 - DNA, 2026 bp, Homo sapiens
aggggagggggcgggggcgccgcgcacgcgcacgggccggcggcgcgcgccgagcggggggcaccgcgcgggtgcagccacgatggaagggggtgcgtacggagcgggcaaagccgggggcgccttcgacccctacaccctggtccggcagccgcacaccatcctgcgcgtcgtgtcttggctgttctccatagtggtgttcggctccatcgtgaacgagggctacctcaacagcgcctccgagggggaggagttctgcatctacaaccgcaaccccaacgcctgcagctatggcgtggccgtgggcgtgctcgccttcctcacctgcctgctgtacctggccctggacgtgtacttcccgcagatcagcagcgtcaaggaccgcaagaaagccgtcctgtccgacatcggtgtctcggccttctgggctttcctctggttcgtgggattctgctacctggccaaccagtggcaggtctccaagcccaaggacaacccactgaacgaagggacggacgcagcccgggccgccatcgccttctcctttttctccatcttcacctggagcctgaccgcagccctggccgtgcggagattcaaggacctaagcttccaggaggagtacagcacactgttccctgcctcggcacagccgtaggcctccccggcttgcagaggccggcagccctgtatcacccctggcagtgaggtggcaggagcagcctagtgccagaaatgtccaagatgccagggcatgcagggcagtggaaggctggcttgaggaaccaattcaggttctccactgactcattcattccttcaccgcctccttcattgattcttcatgcgttcattcattcagtaaacatttattgagcagctgttttgtgcctagtgatgaattaggtggggtccttggctccaggagcccacaggctggggaggagaaaacaaacacatcaatatctcttccaaatggacagccgtggacagttaccaggtaggtagcggccccatacatgggctgcctagaggcgttcatggtccccattgctgagctgtgggtgcagagcaatagcctctcccttcacagcggtgtgaagagtgacctcactgtccttagggttagcatcctggccgaggatgtcacagggctcctggtctggctctgtcctcatgtgctatgtgaccctgacaaacccgtgcacctctctcagcctcagtccacttacctgaactgaggggtgataatggaccaacctctcaaggctgttgtgccaatgaaacaaaggccagcccagggcttagcacaagcatgctcaataaatgtaagctcttttgttcattcattcattcattcattcattcttctctccagagagtcaggggcacctccagaatctctactttaagagtaattctcatgtgatgaatccttgttcctccaaaggattttggtctctggttctacacaggtttcctgcttgaggcccccagctgcctgggcaggaactcacccattcctccactctctgctggagttgaggaggctggtggagcacagacagttcccccaaagcaatgcctcaaccctgcgagggcctgagcacatcgagagtgagcttcctggcactggaggcatcccagtgcagatgcagactgcctgctgcacgctggagatgctgcagagagagcacctacactgagaaagtggggccaggggaccaccaggtccctgggctctcagtagaactcccatcctccctctgcagcccaggccagcgggggcccaggcctctcctttgctcctgtcttgtggccccttaaactggttgcccaaatgaagctttgacttagtgagggcagagagctgaacacagagacagtatgagtgcctacagccagaggcatctccctagaaggatcagtaggggtcatctgctccagccctctgcctctgtacaggaaaccagcctggatagtagagccagggagctcggggagaaccgcgtctacagacattgct

SEQ ID NO: 12061 - protein, 191 aa, Homo sapiens; identical to SEQ ID NO: 2025

SEQ ID NO: 12062 - DNA, 273 bp, Homo sapiens
gggggcgggggcgccgcgcacgcgcacgggccggcggcgcgcgccgagcggggggcaccgcgcgggtgcagccacgatggaagggggtgcgtacggagcgggcaaagccgggggcgccttcgacccctacaccctggtccggcagccgcacaccatcctgcgcgtcgtgtcttgggctggagtgcagtggcatgatcacggttcactacaacctccacctcctgggctcaagagatcctccccctcatcttccctggtacctgagactacagg

SEQ ID NO: 12063 - protein, 64 aa, Homo sapiens
MEGGAYGAGKAGGAFDPYTLVRQPHTILRVVSWAGVQWHDHGSLQPPPPGLKRSSPSSSLVPET

SEQ ID NO: 12064 - DNA, 497 bp, Homo sapiens
cgcgcacgcgcacgggccggcggcgcgcgccgagcggggggcaccgcgcgggtgcagccacgatggaagggggtgcgtacggagcgggcaaagccgggggcgccttcgacccctacaccctggtccggcagccgcacaccatcctgcgcgtcgtgtcttggctgttctccatagtggtgttcggctccatcgtgaacgagggctacctcaacagcgcctccgagggggaggagttctgcatctacaaccgcaaccccaacgcctgcagctatggcgtggccgtgggcgtgctcgccttcctcacctgcctgctgtacctggccctggacgtgtacttcccgcagatcagcagcgtcaaggaccgcaagaaagccgtcctgtccgacatcggtgtctcggcatgggagatgcactcttgaatgtccctctgttcctcggcttccccattttctccccactcaccctctcccccatgtgtggcactgcctattctgccc

SEQ ID NO: 12065 - protein, 118 aa, Homo sapiens
MEGGAYGAGKAGGAFDPYTLVRQPHTILRVVSWLFSIVVFGSIVNEGYLNSASEGEEFCIYNRNPNACSYGVAVGVLAFLTCLLYLALDVYFPQISSVKDRKKAVLSDIGVSAWEMHS

SEQ ID NO: 12066 - DNA, 4437 bp, Homo sapiens
cgcgcacgcgcacgggccggcggcgcgcgccgagcggggggcaccgcgcgggtgcagccacgatggaagggggtgcgtacggagcgggcaaagccgggggcgccttcgacccctacaccctggtccggcagccgcacaccatcctgcgcgtcgtgtcttggctgttctccatagtggtgttcggctccatcgtgaacgagggctacctcaacagcgcctccgagggggaggagttctgcatctacaaccgcaaccccaacgcctgcagctatggcgtggccgtgggcgtgctcgccttcctcacctgcctgctgtacctggccctggacgtgtacttcccgcagatcagcagcgtcaaggaccgcaagaaagccgtcctgtccgacatcggtgtctcggccttctgggctttcctctggttcgtgggattctgctacctggccaaccagtggcaggtctccaagcccaaggacaacccactgaacgaagggacggacgcagcccgggccgccatcgccttctcctttttctccatcttcacctgggcgggccaggctgtgctggccttccagcggtaccagattggcgccgactcggccctcttctcccaggactacatggaccccagccaggactccagcatgccttacgcgccctacgtggagcccactgggccggatcccgccggtatgggcggcacctaccagcagccggccaacaccttcgacaccgagccccagggctaccagtcgcagggctactgagccacagtgaccgcctgcccccgcccctccccatctgtcccctctctccacacccagcccctgctcctgcccaggctgccctgcccagcgcctcatcagcctctgccttgtcccactgaggtccagggtagctcggggcaggggtggggcagtccagtgttggggactgtctacgtatgtgcaagtatatcccagggcatgtgccccgcaggggcctagagggtgggggccaggggtatttgcattcatacattgtgtcatcaagcattccttgagcgcctactgggcatccggcctgtgctgggcatgggtggtgacattggcagaaatggccactggaaaggggagcgatgagctgtggaggaagccctggtggtaccagaggccagaatggtgggaaagacagatccagataatgctgggaagtgtggctacaccgtggcttggtcatagggtgagtgtaaacacccacaggacactgggggctgtcaccctgctctggcagtcctgctaagagtgtcagggccgtctccattttatggttgaggaaactgaggtctagagaggtcaagattacttgcccagaatcactcaggcagctagtgatagaggtggggccaagcccaggctgcccgactgcagaccacgtgctcttccctggccacccacctcctaccatccccacgcttggggcttccctgctcagtgttactgtcattctgggaggccttggggccctcagccccttgagacaccctgattctgctgcatgccaagggcctgttctgccccagctgttcctcctcccctggggacagccccacctccgggtccctccacccacatccccctggtcctacccctggcccttggcctcctccaagagggctcaccccgggtgctgctctgtgctctgcgtgtcccacagacgcttgttccagggggctccagcaaaccccttcgtggtctctcaaaggactgatcactgtccttgcctctaggaggggtcactaagcccttacctagggctgggtggacaacaaggcacagatgagggtgtgactggcccgaggtcacggtgagtgagtggcaaagctggccctgacgcctgggtttcttggccccagctgcccagcaggtgcctcgattccctgcccttgtgacctcccaggaaacagaactgatctgggacactatgtcacctctcctctcatctggggtcagtcagggttcgggggctgcagcagccaagcgcatgagaggtgtttccttggccttccagaaggcccactgtggagccagcctccctatgggaggcagagcggcaaggacagggctttggaatcagccaggtcggctcctgggctgtggccgtggagagacactgcccccaggatgacacaggcaagagcccctgaggcatgggaggcccagggaagaccatgggctgtaggggagagtgtggcaggtgacccaaaggcccaaagagggccgtggggcctgaggaggtcataatctcttctgagtgggggcaggtcgattcttgcacaaggtgggctcttcactgagccataagggacagggaggtatgggagagcgctgggggcccatccccctgtccacccagtgtccactggcctgtccttcagggagcagagcagagcaggtggtggacgggcccagtgctgggtgttttcaccaccatccccccatcccccatctaagaatcctaagaggcaggcgatccctcacctgcttactcactcagcagttacccggcccctgtgctggagataccaagggcatgggtggtccctgcttcgatggccccaaagctgggccagagttaagggaaagaggaggaagtcctaagcagagaagtagcaccattatccccatttaacagaagggaaactgaggctcggcaagcataggcgagttggcagtggaacacggatctaaactcaggtgtgtccaagtcctcccaaaggacagcagtgatggagaggaccccagccagctgtgtgacagctggttgttgctgacttcattttccaatccggagaaggggctctgtccacagtcccccgccgccaggtggcccacatgggaccagcatgggggcaggttatctgttggcctgaagagtgaaacctgtaccaggccaaaggtgagggcgtgagtgagggcaggagtgtttatggcagagtgaagttctgtgcccaccacaagaggctgtgagatgttctgaccctcacccactgtccaccaaaagcctctcctgctgatgggcactaggagacctcagggtactgcccatctgtttctcctcgggtgccagccagctgctggtgatcctcagccggagggcagggtaccaggtaagcttaactccatcttgggtgtttgtgacaggccctgcctgccaccctaggcagggaaagctgtcaagactcctgccaggaatggggggtgctgagtcatctcacgaagaatccctcactcttcccgggttcagcccagaagcccttccaggcatgatcttccccatcaggctgggctctggcagggacctgcccaggatggagatgagagagggtgagagatggagggcgagatttggatgggacccagggctcctgactctgccctggaaggttcatggggaaactcgctccttctgttggcagaggacagcccctggggaaccccaggcccaactctgtccggtatcccttttcctcccagctgccctcccctacttctcccttgctcccaaagctttccttggagaagggccctcctgcagctggaccctgcagggtggctccctcctccccatcaagcacaagagagggcccaggaaaaaaggtttcacataagtgtagagtcgcaaggacgcttagagtcggcagagtctggggtagggagacagcgacttgtccaaggtcaagcacagagggagaggttcaggagtcaggtcttctgccttctgagttggctcatcctgggcagtcacagactgtcctgcctgcacggctcctatccacctgggggtgtcgcagttgaggggctaattcccaggggactgacgttagttccctactccatccttccctggtgattcttgatcttcaaagcctcggggatcccaggtttccccatgtaactgagacaccctgcctgttagccctgggagacccctaaccttggcccaagacccctttgattctctaaggagcacgaaagggggaatgcccctcccaggagtttatgggagaagggactgggccggctgcctcccagcgatgcacttgacctgacactccccatgtcctggtgcgcacagcccttgtcggtgccccggcccctcccgcagcgttactgcctgtgtatagtataaatatatatattttctatatataagatgtataatataaggctccacaaatatatctgtgtgtgtgtgtgcgtgtgtgtgcggtgaagggcggtccccatcctgggcccccactctagacccccccaccacctggttaagtctcgagtgaatccagtggccccgtggcaccctcctttatgacatccatccatctgtggtgaaccaagtgaaggtggtgacttctggtgacatagtaataaagtgaagactcagaacccaccagcgattgca

SEQ ID NO: 12067 - protein, 233 aa, Homo sapiens; identical to SEQ ID NO: 2023

SEQ ID NO: 12068 - DNA, 930 bp, Homo sapiens
gggcaccgcgcgggtgcagccacgatggaagggggtgcgtacggagcgggcaaagccgggggcgccttcgacccctacaccctggtccggcagccgcacaccatcctgcgcgtcgtgtcttggctgttctccatagtggtgttcggctccatcgtgaacgagggctacctcaacagcgcctccgagggggaggagttctgcatctacaaccgcaaccccaacgcctgcagctatggcgtggccgtgggcgtgctcgccttcctcacctgcctgctgtacctggccctggacgtgtacttcccgcagatcagcagcgtcaaggaccgcaagaaagccgtcctgtccgacatcggtgtctcgggtgagccccacccagcaggtaccccctgcacagagtctacagagggctgtcccggccataggaggcggctgccacccttcttcccatgtttcagatgaggaaatgagccttctgggctttcctctggttcgtgggattctgctacctggccaaccagtggcaggtctccaagcccaaggacaacccactgaacgaagggacggacgcagcccgggccgccatcgccttctcctttttctccatcttcacctggagcctgaccgcagccctggccgtgcggagattcaaggacctaagcttccaggaggagtacagcacactgttccctgcctcggcacagccgtaggcctccccggcttgcagaggccggcagccctgtatcacccctggcagtgaggtggcaggagcagcctagtgccagaaatgtccaagatgccagggcatgcagggcagtggaaggctggcttgaggaaccaattcaggttctccactgactcattcattccttcaccgcctccttcattgattcttcatgcgttcattcattcagtaaacatttattgagcagc

SEQ ID NO: 12069 - protein, 174 aa, Homo sapiens
MAWPWACSPSSPACCTWPWTCTSRRSAASRTARKPSCPTSVSRVSPTQQVPPAQSLQRAVPAIGGGCHPSSHVSDEEMSLLGFPLVRGILLPGQPVAGLQAQGQPTERRDGRSPGRHRLLLFLHLHLEPDRSPGRAEIQGPKLPGGVQHTVPCLGTAVGLPGLQRPAALYHPWQ

SEQ ID NO: 12070 - DNA, 1397 bp, Homo sapiens
gggcaccgcgcgggtgcagccacgatggaagggggtgcgtacggagcgggcaaagccgggggcgccttcgacccctacaccctggtccggcagccgcacaccatcctgcgcgtcgtgtcttggctgttctccatagtggtgttcggctccatcgtgaacgagggctacctcaacagcgcctccgagggggaggagttctgcatctacaaccgcaaccccaacgcctgcagctatggcgtggccgtgggcgtgctcgccttcctcacctgcctgctgtacctggccctggacgtgtacttcccgcagatcagcagcgtcaaggaccgcaagaaagccgtcctgtccgacatcggtgtctcgggtgagccccacccagcaggtaccccctgcacagagtctacagagggctgtcccggccataggaggcggctgccacccttcttcccatgtttcagatgaggaaatgagccttctgggctttcctctggttcgtgggattctgctacctggccaaccagtggcaggtctccaagcccaaggacaacccactgaacgaagggacggacgcagcccgggccgccatcgccttctcctttttctccatcttcacctggagcctgaccgcagccctggccgtgcggagattcaaggacctaagcttccaggaggagtacagcacactgttccctgcctcggcacagccgtaggcctccccggcttgcagaggccggcagccctgtatcacccctggcagtgaggtggcaggagcagcctagtgccagaaatgtccaagatgccagggcatgcagggcagtggaaggctggcttgaggaaccaattcaggttctccactgactcattcattccttcaccgcctccttcattgattcttcatgcgttcattcattcagtaaacatttattgagcagctgttttgtgcctagtgatgaattaggtggggtccttggctccaggagcccacaggctggggaggagaaaacaaacacatcaatatctcttccaaatggacagccgtggacagttaccaggtaggtagcggccccatacatgggctgcctagaggcgttcatggtccccattgctgagctgtgggtgcagagcaatagcctctcccttcacagcggtgtgaagagtgacctcactgtccttagggttagcatcctggccgaggatgtcacagggctcctggtctggctctgtcctcatgtgctatgtgaccctgacaaacccgtgcacctctctcagcctcagtccacttacctgaactgaggggtgataatggaccaacctctcaaggctgttgtgccaatgaaacaaaggccagcccagggcttagcacaagcatgctcaataaatgtaagctcttttgttcattc

SEQ ID NO: 12071 - protein, 174 aa, Homo sapiens; identical to SEQ ID NO: 12069

SEQ ID NO: 12072 - DNA, 2075 bp, Homo sapiens
gggcaccgcgcgggtgcagccacgatggaagggggtgcgtacggagcgggcaaagccgggggcgccttcgacccctacaccctggtccggcagccgcacaccatcctgcgcgtcgtgtcttggctgttctccatagtggtgttcggctccatcgtgaacgagggctacctcaacagcgcctccgagggggaggagttctgcatctacaaccgcaaccccaacgcctgcagctatggcgtggccgtgggcgtgctcgccttcctcacctgcctgctgtacctggccctggacgtgtacttcccgcagatcagcagcgtcaaggaccgcaagaaagccgtcctgtccgacatcggtgtctcgggtgagccccacccagcaggtaccccctgcacagagtctacagagggctgtcccggccataggaggcggctgccacccttcttcccatgtttcagatgaggaaatgagccttctgggctttcctctggttcgtgggattctgctacctggccaaccagtggcaggtctccaagcccaaggacaacccactgaacgaagggacggacgcagcccgggccgccatcgccttctcctttttctccatcttcacctggagcctgaccgcagccctggccgtgcggagattcaaggacctaagcttccaggaggagtacagcacactgttccctgcctcggcacagccgtaggcctccccggcttgcagaggccggcagccctgtatcacccctggcagtgaggtggcaggagcagcctagtgccagaaatgtccaagatgccagggcatgcagggcagtggaaggctggcttgaggaaccaattcaggttctccactgactcattcattccttcaccgcctccttcattgattcttcatgcgttcattcattcagtaaacatttattgagcagctgttttgtgcctagtgatgaattaggtggggtccttggctccaggagcccacaggctggggaggagaaaacaaacacatcaatatctcttccaaatggacagccgtggacagttaccaggtaggtagcggccccatacatgggctgcctagaggcgttcatggtccccattgctgagctgtgggtgcagagcaatagcctctcccttcacagcggtgtgaagagtgacctcactgtccttagggttagcatcctggccgaggatgtcacagggctcctggtctggctctgtcctcatgtgctatgtgaccctgacaaacccgtgcacctctctcagcctcagtccacttacctgaactgaggggtgataatggaccaacctctcaaggctgttgtgccaatgaaacaaaggccagcccagggcttagcacaagcatgctcaataaatgtaagctcttttgttcattcattcattcattcattcattcttctctccagagagtcaggggcacctccagaatctctactttaagagtaattctcatgtgatgaatccttgttcctccaaaggattttggtctctggttctacacaggtttcctgcttgaggcccccagctgcctgggcaggaactcacccattcctccactctctgctggagttgaggaggctggtggagcacagacagttcccccaaagcaatgcctcaaccctgcgagggcctgagcacatcgagagtgagcttcctggcactggaggcatcccagtgcagatgcagactgcctgctgcacgctggagatgctgcagagagagcacctacactgagaaagtggggccaggggaccaccaggtccctgggctctcagtagaactcccatcctccctctgcagcccaggccagcgggggcccaggcctctcctttgctcctgtcttgtggccccttaaactggttgcccaaatgaagctttgacttagtgagggcagagagctgaacacagagacagtatgagtgcctacagccagaggcatctccctagaaggatcagtaggggtcatctgctccagccctctgcctctgtacaggaaaccagcctggatagtagagccagggagctcggggagaaccgcgtctacagacattgct

SEQ ID NO: 12073 - protein, 174 aa, Homo sapiens; identical to SEQ ID NO: 12069

SEQ ID NO: 12074 - DNA, 5128 bp, Homo sapiens
ccacgatggaagggggtgcgtacggagcgggcaaagccgggggcgccttcgacccctacaccctggtccggcagccgcacaccatcctgcgcgtcgtgtcttggctgttctccatagtggtgttcggctccatcgtgaacgagggctacctcaacagcgcctccgagggggaggagttctgcatctacaaccgcaaccccaacgcctgcagctatggcgtggccgtgggcgtgctcgccttcctcacctgcctgctgtacctggccctggacgtgtacttcccgcagatcagcagcgtcaaggaccgcaagaaagccgtcctgtccgacatcggtgtctcgggtgagccccacccagcaggtaccccctgcacagagtctacagagggctgtcccggccataggaggcggctgccacccttcttcccatgtttcagatgaggaaatgaggtgcaggcgggtgaagggatggactcagggtcacatggctggcagcaggaaggatgggaccaggacagggcctgggaccccaaaataacccatgctgcccacaggcaggggagcgtggatgggattctagttccttctagtctaagggacccatggatggcactgggcatgtgccagcccccatgggttggcccgtgtttcagtggcctcttctgtgccacctccctggggcagcctcatgaggactaagcaaggcggtgactgggtgcccagtgcacagcaggggccctggagcctcagcctccccacgcctcccagccagaccttggcaggaccagggcctggacctgtggagccaacctgacctgctgccctttgcccttcagaagcagcctttggcagaggcaccctgacctctgctccgtgacttccaggaatctgattggtggatgctctcagtcaggggtccgaacccgaggcttcagcctcgctgttctgaggcttgggtccccggactgggaccaacccctagttctaagcctggagctctcaggataagccaggctgaaggcaggtcatgaggtctagttttagaaggaactagaactaaatgaatggttctcaaacttccacagagcctcagggttccctggcagtgcctctgggaggtgggctgggccccaggtgggcaccccacctgcttggcagatgcacgccttgtcctgagcaggtctgggcttctctggggagaccttggcactcacaggagattgcgtggctatgaggctcccactgctgacgcccccaggctcggctctcagtgggcccctcgctaaacctggggctctgtggggtcgcagcacgttagaagtcgaagcccagacccacccagccaagctgccatccttgccccagcctcgtcctccttcccatacctcatttgtctggcagcctgagggttggggtcttcctgcctgcagagttgcaggcatcaggggtggaccgggggggcccacgtcagcggtgtggctggacatgggggtttggcagaggctgcagaaatgcggcctgagttgattaccttctttctctgtctctccctccatcctcccctctcactgcccgtggctctcctctgactggccctgaccctgccctgtctgtggcctcctcccccctgcatctggctggcttccctcttctcgcctgcatcttctcttggctcccctctctcttcccctaccccctttgcctgtccctttgggggtgggggagcatgggagatgcactcttgaatgtccctctgttcctcggcttccccattttctccccactcaccctctcccccatgtgtggcactgcctattctgcccggtcctgggaccccccagccttctgggctttcctctggttcgtgggattctgctacctggccaaccagtggcaggtctccaagcccaaggacaacccactgaacgaagggacggacgcagcccgggccgccatcgccttctcctttttctccatcttcacctgggagcagcagccaagctggacagatgacctgcctctctgccacctctctggggttggctcagcctccaaccgcagctactctgctgatggcaagggcactgagagccacccgccagaggacagctggctcaagttcaggagtgagaacaactgcttcctgtatggggtcttcaacggctatgatggcaaccgagtgaccaacttcgtggcccagcggctgtccgcagagctcctgctgggccagctgaatgccgagcacgccgaggccgatgtgcggcgtgtgctgctgcaggccttcgatgtggtggagaggagcttcctggagtccattgacgacgccttggctgagaaggcaagcctccagtcgcaattgccagagggagtccctcagcaccagctgcctcctcagtatcagaagatccttgagagactcaagacgttagagagggaaatttcgggaggggccatggccgttgtggcggtccttctcaacaacaagctctacgtcgccaatgtcggtacaaaccgtgcacttttatgcaaatcgacagtggatgggttgcaggtgacacagctgaacgtggaccacaccacagagaacgaggatgagctcttccgtctttcgcagctgggcttggatgctggaaagatcaagcaggtggggatcatctgtgggcaggagagcacccggcggatcggggattacaaggttaaatatggctacacggacattgaccttctcagcgctgccaagtccaaaccaatcatcgcagagccagaaatccatggggcacagccgctggatggggtgacgggcttcttggtgctgatgtcggaggggttgtacaaggccctagaggcagcccatgggcctgggcaggccaaccaggagattgctgcgatgattgacactgagtttgccaagcagacctccctggacgcagtggcccaggccgtcgtggaccgggtgaagcgcatccacagcgacaccttcgccagtggtggggagcgtgccaggttctgcccccggcacgaggacatgaccctgctagtgaggaactttggctacccgctgggcgaaatgagccagcccacaccgagcccagccccagctgcaggaggacgagtgtaccctgtgtctgtgccatactccagcgcccagagcaccagcaagaccagcgtgaccctctcccttgtcatgccctcccagggccagatggtcaacggggctcacagtgcttccaccctggacgaagccacccccaccctcaccaaccaaagcccgaccttaaccctgcagtccaccaacacgcacacgcagagcagcagctccagctctgacggaggcctcttccgctcccggcccgcccactcgctcccgcctggcgaggacggtcgtgttgagccctatgtggactttgctgagttttaccgcctctggagcgtggaccatggcgagcagagcgtggtgacagcaccgtagggcagccggagaatgcagcccaagcagggcctggcatggggcaggacagggtccagccttttcctaacatctgcctgtgccacaacggccagcaggtgccccatcctctgcccacagcagactctgtcccatggctctccgggcagtagagtgtgtgagtgcagactggacctgtggttcataccttgtcaccacccgggaagctgaaggccacttcctcccagatggcctcagccaggaccatcgccctttctcagagcagagggccaggtatagaaaccgcagtgggcctgcaagccgcccgagcctccccagcagcctcctacagagcaggaagaggcgccctgtgaaccctgagtgttgcaggcccagcagaccctgctgtcccaagcccacccctcctcccaccatcacctccctcacctcgggacagtagccctccacttctccagcctctcagccctgtgctcctgcatccagagtggaacccaggctggtgtccgcatctgtccctgggccccacccctggacctgccttggttgtgtcatctgttgtaaacgttcaggaggaccagggcagcatctggggcctgggatggccacagaaggggcaggccaggtggaaaggagccagggggaagtggtctaagagacctggaactgccagaggatggcggcctgggcttccccagagccaggcgtgcgggagaggtgaggactggccccggtgggctgaggcaggggccgctgtcgtcaggcctgagccagggtgagctggtgcctgccttgcattttccttctggtgctgtgaagaccataggctggcaggcagctgagatgaactgtctttaccactgatgaggggcctctgccggctgagggtagcaagcaggggttgtgagtcaggctgggggacttgtttgaaagaaagaggagtggaaaatggttccaggagggaagaggttctttgagacacagtaccctgggaggcataggagaagggtcgggccagcccagcccagggcctgagttagactatttcccacatgttctctgccttcagtggggagggggtgccaccagggctgtcggccaggattgccactcctgtttcagaggaagcaggccgagagacttgcaccttggccaagccacacaatcagtggggcagccagagctcagacctgagccattttgtcagtatccaggaccccccggattctccacgccctccccatctcccagtctccctgccccccatgccccagaccggcccaccagggactagccgctgtcgcacagcctctggggtgcttggtctctgcgaagtcaaaggcctgacagctctgtggcctgggaatccattttcctgcggcagagcagggcctggtgtggaaccagggagctgtgggaagccacagcagaaatggaagaaaaacaggtctcagcccagggtcctcgctcactccctcactccccactttgaagccatctctgttctgcaggtgagaggatttaaagtcagtcacaaaggcttgggaacaaaaggaattctcttccaagaatgcctctgtggtgctgtttggtctctagaaacagggtcacttttttaatgtagtaaagaagtaataaatggtggcattacacattgtgatattaa

SEQ ID NO: 12075 - protein, 580 aa, Homo sapiens
MGDALLNVPLFLGFPIFSPLTLSPMCGTAYSARSWDPPAFWAFLWFVGFCYLANQWQVSKPKDNPLNEGTDAARAAIAFSFFSIFTWEQQPSWTDDLPLCHLSGVGSASNRSYSADGKGTESHPPEDSWLKFRSENNCFLYGVFNGYDGNRVTNFVAQRLSAELLLGQLNAEHAEADVRRVLLQAFDVVERSFLESIDDALAEKASLQSQLPEGVPQHQLPPQYQKILERLKTLEREISGGAMAVVAVLLNNKLYVANVGTNRALLCKSTVDGLQVTQLNVDHTTENEDELFRLSQLGLDAGKIKQVGIICGQESTRRIGDYKVKYGYTDIDLLSAAKSKPIIAEPEIHGAQPLDGVTGFLVLMSEGLYKALEAAHGPGQANQEIAAMIDTEFAKQTSLDAVAQAVVDRVKRIHSDTFASGGERARFCPRHEDMTLLVRNFGYPLGEMSQPTPSPAPAAGGRVYPVSVPYSSAQSTSKTSVTLSLVMPSQGQMVNGAHSASTLDEATPTLTNQSPTLTLQSTNTHTQSSSSSSDGGLFRSRPAHSLPPGEDGRVEPYVDFAEFYRLWSVDHGEQSVVTAP

SEQ ID NO: 12076 - DNA, 827 bp, Homo sapiens
ccagcaggcatgcctccttggtctcatgttgaccttagagtttgggattctggaattcgatccttcatggataggcagctggacacagaggtcgtgggtgagctggaggagcaggcccggatgtgagctgttctccatagtggtgttcggctccatcgtgaacgagggctacctcaacagcgcctccgagggggaggagttctgcatctacaaccgcaaccccaacgcctgcagctatggcgtggccgtgggcgtgctcgccttcctcacctgcctgctgtacctggccctggacgtgtacttcccgcagatcagcagcgtcaaggaccgcaagaaagccgtcctgtccgacatcggtgtctcggccttctgggctttcctctggttcgtgggattctgctacctggccaaccagtggcaggtctccaagcccaaggacaacccactgaacgaagggacggacgcagcccgggccgccatcgccttctcctttttctccatcttcacctggagcctgaccgcagccctggccgtgcggagattcaaggacctaagcttccaggaggagtacagcacactgttccctgcctcggcacagccgtaggcctccccggcttgcagaggccggcagccctgtatcacccctggcagtgaggtggcaggagcagcctagtgccagaaatgtccaagatgccagggcatgcagggcagtggaaggctggcttgaggaaccaattcaggttctccactgactcattcattccttcaccgcctccttcattgattcttcatgcgttcattcattcagtaaacatttattgagcagc

SEQ ID NO: 12077 - protein, 192 aa, Homo sapiens; identical to SEQ ID NO: 2027

SEQ ID NO: 12078 - DNA, 1294 bp, Homo sapiens
ccagcaggcatgcctccttggtctcatgttgaccttagagtttgggattctggaattcgatccttcatggataggcagctggacacagaggtcgtgggtgagctggaggagcaggcccggatgtgagctgttctccatagtggtgttcggctccatcgtgaacgagggctacctcaacagcgcctccgagggggaggagttctgcatctacaaccgcaaccccaacgcctgcagctatggcgtggccgtgggcgtgctcgccttcctcacctgcctgctgtacctggccctggacgtgtacttcccgcagatcagcagcgtcaaggaccgcaagaaagccgtcctgtccgacatcggtgtctcggccttctgggctttcctctggttcgtgggattctgctacctggccaaccagtggcaggtctccaagcccaaggacaacccactgaacgaagggacggacgcagcccgggccgccatcgccttctcctttttctccatcttcacctggagcctgaccgcagccctggccgtgcggagattcaaggacctaagcttccaggaggagtacagcacactgttccctgcctcggcacagccgtaggcctccccggcttgcagaggccggcagccctgtatcacccctggcagtgaggtggcaggagcagcctagtgccagaaatgtccaagatgccagggcatgcagggcagtggaaggctggcttgaggaaccaattcaggttctccactgactcattcattccttcaccgcctccttcattgattcttcatgcgttcattcattcagtaaacatttattgagcagctgttttgtgcctagtgatgaattaggtggggtccttggctccaggagcccacaggctggggaggagaaaacaaacacatcaatatctcttccaaatggacagccgtggacagttaccaggtaggtagcggccccatacatgggctgcctagaggcgttcatggtccccattgctgagctgtgggtgcagagcaatagcctctcccttcacagcggtgtgaagagtgacctcactgtccttagggttagcatcctggccgaggatgtcacagggctcctggtctggctctgtcctcatgtgctatgtgaccctgacaaacccgtgcacctctctcagcctcagtccacttacctgaactgaggggtgataatggaccaacctctcaaggctgttgtgccaatgaaacaaaggccagcccagggcttagcacaagcatgctcaataaatgtaagctcttttgttcattc

SEQ ID NO: 12079 - protein, 192 aa, Homo sapiens; identical to SEQ ID NO: 2027

SEQ ID NO: 12080 - DNA, 1972 bp, Homo sapiens
ccagcaggcatgcctccttggtctcatgttgaccttagagtttgggattctggaattcgatccttcatggataggcagctggacacagaggtcgtgggtgagctggaggagcaggcccggatgtgagctgttctccatagtggtgttcggctccatcgtgaacgagggctacctcaacagcgcctccgagggggaggagttctgcatctacaaccgcaaccccaacgcctgcagctatggcgtggccgtgggcgtgctcgccttcctcacctgcctgctgtacctggccctggacgtgtacttcccgcagatcagcagcgtcaaggaccgcaagaaagccgtcctgtccgacatcggtgtctcggccttctgggctttcctctggttcgtgggattctgctacctggccaaccagtggcaggtctccaagcccaaggacaacccactgaacgaagggacggacgcagcccgggccgccatcgccttctcctttttctccatcttcacctggagcctgaccgcagccctggccgtgcggagattcaaggacctaagcttccaggaggagtacagcacactgttccctgcctcggcacagccgtaggcctccccggcttgcagaggccggcagccctgtatcacccctggcagtgaggtggcaggagcagcctagtgccagaaatgtccaagatgccagggcatgcagggcagtggaaggctggcttgaggaaccaattcaggttctccactgactcattcattccttcaccgcctccttcattgattcttcatgcgttcattcattcagtaaacatttattgagcagctgttttgtgcctagtgatgaattaggtggggtccttggctccaggagcccacaggctggggaggagaaaacaaacacatcaatatctcttccaaatggacagccgtggacagttaccaggtaggtagcggccccatacatgggctgcctagaggcgttcatggtccccattgctgagctgtgggtgcagagcaatagcctctcccttcacagcggtgtgaagagtgacctcactgtccttagggttagcatcctggccgaggatgtcacagggctcctggtctggctctgtcctcatgtgctatgtgaccctgacaaacccgtgcacctctctcagcctcagtccacttacctgaactgaggggtgataatggaccaacctctcaaggctgttgtgccaatgaaacaaaggccagcccagggcttagcacaagcatgctcaataaatgtaagctcttttgttcattcattcattcattcattcattcttctctccagagagtcaggggcacctccagaatctctactttaagagtaattctcatgtgatgaatccttgttcctccaaaggattttggtctctggttctacacaggtttcctgcttgaggcccccagctgcctgggcaggaactcacccattcctccactctctgctggagttgaggaggctggtggagcacagacagttcccccaaagcaatgcctcaaccctgcgagggcctgagcacatcgagagtgagcttcctggcactggaggcatcccagtgcagatgcagactgcctgctgcacgctggagatgctgcagagagagcacctacactgagaaagtggggccaggggaccaccaggtccctgggctctcagtagaactcccatcctccctctgcagcccaggccagcgggggcccaggcctctcctttgctcctgtcttgtggccccttaaactggttgcccaaatgaagctttgacttagtgagggcagagagctgaacacagagacagtatgagtgcctacagccagaggcatctccctagaaggatcagtaggggtcatctgctccagccctctgcctctgtacaggaaaccagcctggatagtagagccagggagctcggggagaaccgcgtctacagacattgct

SEQ ID NO: 12081 - protein, 192 aa, Homo sapiens; identical to SEQ ID NO: 2027

SEQ ID NO: 12082 - DNA, 1242 bp, Homo sapiens
aatgaatggttctcaaacttccacagagcctcagggttccctggcagtgcctctgggaggtgggctgggccccaggtgggcaccccacctgcttggcagatgcacgccttgtcctgagcaggtctgggcttctctggggagaccttggcactcacaggagattgcgtggctatgaggctcccactgctgacgcccccaggctcggctctcagtgggcccctcgctaaacctggggctctgtggggtcgcagcacgttagaagtcgaagcccagacccacccagccaagctgccatccttgccccagcctcgtcctccttcccatacctcatttgtctggcagcctgagggttggggtcttcctgcctgcagagttgcaggcatcaggggtggaccgggggggcccacgtcagcggtgtggctggacatgggggtttggcagaggctgcagaaatgcggcctgagttgattaccttctttctctgtctctccctccatcctcccctctcactgcccgtggctctcctctgactggccctgaccctgccctgtctgtggcctcctcccccctgcatctggctggcttccctcttctcgcctgcatcttctcttggctcccctctctcttcccctaccccctttgcctgtccctttgggggtgggggagcatgggagatgcactcttgaatgtccctctgttcctcggcttccccattttctccccactcaccctctcccccatgtgtggcactgcctattctgcccggtcctgggaccccccagccttctgggctttcctctggttcgtgggattctgctacctggccaaccagtggcaggtctccaagcccaaggacaacccactgaacgaagggacggacgcagcccgggccgccatcgccttctcctttttctccatcttcacctggagcctgaccgcagccctggccgtgcggagattcaaggacctaagcttccaggaggagtacagcacactgttccctgcctcggcacagccgtaggcctccccggcttgcagaggccggcagccctgtatcacccctggcagtgaggtggcaggagcagcctagtgccagaaatgtccaagatgccagggcatgcagggcagtggaaggctggcttgaggaaccaattcaggttctccactgactcattcattccttcaccgcctccttcattgattcttcatgcgttcattcattcagtaaacatttattgagca

SEQ ID NO: 12083 - protein, 117 aa, Homo sapiens
MGDALLNVPLFLGFPIFSPLTLSPMCGTAYSARSWDPPAFWAFLWFVGFCYLANQWQVSKPKDNPLNEGTDAARAAIAFSFFSIFTWSLTAALAVRRFKDLSFQEEYSTLFPASAQP

SEQ ID NO: 12084 - DNA, 1711 bp, Homo sapiens
aatgaatggttctcaaacttccacagagcctcagggttccctggcagtgcctctgggaggtgggctgggccccaggtgggcaccccacctgcttggcagatgcacgccttgtcctgagcaggtctgggcttctctggggagaccttggcactcacaggagattgcgtggctatgaggctcccactgctgacgcccccaggctcggctctcagtgggcccctcgctaaacctggggctctgtggggtcgcagcacgttagaagtcgaagcccagacccacccagccaagctgccatccttgccccagcctcgtcctccttcccatacctcatttgtctggcagcctgagggttggggtcttcctgcctgcagagttgcaggcatcaggggtggaccgggggggcccacgtcagcggtgtggctggacatgggggtttggcagaggctgcagaaatgcggcctgagttgattaccttctttctctgtctctccctccatcctcccctctcactgcccgtggctctcctctgactggccctgaccctgccctgtctgtggcctcctcccccctgcatctggctggcttccctcttctcgcctgcatcttctcttggctcccctctctcttcccctaccccctttgcctgtccctttgggggtgggggagcatgggagatgcactcttgaatgtccctctgttcctcggcttccccattttctccccactcaccctctcccccatgtgtggcactgcctattctgcccggtcctgggaccccccagccttctgggctttcctctggttcgtgggattctgctacctggccaaccagtggcaggtctccaagcccaaggacaacccactgaacgaagggacggacgcagcccgggccgccatcgccttctcctttttctccatcttcacctggagcctgaccgcagccctggccgtgcggagattcaaggacctaagcttccaggaggagtacagcacactgttccctgcctcggcacagccgtaggcctccccggcttgcagaggccggcagccctgtatcacccctggcagtgaggtggcaggagcagcctagtgccagaaatgtccaagatgccagggcatgcagggcagtggaaggctggcttgaggaaccaattcaggttctccactgactcattcattccttcaccgcctccttcattgattcttcatgcgttcattcattcagtaaacatttattgagcagctgttttgtgcctagtgatgaattaggtggggtccttggctccaggagcccacaggctggggaggagaaaacaaacacatcaatatctcttccaaatggacagccgtggacagttaccaggtaggtagcggccccatacatgggctgcctagaggcgttcatggtccccattgctgagctgtgggtgcagagcaatagcctctcccttcacagcggtgtgaagagtgacctcactgtccttagggttagcatcctggccgaggatgtcacagggctcctggtctggctctgtcctcatgtgctatgtgaccctgacaaacccgtgcacctctctcagcctcagtccacttacctgaactgaggggtgataatggaccaacctctcaaggctgttgtgccaatgaaacaaaggccagcccagggcttagcacaagcatgctcaataaatgtaagctcttttgttcattc

SEQ ID NO: 12085 - protein, 117 aa, Homo sapiens; identical to SEQ ID NO: 12083

SEQ ID NO: 12086 - DNA, 2389 bp, Homo sapiens
aatgaatggttctcaaacttccacagagcctcagggttccctggcagtgcctctgggaggtgggctgggccccaggtgggcaccccacctgcttggcagatgcacgccttgtcctgagcaggtctgggcttctctggggagaccttggcactcacaggagattgcgtggctatgaggctcccactgctgacgcccccaggctcggctctcagtgggcccctcgctaaacctggggctctgtggggtcgcagcacgttagaagtcgaagcccagacccacccagccaagctgccatccttgccccagcctcgtcctccttcccatacctcatttgtctggcagcctgagggttggggtcttcctgcctgcagagttgcaggcatcaggggtggaccgggggggcccacgtcagcggtgtggctggacatgggggtttggcagaggctgcagaaatgcggcctgagttgattaccttctttctctgtctctccctccatcctcccctctcactgcccgtggctctcctctgactggccctgaccctgccctgtctgtggcctcctcccccctgcatctggctggcttccctcttctcgcctgcatcttctcttggctcccctctctcttcccctaccccctttgcctgtccctttgggggtgggggagcatgggagatgcactcttgaatgtccctctgttcctcggcttccccattttctccccactcaccctctcccccatgtgtggcactgcctattctgcccggtcctgggaccccccagccttctgggctttcctctggttcgtgggattctgctacctggccaaccagtggcaggtctccaagcccaaggacaacccactgaacgaagggacggacgcagcccgggccgccatcgccttctcctttttctccatcttcacctggagcctgaccgcagccctggccgtgcggagattcaaggacctaagcttccaggaggagtacagcacactgttccctgcctcggcacagccgtaggcctccccggcttgcagaggccggcagccctgtatcacccctggcagtgaggtggcaggagcagcctagtgccagaaatgtccaagatgccagggcatgcagggcagtggaaggctggcttgaggaaccaattcaggttctccactgactcattcattccttcaccgcctccttcattgattcttcatgcgttcattcattcagtaaacatttattgagcagctgttttgtgcctagtgatgaattaggtggggtccttggctccaggagcccacaggctggggaggagaaaacaaacacatcaatatctcttccaaatggacagccgtggacagttaccaggtaggtagcggccccatacatgggctgcctagaggcgttcatggtccccattgctgagctgtgggtgcagagcaatagcctctcccttcacagcggtgtgaagagtgacctcactgtccttagggttagcatcctggccgaggatgtcacagggctcctggtctggctctgtcctcatgtgctatgtgaccctgacaaacccgtgcacctctctcagcctcagtccacttacctgaactgaggggtgataatggaccaacctctcaaggctgttgtgccaatgaaacaaaggccagcccagggcttagcacaagcatgctcaataaatgtaagctcttttgttcattcattcattcattcattcattcttctctccagagagtcaggggcacctccagaatctctactttaagagtaattctcatgtgatgaatccttgttcctccaaaggattttggtctctggttctacacaggtttcctgcttgaggcccccagctgcctgggcaggaactcacccattcctccactctctgctggagttgaggaggctggtggagcacagacagttcccccaaagcaatgcctcaaccctgcgagggcctgagcacatcgagagtgagcttcctggcactggaggcatcccagtgcagatgcagactgcctgctgcacgctggagatgctgcagagagagcacctacactgagaaagtggggccaggggaccaccaggtccctgggctctcagtagaactcccatcctccctctgcagcccaggccagcgggggcccaggcctctcctttgctcctgtcttgtggccccttaaactggttgcccaaatgaagctttgacttagtgagggcagagagctgaacacagagacagtatgagtgcctacagccagaggcatctccctagaaggatcagtaggggtcatctgctccagccctctgcctctgtacaggaaaccagcctggatagtagagccagggagctcggggagaaccgcgtctacagacattgct

SEQ ID NO: 12087 - protein, 117 aa, Homo sapiens; identical to SEQ ID NO: 12083

SEQ ID NO: 12088 - DNA, 4820 bp, Homo sapiens
aatgaatggttctcaaacttccacagagcctcagggttccctggcagtgcctctgggaggtgggctgggccccaggtgggcaccccacctgcttggcagatgcacgccttgtcctgagcaggtctgggcttctctggggagaccttggcactcacaggagattgcgtggctatgaggctcccactgctgacgcccccaggctcggctctcagtgggcccctcgctaaacctggggctctgtggggtcgcagcacgttagaagtcgaagcccagacccacccagccaagctgccatccttgccccagcctcgtcctccttcccatacctcatttgtctggcagcctgagggttggggtcttcctgcctgcagagttgcaggcatcaggggtggaccgggggggcccacgtcagcggtgtggctggacatgggggtttggcagaggctgcagaaatgcggcctgagttgattaccttctttctctgtctctccctccatcctcccctctcactgcccgtggctctcctctgactggccctgaccctgccctgtctgtggcctcctcccccctgcatctggctggcttccctcttctcgcctgcatcttctcttggctcccctctctcttcccctaccccctttgcctgtccctttgggggtgggggagcatgggagatgcactcttgaatgtccctctgttcctcggcttccccattttctccccactcaccctctcccccatgtgtggcactgcctattctgcccggtcctgggaccccccagccttctgggctttcctctggttcgtgggattctgctacctggccaaccagtggcaggtctccaagcccaaggacaacccactgaacgaagggacggacgcagcccgggccgccatcgccttctcctttttctccatcttcacctgggcgggccaggctgtgctggccttccagcggtaccagattggcgccgactcggccctcttctcccaggactacatggaccccagccaggactccagcatgccttacgcgccctacgtggagcccactgggccggatcccgccggtatgggcggcacctaccagcagccggccaacaccttcgacaccgagccccagggctaccagtcgcagggctactgagccacagtgaccgcctgcccccgcccctccccatctgtcccctctctccacacccagcccctgctcctgcccaggctgccctgcccagcgcctcatcagcctctgccttgtcccactgaggtccagggtagctcggggcaggggtggggcagtccagtgttggggactgtctacgtatgtgcaagtatatcccagggcatgtgccccgcaggggcctagagggtgggggccaggggtatttgcattcatacattgtgtcatcaagcattccttgagcgcctactgggcatccggcctgtgctgggcatgggtggtgacattggcagaaatggccactggaaaggggagcgatgagctgtggaggaagccctggtggtaccagaggccagaatggtgggaaagacagatccagataatgctgggaagtgtggctacaccgtggcttggtcatagggtgagtgtaaacacccacaggacactgggggctgtcaccctgctctggcagtcctgctaagagtgtcagggccgtctccattttatggttgaggaaactgaggtctagagaggtcaagattacttgcccagaatcactcaggcagctagtgatagaggtggggccaagcccaggctgcccgactgcagaccacgtgctcttccctggccacccacctcctaccatccccacgcttggggcttccctgctcagtgttactgtcattctgggaggccttggggccctcagccccttgagacaccctgattctgctgcatgccaagggcctgttctgccccagctgttcctcctcccctggggacagccccacctccgggtccctccacccacatccccctggtcctacccctggcccttggcctcctccaagagggctcaccccgggtgctgctctgtgctctgcgtgtcccacagacgcttgttccagggggctccagcaaaccccttcgtggtctctcaaaggactgatcactgtccttgcctctaggaggggtcactaagcccttacctagggctgggtggacaacaaggcacagatgagggtgtgactggcccgaggtcacggtgagtgagtggcaaagctggccctgacgcctgggtttcttggccccagctgcccagcaggtgcctcgattccctgcccttgtgacctcccaggaaacagaactgatctgggacactatgtcacctctcctctcatctggggtcagtcagggttcgggggctgcagcagccaagcgcatgagaggtgtttccttggccttccagaaggcccactgtggagccagcctccctatgggaggcagagcggcaaggacagggctttggaatcagccaggtcggctcctgggctgtggccgtggagagacactgcccccaggatgacacaggcaagagcccctgaggcatgggaggcccagggaagaccatgggctgtaggggagagtgtggcaggtgacccaaaggcccaaagagggccgtggggcctgaggaggtcataatctcttctgagtgggggcaggtcgattcttgcacaaggtgggctcttcactgagccataagggacagggaggtatgggagagcgctgggggcccatccccctgtccacccagtgtccactggcctgtccttcagggagcagagcagagcaggtggtggacgggcccagtgctgggtgttttcaccaccatccccccatcccccatctaagaatcctaagaggcaggcgatccctcacctgcttactcactcagcagttacccggcccctgtgctggagataccaagggcatgggtggtccctgcttcgatggccccaaagctgggccagagttaagggaaagaggaggaagtcctaagcagagaagtagcaccattatccccatttaacagaagggaaactgaggctcggcaagcataggcgagttggcagtggaacacggatctaaactcaggtgtgtccaagtcctcccaaaggacagcagtgatggagaggaccccagccagctgtgtgacagctggttgttgctgacttcattttccaatccggagaaggggctctgtccacagtcccccgccgccaggtggcccacatgggaccagcatgggggcaggttatctgttggcctgaagagtgaaacctgtaccaggccaaaggtgagggcgtgagtgagggcaggagtgtttatggcagagtgaagttctgtgcccaccacaagaggctgtgagatgttctgaccctcacccactgtccaccaaaagcctctcctgctgatgggcactaggagacctcagggtactgcccatctgtttctcctcgggtgccagccagctgctggtgatcctcagccggagggcagggtaccaggtaagcttaactccatcttgggtgtttgtgacaggccctgcctgccaccctaggcagggaaagctgtcaagactcctgccaggaatggggggtgctgagtcatctcacgaagaatccctcactcttcccgggttcagcccagaagcccttccaggcatgatcttccccatcaggctgggctctggcagggacctgcccaggatggagatgagagagggtgagagatggagggcgagatttggatgggacccagggctcctgactctgccctggaaggttcatggggaaactcgctccttctgttggcagaggacagcccctggggaaccccaggcccaactctgtccggtatcccttttcctcccagctgccctcccctacttctcccttgctcccaaagctttccttggagaagggccctcctgcagctggaccctgcagggtggctccctcctccccatcaagcacaagagagggcccaggaaaaaaggtttcacataagtgtagagtcgcaaggacgcttagagtcggcagagtctggggtagggagacagcgacttgtccaaggtcaagcacagagggagaggttcaggagtcaggtcttctgccttctgagttggctcatcctgggcagtcacagactgtcctgcctgcacggctcctatccacctgggggtgtcgcagttgaggggctaattcccaggggactgacgttagttccctactccatccttccctggtgattcttgatcttcaaagcctcggggatcccaggtttccccatgtaactgagacaccctgcctgttagccctgggagacccctaaccttggcccaagacccctttgattctctaaggagcacgaaagggggaatgcccctcccaggagtttatgggagaagggactgggccggctgcctcccagcgatgcacttgacctgacactccccatgtcctggtgcgcacagcccttgtcggtgccccggcccctcccgcagcgttactgcctgtgtatagtataaatatatatattttctatatataagatgtataatataaggctccacaaatatatctgtgtgtgtgtgtgcgtgtgtgtgcggtgaagggcggtccccatcctgggcccccactctagacccccccaccacctggttaagtctcgagtgaatccagtggccccgtggcaccctcctttatgacatccatccatctgtggtgaaccaagtgaaggtggtgacttctggtgacatagtaataaagtgaagactcagaacccaccagcgattgca

SEQ ID NO: 12089 - protein, 159 aa, Homo sapiens
MGDALLNVPLFLGFPIFSPLTLSPMCGTAYSARSWDPPAFWAFLWFVGFCYLANQWQVSKPKDNPLNEGTDAARAAIAFSFFSIFTWAGQAVLAFQRYQIGADSALFSQDYMDPSQDSSMPYAPYVEPTGPDPAGMGGTYQQPANTFDTEPQGYQSQGY

SEQ ID NO: 12090 - DNA, 3245 bp, Homo sapiens
tcgggccgctctagccgccccactcgctgctctgcggggaggcgggcgctcccgcaggggttcctccaagatggcggcgcagaggaggagcttgctgcagagtgagcagcagccaagctggacagatgacctgcctctctgccacctctctggggttggctcagcctccaaccgcagctactctgctgatggcaagggcactgagagccacccgccagaggacagctggctcaagttcaggagtgagaacaactgcttcctgtatggggtcttcaacggctatgatggcaaccgagtgaccaacttcgtggcccagcggctgtccgcagagctcctgctgggccagctgaatgccgagcacgccgaggccgatgtgcggcgtgtgctgctgcaggccttcgatgtggtggagaggagcttcctggagtccattgacgacgccttggctgagaaggcaagcctccagtcgcaattgccagagggagtccctcagcaccagctgcctcctcagtatcagaagatccttgagagactcaagacgttagagagggaaatttcgggaggggccatggccgttgtggcggtccttctcaacaacaagctctacgtcgccaatgtcggtacaaaccgtgcacttttatgcaaatcgacagtggatgggttgcaggtgacacagctgaacgtggaccacaccacagagaacgaggatgagctcttccgtctttcgcagctgggcttggatgctggaaagatcaagcaggtggggatcatctgtgggcaggagagcacccggcggatcggggattacaaggttaaatatggctacacggacattgaccttctcagcgctgccaagtccaaaccaatcatcgcagagccagaaatccatggggcacagccgctggatggggtgacgggcttcttggtgctgatgtcggaggggttgtacaaggccctagaggcagcccatgggcctgggcaggccaaccaggagattgctgcgatgattgacactgagtttgccaagcagacctccctggacgcagtggcccaggccgtcgtggaccgggtgaagcgcatccacagcgacaccttcgccagtggtggggagcgtgccaggttctgcccccggcacgaggacatgaccctgctagtgaggaactttggctacccgctgggcgaaatgagccagcccacaccgagcccagccccagctgcaggaggacgagtgtaccctgtgtctgtgccatactccagcgcccagagcaccagcaagaccagcgtgaccctctcccttgtcatgccctcccagggccagatggtcaacggggctcacagtgcttccaccctggacgaagccacccccaccctcaccaaccaaagcccgaccttaaccctgcagtccaccaacacgcacacgcagagcagcagctccagctctgacggaggcctcttccgctcccggcccgcccactcgctcccgcctggcgaggacggtcgtgttgagccctatgtggactttgctgagttttaccgcctctggagcgtggaccatggcgagcagagcgtggtgacagcaccgtagggcagccggagaatgcagcccaagcagggcctggcatggggcaggacagggtccagccttttcctaacatctgcctgtgccacaacggccagcaggtgccccatcctctgcccacagcagactctgtcccatggctctccgggcagtagagtgtgtgagtgcagactggacctgtggttcataccttgtcaccacccgggaagctgaaggccacttcctcccagatggcctcagccaggaccatcgccctttctcagagcagagggccaggtatagaaaccgcagtgggcctgcaagccgcccgagcctccccagcagcctcctacagagcaggaagaggcgccctgtgaaccctgagtgttgcaggcccagcagaccctgctgtcccaagcccacccctcctcccaccatcacctccctcacctcgggacagtagccctccacttctccagcctctcagccctgtgctcctgcatccagagtggaacccaggctggtgtccgcatctgtccctgggccccacccctggacctgccttggttgtgtcatctgttgtaaacgttcaggaggaccagggcagcatctggggcctgggatggccacagaaggggcaggccaggtggaaaggagccagggggaagtggtctaagagacctggaactgccagaggatggcggcctgggcttccccagagccaggcgtgcgggagaggtgaggactggccccggtgggctgaggcaggggccgctgtcgtcaggcctgagccagggtgagctggtgcctgccttgcattttccttctggtgctgtgaagaccataggctggcaggcagctgagatgaactgtctttaccactgatgaggggcctctgccggctgagggtagcaagcaggggttgtgagtcaggctgggggacttgtttgaaagaaagaggagtggaaaatggttccaggagggaagaggttctttgagacacagtaccctgggaggcataggagaagggtcgggccagcccagcccagggcctgagttagactatttcccacatgttctctgccttcagtggggagggggtgccaccagggctgtcggccaggattgccactcctgtttcagaggaagcaggccgagagacttgcaccttggccaagccacacaatcagtggggcagccagagctcagacctgagccattttgtcagtatccaggaccccccggattctccacgccctccccatctcccagtctccctgccccccatgccccagaccggcccaccagggactagccgctgtcgcacagcctctggggtgcttggtctctgcgaagtcaaaggcctgacagctctgtggcctgggaatccattttcctgcggcagagcagggcctggtgtggaaccagggagctgtgggaagccacagcagaaatggaagaaaaacaggtctcagcccagggtcctcgctcactccctcactccccactttgaagccatctctgttctgcaggtgagaggatttaaagtcagtcacaaaggcttgggaacaaaaggaattctcttccaagaatgcctctgtggtgctgtttggtctctagaaacagggtcacttttttaatgtagtaaagaagtaataaatggtggcattacacattgtgatattaa

SEQ ID NO: 12091 - protein, 504 aa, Homo sapiens; identical to SEQ ID NO: 2029

SEQ ID NO: 12092 - DNA, 2142 bp, Homo sapiens
tcgggccgctctagccgccccactcgctgctctgcggggaggcgggcgctcccgcaggggttcctccaagatggcggcgcagaggaggagcttgctgcagagtgagcagcagccaagctggacagatgacctgcctctctgccacctctctggggttggctcagcctccaaccgcagctactctgctgatggcaagggcactgagagccacccgccagaggacagctggctcaagttcaggagtgagaacaactgcttcctgtatggggtcttcaacggctatgatggcaaccgagtgaccaacttcgtggcccagcggctgtccgcagagctcctgctgggccagctgaatgccgagcacgccgaggccgatgtgcggcgtgtgctgctgcaggccttcgatgtggtggagaggagcttcctggagtccattgacgacgccttggctgagaaggcaagcctccagtcgcaattgccagagggagtccctcagcaccagctgcctcctcagtatcagaagatccttgagagactcaagacgttagagagggaaatttcgggaggggccatggcccaggtgccccatcctctgcccacagcagactctgtcccatggctctccgggcagtagagtgtgtgagtgcagactggacctgtggttcataccttgtcaccacccgggaagctgaaggccacttcctcccagatggcctcagccaggaccatcgccctttctcagagcagagggccaggtatagaaaccgcagtgggcctgcaagccgcccgagcctccccagcagcctcctacagagcaggaagaggcgccctgtgaaccctgagtgttgcaggcccagcagaccctgctgtcccaagcccacccctcctcccaccatcacctccctcacctcgggacagtagccctccacttctccagcctctcagccctgtgctcctgcatccagagtggaacccaggctggtgtccgcatctgtccctgggccccacccctggacctgccttggttgtgtcatctgttgtaaacgttcaggaggaccagggcagcatctggggcctgggatggccacagaaggggcaggccaggtggaaaggagccagggggaagtggtctaagagacctggaactgccagaggatggcggcctgggcttccccagagccaggcgtgcgggagaggtgaggactggccccggtgggctgaggcaggggccgctgtcgtcaggcctgagccagggtgagctggtgcctgccttgcattttccttctggtgctgtgaagaccataggctggcaggcagctgagatgaactgtctttaccactgatgaggggcctctgccggctgagggtagcaagcaggggttgtgagtcaggctgggggacttgtttgaaagaaagaggagtggaaaatggttccaggagggaagaggttctttgagacacagtaccctgggaggcataggagaagggtcgggccagcccagcccagggcctgagttagactatttcccacatgttctctgccttcagtggggagggggtgccaccagggctgtcggccaggattgccactcctgtttcagaggaagcaggccgagagacttgcaccttggccaagccacacaatcagtggggcagccagagctcagacctgagccattttgtcagtatccaggaccccccggattctccacgccctccccatctcccagtctccctgccccccatgccccagaccggcccaccagggactagccgctgtcgcacagcctctggggtgcttggtctctgcgaagtcaaaggcctgacagctctgtggcctgggaatccattttcctgcggcagagcagggcctggtgtggaaccagggagctgtgggaagccacagcagaaatggaagaaaaacaggtctcagcccagggtcctcgctcactccctcactccccactttgaagccatctctgttctgcaggtgagaggatttaaagtcagtcacaaaggcttgggaacaaaaggaattctcttccaagaatgcctctgtggtgctgtttggtctctagaaacagggtcacttttttaatgtagtaaagaagtaataaatggtggcattacacattgtgatattaa

SEQ ID NO: 12093 - protein, 186 aa, Homo sapiens
MAAQRRSLLQSEQQPSWTDDLPLCHLSGVGSASNRSYSADGKGTESHPPEDSWLKFRSENNCFLYGVFNGYDGNRVTNFVAQRLSAELLLGQLNAEHAEADVRRVLLQAFDVVERSFLESIDDALAEKASLQSQLPEGVPQHQLPPQYQKILERLKTLEREISGGAMAQVPHPLPTADSVPWLSGQ

SEQ ID NO: 12094 - DNA, 2016 bp, Homo sapiens
tcgggccgctctagccgccccactcgctgctctgcggggaggcgggcgctcccgcaggggttcctccaagatggcggcgcagaggaggagcttgctgcagagtgagcagcagccaagctggacagatgacctgcctctctgccacctctctggggttggctcagcctccaaccgcagctactctgctgatggcaagggcactgagagccacccgccagaggacagctggctcaagttcaggagtgagaacaactgcttcctgtatggggtcttcaacggctatgatggcaaccgagtgaccaacttcgtggcccagcggctgtccgcagagctcctgctgggccagctgaatgccgagcacgccgaggccgatgtgcggcgtgtgctgctgcaggccttcgatgtggtggagaggagcttcctggagtccattgacgacgccttggctgagaaggcaagcctccagtcgcaattgccagagggagtccctcagcaccagctgcctcctcagtatcagaagatccttgagagactcaagacgttagagagggaaatttcgggaggggccatggccgttgtggcggtccttctcaacaacaagctctacgtcgccaatgtcggtacaaaccgtgcacttttatgcaaatcgacagtggatgggttgcaggtgacacagctgaacgtggaccacaccacagagaacgaggatgagctcttccgtctttcgcagctgggcttggatgctggaaagatcaagcaggtggggatcatctgtgggcaggagagcacccggcggatcggggattacaaggttaaatatggctacacggacattgaccttctcagcgctgccaagtccaaaccaatcatcgcagagccagaaatccatggggcacagccgctggatggggtgacgggcttcttggtgctgatgtcggaggggttgtacaaggccctagaggcagcccatgggcctgggcaggccaaccaggagattgctgcgatgattgacactgagtttgccaagcagacctccctggacgcagtggcccaggccgtcgtggaccgggtgaagcgcatccacagcgacaccttcgccagtggtggggagcgtgccaggttctgcccccggcacgaggacatgaccctgctagtgaggaactttggctacccgctgggcgaaatgagccagcccacaccgagcccagccccagctgcaggaggacgagtgtaccctgtgtctgtgccatactccagcgcccagagcaccagcaagaccagcgtgaccctctcccttgtcatgccctcccagggccagatggtcaacggggctcacagtgcttccaccctggacgaagccacccccaccctcaccaaagacccttccaggcctgcaagcgatttgacagccatccctcagtgccaactaaacctcctgggcagcctgaccccagggtaggaaggaagcgcctacaccaaggggccctctgggagctgagatcatcctggggttttgtcgcctggtctgacttgtgcactgggatcttctcgtgccaggccaggccccgccccctccccgggactgggcagaccccctccctcatgcatctgtgtccactgaggcttccctcacctagaatggcccatccttcaggacccagctcactctcatcttctttccagggacttatcccccaaggctgtcctctgttctggtgagctcagggctcttggaacttggtctgcagtgactctggggttcctggttaggacccatgttctctaggtcccagcaccctgcacggggcagtgtttgtgacactgggcccagctattctgagagaaggactccaaccttccatcaggtgtggcccgagatgtgggtggccctgggcatggggcatggatgcattgtgactttcatgggcctcttctgcaaaaaaaaaattaaaattatactttatgactattggtagaaagataaatatattaatacattaaaatttctctttgagt

SEQ ID NO: 12095 - protein, 462 aa, Homo sapiens; identical to SEQ ID NO: 2031

SEQ ID NO: 12096 - DNA, 868 bp, Homo sapiens
ccaaagcccgaccttaaccctgcagtccaccaacacgcacacgcagagcagcagctccagctctgacggaggcctcttccgctcccggcccgcccactcgctcccgcctggcgaggacggtcgtgttgagccctatgtggactttgctgagttttaccgcctctggagcgtggaccatggcgagcagagcgtggtgacagcaccgtagggcagccggagaatgcagcccaagcagggcctggcatggggcaggacagggtccagccttttcctaacatctgcctgtgccacaacggccagcaggtgccccatcctctgcccacagcagactctgtcccatggctctccgggcagtagagtgtgtgagtgcagactggacctgtggttcataccttgtcaccacccgggaagctgaaggccacttcctcccagatggcctcagccaggaccatcgccctttctcagagcagagggccaggtatagaaaccgcagtgggcctgcaagccgcccgagcctccccagcagcctcctacagagcaggaagaggcgccctgtgaaccctgggaatccattttcctgcggcagagcagggcctggtgtggaaccagggagctgtgggaagccacagcagaaatggaagaaaaacaggtctcagcccagggtcctcgctcactccctcactccccactttgaagccatctctgttctgcaggtgagaggatttaaagtcagtcacaaaggcttgggaacaaaaggaattctcttccaagaatgcctctgtggtgctgtttggtctctagaaacagggtcacttttttaatgtagtaaagaagtaataaatggtggcattacacattgtgatattaa

SEQ ID NO: 12097 - protein, 160 aa, Homo sapiens
MALRAVECVSADWTCGSYLVTTREAEGHFLPDGLSQDHRPFSEQRARYRNRSGPASRPSLPSSLLQSRKRRPVNPGNPFSCGRAGPGVEPGSCGKPQQKWKKNRSQPRVLAHSLTPHFEAISVLQVRGFKVSHKGLGTKGILFQECLCGAVWSLETGSLF

SEQ ID NO: 12098 - DNA, 1283 bp, Homo sapiens
cagcagactctgtcccatggctctccgggcagtagagtgtgtgagtgcagactggacctgtggttcataccttgtcaccacccgggaagctgaaggccacttcctcccagatggcctcagccaggaccatcgccctttctcagagcagagggccaggtatagaaaccgcagtgggcctgcaagccgcccgagcctccccagcagcctcctacagagcaggaagaggcgccctgtgaaccctgagtgttgcaggcccagcagaccctgctgtcccaagcccacccctcctcccaccatcacctccctcacctcgggacagtagccctccacttctccagcctctcagccctgtgctcctgcatccagagtggaacccaggctggtgtccgcatctgtccctgggccccacccctggacctgccttggttgtgtcatctgttgtaaacgttcaggaggaccagggcagcatctggggcctgggatggccacagaaggggcaggccaggtggaaaggagccagggggaagtggtctaagagacctggaactgccagaggatggcggcctgggcttccccagagccaggcgtgcgggagaggtgaggactggccccggtgggctgaggcaggggccgctgtcgtcaggcctgagccagggtgagctggtgcctgccttgcattttccttctggtgctgtgaagaccataggctggcaggcagctgagatgaactgtctttaccactgatgaggggcctctgccggctgagggtagcaagcaggggttgtgagtcaggctgggggacttgtttgaaagaaagaggagtggaaaatggttccaggagggaagaggttctttgagacacagtaccctgggaggcataggagaagggtcgggccagcccagcccagggcctgagttagactatttcccacatgttctctgccttcagtggggagggggtgccaccagggctgtcggccaggattgccactcctgtttcagaggaagcaggccgagagacttgcaccttggccaagccacaagcagaaatggaagaaaaacaggtctcagcccagggtcctcgctcactccctcactccccactttgaagccatctctgttctgcaggtgagaggatttaaagtcagtcacaaaggcttgggaacaaaaggaattctcttccaagaatgcctctgtggtgctgtttggtctctagaaacagggtcacttttttaatgtagtaaagaagtaataaatggtggcattacacattgtgatattaa

SEQ ID NO: 12099 - protein, 58 aa, Homo sapiens
MFSAFSGEGVPPGLSARIATPVSEEAGRETCTLAKPQAEMEEKQVSAQGPRSLPHSPL

SEQ ID NO: 12100 - DNA, 1177 bp, Homo sapiens
tcctcccagatggcctcagccaggaccatcgccctttctcagagcagagggccaggtatagaaaccgcagtgggcctgcaagccgcccgagcctccccagcagcctcctacagagcaggaagaggcgccctgtgaaccctgagtgttgcaggcccagcagaccctgctgtcccaagcccacccctcctcccaccatcacctccctcacctcgggacagtagccctccacttctccagcctctcagccctgtgctcctgcatccagagtggaacccaggctggtgtccgcatctgtccctgggccccacccctggacctgccttggttgtgtcatctgttgtaaacgttcaggaggaccagggcagcatctggggcctgggatggccacagaaggggcaggccaggtggaaaggagccagggggaagtggtctaagagacctggaactgccagaggatggcggcctgggcttccccagagccaggcgtgcgggagaggtgaggactggccccggtgggctgaggcaggggccgctgtcgtcaggcctgagccagggtgagctggtgcctgccttgcattttccttctggtgctgtgaagaccataggctggcaggcagctgagatgaactgtctttaccactgatgaggggcctctgccggctgagggtagcaagcaggggttgtgagtcaggctgggggacttgtttgaaagaaagaggagtggaaaatggttccaggagggaagaggttctttgagacacagtaccctgggaggcataggagaagggtcgggccagcccagcccagggcctgagttagactatttcccacatgttctctgcgaagtcaaaggcctgacagctctgtggcctgggaatccattttcctgcggcagagcagggcctggtgtggaaccagggagctgtgggaagccacagcagaaatggaagaaaaacaggtctcagcccagggtcctcgctcactccctcactccccactttgaagccatctctgttctgcaggtgagaggatttaaagtcagtcacaaaggcttgggaacaaaaggaattctcttccaagaatgcctctgtggtgctgtttggtctctagaaacagggtcacttttttaatgtagtaaagaagtaataaatggtggcattacacattgtgatattaa

SEQ ID NO: 12101 - protein, 41 aa, Homo sapiens
MASARTIALSQSRGPGIETAVGLQAARASPAASYRAGRGAL

SEQ ID NO: 12102 - DNA, 1268 bp, Homo sapiens
gagcaggaagaggcgccctgtgaaccctgagtgttgcaggcccagcagaccctgctgtcccaagcccacccctcctcccaccatcacctccctcacctcgggacagtagccctccacttctccagcctctcagccctgtgctcctgcatccagagtggaacccaggctggtgtccgcatctgtccctgggccccacccctggacctgccttggttgtgtcatctgttgtaaacgttcaggaggaccagggcagcatctggggcctgggatggccacagaaggggcaggccaggtggaaaggagccagggggaagtggtctaagagacctggaactgccagaggatggcggcctgggcttccccagagccaggcgtgcgggagaggtgaggactggccccggtgggctgaggcaggggccgctgtcgtcaggcctgagccagggtgagctggtgcctgccttgcattttccttctggtgctgtgaagaccataggctggcaggcagctgagatgaactgtctttaccactgatgaggggcctctgccggctgagggtagcaagcaggggttgtgagtcaggctgggggacttgtttgaaagaaagaggagtggaaaatggttccaggagggaagaggttctttgagacacagtaccctgggaggcataggagaagggtcgggccagcccagcccagggcctgagttagactatttcccacatgttctctgccttcagtggggagggggtgccaccagggctgtcggccaggattgccactcctgtttcagaggaagcaggccgagagacttgcaccttggccaagccacacaatcagtggggcagccagagctcagacctgagccattttgtcagtatccaggaccccccggattctccacgccctccccgcctctggggtgcttggtctctgcgaagtcaaaggcctgacagctctgtggcctgggaatccattttcctgcggcagagcagggcctggtgtggaaccagggagctgtgggaagccacagcagaaatggaagaaaaacaggtctcagcccagggtcctcgctcactccctcactccccactttgaagccatctctgttctgcaggtgagaggatttaaagtcagtcacaaaggcttgggaacaaaaggaattctcttccaagaatgcctctgtggtgctgtttggtctctagaaacagggtcacttttttaatgtagtaaagaagtaataaatggtggcattacacattgtgatattaa

SEQ ID NO: 12103 - protein, 124 aa, Homo sapiens [sequence omitted]

SEQ ID NO: 12104 - DNA, 1734 bp, Homo sapiens
ctctggcccatggccagtggcagggttgtggtgccaactccactctgctgagagtgagcctagggtcttggtgtgtgagtggtgctgtggccacccggtgctcaggtcaccagggcggaggccttgccctcttgccagctagtttgctttactgggttttgctttggggaaggatcttctataaataccagtccatagagcacttcatcctgctttctgggacgtaagaactcatccctctaagaagagcctctgcaacagaaaccgaaacagtgcatctgcttaggaacaaagccactctctgtctggtgtggtcagagggtcccggatgtccccccctccactctgctgggcaggggctgtgcctgcggagcttccttccaggatctgtccttctcagcttccccagccgagccgccaggggtcctgaggaccaccatggcccctgaacactcctggagctttggtgtcagccctgccacccgagagagagagagagacatgccttggtgttacttactgcacttgagcctgtctcctggagggaaatgaagaatgaggcgacgacccacttagattgctgaacacatcgagtggccatagccgtgagaagtgagagctgcccctgccctactgatggggagacaggtacaggtgacgggagcgttagccgagatgtccacccatccaccacacgcctatgggcacccttgtgccatgagggctcagcctgggccctggtggaagcaggtaccgggtcgatgctacctgcagcctcatcagagcctagctcttgggcagcgggcgtggttctggcctcttcacagccgaagtgcagacaggggctgtgggccaagctcctgaaatttccgccgacaagggcatctttcatgagtcttccttctgggccccctgttttgaaaccaaacaaggatgcagatttctgccaatcccgatgagctcggcatgagcacaggctctgttcccacgcggaggtgatgtcagccccgagcagagacaggcgcttggcattccacgagcctgggcggccgcgtcagggacagacacagtgtctgacagctggctttgagaaatactgacaccagttcacagactccattcctaccttcagggacccccagaaaggtgaaaggaccccaggttgtgtgaccagtcacctgatccagccccttcttgtcctggttctcccatcacagaggggccagggcagggcaggagtgggcctgagagcccatggctggtttccacatgcgccatgattaagctcctgcactcggcatttcagtaaagccatcttgtggtacagacagtgctgacatcagaaccttccgtggatccagcctcctacctccgggtacctgctgtgtgggagtcactcccctcccccagccctggatgctcctccagtcatcccagtagctcagggccagcccctgggatgtgtctaagaacatgagtggacaaatagatggactgcccagagcagggtttctgagacttcgctgcaggatatgtcatcgccctgcagaaaactacccccaccctaggaccccccgagttttggggtttgtaagaaattacatgtctcatttattttgaacaggtgaattttgcagtcaaattcttgtgttccattttagtacaaaaatagcattatcttttcaaaagtaacattttgaaattactcatcaaataaattgatgcttcaggaag

SEQ ID NO: 12105 - protein, 37 aa, Homo sapiens
MAPEHSWSFGVSPATRERERDMPWCYLLHLSLSPGGK

SEQ ID NO: 12106 - DNA, 3564 bp, Homo sapiens
ctctggcccatggccagtggcagggttgtggtgccaactccactctgctgagagtgagcctagggtcttggtgtgtgagtggtgctgtggccacccggtgctcaggtcaccagggcggaggccttgccctcttgccagctagtttgctttactgggttttgctttggggaaggatcttctataaataccagtccatagagcacttcatcctgctttctgggacgtaagaactcatccctctaagaagagcctctgcaacagaaaccgaaacagtgcatctgcttaggaacaaagccactctctgtctggtgtggtcagagggtcccggatgtccccccctccactctgctgggcaggggctgtgcctgcggagcttccttccaggatctgtccttctcagcttccccagccgagccgccaggggtcctgaggaccaccatggcccctgaacactcctggagctttggtgtcagccctgccacccgagagagagagagagacatgccttggtgttacttactgcacttgagcctgtctcctggagggaaatgaagaatgaggcgacgacccacttagattgctgaacacatcgagtggccatagccgtgagaagtgagagctgcccctgccctactgatggggagacaggtacaggtgacgggagcgttagccgagatgtccacccatccaccacacgcctatgggcacccttgtgccatgagggctcagcctgggccctggtggaagcaggtaccgggtcgatgctacctgcagcctcatcagagcctagctcttgggcagcgggcgtggttctggcctcttcacagccgaagtgcagacaggggctgtgggccaagctcctgaaatttccgccgacaagggcatctttcatgagtcttccttctgggccccctgttttgaaaccaaacaaggatgcagatttctgccaatcccgatgagctcggcatgagcacaggctctgttcccacgcggaggtgatgtcagccccgagcagagacaggcgcttggcattccacgagcctgggcggccgcgtcagggacagacacagtgtctgacagctggctttgagaaatactgacaccagttcacagactccattcctaccttcagggacccccagaaaggtgaaaggaccccaggttgtgtgaccagtcacctgatccagccccttcttgtcctggttctcccatcacagaggggccagggcagggcaggagtgggcctgagagcccatggctggtttccacatgcgccatgattaagctcctgcactcggcatttcagtaaagccatcttgtggtacagacagtgctgacatcagaaccttccgtggatccagcctcctacctccgggtacctgctgtgtgggagtcactcccctcccccagccctggatgctcctccagtcatcccagtagctcagggccagcccctgggatgtgtctaagaacatgagtggacaaatagatggactgcccagagcagggtttctgagacttcgctgcaggatatgtcatcgccctgcagaaaactacccccaccctaggaccccccgagttttggggtttgtaagaaattacatgtctcatttattttgaacaggtgaattttgcagtcaaattcttgtgttccattttagtacaaaaatagcattatcttttcaaaagtaacattttgaaattactcatcaaataaattgatgcttcaggaagagctgtgtcaatcctgtaggtttatagatctgcgcttcacaggaaaccccagcaggtccccggctgccgggcccaggtgatcctaatgaaactctccactgctcagggccaggtgccttgctgggagcttgcaaagccttcactcccgcggccctcacccagcccctgaagggcagcgatttgtgtctgaaggttcgctgggtcctactgctggcgcccattttacagatgtggaaaagcaagcacagaccagttaaggagcttgggcagagtgactgggagacagttcagctccgtatcagaaagggctttctaagcgtgcgtgctgtcacatgtaagcggctccctgtgggtggtgggcccccttccccaccaccaccctgacatcacaggtgtgagcagccaccgcacacactgggcatcacatgggccggggagcctggctctacagcacagtcctttggccatgaagagggggtggtagtgaagatacagagtccttggcttgataggaggtggggctgacagcctcccatcttccagcctgccccaagaccacgtgacctttcctgacctggtgcttctgtaagtcccacctcccgggtgcccctgggcgaccttggcccataaatctctttgatccccatctcatcttcaaatgaaggtttacagctcagctttttaaaaaaataaaaataactagtaggttctggctgggcacggtggctcacgcctataatcccagcactttgggaggccaaggcaggtggatcacctgaggtcaggagtttgagaccagcctggccaacatggtaaaatcccatctctactaaaaatacaaaaaagtagccaggcgttgtggtgcatgcctgtagtcccagctactcaggaggctgaggcaggagaatcacttgcaccctggaggcggaggttgcagtgagtggagattgtgccactatactccagcctgggcaacagagcgagactccgtctcaaaaaaaagaaaaaaaaaaaggagttctaactacgttccaggtatgtagctgacgtgtaatatctcatttaacctggcaaagagttggtatccgtggcctcagagaggtttagaaagttgcccaagatcacacaggagcaaagatttaaactctggacttttcttcatgtgtcatgaagtttcctcctgattttcagagacccttccaggcctgcaagcgatttgacagccatccctcagtgccaactaaacctcctgggcagcctgaccccagggtaggaaggaagcgcctacaccaaggggccctctgggagctgagatcatcctggggttttgtcgcctggtctgacttgtgcactgggatcttctcgtgccaggccaggccccgccccctccccgggactgggcagaccccctccctcatgcatctgtgtccactgaggcttccctcacctagaatggcccatccttcaggacccagctcactctcatcttctttccagggacttatcccccaaggctgtcctctgttctggtgagctcagggctcttggaacttggtctgcagtgactctggggttcctggttaggacccatgttctctaggtcccagcaccctgcacggggcagtgtttgtgacactgggcccagctattctgagagaaggactccaaccttccatcaggtgtggcccgagatgtgggtggccctgggcatggggcatggatgcattgtgactttcatgggcctcttctgcaaaaaaaaaattaaaattatactttatgactattggtagaaagataaatatattaatacattaaaatttctctttgagt

SEQ ID NO: 12107 - protein, 37 aa, Homo sapiens; identical to SEQ ID NO: 12105

SEQ ID NO: 12108 - DNA, 872 bp, Homo sapiens
agtgcatctgcttaggaacaaagccactctctgtctggtgtggtcagagggtcccggatgtccccccctccactctgctgggcaggggctgtgcctgcggagcttccttccaggatctgtccttctcagcttccccagccgagccgccaggggtcctgaggaccaccatggcccctgaacactcctggagctttggtgtcagccctgccacccgagagagagagagagacatgagacccttccaggcctgcaagcgatttgacagccatccctcagtgccaactaaacctcctgggcagcctgaccccagggtaggaaggaagcgcctacaccaaggggccctctgggagctgagatcatcctggggttttgtcgcctggtctgacttgtgcactgggatcttctcgtgccaggccaggccccgccccctccccgggactgggcagaccccctccctcatgcatctgtgtccactgaggcttccctcacctagaatggcccatccttcaggacccagctcactctcatcttctttccagggacttatcccccaaggctgtcctctgttctggtgagctcagggctcttggaacttggtctgcagtgactctggggttcctggttaggacccatgttctctaggtcccagcaccctgcacggggcagtgtttgtgacactgggcccagctattctgagagaaggactccaaccttccatcaggtgtggcccgagatgtgggtggccctgggcatggggcatggatgcattgtgactttcatgggcctcttctgcaaaaaaaaaattaaaattatactttatgactattggtagaaagataaatatattaatacattaaaatttctctttgagt

SEQ ID NO: 12109 - protein, 135 aa, Homo sapiens
MAPEHSWSFGVSPATRERERDMRPFQACKRFDSHPSVPTKPPGQPDPRVGRKRLHQGALWELRSSWGFVAWSDLCTGIFSCQARPRPLPGTGQTPSLMHLCPLRLPSPRMAHPSGPSSLSSSFQGLIPQGCPLFW

SEQ ID NO: 12110 - DNA, 648 bp, Homo sapiens
ttggatgtcgctggtctgagatggatcagatggggccagactggcagtggggagagctggcagaggcgctgggaaacagatccatgccccatgcccagggccacccacatctcgggccacacctgatggaaggttggagtccttctctcagaatagctgggcccagtgtcacaaacactgccccgtgcagggtgctgggacctagagaacatgggtcctaaccaggaaccccagagtcactgcagaccaagttccaagagccctgagctcaccagaacagaggacagccttgggggataagtccctggaaagaagatgagagtgagctgggtcctgaaggatgggccattctaggtgagggaagcctcagtggacacagatgcatgagggagggggtctgcccagtcccggggagggggcggggcctggcctggcacgagaagatcccagtgcacaagtcagaccaggcgacaaaaccccaggatgatctcagctcccagagggccccttggtgtaggcgcttccttcctaccctggggtcaggctgcccaggaggtttagttggcactgagggatggctgtcaaatcgcttgcaggcctggaagggtctctgaaaatcaggaggaaacttcatgacacatgaagaaa

SEQ ID NO: 12111 - protein, 66 aa, Homo sapiens
MDQMGPDWQWGELAEALGNRSMPHAQGHPHLGPHLMEGWSPSLRIAGPSVTNTAPCRVLGPREHGS

SEQ ID NO: 12112 - DNA, 5086 bp, Homo sapiens
gagcggccgcgccgggtccccgggacggggtggaagtgggggtggggggaggggatcggggccgggccggggccgcgctgcctgcgatgccgggcgcccgccgcagccgctgccgccggagcccgggatggggcgagaggctgcggcggacgccagcatctccccgccggggaccccgggggccgcggagccgccgccgccgctgctgccgccgttgctgagacccagcgggcgatgggatgaagatgagacgctacaagctctttctcatgttctgtatggccggcctgtgcctcatctccttcctgcacttcttcaagaccctgtcctatgtcaccttcccccgagaactggcctccctcagccctaacctggtgtccagctttttctggaacaatgccccggtcacgccccaggccagccccgagccaggaggccctgacctgctgcgtaccccactctactcccactcgcccctgctgcagccgctgccgcccagcaaggcggccgaggagctccaccgggtggacttggtgctgcccgaggacaccaccgagtatttcgtgcgcaccaaggccggcggcgtctgcttcaaacccggcaccaagatgctggagaggccgcccccgggacggccggaggagaagcctgagggggccaacggctcctcggcccggcggccaccccggtacctcctgagcgcccgggagcgcacggggggccgaggcgcccggcgcaagtgggtggagtgcgtgtgcctgcccggctggcacggacccagctgcggcgtgcccactgtggtgcagtactccaacctgcccaccaaggagcggctggtgcccagggaggtgccgcgccgcgtcatcaacgccatcaacgtcaaccacgagttcgacctgctggacgtgcgcttccacgagctgggcgacgtggtggacgcctttgtggtgtgcgagtccaacttcacggcttatggggagccgcggccgctcaagttccgggagatgctgaccaatggcaccttcgagtacatccgccacaaggtgctctatgtcttcctggaccacttcccgcccggcggccggcaggacggctggatcgccgacgactacctgcgcaccttcctcacccaggacggcgtctcgcggctgcgcaacctgcggcccgacgacgtcttcatcattgacgatgcggacgagatcccggcccgtgacggcgtccttttcctcaagctctacgatggctggaccgagcccttcgccttccacatgcgcaagtcgctctacggcttcttctggaagcagccgggcaccctggaggtggtgtcaggctgcacggtggacatgctgcaggcagtgtatgggctggacggcatccgcctgcgccgccgccagtactacaccatgcccaacttcagacagtatgagaaccgcaccggccacatcctggtgcagtggtcgctgggcagccccctgcacttcgccggctggcactgctcctggtgcttcacgcccgagggcatctacttcaagctcgtgtccgcccagaatggcgacttcccacgctggggtgactacgaggacaagcgggacctgaactacatccgcggcctgatccgcaccgggggctggttcgacggcacgcagcaggagtacccgcctgcagaccccagcgagcacatgtatgcgcccaagtacctgctgaagaactacgaccggttccactacctgctggacaacccctaccaggagcccaggagcacggcggcgggcgggtggcgccacaggggtcccgagggaaggccgcccgcccggggcaaactggacgaggcggaagtctagagctgcatgatctgatagggtttgtgacagggcgggggtggcggcggcccctagcgctatctccctgcctcctgccggctccttggttcttgaggggaccaggagtgggtggggagtgggggtgggggtagggtttccctactgaagcccttgtgaatcaagggtcaggcctttgagctcagaaaatatccctcctgttgggagagggcgcaggccgtgacgtctgggtggcccttatgactgccaagactgctgtggccaggaggtgccactggagtgtgcgtggtggtccctgggtagcgggggagggtaggcaggattggggaagagagcctgcaggatctcaccaggcagcctctggggggtggccaggccgggaaaaagcccaccatttggcatccctgggccttgggctccgtgtgggagaccggcctgccaggaggacccagggctctgtaagtagatgcatttgggtccaggaggaagcgtggacacctcgtagggaagagatgaaaaagccacatcctaccaagaggaggtgctgagggatgctttgcagtgtagtcagaagtgctgggccagatggagacagaactccaccccctgccgcaaaggacaggacctggctgccctgggatgctggtgcctgagtctgtctctgtgcacccctcaggctgtcgtgagccaacacaggggcctggagaaccctgaggagctttccttttggttctaaacccggcgttgacgttccttctccctttcacattgctgtcttgtggactgtgcactcagtccttgcaaggccaagagtccagttgtaggtgtggccttgagggggaagtggggaggagaagactgacatgagtcctctgcacggatccgtctctccctccccatcaccccttccttctgacacccagtcccagctgtccactgtcccaggtgcagtcactgttgtgcccttccttggggcaggctggctgggggccagaaaggggccatgaggctgtcttgggcccaaaaagggacaataaggccagttgtatgcttcctgttcctcatagcttgccttggtggggatgtctttgttggagttgattctgagctgctgtgattaggagaccctgaaatacagtggtttaagcaagatggaagcttgtttctaattagtctagattgagatggcccagagctggtagggcagctctgcgtttcttcatacgcaccttccaattctgggtacacagcggctgctccagcgcccaccctcctgtgtgcatccaagcctgggggaagcagaaatagacaagagggcacacccactttttgctaaaggcatgagccagaattggcaggctcacctctgctggcctctcattggctgggactcagtcacatggccacaagcagctgctagggaacctgggaagtgtagtcttcagcggggccgccatgtgcctggcctcaccttgggagttatcttattgatggaggagaagagaatggatatgggggaccagtagcatctctgggagagggggagggagcagcaataactcagtcgtcggatccagctctcattgtcagagtttccggaacagcttgctcctgtttccctcactgtgcagcccagggctgggggcagtgaggagcttgcagctctgtgggaaggggaaacaccccctcccctcggcccctcagacgctacccaatgatgccggtttgcagagttggcctgtggaatggctcatgtttgtgcgtgtgtgtgtgtatatttatgggcatgggtgcatgcttggtgtgtatttgtacatgtctgtattgctgtgtccctgtaaatacatgcttgtgtatggatggaagaggccaggcccaggcctggcctcttcctcgggcctgtggccacacctcctgcagctccccaaaatgactgaggcagaaagcccttggggagcctagaaagcaaagctaaaggggatgcagggtctgtctgtctgtctgtctttcagtctgaggaatgagaatcctgacctgagggctgtgcagctgagagcccactacctccccagcccctctcggccccagccgcatcatcccacctgtcccctcccccccacctccagtggggctttctccagatgtcttatggttgggggtttcctgatgggccaggagaggagggcatcttcttgcgacagcactgtctgggttaagtgcccagtgagggcatggtgtggggagctggcctcagaggagccgctggtgggcaagcgtgaagtgggctgaggggctctgagccactttgctcccatctaggggactgccccccatggaactcctttgaagtcacagcagccttcctttctgtttgctcttggggctgagaggtggctcaaacactcggggtccctatggctctgggtcaatctaggccaggctgcaccccatggacagggagtctcagggctcctgatcatgcccaggccctggcctggggcctccctccttggcagctttcccacccccacgcccctggcatcctcagttgctatgggatgcccctccagggcaccagctcagggctaagcgaaggaagataggagcagctcagagctgccaggctctgccttcctcacagacctggtggggcaggtcctgttcacagcagcaggagtgaaggcctggccatcggtggagagggcagctgtcagagggctgggggccagggcacaggattgaagagtttcacatatcatcacagcatacactgggaatttggtgggggcagaagaacccagggccactccctcaatatgaagggaaaccaagctgaatgtgaccaccggcacactgctgccatgtcccatgtccacctttctccccgggaataactggccctgagacccctagacccaaggaggcctgtccatgccaagcatccgggaagcatggctggccttatccacccatgggtcacgtcggttcccaggggcagcatgggagatctttgggggcaacagggagagtctgggtggggagacgggacttgtccaagcagaaggcaggaccctgggaaatgcataatgtaaggacatcaataatagtattattttttttgtaagggaaaatcaatatgtacattctgaaatcattttctctgtaaatggttggatttcatttcacccttaaagggatgcttaaaggagaagataatattaataataaaaacagctacaaagtctgaa

SEQ ID NO: 12113 - protein, 80 aa, Homo sapiens
MGREAAADASISPPGTPGAAEPPPPLLPPLLRPSGRWDEDETLQALSHVLYGRPVPHLLPALLQDPVLCHLPPRTGLPQP

SEQ ID NO: 12114 - DNA, 660 bp, Homo sapiens
ccaggcagcagtgaggggcagccccaccctcccagagccactcctaggtgccaggtgcttgaggaggtagggacactgtggttttacaggtggagagcctgtcagggccaagcgctcagtaaaaagcaggtccatctcttgtgagcctcgccttgctccctctctgtgtgggagggttcccgagaactgcaccccgactcccagaggggctactggacattctcagtgggacgaggatagggaaccaaggaacactatatgcatggaagagctcagaaatacactctcggcacggcgggaccccgagtctctgacaaagtaccgggcagggacagggcgggggtcagggagcctgaacccacactgcctctcctgcaagggggctcaggagtccatagccttttggagggagttgggtctctctgggagtgggggcagaggctggattctgcccacaggagacggccagacagctattgtactgctggctccaagcccaagggtccacccttagcaaggcattcattcctcagtcccagcctgctcaggagttcccccacgctatcccctaagcctggagaggaatttcctgtttgcttgtcttgctcagggtggtggctgaccacagagaacagtgcaatagcatccagtgaaagaatg

SEQ ID NO: 12115 - protein, 133 aa, Homo sapiens
MHGRAQKYTLGTAGPRVSDKVPGRDRAGVREPEPTLPLLQGGSGVHSLLEGVGSLWEWGQRLDSAHRRRPDSYCTAGSKPKGPPLARHSFLSPSLLRSSPTLSPKPGEEFPVCLSCSGWWLTTENSAIASSER

SEQ ID NO: 12116 - DNA, 4933 bp, Homo sapiens
acacctgggctcagcctctagggaggaaactgctgccatagagccttgaaagccaggcagaggggactagacactgtgcctcaaggatgaagatgagacgctacaagctctttctcatgttctgtatggccggcctgtgcctcatctccttcctgcacttcttcaagaccctgtcctatgtcaccttcccccgagaactggcctccctcagccctaacctggtgtccagctttttctggaacaatgccccggtcacgccccaggccagccccgagccaggaggccctgacctgctgcgtaccccactctactcccactcgcccctgctgcagccgctgccgcccagcaaggcggccgaggagctccaccgggtggacttggtgctgcccgaggacaccaccgagtatttcgtgcgcaccaaggccggcggcgtctgcttcaaacccggcaccaagatgctggagaggccgcccccgggacggccggaggagaagcctgagggggccaacggctcctcggcccggcggccaccccggtacctcctgagcgcccgggagcgcacggggggccgaggcgcccggcgcaagtgggtggagtgcgtgtgcctgcccggctggcacggacccagctgcggcgtgcccactgtggtgcagtactccaacctgcccaccaaggagcggctggtgcccagggaggtgccgcgccgcgtcatcaacgccatcaacgtcaaccacgagttcgacctgctggacgtgcgcttccacgagctgggcgacgtggtggacgcctttgtggtgtgcgagtccaacttcacggcttatggggagccgcggccgctcaagttccgggagatgctgaccaatggcaccttcgagtacatccgccacaaggtgctctatgtcttcctggaccacttcccgcccggcggccggcaggacggctggatcgccgacgactacctgcgcaccttcctcacccaggacggcgtctcgcggctgcgcaacctgcggcccgacgacgtcttcatcattgacgatgcggacgagatcccggcccgtgacggcgtccttttcctcaagctctacgatggctggaccgagcccttcgccttccacatgcgcaagtcgctctacggcttcttctggaagcagccgggcaccctggaggtggtgtcaggctgcacggtggacatgctgcaggcagtgtatgggctggacggcatccgcctgcgccgccgccagtactacaccatgcccaacttcagacagtatgagaaccgcaccggccacatcctggtgcagtggtcgctgggcagccccctgcacttcgccggctggcactgctcctggtgcttcacgcccgagggcatctacttcaagctcgtgtccgcccagaatggcgacttcccacgctggggtgactacgaggacaagcgggacctgaactacatccgcggcctgatccgcaccgggggctggttcgacggcacgcagcaggagtacccgcctgcagaccccagcgagcacatgtatgcgcccaagtacctgctgaagaactacgaccggttccactacctgctggacaacccctaccaggagcccaggagcacggcggcgggcgggtggcgccacaggggtcccgagggaaggccgcccgcccggggcaaactggacgaggcggaagtctagagctgcatgatctgatagggtttgtgacagggcgggggtggcggcggcccctagcgctatctccctgcctcctgccggctccttggttcttgaggggaccaggagtgggtggggagtgggggtgggggtagggtttccctactgaagcccttgtgaatcaagggtcaggcctttgagctcagaaaatatccctcctgttgggagagggcgcaggccgtgacgtctgggtggcccttatgactgccaagactgctgtggccaggaggtgccactggagtgtgcgtggtggtccctgggtagcgggggagggtaggcaggattggggaagagagcctgcaggatctcaccaggcagcctctggggggtggccaggccgggaaaaagcccaccatttggcatccctgggccttgggctccgtgtgggagaccggcctgccaggaggacccagggctctgtaagtagatgcatttgggtccaggaggaagcgtggacacctcgtagggaagagatgaaaaagccacatcctaccaagaggaggtgctgagggatgctttgcagtgtagtcagaagtgctgggccagatggagacagaactccaccccctgccgcaaaggacaggacctggctgccctgggatgctggtgcctgagtctgtctctgtgcacccctcaggctgtcgtgagccaacacaggggcctggagaaccctgaggagctttccttttggttctaaacccggcgttgacgttccttctccctttcacattgctgtcttgtggactgtgcactcagtccttgcaaggccaagagtccagttgtaggtgtggccttgagggggaagtggggaggagaagactgacatgagtcctctgcacggatccgtctctccctccccatcaccccttccttctgacacccagtcccagctgtccactgtcccaggtgcagtcactgttgtgcccttccttggggcaggctggctgggggccagaaaggggccatgaggctgtcttgggcccaaaaagggacaataaggccagttgtatgcttcctgttcctcatagcttgccttggtggggatgtctttgttggagttgattctgagctgctgtgattaggagaccctgaaatacagtggtttaagcaagatggaagcttgtttctaattagtctagattgagatggcccagagctggtagggcagctctgcgtttcttcatacgcaccttccaattctgggtacacagcggctgctccagcgcccaccctcctgtgtgcatccaagcctgggggaagcagaaatagacaagagggcacacccactttttgctaaaggcatgagccagaattggcaggctcacctctgctggcctctcattggctgggactcagtcacatggccacaagcagctgctagggaacctgggaagtgtagtcttcagcggggccgccatgtgcctggcctcaccttgggagttatcttattgatggaggagaagagaatggatatgggggaccagtagcatctctgggagagggggagggagcagcaataactcagtcgtcggatccagctctcattgtcagagtttccggaacagcttgctcctgtttccctcactgtgcagcccagggctgggggcagtgaggagcttgcagctctgtgggaaggggaaacaccccctcccctcggcccctcagacgctacccaatgatgccggtttgcagagttggcctgtggaatggctcatgtttgtgcgtgtgtgtgtgtatatttatgggcatgggtgcatgcttggtgtgtatttgtacatgtctgtattgctgtgtccctgtaaatacatgcttgtgtatggatggaagaggccaggcccaggcctggcctcttcctcgggcctgtggccacacctcctgcagctccccaaaatgactgaggcagaaagcccttggggagcctagaaagcaaagctaaaggggatgcagggtctgtctgtctgtctgtctttcagtctgaggaatgagaatcctgacctgagggctgtgcagctgagagcccactacctccccagcccctctcggccccagccgcatcatcccacctgtcccctcccccccacctccagtggggctttctccagatgtcttatggttgggggtttcctgatgggccaggagaggagggcatcttcttgcgacagcactgtctgggttaagtgcccagtgagggcatggtgtggggagctggcctcagaggagccgctggtgggcaagcgtgaagtgggctgaggggctctgagccactttgctcccatctaggggactgccccccatggaactcctttgaagtcacagcagccttcctttctgtttgctcttggggctgagaggtggctcaaacactcggggtccctatggctctgggtcaatctaggccaggctgcaccccatggacagggagtctcagggctcctgatcatgcccaggccctggcctggggcctccctccttggcagctttcccacccccacgcccctggcatcctcagttgctatgggatgcccctccagggcaccagctcagggctaagcgaaggaagataggagcagctcagagctgccaggctctgccttcctcacagacctggtggggcaggtcctgttcacagcagcaggagtgaaggcctggccatcggtggagagggcagctgtcagagggctgggggccagggcacaggattgaagagtttcacatatcatcacagcatacactgggaatttggtgggggcagaagaacccagggccactccctcaatatgaagggaaaccaagctgaatgtgaccaccggcacactgctgccatgtcccatgtccacctttctccccgggaataactggccctgagacccctagacccaaggaggcctgtccatgccaagcatccgggaagcatggctggccttatccacccatgggtcacgtcggttcccaggggcagcatgggagatctttgggggcaacagggagagtctgggtggggagacgggacttgtccaagcagaaggcaggaccctgggaaatgcataatgtaaggacatcaataatagtattattttttttgtaagggaaaatcaatatgtacattctgaaatcattttctctgtaaatggttggatttcatttcacccttaaagggatgcttaaaggagaagataatattaataataaaaacagctacaaagtctgaa

SEQ ID NO: 12117 - protein, 533 aa, Homo sapiens; identical to SEQ ID NO: 2033

SEQ ID NO: 12118 - DNA, 498 bp, Homo sapiens
gctactggtggtcatcggggacgcagatatgtgtgtctccattttgcagatgaggacatggaggcctcaagaggttaagtgacttgctcagccacacacagctgatgggaatgaaacagacggaaacggagactccccaagctgacaggcggactacagatctgggggttctgctccaggctcaacacaagtggcctgggcgagggagggcctggtagaccatgacacccagcatcgaggaattctgcttccccagcaggctcagaaggaagaagtctgcttcaggggccaggcctggtcaaagactccatcttccctggatggccagagtcaaatccttgcaaatcccgttcaccatggagcagagacgagacctatgttacccaggctgtatgtgaattcctggactcaagcaatcctcccatctcagcctcgtgagtagttgggacaagtctcacaccaccatacccagcttaatttaatttgaattttaatagc

SEQ ID NO: 12119 - protein, 58 aa, Homo sapiens
MTPSIEEFCFPSRLRRKKSASGARPGQRLHLPWMARVKSLQIPFTMEQRRDLCYPGCM

SEQ ID NO: 12120 - DNA, 5667 bp, Homo sapiens
catgtgggatcctgaaacctcaagctgcatttagtttcagagtccggggaggtgctcactgtcttctgactcctgagatgccgactccctctgccataccccagggaaggaaccagtagcagaagctccagggaaactgatgaaggtcaacagaaggaagaacttctagcagcccaaagggattggaatgggcggcccgtgggagtggacatgcagaggcactggcctggggtgaagccttggaccaaattcttacttgcaggccctctggacccaggagaggagtctgcaggcctcggctgggccggattccgcagattctggcctaggtcctgaatgcctggtgagttactgagaaaggccctacaggctgagggtgccagtcagggtgaagcagccccgcaattggcccacctccttttgtaccttaacaaaggtgtctttgttacctttcttaaaggaaataaagccggtcaggagcaaggcctggcatattcagggggtcatctgtatttggtcgtccagcgggaaacccaaatggaaggaaagaaaaaaaaaaaaaaccatgcatttatagaacctctgccaatggccaggctccatgcagaatgctttgacaccgtggctcagccaggtctcccacaggactgcaaaacagagggtgacatctttcttttagatcggagaagactgaggaccagagaagctaagtaacttgccaaagggcacacagcaaatggagtcttgctcttgtcacccaggttctggagtgcaatggcgtgatcatggctcactgcaacttccgccccctgggttcaagatgaagatgagacgctacaagctctttctcatgttctgtatggccggcctgtgcctcatctccttcctgcacttcttcaagaccctgtcctatgtcaccttcccccgagaactggcctccctcagccctaacctggtgtccagctttttctggaacaatgccccggtcacgccccaggccagccccgagccaggaggccctgacctgctgcgtaccccactctactcccactcgcccctgctgcagccgctgccgcccagcaaggcggccgaggagctccaccgggtggacttggtgctgcccgaggacaccaccgagtatttcgtgcgcaccaaggccggcggcgtctgcttcaaacccggcaccaagatgctggagaggccgcccccgggacggccggaggagaagcctgagggggccaacggctcctcggcccggcggccaccccggtacctcctgagcgcccgggagcgcacggggggccgaggcgcccggcgcaagtgggtggagtgcgtgtgcctgcccggctggcacggacccagctgcggcgtgcccactgtggtgcagtactccaacctgcccaccaaggagcggctggtgcccagggaggtgccgcgccgcgtcatcaacgccatcaacgtcaaccacgagttcgacctgctggacgtgcgcttccacgagctgggcgacgtggtggacgcctttgtggtgtgcgagtccaacttcacggcttatggggagccgcggccgctcaagttccgggagatgctgaccaatggcaccttcgagtacatccgccacaaggtgctctatgtcttcctggaccacttcccgcccggcggccggcaggacggctggatcgccgacgactacctgcgcaccttcctcacccaggacggcgtctcgcggctgcgcaacctgcggcccgacgacgtcttcatcattgacgatgcggacgagatcccggcccgtgacggcgtccttttcctcaagctctacgatggctggaccgagcccttcgccttccacatgcgcaagtcgctctacggcttcttctggaagcagccgggcaccctggaggtggtgtcaggctgcacggtggacatgctgcaggcagtgtatgggctggacggcatccgcctgcgccgccgccagtactacaccatgcccaacttcagacagtatgagaaccgcaccggccacatcctggtgcagtggtcgctgggcagccccctgcacttcgccggctggcactgctcctggtgcttcacgcccgagggcatctacttcaagctcgtgtccgcccagaatggcgacttcccacgctggggtgactacgaggacaagcgggacctgaactacatccgcggcctgatccgcaccgggggctggttcgacggcacgcagcaggagtacccgcctgcagaccccagcgagcacatgtatgcgcccaagtacctgctgaagaactacgaccggttccactacctgctggacaacccctaccaggagcccaggagcacggcggcgggcgggtggcgccacaggggtcccgagggaaggccgcccgcccggggcaaactggacgaggcggaagtctagagctgcatgatctgatagggtttgtgacagggcgggggtggcggcggcccctagcgctatctccctgcctcctgccggctccttggttcttgaggggaccaggagtgggtggggagtgggggtgggggtagggtttccctactgaagcccttgtgaatcaagggtcaggcctttgagctcagaaaatatccctcctgttgggagagggcgcaggccgtgacgtctgggtggcccttatgactgccaagactgctgtggccaggaggtgccactggagtgtgcgtggtggtccctgggtagcgggggagggtaggcaggattggggaagagagcctgcaggatctcaccaggcagcctctggggggtggccaggccgggaaaaagcccaccatttggcatccctgggccttgggctccgtgtgggagaccggcctgccaggaggacccagggctctgtaagtagatgcatttgggtccaggaggaagcgtggacacctcgtagggaagagatgaaaaagccacatcctaccaagaggaggtgctgagggatgctttgcagtgtagtcagaagtgctgggccagatggagacagaactccaccccctgccgcaaaggacaggacctggctgccctgggatgctggtgcctgagtctgtctctgtgcacccctcaggctgtcgtgagccaacacaggggcctggagaaccctgaggagctttccttttggttctaaacccggcgttgacgttccttctccctttcacattgctgtcttgtggactgtgcactcagtccttgcaaggccaagagtccagttgtaggtgtggccttgagggggaagtggggaggagaagactgacatgagtcctctgcacggatccgtctctccctccccatcaccccttccttctgacacccagtcccagctgtccactgtcccaggtgcagtcactgttgtgcccttccttggggcaggctggctgggggccagaaaggggccatgaggctgtcttgggcccaaaaagggacaataaggccagttgtatgcttcctgttcctcatagcttgccttggtggggatgtctttgttggagttgattctgagctgctgtgattaggagaccctgaaatacagtggtttaagcaagatggaagcttgtttctaattagtctagattgagatggcccagagctggtagggcagctctgcgtttcttcatacgcaccttccaattctgggtacacagcggctgctccagcgcccaccctcctgtgtgcatccaagcctgggggaagcagaaatagacaagagggcacacccactttttgctaaaggcatgagccagaattggcaggctcacctctgctggcctctcattggctgggactcagtcacatggccacaagcagctgctagggaacctgggaagtgtagtcttcagcggggccgccatgtgcctggcctcaccttgggagttatcttattgatggaggagaagagaatggatatgggggaccagtagcatctctgggagagggggagggagcagcaataactcagtcgtcggatccagctctcattgtcagagtttccggaacagcttgctcctgtttccctcactgtgcagcccagggctgggggcagtgaggagcttgcagctctgtgggaaggggaaacaccccctcccctcggcccctcagacgctacccaatgatgccggtttgcagagttggcctgtggaatggctcatgtttgtgcgtgtgtgtgtgtatatttatgggcatgggtgcatgcttggtgtgtatttgtacatgtctgtattgctgtgtccctgtaaatacatgcttgtgtatggatggaagaggccaggcccaggcctggcctcttcctcgggcctgtggccacacctcctgcagctccccaaaatgactgaggcagaaagcccttggggagcctagaaagcaaagctaaaggggatgcagggtctgtctgtctgtctgtctttcagtctgaggaatgagaatcctgacctgagggctgtgcagctgagagcccactacctccccagcccctctcggccccagccgcatcatcccacctgtcccctcccccccacctccagtggggctttctccagatgtcttatggttgggggtttcctgatgggccaggagaggagggcatcttcttgcgacagcactgtctgggttaagtgcccagtgagggcatggtgtggggagctggcctcagaggagccgctggtgggcaagcgtgaagtgggctgaggggctctgagccactttgctcccatctaggggactgccccccatggaactcctttgaagtcacagcagccttcctttctgtttgctcttggggctgagaggtggctcaaacactcggggtccctatggctctgggtcaatctaggccaggctgcaccccatggacagggagtctcagggctcctgatcatgcccaggccctggcctggggcctccctccttggcagctttcccacccccacgcccctggcatcctcagttgctatgggatgcccctccagggcaccagctcagggctaagcgaaggaagataggagcagctcagagctgccaggctctgccttcctcacagacctggtggggcaggtcctgttcacagcagcaggagtgaaggcctggccatcggtggagagggcagctgtcagagggctgggggccagggcacaggattgaagagtttcacatatcatcacagcatacactgggaatttggtgggggcagaagaacccagggccactccctcaatatgaagggaaaccaagctgaatgtgaccaccggcacactgctgccatgtcccatgtccacctttctccccgggaataactggccctgagacccctagacccaaggaggcctgtccatgccaagcatccgggaagcatggctggccttatccacccatgggtcacgtcggttcccaggggcagcatgggagatctttgggggcaacagggagagtctgggtggggagacgggacttgtccaagcagaaggcaggaccctgggaaatgcataatgtaaggacatcaataatagtattattttttttgtaagggaaaatcaatatgtacattctgaaatcattttctctgtaaatggttggatttcatttcacccttaaagggatgcttaaaggagaagataatattaataataaaaacagctacaaagtctgaa

SEQ ID NO: 12121 - protein, 561 aa, Homo sapiens
MESCSCHPGSGVQWRDHGSLQLPPPGFKMKMRRYKLFLMFCMAGLCLISFLHFFKTLSYVTFPRELASLSPNLVSSFFWNNAPVTPQASPEPGGPDLLRTPLYSHSPLLQPLPPSKAAEELHRVDLVLPEDTTEYFVRTKAGGVCFKPGTKMLERPPPGRPEEKPEGANGSSARRPPRYLLSARERTGGRGARRKWVECVCLPGWHGPSCGVPTVVQYSNLPTKERLVPREVPRRVINAINVNHEFDLLDVRFHELGDVVDAFVVCESNFTAYGEPRPLKFREMLTNGTFEYIRHKVLYVFLDHFPPGGRQDGWIADDYLRTFLTQDGVSRLRNLRPDDVFIIDDADEIPARDGVLFLKLYDGWTEPFAFHMRKSLYGFFWKQPGTLEVVSGCTVDMLQAVYGLDGIRLRRRQYYTMPNFRQYENRTGHILVQWSLGSPLHFAGWHCSWCFTPEGIYFKLVSAQNGDFPRWGDYEDKRDLNYIRGLIRTGGWFDGTQQEYPPADPSEHMYAPKYLLKNYDRFHYLLDNPYQEPRSTAAGGWRHRGPEGRPPARGKLDEAEV

SEQ ID NO: 12122 - DNA, 540 bp, Homo sapiens
ctcttctggctgccccctccctgcatcaaggctagaataaataccagccaacccctaaacaaacccagatgcaacacatacaattggcttttgtcccctgtagctgtcctttcatcttctctttccctttccagcaaaatcactgtctccattttttcttttctttctttcttttttttttgagacagagtctcactctgttgcccaggctggagtgcagtggcatgatctcggctcactgcaacctccgcctcctgagttcaagtgattctcctgcctcagcctcccaagtagctgggactacaggcgcctgccatcatgcctggctaatttttctatttttagtagagatggggtttcatcatgttggccaggctggtctcaaactcctgaccccaggtgatccgcccacctcagcctcccaaagtgctgggattacagacgtgagccaccgtgcccagccctgcaacagactcttgattggtctccctgcctcagccctggttccattccgttattctcaagccagacagatcccat

SEQ ID NO: 12123 - protein, 156 aa, Homo sapiens
MQHIQLAFVPCSCPFIFSFPFQQNHCLHFFFSFFLFFLRQSLTLLPRLECSGMISAHCNLRLLSSSDSPASASQVAGTTGACHHAWLIFLFLVEMGFHHVGQAGLKLLTPGDPPTSASQSAGITDVSHRAQPCNRLLIGLPASALVPFRYSQARQI

SEQ ID NO: 12124 - DNA, 585 bp, Homo sapiens
agatgcaacacatacaattggcttttgtcccctgtagctgtcctttcatcttctctttccctttccagcaaaatcactgtctccattttttcttttctttctttcttttttttttgagacagagtctcactctcctaaagacagagcgagactccatctcaaaacaaacaaacaaacaaacaaacaaacaccctgcaatatcaatccaagagatcctggaatgcctcttgccctgtgaaacctggcagagccctgaggtttgggtcagtgccccctgccgtgggtctctggcctacaaaggcaccatgggctggagtacagtagcgtgatcttggctcactgcaacctctgcctcccaggctcaagcaattctcctgcctcagcctcccaagtaactgggattacagattatgaggcgtaagatgtgcagacatttccgtggggcccaaagaaggcacgtgagtgtgttagagggaggcgaggaaggggctgggagagatttcccagtgaaggggggcatttgaggtagactttgaaggaagggtaggagtttgccagaagccatggggcctggggagtaggaac

SEQ ID NO: 12125 - protein, 108 aa, Homo sapiens [sequence omitted]

SEQ ID NO: 12126 - DNA, 604 bp, Homo sapiens
aattagccacccctcacctcatgcatcaggcctcacatgccctctctgattaatcttcaacagcctgataagctagtcctttctcaccatctccaatacacaggtggagggactaaggctcacgaagcccaacgcacttgccctgcactcaccaccaacccacctttcaaatgagacaggcttgatcaccctgacccaggtgaaatggtccatccctcctgtctttccacaaaacgttcattcattcaacaattacacccattcactactatatgtgagtcactgttctggatgaggaactgagacagtcacagagaggttaggagacttgcccacggtcatgcagctcgtaagtgctggtgccaggattcaagtatggctgagtgcttgtcttcaaccctcctagatcaccccctgtggtgaagttctattaccgttcattacgtgcacagttctcaaaataatcctatgtgtgtgacacccagcccctgccagtcccccatggccccgtggagccgagaggcggtgctgagtctctatcgggctctgttgcgccagggccgacagcttcgctacactgatcgagacttctactttgcctcca

SEQ ID NO: 12127 - protein, 44 aa, Homo sapiens
MCVTPSPCQSPMAPWSREAVLSLYRALLRQGRQLRYTDRDFYFA

SEQ ID NO: 12128 - DNA, 2268 bp, Homo sapiens
ctccatctcaaaacaaacaaacaaacaaacaaacaaacaccctgcaatatcaatccaagagatcctggaatgcctcttgccctgtgaaacctggcagagccctgaggtttgggtcagtgccccctgccgtgggtctctggcctacaaaggcaccatggtgtgacacccagcccctgccagtcccccatggccccgtggagccgagaggcggtgctgagtctctatcgggctctgttgcgccagggccgacagcttcgctacactgatcgagacttctactttgcctccatccgccgtgaattccgaaaaaatcagaagctagaggacgctgaggcccgggagaggcagctggagaagggcctggtctttctcaacggcaaattggggaggatcatttaggatcctccaagggaaagaggacaaaggtgccttctgtagacactcctgctctcttccatccccatcttacagatgtattaagaagcctcagatgagcaatggcaggcgctggtgagcgcaaaggcaagaaggatgacaatggcattggcacggccattgactttgtgctctccaatgcccggctggtgctgggggtgggtggagcggccatgctgggcatcgccacgctggcagttaagcggatgtacgatcgggcgatcagtgcccctaccagccccacccgcctgagccattcggggaaaaggagctgggaagaacccaactggatgggctccccacgactgctgaacagggacatgaagacgggcctgagccggtccttgcagacccttcccacagactcctccaccttcgacacagatacattctgcccgccccggcccaagccagtggccaggaagggccaggtagacttgaagaagtcacgactccgcatgtccctgcaggagaaacttcttacttactaccggaaccgggcagccatccctgctggagagcaggctcgggccaagcaagctgctgtggacatatgtgccgagctccggagcttcctgcgggccaagttgcctgacatgccgcttcgggacatgtacttgagtggcagcctctacgatgacctgcaggtggtgacagctgaccacatccaactcattgtgccccttgtgctggagcagaacctgtggtcatgtattcctggtgaagacaccatcatgaatgtccctggcttcttcctggtgcgtcgtgagaatccagagtactttcctcgtgggagcagttactgggaccgctgtgtagtagggggctacctctctccaaagacagtcgcagatacatttgagaaggtagtggctggctccatcaattggccagccatagggtccctcttggactatgtgatccgcccggccccacccccagaagccctcacactggaggtgcagtatgagcgtgacaaacatctcttcattgacttcctgccatcagtgaccctcggtgacacagtcttggtggccaaaccacaccggctagcccagtatgacaacctgtggcggctgagcctgcgtcccgcggagacggcacgcctgcgggctctggaccaggctgactcgggctgccgatctctgtgcctcaagatcctcaaggccatatgcaagtccaccccggctctgggccacctcactgccagccagctaaccaatgtcatcctccacttggcccaggaggaggctgactggtctccggatatgctggccgaccgtttcctgcaggccttgaggggacttatcagctacttagaggctggagtcctgcccagtgccctaaaccccaaggacaaggccttgaaggaacgcagccttagacatcaggtgaggatgatggaggtagacagtcgactgaatgtcagctggaaaatccagtcactagttggggtttggtggccatgttttctacccagacaggccctgcttttctaggatgtggccttagagcaagaacagacccaacagccagcccttcatcctccagcgtctgccataggaatgtgagaggggtgtttgctgagcgctccgggcacggccagagggcaagtgagcatgcacggacctcttccccctgtcctgtttctcacccagcacctggggagatcggtgctaccaaggaagagagcacacagataagacagaggggaggaggtgggcatttcctacattcctccttgtttgccgctgctgagattgcagtatttattgcaatgtaaatgtatcctgaaggtggggaggaatgtttaatctaccatgtccgtgtgtc

SEQ ID NO: 12129 - protein, 478 aa, Homo sapiens
MAGAGERKGKKDDNGIGTAIDFVLSNARLVLGVGGAAMLGIATLAVKRMYDRAISAPTSPTRLSHSGKRSWEEPNWMGSPRLLNRDMKTGLSRSLQTLPTDSSTFDTDTFCPPRPKPVARKGQVDLKKSRLRMSLQEKLLTYYRNRAAIPAGEQARAKQAAVDICAELRSFLRAKLPDMPLRDMYLSGSLYDDLQVVTADHIQLIVPLVLEQNLWSCIPGEDTIMNVPGFFLVRRENPEYFPRGSSYWDRCVVGGYLSPKTVADTFEKVVAGSINWPAIGSLLDYVIRPAPPPEALTLEVQYERDKHLFIDFLPSVTLGDTVLVAKPHRLAQYDNLWRLSLRPAETARLRALDQADSGCRSLCLKILKAICKSTPALGHLTASQLTNVILHLAQEEADWSPDMLADRFLQALRGLISYLEAGVLPSALNPKDKALKERSLRHQVRMMEVDSRLNVSWKIQSLVGVWWPCFLPRQALLF

SEQ ID NO: 12130 - DNA, 681 bp, Homo sapiens
acacacggaggcggggctcaggattggggggcggaatcatgcgcagggggcggggcccgagagagagcttggagaagaccggaagtccctccgcctccactcgccctcgtgctcccttcagccccttcgcagctccgtgcgcaaggtcgtgtcccggaagtgaaggggccatgttgatgggtgacccggggagaggtacccggccagaggcgagtcctgcggagtggtagcgcgcacggcctgcggtgtgacacccagcccctgccagtcccccatggccccgtggagccgagaggcggtgctgagtctctatcgggctctgttgcgccagggccgacagcttcgctacactgatcgagacttctactttgcctccatccgccgtgaattccgaaaaaatcagaagctagaggacgctgaggcccgggagaggcagctggagaagggcctggtctttctcaacggcaaattggggaggatcatttaggatcctccaagggaaagaggacaaaggtgccttctgtagacactcctgctctcttccatccccatcttacagatgtattaagaagcctcagatgagcaatggcaggcgctggtgagcgcaaaggcaagaaggatgacaatggcattggcacggccattgactttgtgctctccaatgcccggctggtgctgggg

SEQ ID NO: 12131 - protein, 70 aa, Homo sapiens
MAPWSREAVLSLYRALLRQGRQLRYTDRDFYFASIRREFRKNQKLEDAEARERQLEKGLVFLNGKLGRII

SEQ ID NO: 12132 - DNA, 5790 bp, Homo sapiens
acacacggaggcggggctcaggattggggggcggaatcatgcgcagggggcggggcccgagagagagcttggagaagaccggaagtccctccgcctccactcgccctcgtgctcccttcagccccttcgcagctccgtgcgcaaggtcgtgtcccggaagtgaaggggccatgttgatgggtgacccggggagaggtacccggccagaggcgagtcctgcggagtggtagcgcgcacggcctgcggtgtgacacccagcccctgccagtcccccatggccccgtggagccgagaggcggtgctgagtctctatcgggctctgttgcgccagggccgacagcttcgctacactgatcgagacttctactttgcctccatccgccgtgaattccgaaaaaatcagaagctagaggacgctgaggcccgggagaggcagctggagaagggcctggtctttctcaacggcaaattggggaggatcatttaggatcctccaagggaaagaggacaaaggtgccttctgtagacactcctgctctcttccatccccatcttacagatgtattaagaagcctcagatgagcaatggcaggcgctggtgagcgcaaaggcaagaaggatgacaatggcattggcacggccattgactttgtgctctccaatgcccggctggtgctgggggtgggtggagcggccatgctgggcatcgccacgctggcagttaagcggatgtacgatcgggcgatcagtgcccctaccagccccacccgcctgagccattcggggaaaaggagctgggaagaacccaactggatgggctccccacgactgctgaacagggacatgaagacgggcctgagccggtccttgcagacccttcccacagactcctccaccttcgacacagatacattctgcccgccccggcccaagccagtggccaggaagggccaggtagacttgaagaagtcacgactccgcatgtccctgcaggagaaacttcttacttactaccggaaccgggcagccatccctgctggagagcaggctcgggccaagcaagctgctgtggacatatgtgccgagctccggagcttcctgcgggccaagttgcctgacatgccgcttcgggacatgtacttgagtggcagcctctacgatgacctgcaggtggtgacagctgaccacatccaactcattgtgccccttgtgctggagcagaacctgtggtcatgtattcctggtgaagacaccatcatgaatgtccctggcttcttcctggtgcgtcgtgagaatccagagtactttcctcgtgggagcagttactgggaccgctgtgtagtagggggctacctctctccaaagacagtcgcagatacatttgagaaggtagtggctggctccatcaattggccagccatagggtccctcttggactatgtgatccgcccggccccacccccagaagccctcacactggaggtgcagtatgagcgtgacaaacatctcttcattgacttcctgccatcagtgaccctcggtgacacagtcttggtggccaaaccacaccggctagcccagtatgacaacctgtggcggctgagcctgcgtcccgcggagacggcacgcctgcgggctctggaccaggctgactcgggctgccgatctctgtgcctcaagatcctcaaggccatatgcaagtccaccccggctctgggccacctcactgccagccagctaaccaatgtcatcctccacttggcccaggaggaggctgactggtctccggatatgctggccgaccgtttcctgcaggccttgaggggacttatcagctacttagaggctggagtcctgcccagtgccctaaaccccaaggtgaacttatttgcagagctcacccctgaagaaatagacgaattaggatacactctgtattgctcattgtctgagccagaggtgctgctgcagacgtagggcaggtgaaggccaaagcgggtgttggtggtcaggccctggattctccgttagatacacttggctacctagttggtgcctcacagggttcctgctgcctggtgtcttgctgatcatcaccctggtcacttcatgctgattagaatgacatctctttcgtctcctattttgttacccaactcttcctatttttgttaccaatcactgtgctctctgccgccccctggctccaggctaatttttctggaatgaattgagaaggtggcgtgctggcctgagctgatggaccacttggtgttttgcgttttggcccatgtttgctgcctctatctggtctgccttgcccgtttgcctgttcctattcagtgtcttttctattttttcctctctcgttcatgccttctgttttgctcttgtccctggagcatatctgcctaattaagatgttgccttttagttgaatgccactgaagagctgtgatagcatgtttcaaagctgaactctacagagcgagtgctgagacagtatttagggtttctgggagtgaggctggtagaagagttggcctttgaccacggttcctggagtagaagtccatcctccccccaacctcctgacccattcataaatgctgagaatgtctctcatgggaacactgttaatgacccacacaggataagctgaatgcaaagttatttgcaggttgaatttcttggtggctattagcagaagtgcagagtagggaaccagagctggttaagggcctagtgaagggtttgtgtgcccagtgtctgctcgtcatctgtggctgcaggggtcagacagacaaggatggggactgccagggcaccacttcatcatgaatgctggttttcacaccttttccttattttattgccaatcaggacaaggccttgaaggaacgcagccttagacatcaggtgaggatgatggaggtagacagtcgactgaatgtcagctggaaaatccagtcactagttggggtttggtggccatgttttctacccagacaggccctgcttttctaggatgtggccttagagcaagaacagacccaacagccagcccttcatcctccagcgtctgccataggaatgtgagaggggtgtttgctgagcgctccgggcacggccagagggcaagtgagcatgcacggacctcttccccctgtcctgtttctcacccagcacctggggagatcggtgctaccaaggaagagagcacacagataagacagaggggaggaggtgggcatttcctacattcctccttgtttgccgctgctgagattgcagtatttattgcaatgtaaatgtatcctgaaggtggggaggaatgtttaatctaccatgtccgtgtgtcatcttggtttgtgtttttccctgtttgtagcaagactctgatgataattctgtttctcatctgcccattcagtattttgttttccttccgtcaagttgtcttattttttcaatgactacctctccatcattgaggttctggtgaagctctctgcagctgtctcattccttcccaacgatagtaacaggaaatgactctttagcatcgatacctcaacatcaatttagggtagagattcctgcccctcttttgtcacagattaggaaattgagaactagggttaaccttgactatatttagaggtctttttgcctcttttccccttaacaaggatttcttatggtggtttcagtttcatttgcataaaggtattgagagggaacaaaaaacataaagctgagaatcttgagagagctcatctaccctgtctgttggtcagactcaaatgagagttaaaaaaaaaaaaaaaaatctgtatgcctgagtaccatcctggatgaatctagaaggtatggggtagagcttgacagggttcctgtgtacccactgggtatccgttagaggtaagggagaggagaggattgatagagtgttgcaaaagtatagattattcattgagataaaggatttggtttccctgccatgagtattaaaaaaatttaagttttcccaagcttgcatctctgaccaaatttcacataaaacattggaaggaggctgggtgcggtggctcatgcttgtaatcccagcactgggaagctaaggcgggtggatcacttgaggtcaggagttcgagaccagcctggccaacatggtgaaaccccgtctccacgaaaaagataaaaataagctgggcgtggtggcaggcgcctataatcccagctactcgggaggctgaggcaggagaataacttaaacccgggaggcggaggttacagtgagctgagatcgtgccactgcactccagcctgggtgacagagtgagaccctatttcaaaaaaataaaaattggaagaagagcttaaaaaagataagattttaaagagtcccaagttatttaagttgagtgtaattgtcatttaaggaaggcaaatgagtttatcatccttcttaaagagcatctcttttaactgttggacaaaaccataactttgtcattttacaaggaagaacctcttaagaagtcctcagaaccagaagcaatgtgaactctcagcgctggtcctggtgggtttgctgaccatgactgggcaagccgttctttttgctgccatcttcctcatcataaagtgtggaacataggcaattgctttgagattcttggatagaagaggacaacattctgcacctgcccccttttttaaatctttggggaaagatgagtaactttccccactactctgccttcctgttcagtaactcttacttttgcctgaagtaacagcatcttctacttctccatctagagatttttgtgtgtgtgccatcaaggttagcaaactttatacgtagcctaacacttaaaaaatgcactcattatcttaaacctaataaattccagagtttattttggttctcctctgttgcccttcctaaaaaatgagctgaagatgacagtatttttctttacatgcttggttatgacttttaaagttttatttaaataaatgttgaagctcaagtttaaagaagcgttgcagaggcccacggtctcctgggtcccggccacctgtccatattccacatttgctgactgtgctccctgcactccactcaagttgagagttcaaatagtcttgaaggggaatcagcttcaggatggaaggacccaggagaggccccgaggtgggagggttctgtaaatacagactactgcgagtgtccagagctctctgccatgatacttccttgggactgacttggctgagaacgtgttctgtcagaggatttgttagaactctgcccttttgtctgaaactcaaggccaaggagaatgataggagacttaggacagagctgacccttgcaccaggctgggaggctgcagcccttttagatgccacttactgtaagtggccagaataccagagaggtgggttccatggtcaaatgcacagtaggtgtttacctttacatttggatcaccttgtagtctttaaattcttggtccctgaggccaagtccacaacttgccttctagtcacttgcctgcccgcagtggtggtggatgtgttagctggtagatttggaatcagtcaccagtctttctgtactgtcttggttagctctatataagtaggggcagcttagccctgaggcccagagacctgctgtcctttttctccttgagggaggaaataaaactgcggaatacaatgtccttccatagcatgggaagaagaaaataaacatctcctttccaacagctg

SEQ ID NO: 12133 - protein, 463 aa, Homo sapiens; identical to SEQ ID NO: 2035

SEQ ID NO: 12134 - DNA, 590 bp, Homo sapiens
aggattggggggcggaatcatgcgcagggggcggggcccgagagagagcttggagaagaccggaagtccctccgcctccactcgccctcgtgctcccttcagccccttcgcagctccgtgcgcaaggtcgtgtcccggaagtgaaggggccatgttgatgggtgacccggggagaggtacccggccagaggcgagtcctgcggagtggtagcgcgcacggcctgcggggacgttgtgaaattctctccgttacgcataattttgagccccttgtatgtgccaagcgctgtgctgggaaagttcgtggagcacccagaagtgctgtacacacggtccggctccagcaaagggtaactcattccagaggcaggcagagttggggtcaggagtgcagccctccccttgacagctgtgggcccgcggatgaggaactgagacagtcacagagaggttaggagacttgcccacggtcatgcagctcgtaagtgctggtgccaggattcaagtatggctgagtgcttgtcttcaaccctcctagatcaccccctgtggtgaagttctattaccgttcattacgtgcacagttctca

SEQ ID NO: 12135 - protein, 63 aa, Homo sapiens
MRRGRGPRESLEKTGSPSASTRPRAPFSPFAAPCARSCPGSEGAMLMGDPGRGTRPEASPAEW

SEQ ID NO: 12136 - DNA, 581 bp, Homo sapiens
gagagagcttggagaagaccggaagtccctccgcctccactcgccctcgtgctcccttcagccccttcgcagctccgtgcgcaaggtcgtgtcccggaagtgaaggggccatgttgatgggtgacccggggagaggtacccggccagaggcgagtcctgcggagtggtagcgcgcacggcctgcggatgaggaactgagacagtcacagagaggttaggagacttgcccacggtcatgcagctcgtaagtgctggtgccaggattcaagtatggctgagtgcttgtcttcaaccctcctagatcaccccctgtggtgaagttctattaccgttcattacgtgcacagttctcaaaataatcctatgtgtgtgacacccagcccctgccagtcccccatggccccgtggagccgagaggcggtgctgagtctctatcgggctctgttgcgccagggccgacagcttcgctacactgatcgagacttctactttgcctccatccgccgtgaattccgaaaaaatcagaagctagaggacgctgaggcccgggagaggcagctggagaagggcctggtctttct

SEQ ID NO: 12137 - protein, 71 aa, Homo sapiens
MCVTPSPCQSPMAPWSREAVLSLYRALLRQGRQLRYTDRDFYFASIRREFRKNQKLEDAEARERQLEKGLV

SEQ ID NO: 12138 - DNA, 2304 bp, Homo sapiens
agtatttagggtttctgggagtgaggctggtagaagagttggcctttgaccacggttcctggagtagaagtccatcctccccccaacctcctgacccattcataaatgctgagaatgtctctcatgggaacactgttaatgacccacacaggataagctgaatgcaaagttatttgcaggttgaatttcttggtggctattagcagaagtgcagagtagggaaccagagctggttaagggcctagtgaagggtttgtgtgcccagtgtctgctcgtcatctgtggctgcaggggtcagacagacaaggatggggactgccagggcaccacttcatcatgaatgctggttttcacaccttttccttattttattgccaatcaggacaaggccttgaaggaacgcagccttagacatcaggtgaggatgatggaggtagacagtcgactgaatgtcagctggaaaatccagtcactagttggggtttggtggccatgttttctacccagacaggccctgcttttctaggatgtggccttagagcaagaacagacccaacagccagcccttcatcctccagcgtctgccataggaatgtgagaggggtgtttgctgagcgctccgggcacggccagagggcaagtgagcatgcacggacctcttccccctgtcctgtttctcacccagcacctggggagatcggtgctaccaaggaagagagcacacagataagacagaggggaggaggtgggcatttcctacattcctccttgtttgccgctgctgagattgcagtatttattgcaatgtaaatgtatcctgaaggtggggaggaatgtttaatctaccatgtccgtgtgtcatcttggtttgtgtttttccctgtttgtagcaagactctgatgataattctgtttctcatctgcccattcagtattttgttttccttccgtcaagttgtcttattttttcaatgactacctctccatcattgaggttctggtgaagctctctgcagctgtctcattccttcccaacgatagtaacaggaaatgactctttagcatcgatacctcaacatcaatttagggtagagattcctgcccctcttttgtcacagattaggaaattgagaactaggagagctcatctaccctgtctgttggtcagactcaaatgagagttaaaaaaaaaaaaaaaaatctgtatgcctgagtaccatcctggatgaatctagaaggtatggggtagagcttgacagggttcctgtgtacccactgggtatccgttagaggtaagggagaggagaggattgatagagtgttgcaaaagtatagattattcattgagataaaggatttggtttccctgccatgagtattaaaaaaatttaagttttcccaagcttgcatctctgaccaaatttcacataaaacattggaaggaggctgggtgcggtggctcatgcttgtaatcccagcactgggaagctaaggcgggtggatcacttgaggtcaggagttcgagaccagcctggccaacatggtgaaaccccgtctccacgaaaaagataaaaataagctgggcgtggtggcaggcgcctataatcccagctactcgggaggctgaggcaggagaataacttaaacccgggaggcggaggttacagtgagctgagatcgtgccactgcactccagcctgggtgacagagtgagaccctatttcaaaaaaataaaaattggaagaagagcttaaaaaagataagattttaaagagtcccaagttatttaagttgagtgtaattgtcatttaaggaaggcaaatgagtttatcatccttcttaaagagcatctcttttaactgttggacaaaaccataactttgtcattttacaaggaagaacctcttaagaagtcctcagaaccagaagcaatgtgaactctcagcgctggtcctggtgggtttgctgaccatgactgggcaagccgttctttttgctgccatcttcctcatcataaagtgtggaacataggcaattgctttgagattcttggatagaagaggacaacattctgcacctgcccccttttttaaatctttggggaaagatgagtaactttccccactactctgccttcctgttcagtaactcttacttttgcctgaagtaacagcatcttctacttctccatctagagatttttgtgtgtgtgccatcaaggttagcaaactttatacgtagcctaacacttaaaaaatgcactcattatcttaaacctaataaattccagagtttattttggtt

SEQ ID NO: 12139 - protein, 105 aa, Homo sapiens [sequence omitted]

SEQ ID NO: 12140 - DNA, 2414 bp, Homo sapiens
agtatttagggtttctgggagtgaggctggtagaagagttggcctttgaccacggttcctggagtagaagtccatcctccccccaacctcctgacccattcataaatgctgagaatgtctctcatgggaacactgttaatgacccacacaggataagctgaatgcaaagttatttgcaggttgaatttcttggtggctattagcagaagtgcagagtagggaaccagagctggttaagggcctagtgaagggtttgtgtgcccagtgtctgctcgtcatctgtggctgcaggggtcagacagacaaggatggggactgccagggcaccacttcatcatgaatgctggttttcacaccttttccttattttattgccaatcaggacaaggccttgaaggaacgcagccttagacatcaggtgaggatgatggaggtagacagtcgactgaatgtcagctggaaaatccagtcactagttggggtttggtggccatgttttctacccagacaggccctgcttttctaggatgtggccttagagcaagaacagacccaacagccagcccttcatcctccagcgtctgccataggaatgtgagaggggtgtttgctgagcgctccgggcacggccagagggcaagtgagcatgcacggacctcttccccctgtcctgtttctcacccagcacctggggagatcggtgctaccaaggaagagagcacacagataagacagaggggaggaggtgggcatttcctacattcctccttgtttgccgctgctgagattgcagtatttattgcaatgtaaatgtatcctgaaggtggggaggaatgtttaatctaccatgtccgtgtgtcatcttggtttgtgtttttccctgtttgtagcaagactctgatgataattctgtttctcatctgcccattcagtattttgttttccttccgtcaagttgtcttattttttcaatgactacctctccatcattgaggttctggtgaagctctctgcagctgtctcattccttcccaacgatagtaacaggaaatgactctttagcatcgatacctcaacatcaatttagggtagagattcctgcccctcttttgtcacagattaggaaattgagaactaggagagctcatctaccctgtctgttggtcagactcaaatgagagttaaaaaaaaaaaaaaaaatctgtatgcctgagtaccatcctggatgaatctagaaggtatggggtagagcttgacagggttcctgtgtacccactgggtatccgttagaggtaagggagaggagaggattgatagagtgttgcaaaagtatagattattcattgagataaaggatttggtttccctgccatgagtattaaaaaaatttaagttttcccaagcttgcatctctgaccaaatttcacataaaacattggaaggaggctgggtgcggtggctcatgcttgtaatcccagcactgggaagctaaggcgggtggatcacttgaggtcaggagttcgagaccagcctggccaacatggtgaaaccccgtctccacgaaaaagataaaaataagctgggcgtggtggcaggcgcctataatcccagctactcgggaggctgaggcaggagaataacttaaacccgggaggcggaggttacagtgagctgagatcgtgccactgcactccagcctgggtgacagagtgagaccctatttcaaaaaaataaaaattggaagaagagcttaaaaaagataagattttaaagagtcccaagttatttaagttgagtgtaattgtcatttaaggaaggcaaatgagtttatcatccttcttaaagagcatctcttttaactgttggacaaaaccataactttgtcattttacaaggaagaacctcttaagaagtcctcagaaccagaagcaatgtgaactctcagcgctggtcctggtgggtttgctgaccatgactgggcaagccgttctttttgctgccatcttcctcatcataaagtgtggaacataggcaattgctttgagattcttggatagaagaggacaacattctgcacctgcccccttttttaaatctttggggaaagatgagtaactttccccactactctgccttcctgttcagtaactcttacttttgcctgaagtaacagcatcttctacttctccatctagagatttttgtgtgtgtgccatcaaggttagcaaactttatacgtagcctaacacttaaaaaatgcactcattatcttaaacctaataaattccagagtttattttggttctcctctgttgcccttcctaaaaaatgagctgaagatgacagtatttttctttacatgcttggttatgacttttaaagttttatttaaataaatgttgaagctcaagttt

SEQ ID NO: 12141 - protein, 105 aa, Homo sapiens [sequence omitted]

SEQ ID NO: 12142 - DNA, 3158 bp, Homo sapiens
agtatttagggtttctgggagtgaggctggtagaagagttggcctttgaccacggttcctggagtagaagtccatcctccccccaacctcctgacccattcataaatgctgagaatgtctctcatgggaacactgttaatgacccacacaggataagctgaatgcaaagttatttgcaggttgaatttcttggtggctattagcagaagtgcagagtagggaaccagagctggttaagggcctagtgaagggtttgtgtgcccagtgtctgctcgtcatctgtggctgcaggggtcagacagacaaggatggggactgccagggcaccacttcatcatgaatgctggttttcacaccttttccttattttattgccaatcaggacaaggccttgaaggaacgcagccttagacatcaggtgaggatgatggaggtagacagtcgactgaatgtcagctggaaaatccagtcactagttggggtttggtggccatgttttctacccagacaggccctgcttttctaggatgtggccttagagcaagaacagacccaacagccagcccttcatcctccagcgtctgccataggaatgtgagaggggtgtttgctgagcgctccgggcacggccagagggcaagtgagcatgcacggacctcttccccctgtcctgtttctcacccagcacctggggagatcggtgctaccaaggaagagagcacacagataagacagaggggaggaggtgggcatttcctacattcctccttgtttgccgctgctgagattgcagtatttattgcaatgtaaatgtatcctgaaggtggggaggaatgtttaatctaccatgtccgtgtgtcatcttggtttgtgtttttccctgtttgtagcaagactctgatgataattctgtttctcatctgcccattcagtattttgttttccttccgtcaagttgtcttattttttcaatgactacctctccatcattgaggttctggtgaagctctctgcagctgtctcattccttcccaacgatagtaacaggaaatgactctttagcatcgatacctcaacatcaatttagggtagagattcctgcccctcttttgtcacagattaggaaattgagaactaggagagctcatctaccctgtctgttggtcagactcaaatgagagttaaaaaaaaaaaaaaaaatctgtatgcctgagtaccatcctggatgaatctagaaggtatggggtagagcttgacagggttcctgtgtacccactgggtatccgttagaggtaagggagaggagaggattgatagagtgttgcaaaagtatagattattcattgagataaaggatttggtttccctgccatgagtattaaaaaaatttaagttttcccaagcttgcatctctgaccaaatttcacataaaacattggaaggaggctgggtgcggtggctcatgcttgtaatcccagcactgggaagctaaggcgggtggatcacttgaggtcaggagttcgagaccagcctggccaacatggtgaaaccccgtctccacgaaaaagataaaaataagctgggcgtggtggcaggcgcctataatcccagctactcgggaggctgaggcaggagaataacttaaacccgggaggcggaggttacagtgagctgagatcgtgccactgcactccagcctgggtgacagagtgagaccctatttcaaaaaaataaaaattggaagaagagcttaaaaaagataagattttaaagagtcccaagttatttaagttgagtgtaattgtcatttaaggaaggcaaatgagtttatcatccttcttaaagagcatctcttttaactgttggacaaaaccataactttgtcattttacaaggaagaacctcttaagaagtcctcagaaccagaagcaatgtgaactctcagcgctggtcctggtgggtttgctgaccatgactgggcaagccgttctttttgctgccatcttcctcatcataaagtgtggaacataggcaattgctttgagattcttggatagaagaggacaacattctgcacctgcccccttttttaaatctttggggaaagatgagtaactttccccactactctgccttcctgttcagtaactcttacttttgcctgaagtaacagcatcttctacttctccatctagagatttttgtgtgtgtgccatcaaggttagcaaactttatacgtagcctaacacttaaaaaatgcactcattatcttaaacctaataaattccagagtttattttggttctcctctgttgcccttcctaaaaaatgagctgaagatgacagtatttttctttacatgcttggttatgacttttaaagttttatttaaataaatgttgaagctcaagtttaaagaagcgttgcagaggcccacggtctcctgggtcccggccacctgtccatattccacatttgctgactgtgctccctgcactccactcaagttgagagttcaaatagtcttgaaggggaatcagcttcaggatggaaggacccaggagaggccccgaggtgggagggttctgtaaatacagactactgcgagtgtccagagctctctgccatgatacttccttgggactgacttggctgagaacgtgttctgtcagaggatttgttagaactctgcccttttgtctgaaactcaaggccaaggagaatgataggagacttaggacagagctgacccttgcaccaggctgggaggctgcagcccttttagatgccacttactgtaagtggccagaataccagagaggtgggttccatggtcaaatgcacagtaggtgtttacctttacatttggatcaccttgtagtctttaaattcttggtccctgaggccaagtccacaacttgccttctagtcacttgcctgcccgcagtggtggtggatgtgttagctggtagatttggaatcagtcaccagtctttctgtactgtcttggttagctctatataagtaggggcagcttagccctgaggcccagagacctgctgtcctttttctccttgagggaggaaataaaactgcggaatacaatgtccttccatagcatgggaagaagaaaataaacatctcctttccaacagctg

SEQ ID NO: 12143 - protein, 158 aa, Homo sapiens
MEGPRRGPEVGGFCKYRLLRVSRALCHDTSLGLTWLRTCSVRGFVRTLPFCLKLKAKENDRRLRTELTLAPGWEAAALLDATYCKWPEYQRGGFHGQMHSRCLPLHLDHLVVFKFLVPEAKSTTCLLVTCLPAVVVDVLAGRFGISHQSFCTVLVSSI

SEQ ID NO: 12144 - DNA, 1672 bp, Homo sapiens
ctttccccgcccactgcgctgacaccggaagcgaggcgtgtctgggagatcactccgcgctccggcggcgaaggaaagaacggactctgatcatagaagcctagtaaagtagtacacctctctcctttcgtgaggccataagaacaaactccttttctcgtcacagctacgccctgggcataaacggttggggcgtcaaagggagggagggaagggagcgggcgggaggagacggtcacgtggtcgcggcggaaggatgcgtctgtgctgcgtccccatagagacgaagtctataaagggccggcgggcggccacggcagccatttctactttgcccgcccacagatgtagttttctctgcgcgtgtgcgttttccctcctccccgccctcagggtccacggccaccatggcgtattaggggcagcagtgcctgcggcagcattggcctttgcagcggcggcagcagcaccaggctctgcagcggcaacccccagcggcttaagccatggcgcttctcacggcattcagcagcagcgttgctgtaaccgacaaagacaccttcgaattaagcacattcctcgattccagcaaagcaccgcaacatgaccgaaatgagcttcctgagcagcgaggtgttggtgggggacttgatgtcccccttcgaccagtcgggtttgggggctgaagaaagcctaggtctcttagatgattacctggaggtggccaagcacttcaaacctcatgggttctccagcgacaaggctaaggcgggctcctccgaatggctggctgtggatggatttgaaggagttcgacttggatgccctgttgggtatagatgacctggaaaccatgccagatgaccttctgaccacgttggatgacacttgtgatctctttgcccccctagtccaggagactaataagcagcccccccagacggtgaacccaattggccatctcccagaaagtttaacaaaacccgaccaggttgcccccttcaccttcttacaacctcttcccctttccccaggggtcctgtcctccactccagatcattcctttagtttagagctgggcagtgaagtggatatcactgaaggagataggaagccagactacactgcttacgttgccatgatccctcagtgcataaaggaggaagacaccccttcagataatgatagtggcatctgtatgagcccagagtcctatctggggtctcctcagcacagcccctctaccaggggctctccaaataggagcctcccatctccaggtgttctctgtgggtctgcccgtcccaaaccttacgatcctcctggagagaagatggtagcagcaaaagtaaagggtgagaaactggataagaagctgaaaaaaatggagcaaaacaagacagcagccactaggtaccgccagaagaagagggcggagcaggaggctcttactggtgagtgcaaagagctggaaaagaagaacgaggctctaaaagagagggcggattccctggccaaggagatccagtacctgaaagatttgatagaagaggtccgcaaggcaagggggaagaaaagggtcccctagttgaggatagtcaggagcgtcaatgtgcttgtacatagagtgctgtagctgtgtgttccaataaattattttgtagggaaagta

SEQ ID NO: 12145 - protein, 293 aa, Homo sapiens
MITWRWPSTSNLMGSPATRLRRAPPNGWLWMDLKEFDLDALLGIDDLETMPDDLLTTLDDTCDLFAPLVQETNKQPPQTVNPIGHLPESLTKPDQVAPFTFLQPLPLSPGVLSSTPDHSFSLELGSEVDITEGDRKPDYTAYVAMIPQCIKEEDTPSDNDSGICMSPESYLGSPQHSPSTRGSPNRSLPSPGVLCGSARPKPYDPPGEKMVAAKVKGEKLDKKLKKMEQNKTAATRYRQKKRAEQEALTGECKELEKKNEALKERADSLAKEIQYLKDLIEEVRKARGKKRVP

SEQ ID NO: 12146 - DNA, 1464 bp, Homo sapiens
agagacgaagtctataaagggccggcgggcggccacggcagccatttctactttgcccgcccacagatgtagttttctctgcgcgtgtgcgttttccctcctccccgccctcagggtccacggccaccatggcgtattaggggcagcagtgcctgcggcagcattggcctttgcagcggcggcagcagcaccaggctctgcagcggcaacccccagcggcttaagccatggcgcttctcacggcattcagcagcagcgttgctgtaaccgacaaagacaccttcgaattaagcacattcctcgattccagcaaagcaccgcaacatgaccgaaatgagcttcctgagcagcgaggtgttggtgggggacttgatgtcccccttcgaccagtcgggtttgggggctgaagaaagcctaggtctcttagatgattacctggaggtggccaagcacttcaaacctcatgggttctccagcgacaaggctaaggcgggctcctccgaatggctggctgtggatgggttggtcagtccctccaacaacagcaaggaggatgccttctccgggacagattggatgttggagaaaatggatttgaaggagttcgacttggatgccctgttgggtatagatgacctggaaaccatgccagatgaccttctgaccacgttggatgacacttgtgatctctttgcccccctagtccaggagactaataagcagcccccccagacggtgaacccaattggccatctcccagaaagtttaacaaaacccgaccaggttgcccccttcaccttcttacaacctcttcccctttccccaggggtcctgtcctccactccagatcattcctttagtttagagctgggcagtgaagtggatatcactgaaggagataggaagccagactacactgcttacgttgccatgatccctcagtgcataaaggaggaagacaccccttcagataatgatagtggcatctgtatgagcccagagtcctatctggggtctcctcagcacagcccctctaccaggggctctccaaataggagcctcccatctccaggtgttctctgtgggtctgcccgtcccaaaccttacgatcctcctggagagaagatggtagcagcaaaagtaaagggtgagaaactggataagaagctgaaaaaaatggagcaaaacaagacagcagccactaggtaccgccagaagaagagggcggagcaggaggctcttactggtgagtgcaaagagctggaaaagaagaacgaggctctaaaagagagggcggattccctggccaaggagatccagtacctgaaagatttgatagaagaggtccgcaaggcaagggggaagaaaagggtcccctagttgaggatagtcaggagcgtcaatgtgcttgtacatagagtgctgtagctgtgtgttccaataaattattttgtagggaaagta

SEQ ID NO: 12147 - protein, 351 aa, Homo sapiens; identical to SEQ ID NO: 2037

SEQ ID NO: 12148 - DNA, 1872 bp, Homo sapiens
aagtctataaagggccggcgggcggccacggcagccatttctactttgcccgcccacagatgtagttttctctgcgcgtgtgcgttttccctcctccccgccctcagggtccacggccaccatggcgtattaggggcagcagtgcctgcggcagcattggcctttgcagcggcggcagcagcaccaggctctgcagcggcaacccccagcggcttaagccatggcgtgagtaccggggcgggtcgtccagctgtgctcctggggccggcgcgggttttggattggtggggtgcggcctgggccgtatttggacgtggggacggagcgctttcctcttggcggccggtggaagaatcccctggtctccgtgagcgtccattttgtggaacctgagttgcaagcagggaggggcaaatacaactgccctgttcccgattctctagatggccgatctagagaagtcccgcctcataagtggaaggatgaaattctcagaacagctaacctctaatgggagttggcttctgattctcattcaggcttctcacggcattcagcagcagcgttgctgtaaccgacaaagacaccttcgaattaagcacattcctcgattccagcaaagcaccgcaacatgaccgaaatgagcttcctgagcagcgaggtgttggtgggggacttgatgtcccccttcgaccagtcgggtttgggggctgaagaaagcctaggtctcttagatgattacctggaggtggccaagcacttcaaacctcatgggttctccagcgacaaggctaaggcgggctcctccgaatggctggctgtggatgggttggtcagtccctccaacaacagcaagggtgagtgggccaccaccacatcgtcctggtgggatctagggttaggggcctcctacctttgtatctgactcacttggccccatcactcaaatgttttgcagaggatgccttctccgggacagattggatgttggagaaaatggatttgaaggagttcgacttggatgccctgttgggtatagatgacctggaaaccatgccagatgaccttctgaccacgttggatgacacttgtgatctctttgcccccctagtccaggagactaataagcagcccccccagacggtgaacccaattggccatctcccagaaagtttaacaaaacccgaccaggttgcccccttcaccttcttacaacctcttcccctttccccaggggtcctgtcctccactccagatcattcctttagtttagagctgggcagtgaagtggatatcactgaaggagataggaagccagactacactgcttacgttgccatgatccctcagtgcataaaggaggaagacaccccttcagataatgatagtggcatctgtatgagcccagagtcctatctggggtctcctcagcacagcccctctaccaggggctctccaaataggagcctcccatctccaggtgttctctgtgggtctgcccgtcccaaaccttacgatcctcctggagagaagatggtagcagcaaaagtaaagggtgagaaactggataagaagctgaaaaaaatggagcaaaacaagacagcagccactaggtaccgccagaagaagagggcggagcaggaggctcttactggtgagtgcaaagagctggaaaagaagaacgaggctctaaaagagagggcggattccctggccaaggagatccagtacctgaaagatttgatagaagaggtccgcaaggcaagggggaagaaaagggtcccctagttgaggatagtcaggagcgtcaatgtgcttgtacatagagtgctgtagctgtgtgttccaataaattattttgtagggaaagta

SEQ ID NO: 12149 - protein, 267 aa, Homo sapiens
MLEKMDLKEFDLDALLGIDDLETMPDDLLTTLDDTCDLFAPLVQETNKQPPQTVNPIGHLPESLTKPDQVAPFTFLQPLPLSPGVLSSTPDHSFSLELGSEVDITEGDRKPDYTAYVAMIPQCIKEEDTPSDNDSGICMSPESYLGSPQHSPSTRGSPNRSLPSPGVLCGSARPKPYDPPGEKMVAAKVKGEKLDKKLKKMEQNKTAATRYRQKKRAEQEALTGECKELEKKNEALKERADSLAKEIQYLKDLIEEVRKARGKKRVP

SEQ ID NO: 12150 - DNA, 2051 bp, Homo sapiens
aaagggccggcgggcggccacggcagccatttctactttgcccgcccacagatgtagttttctctgcgcgtgtgcgttttccctcctccccgccctcagggtccacggccaccatggcgtattaggggcagcagtgcctgcggcagcattggcctttgcagcggcggcagcagcaccaggctctgcagcggcaacccccagcggcttaagccatggcgtgagtaccggggcgggtcgtccagctgtgctcctggggccggcgcgggttttggattggtggggtgcggcctggggccagggcggtgccgccaagggggaagcgatttaacgagcgcccgggacgcgtggtctttgcttgggtgtccccgagacgctcgcgtgcctgggatcgggaaagcgtagtcgggtgcccggactgcttccccaggagccctacagccctcggaccccgagccccgcaagggtcccaggggtcttggctgttgccccacgaaacgtggcaggaaccaagatggcggcggcagggcggcggcgcgggcgtgagtcaagggcgggcggtgggcggggcgcggccgccctggccgtatttggacgtggggacggagcgctttcctcttggcggccggtggaagaatcccctggtctccgtgagcgtccattttgtggaacctgagttgcaagcagggaggggcaaatacaactgccctgttcccgattctctagatggccgatctagagaagtcccgcctcataagtggaaggatgaaattctcagaacagctaacctctaatgggagttggcttctgattctcattcaggcttctcacggcattcagcagcagcgttgctgtaaccgacaaagacaccttcgaattaagcacattcctcgattccagcaaagcaccgcaacatgaccgaaatgagcttcctgagcagcgaggtgttggtgggggacttgatgtcccccttcgaccagtcgggtttgggggctgaagaaagcctaggtctcttagatgattacctggaggtggccaagcacttcaaacctcatgggttctccagcgacaaggctaaggcgggctcctccgaatggctggctgtggatgggttggtcagtccctccaacaacagcaaggaggatgccttctccgggacagattggatgttggagaaaatggatttgaaggagttcgacttggatgccctgttgggtatagatgacctggaaaccatgccagatgaccttctgaccacgttggatgacacttgtgatctctttgcccccctagtccaggagactaataagcagcccccccagacggtgaacccaattggccatctcccagaaagtttaacaaaacccgaccaggttgcccccttcaccttcttacaacctcttcccctttccccaggggtcctgtcctccactccagatcattcctttagtttagagctgggcagtgaagtggatatcactgaaggagataggaagccagactacactgcttacgttgccatgatccctcagtgcataaaggaggaagacaccccttcagataatgatagtggcatctgtatgagcccagagtcctatctggggtctcctcagcacagcccctctaccaggggctctccaaataggagcctcccatctccaggtgttctctgtgggtctgcccgtcccaaaccttacgatcctcctggagagaagatggtagcagcaaaagtaaagggtgagaaactggataagaagctgaaaaaaatggagcaaaacaagacagcagccactaggtaccgccagaagaagagggcggagcaggaggctcttactggtgagtgcaaagagctggaaaagaagaacgaggctctaaaagagagggcggattccctggccaaggagatccagtacctgaaagatttgatagaagaggtccgcaaggcaagggggaagaaaagggtcccctagttgaggatagtcaggagcgtcaatgtgcttgtacatagagtgctgtagctgtgtgttccaataaattattttgtagggaaagta

SEQ ID NO: 12151 - protein, 351 aa, Homo sapiens; identical to SEQ ID NO: 2037

SEQ ID NO: 12152 - DNA, 2086 bp, Homo sapiens
aaagggccggcgggcggccacggcagccatttctactttgcccgcccacagatgtagttttctctgcgcgtgtgcgttttccctcctccccgccctcagggtccacggccaccatggcgtattaggggcagcagtgcctgcggcagcattggcctttgcagcggcggcagcagcaccaggctctgcagcggcaacccccagcggcttaagccatggcgtgagtaccggggcgggtcgtccagctgtgctcctggggccggcgcgggttttggattggtggggtgcggcctggggccagggcggtgccgccaagggggaagcgatttaacgagcgcccgggacgcgtggtctttgcttgggtgtccccgagacgctcgcgtgcctgggatcgggaaagcgtagtcgggtgcccggactgcttccccaggagccctacagccctcggaccccgagccccgcaagggtcccaggggtcttggctgttgccccacgaaacgtggcaggaaccaagatggccgtatttggacgtggggacggagcgctttcctcttggcggccggtggaagaatcccctggtctccgtgagcgtccattttgtggaacctgagttgcaagcagggaggggcaaatacaactgccctgttcccgattctctagatggccgatctagagaagtcccgcctcataagtggaaggatgaaattctcagaacagctaacctctaatgggagttggcttctgattctcattcaggcttctcacggcattcagcagcagcgttgctgtaaccgacaaagacaccttcgaattaagcacattcctcgattccagcaaagcaccgcaacatgaccgaaatgagcttcctgagcagcgaggtgttggtgggggacttgatgtcccccttcgaccagtcgggtttgggggctgaagaaagcctaggtctcttagatgattacctggaggtggccaagcacttcaaacctcatgggttctccagcgacaaggctaaggcgggctcctccgaatggctggctgtggatgggttggtcagtccctccaacaacagcaagggtgagtgggccaccaccacatcgtcctggtgggatctagggttaggggcctcctacctttgtatctgactcacttggccccatcactcaaatgttttgcagaggatgccttctccgggacagattggatgttggagaaaatggatttgaaggagttcgacttggatgccctgttgggtatagatgacctggaaaccatgccagatgaccttctgaccacgttggatgacacttgtgatctctttgcccccctagtccaggagactaataagcagcccccccagacggtgaacccaattggccatctcccagaaagtttaacaaaacccgaccaggttgcccccttcaccttcttacaacctcttcccctttccccaggggtcctgtcctccactccagatcattcctttagtttagagctgggcagtgaagtggatatcactgaaggagataggaagccagactacactgcttacgttgccatgatccctcagtgcataaaggaggaagacaccccttcagataatgatagtggcatctgtatgagcccagagtcctatctggggtctcctcagcacagcccctctaccaggggctctccaaataggagcctcccatctccaggtgttctctgtgggtctgcccgtcccaaaccttacgatcctcctggagagaagatggtagcagcaaaagtaaagggtgagaaactggataagaagctgaaaaaaatggagcaaaacaagacagcagccactaggtaccgccagaagaagagggcggagcaggaggctcttactggtgagtgcaaagagctggaaaagaagaacgaggctctaaaagagagggcggattccctggccaaggagatccagtacctgaaagatttgatagaagaggtccgcaaggcaagggggaagaaaagggtcccctagttgaggatagtcaggagcgtcaatgtgcttgtacatagagtgctgtagctgtgtgttccaataaattattttgtagggaaagta

SEQ ID NO: 12153 - protein, 31 aa, Homo sapiens
MAVFGRGDGALSSWRPVEESPGLRERPFCGT

SEQ ID NO: 12154 - DNA, 1112 bp, Homo sapiens
catttctactttgcccgcccacagatgtagttttctctgcgcgtgtgcgttttccctcctccccgccctcagggtccacggccaccatggcgtattaggggcagcagtgcctgcggcagcattggcctttgcagcggcggcagcagcaccaggctctgcagcggcaacccccagcggcttaagccatggcgcttctcacggcattcagcagcagcgttgctgtaaccgacaaagacaccttcgaattaagcacattcctcgattccagcaaagcaccgcaacatgaccgaaatgagcttcctgagcagcgaggtgttggtgggggaacttgtgatctctttgcccccctagtccaggagactaataagcagcccccccagacggtgaacccaattggccatctcccagaaagtttaacaaaacccgaccaggttgcccccttcaccttcttacaacctcttcccctttccccaggggtcctgtcctccactccagatcattcctttagtttagagctgggcagtgaagtggatatcactgaaggagataggaagccagactacactgcttacgttgccatgatccctcagtgcataaaggaggaagacaccccttcagataatgatagtggcatctgtatgagcccagagtcctatctggggtctcctcagcacagcccctctaccaggggctctccaaataggagcctcccatctccaggtgttctctgtgggtctgcccgtcccaaaccttacgatcctcctggagagaagatggtagcagcaaaagtaaagggtgagaaactggataagaagctgaaaaaaatggagcaaaacaagacagcagccactaggtaccgccagaagaagagggcggagcaggaggctcttactggtgagtgcaaagagctggaaaagaagaacgaggctctaaaagagagggcggattccctggccaaggagatccagtacctgaaagatttgatagaagaggtccgcaaggcaagggggaagaaaagggtcccctagttgaggatagtcaggagcgtcaatgtgcttgtacatagagtgctgtagctgtgtgttccaataaattattttgtagggaaagta

SEQ ID NO: 12155 - protein, 280 aa, Homo sapiens
MALLTAFSSSVAVTDKDTFELSTFLDSSKAPQHDRNELPEQRGVGGGTCDLFAPLVQETNKQPPQTVNPIGHLPESLTKPDQVAPFTFLQPLPLSPGVLSSTPDHSFSLELGSEVDITEGDRKPDYTAYVAMIPQCIKEEDTPSDNDSGICMSPESYLGSPQHSPSTRGSPNRSLPSPGVLCGSARPKPYDPPGEKMVAAKVKGEKLDKKLKKMEQNKTAATRYRQKKRAEQEALTGECKELEKKNEALKERADSLAKEIQYLKDLIEEVRKARGKKRVP

SEQ ID NO: 12156 - DNA, 1619 bp, Homo sapiens
catttctactttgcccgcccacagatgtagttttctctgcgcgtgtgcgttttccctcctccccgccctcagggtccacggccaccatggcgtattaggggcagcagtgcctgcggcagcattggcctttgcagcggcggcagcagcaccaggctctgcagcggcaacccccagcggcttaagccatggcatggccgatctagagaagtcccgcctcataagtggaaggatgaaattctcagaacagctaacctctaatgggagttggcttctgattctcattcaggcttctcacggcattcagcagcagcgttgctgtaaccgacaaagacaccttcgaattaagcacattcctcgattccagcaaagcaccgcaacatgaccgaaatgagcttcctgagcagcgaggtgttggtgggggacttgatgtcccccttcgaccagtcgggtttgggggctgaagaaagcctaggtctcttagatgattacctggaggtggccaagcacttcaaacctcatgggttctccagcgacaaggctaaggcgggctcctccgaatggctggctgtggatgggttggtcagtccctccaacaacagcaagggtgagtgggccaccaccacatcgtcctggtgggatctagggttaggggcctcctacctttgtatctgactcacttggccccatcactcaaatgttttgcagaggatgccttctccgggacagattggatgttggagaaaatggatttgaaggagttcgacttggatgccctgttgggtatagatgacctggaaaccatgccagatgaccttctgaccacgttggatgacacttgtgatctctttgcccccctagtccaggagactaataagcagcccccccagacggtgaacccaattggccatctcccagaaagtttaacaaaacccgaccaggttgcccccttcaccttcttacaacctcttcccctttccccaggggtcctgtcctccactccagatcattcctttagtttagagctgggcagtgaagtggatatcactgaaggagataggaagccagactacactgcttacgttgccatgatccctcagtgcataaaggaggaagacaccccttcagataatgatagtggcatctgtatgagcccagagtcctatctggggtctcctcagcacagcccctctaccaggggctctccaaataggagcctcccatctccaggtgttctctgtgggtctgcccgtcccaaaccttacgatcctcctggagagaagatggtagcagcaaaagtaaagggtgagaaactggataagaagctgaaaaaaatggagcaaaacaagacagcagccactaggtaccgccagaagaagagggcggagcaggaggctcttactggtgagtgcaaagagctggaaaagaagaacgaggctctaaaagagagggcggattccctggccaaggagatccagtacctgaaagatttgatagaagaggtccgcaaggcaagggggaagaaaagggtcccctagttgaggatagtcaggagcgtcaatgtgcttgtacatagagtgctgtagctgtgtgttccaataaattattttgtagggaaagta

SEQ ID NO: 12157 - protein, 63 aa, Homo sapiens
MADLEKSRLISGRMKFSEQLTSNGSWLLILIQASHGIQQQRCCNRQRHLRIKHIPRFQQSTAT

SEQ ID NO: 12158 - DNA, 1322 bp, Homo sapiens
atttctactttgcccgcccacagatgtagttttctctgcgcgtgtgcgttttccctcctccccgccctcagggtccacggccaccatggcgcttctcacggcattcagcagcagcgttgctgtaaccgacaaagacaccttcgaattaagcacattcctcgattccagcaaagcaccgcaacatgaccgaaatgagcttcctgagcagcgaggtgttggtgggggacttgatgtcccccttcgaccagtcgggtttgggggctgaagaaagcctaggtctcttagatgattacctggaggtggccaagcacttcaaacctcatgggttctccagcgacaaggctaaggcgggctcctccgaatggctggctgtggatgggttggtcagtccctccaacaacagcaaggaggatgccttctccgggacagattggatgttggagaaaatggatttgaaggagttcgacttggatgccctgttgggtatagatgacctggaaaccatgccagatgaccttctgaccacgttggatgacacttgtgatctctttgcccccctagtccaggagactaataagcagcccccccagacggtgaacccaattggccatctcccagaaagtttaacaaaacccgaccaggttgcccccttcaccttcttacaacctcttcccctttccccaggggtcctgtcctccactccagatcattcctttagtttagagctgggcagtgaagtggatatcactgaaggagataggaagccagactacactgcttacgttgccatgatccctcagtgcataaaggaggaagacaccccttcagataatgatagtggcatctgtatgagcccagagtcctatctggggtctcctcagcacagcccctctaccaggggctctccaaataggagcctcccatctccaggtgttctctgtgggtctgcccgtcccaaaccttacgatcctcctggagagaagatggtagcagcaaaagtaaagggtgagaaactggataagaagctgaaaaaaatggagcaaaacaagacagcagccactaggtaccgccagaagaagagggcggagcaggaggctcttactggtgagtgcaaagagctggaaaagaagaacgaggctctaaaagagagggcggattccctggccaaggagatccagtacctgaaagatttgatagaagaggtccgcaaggcaagggggaagaaaagggtcccctagttgaggatagtcaggagcgtcaatgtgcttgtacatagagtgctgtagctgtgtgttccaataaattattttgtagggaaagta

SEQ ID NO: 12159 - protein, 351 aa, Homo sapiens; identical to SEQ ID NO: 2037

SEQ ID NO: 12160 - DNA, 1782 bp, Homo sapiens
atttctactttgcccgcccacagatgtagttttctctgcgcgtgtgcgttttccctcctccccgccctcagggtccacggccaccatggcgtattaggggcagcagtgcctgcggcagcattggcctttgcagcggcggcagcagcaccaggctctgcagcggcaacccccagcggcttaagccatggcgtgagtaccggggcgggtcgtccagctgtgctcctggggccggcgcgggttttggattggcggccggtggaagaatcccctggtctccgtgagcgtccattttgtggaacctgagttgcaagcagggaggggcaaatacaactgccctgttcccgattctctagatggccgatctagagaagtcccgcctcataagtggaaggatgaaattctcagaacagctaacctctaatgggagttggcttctgattctcattcaggcttctcacggcattcagcagcagcgttgctgtaaccgacaaagacaccttcgaattaagcacattcctcgattccagcaaagcaccgcaacatgaccgaaatgagcttcctgagcagcgaggtgttggtgggggacttgatgtcccccttcgaccagtcgggtttgggggctgaagaaagcctaggtctcttagatgattacctggaggtggccaagcacttcaaacctcatgggttctccagcgacaaggctaaggcgggctcctccgaatggctggctgtggatgggttggtcagtccctccaacaacagcaagggtgagtgggccaccaccacatcgtcctggtgggatctagggttaggggcctcctacctttgtatctgactcacttggccccatcactcaaatgttttgcagaggatgccttctccgggacagattggatgttggagaaaatggatttgaaggagttcgacttggatgccctgttgggtatagatgacctggaaaccatgccagatgaccttctgaccacgttggatgacacttgtgatctctttgcccccctagtccaggagactaataagcagcccccccagacggtgaacccaattggccatctcccagaaagtttaacaaaacccgaccaggttgcccccttcaccttcttacaacctcttcccctttccccaggggtcctgtcctccactccagatcattcctttagtttagagctgggcagtgaagtggatatcactgaaggagataggaagccagactacactgcttacgttgccatgatccctcagtgcataaaggaggaagacaccccttcagataatgatagtggcatctgtatgagcccagagtcctatctggggtctcctcagcacagcccctctaccaggggctctccaaataggagcctcccatctccaggtgttctctgtgggtctgcccgtcccaaaccttacgatcctcctggagagaagatggtagcagcaaaagtaaagggtgagaaactggataagaagctgaaaaaaatggagcaaaacaagacagcagccactaggtaccgccagaagaagagggcggagcaggaggctcttactggtgagtgcaaagagctggaaaagaagaacgaggctctaaaagagagggcggattccctggccaaggagatccagtacctgaaagatttgatagaagaggtccgcaaggcaagggggaagaaaagggtcccctagttgaggatagtcaggagcgtcaatgtgcttgtacatagagtgctgtagctgtgtgttccaataaattattttgtagggaaagta

SEQ ID NO: 12161 - protein, 267 aa, Homo sapiens; identical to SEQ ID NO: 12149

SEQ ID NO: 12162 - DNA, 1343 bp, Homo sapiens
atttctactttgcccgcccacagatgtagttttctctgcgcgtgtgcgttttccctcctccccgccctcagggtccacggccaccatggcgtattaggggcagcagtgcctgcggcagcattggcctttgcagcggcggcagcagcaccaggctctgcagcggcaacccccagcggcttaagccatggccaaagcaccgcaacatgaccgaaatgagcttcctgagcagcgaggtgttggtgggggacttgatgtcccccttcgaccagtcgggtttgggggctgaagaaagcctaggtctcttagatgattacctggaggtggccaagcacttcaaacctcatgggttctccagcgacaaggctaaggcgggctcctccgaatggctggctgtggatgggttggtcagtccctccaacaacagcaaggaggatgccttctccgggacagattggatgttggagaaaatggatttgaaggagttcgacttggatgccctgttgggtatagatgacctggaaaccatgccagatgaccttctgaccacgttggatgacacttgtgatctctttgcccccctagtccaggagactaataagcagcccccccagacggtgaacccaattggccatctcccagaaagtttaacaaaacccgaccaggttgcccccttcaccttcttacaacctcttcccctttccccaggggtcctgtcctccactccagatcattcctttagtttagagctgggcagtgaagtggatatcactgaaggagataggaagccagactacactgcttacgttgccatgatccctcagtgcataaaggaggaagacaccccttcagataatgatagtggcatctgtatgagcccagagtcctatctggggtctcctcagcacagcccctctaccaggggctctccaaataggagcctcccatctccaggtgttctctgtgggtctgcccgtcccaaaccttacgatcctcctggagagaagatggtagcagcaaaagtaaagggtgagaaactggataagaagctgaaaaaaatggagcaaaacaagacagcagccactaggtaccgccagaagaagagggcggagcaggaggctcttactggtgagtgcaaagagctggaaaagaagaacgaggctctaaaagagagggcggattccctggccaaggagatccagtacctgaaagatttgatagaagaggtccgcaaggcaagggggaagaaaagggtcccctagttgaggatagtcaggagcgtcaatgtgcttgtacatagagtgctgtagctgtgtgttccaataaattattttgtagggaaagta

SEQ ID NO: 12163 - protein, 351 aa, Homo sapiens; identical to SEQ ID NO: 2037

SEQ ID NO: 12164 - DNA, 1522 bp, Homo sapiens
atttctactttgcccgcccacagatgtagttttctctgcgcgtgtgcgttttccctcctccccgccctcagggtccacggccaccatggcgtattaggggcagcagtgcctgcggcagcattggcctttgcagcggcggcagcagcaccaggctctgcagcggcaacccccagcggcttaagccatggcgcttctcacggcattcagcagcagcgttgctgtaaccgacaaagacaccttcgaattaagcacattcctcgattccagcaaagcaccgcaacatgaccgaaatgagcttcctgagcagcgaggtgttggtgggggacttgatgtcccccttcgaccagtcgggtttgggggctgaagaaagcctaggtctcttagatgattacctggaggtggccaagcacttcaaacctcatgggttctccagcgacaaggctaaggcgggctcctccgaatggctggctgtggatgggttggtcagtccctccaacaacagcaagggtgagtgggccaccaccacatcgtcctggtgggatctagggttaggggcctcctacctttgtatctgactcacttggccccatcactcaaatgttttgcagaggatgccttctccgggacagattggatgttggagaaaatggatttgaaggagttcgacttggatgccctgttgggtatagatgacctggaaaccatgccagatgaccttctgaccacgttggatgacacttgtgatctctttgcccccctagtccaggagactaataagcagcccccccagacggtgaacccaattggccatctcccagaaagtttaacaaaacccgaccaggttgcccccttcaccttcttacaacctcttcccctttccccaggggtcctgtcctccactccagatcattcctttagtttagagctgggcagtgaagtggatatcactgaaggagataggaagccagactacactgcttacgttgccatgatccctcagtgcataaaggaggaagacaccccttcagataatgatagtggcatctgtatgagcccagagtcctatctggggtctcctcagcacagcccctctaccaggggctctccaaataggagcctcccatctccaggtgttctctgtgggtctgcccgtcccaaaccttacgatcctcctggagagaagatggtagcagcaaaagtaaagggtgagaaactggataagaagctgaaaaaaatggagcaaaacaagacagcagccactaggtaccgccagaagaagagggcggagcaggaggctcttactggtgagtgcaaagagctggaaaagaagaacgaggctctaaaagagagggcggattccctggccaaggagatccagtacctgaaagatttgatagaagaggtccgcaaggcaagggggaagaaaagggtcccctagttgaggatagtcaggagcgtcaatgtgcttgtacatagagtgctgtagctgtgtgttccaataaattattttgtagggaaagta

SEQ ID NO: 12165 - protein, 59 aa, Homo sapiens
MALLTAFSSSVAVTDKDTFELSTFLDSSKAPQHDRNELPEQRGVGGGLDVPLRPVGFGG

SEQ ID NO: 12166 - DNA, 1585 bp, Homo sapiens
atttctactttgcccgcccacagatgtagttttctctgcgcgtgtgcgttttccctcctccccgccctcagggtccacggccaccatggcgtattaggggcagcagtgcctgcggcagcattggcctttgcagcggcggcagcagcaccaggctctatggccgatctagagaagtcccgcctcataagtggaaggatgaaattctcagaacagctaacctctaatgggagttggcttctgattctcattcaggcttctcacggcattcagcagcagcgttgctgtaaccgacaaagacaccttcgaattaagcacattcctcgattccagcaaagcaccgcaacatgaccgaaatgagcttcctgagcagcgaggtgttggtgggggacttgatgtcccccttcgaccagtcgggtttgggggctgaagaaagcctaggtctcttagatgattacctggaggtggccaagcacttcaaacctcatgggttctccagcgacaaggctaaggcgggctcctccgaatggctggctgtggatgggttggtcagtccctccaacaacagcaagggtgagtgggccaccaccacatcgtcctggtgggatctagggttaggggcctcctacctttgtatctgactcacttggccccatcactcaaatgttttgcagaggatgccttctccgggacagattggatgttggagaaaatggatttgaaggagttcgacttggatgccctgttgggtatagatgacctggaaaccatgccagatgaccttctgaccacgttggatgacacttgtgatctctttgcccccctagtccaggagactaataagcagcccccccagacggtgaacccaattggccatctcccagaaagtttaacaaaacccgaccaggttgcccccttcaccttcttacaacctcttcccctttccccaggggtcctgtcctccactccagatcattcctttagtttagagctgggcagtgaagtggatatcactgaaggagataggaagccagactacactgcttacgttgccatgatccctcagtgcataaaggaggaagacaccccttcagataatgatagtggcatctgtatgagcccagagtcctatctggggtctcctcagcacagcccctctaccaggggctctccaaataggagcctcccatctccaggtgttctctgtgggtctgcccgtcccaaaccttacgatcctcctggagagaagatggtagcagcaaaagtaaagggtgagaaactggataagaagctgaaaaaaatggagcaaaacaagacagcagccactaggtaccgccagaagaagagggcggagcaggaggctcttactggtgagtgcaaagagctggaaaagaagaacgaggctctaaaagagagggcggattccctggccaaggagatccagtacctgaaagatttgatagaagaggtccgcaaggcaagggggaagaaaagggtcccctagttgaggatagtcaggagcgtcaatgtgcttgtacatagagtgctgtagctgtgtgttccaataaattattttgtagggaaagta

SEQ ID NO: 12167 - protein, 63 aa, Homo sapiens; identical to SEQ ID NO: 12157

SEQ ID NO: 12168 - DNA, 1103 bp, Homo sapiens
atttctactttgcccgcccacagatgtagttttctctgcgcgtgtgcgttttccctcctccccgccctcagggtccacggccaccatggcgtattaggggcagcagtgcctgcggcagcattggcctttgcagcggcggcagcagcaccaggctctgcagcggcaacccccagcggcttaagccatggcaggatgccttctccgggacagattggatgttggagaaaatggatttgaaggagttcgacttggatgccctgttgggtatagatgacctggaaaccatgccagatgaccttctgaccacgttggatgacacttgtgatctctttgcccccctagtccaggagactaataagcagcccccccagacggtgaacccaattggccatctcccagaaagtttaacaaaacccgaccaggttgcccccttcaccttcttacaacctcttcccctttccccaggggtcctgtcctccactccagatcattcctttagtttagagctgggcagtgaagtggatatcactgaaggagataggaagccagactacactgcttacgttgccatgatccctcagtgcataaaggaggaagacaccccttcagataatgatagtggcatctgtatgagcccagagtcctatctggggtctcctcagcacagcccctctaccaggggctctccaaataggagcctcccatctccaggtgttctctgtgggtctgcccgtcccaaaccttacgatcctcctggagagaagatggtagcagcaaaagtaaagggtgagaaactggataagaagctgaaaaaaatggagcaaaacaagacagcagccactaggtaccgccagaagaagagggcggagcaggaggctcttactggtgagtgcaaagagctggaaaagaagaacgaggctctaaaagagagggcggattccctggccaaggagatccagtacctgaaagatttgatagaagaggtccgcaaggcaagggggaagaaaagggtcccctagttgaggatagtcaggagcgtcaatgtgcttgtacatagagtgctgtagctgtgtgttccaataaattattttgtagggaaagta

SEQ ID NO: 12169 - protein, 267 aa, Homo sapiens; identical to SEQ ID NO: 12149

SEQ ID NO: 12170 - DNA, 304 bp, Homo sapiens
tttctactttgcccgcccacagatgtagttttctctgcgcgtgtgcgttttccctcctccccgccctcagggtccacggccaccatggcgtattaggggcagcagtgcctgcggcagcattggcctttgcaagggcggattccctggccaaggagatccagtacctgaaagatttgatagaagaggtccgcaaggcaagggggaagaaaagggtcccctagttgaggatagtcaggagcgtcaatgtgcttgtacatagagtgctgtagctgtgtgttccaataaattattttgtagggaaagt

SEQ ID NO: 12171 - protein, 76 aa, Homo sapiens
FSLRVCVFPPPRPQGPRPPWRIRGSSACGSIGLCKGGFPGQGDPVPERFDRRGPQGKGEEKGPLVEDSQERQCACT

SEQ ID NO: 12172 - DNA, 1448 bp, Homo sapiens
tttctactttgcccgcccacagatgtagttttctctgcgcgtgtgcgttttccctcctccccgccctcagggtccacggccaccatggcgtattaggggcagcagtgcctgcggcagcattggcggcattcagcagcagcgttgctgtaaccgacaaagacaccttcgaattaagcacattcctcgattccagcaaagcaccgcaacatgaccgaaatgagcttcctgagcagcgaggtgttggtgggggacttgatgtcccccttcgaccagtcgggtttgggggctgaagaaagcctaggtctcttagatgattacctggaggtggccaagcacttcaaacctcatgggttctccagcgacaaggctaaggcgggctcctccgaatggctggctgtggatgggttggtcagtccctccaacaacagcaagggtgagtgggccaccaccacatcgtcctggtgggatctagggttaggggcctcctacctttgtatctgactcacttggccccatcactcaaatgttttgcagaggatgccttctccgggacagattggatgttggagaaaatggatttgaaggagttcgacttggatgccctgttgggtatagatgacctggaaaccatgccagatgaccttctgaccacgttggatgacacttgtgatctctttgcccccctagtccaggagactaataagcagcccccccagacggtgaacccaattggccatctcccagaaagtttaacaaaacccgaccaggttgcccccttcaccttcttacaacctcttcccctttccccaggggtcctgtcctccactccagatcattcctttagtttagagctgggcagtgaagtggatatcactgaaggagataggaagccagactacactgcttacgttgccatgatccctcagtgcataaaggaggaagacaccccttcagataatgatagtggcatctgtatgagcccagagtcctatctggggtctcctcagcacagcccctctaccaggggctctccaaataggagcctcccatctccaggtgttctctgtgggtctgcccgtcccaaaccttacgatcctcctggagagaagatggtagcagcaaaagtaaagggtgagaaactggataagaagctgaaaaaaatggagcaaaacaagacagcagccactaggtaccgccagaagaagagggcggagcaggaggctcttactggtgagtgcaaagagctggaaaagaagaacgaggctctaaaagagagggcggattccctggccaaggagatccagtacctgaaagatttgatagaagaggtccgcaaggcaagggggaagaaaagggtcccctagttgaggatagtcaggagcgtcaatgtgcttgtacatagagtgctgtagctgtgtgttccaataaattattttgtagggaaagta

SEQ ID NO: 12173 - protein, 267 aa, Homo sapiens; identical to SEQ ID NO: 12149

SEQ ID NO: 12174 - DNA, 891 bp, Homo sapiens
gggcgtgagtcaagggcgggcggtgggcggggcgcggccgccctggccgtatttggacgtggggacggagcgctttcctcttggcggccggtggaagaatcccctggtctccgtgagcgtccattttgtggaacctgagttgcaagcagggaggggcaaatacaactgccctgttcccgattctctagatggccgatctagagaagtcccgcctcataagtggaaggatgaaattctcagaacagctaacctctaatgggagttggcttctgattctcattcaggcttctcacggcattcagcagcagcgttgctgtaaccgacaaagacaccttcgaattaagcacattcctcgattccagcaaagcaccgcaacatgaccgaaatgagcttcctgagcagcgaggtgttggtgggggacttgatgtcccccttcgaccagtcgggtttgggggctgaagaaagcctaggtctcttagatgattacctggaggtggccaagcacttcaaacctcatgggttctccagcgacaaggctaaggcgggctcctccgaatggctggctgtggatgggttggtcagtccctccaacaacagcaaggaggatgccttctccgggacagattggatgttggagaaaatggatttgaaggagttcgacttggatgccctgttgggtatagatgacctggaaaagaagaacgaggctctaaaagagagggcggattccctggccaaggagatccagtacctgaaagatttgatagaagaggtccgcaaggcaagggggaagaaaagggtcccctagttgaggatagtcaggagcgtcaatgtgcttgtacatagagtgctgtagctgtgtgttccaataaattattttgtagggaaagt

SEQ ID NO: 12175 - protein, 143 aa, Homo sapiens
MTEMSFLSSEVLVGDLMSPFDQSGLGAEESLGLLDDYLEVAKHFKPHGFSSDKAKAGSSEWLAVDGLVSPSNNSKEDAFSGTDWMLEKMDLKEFDLDALLGIDDLEKKNEALKERADSLAKEIQYLKDLIEEVRKARGKKRVP

SEQ ID NO: 12176 - DNA, 1376 bp, Homo sapiens
gggcgtgagtcaagggcgggcggtgggcggggcgcggccgccctggccgtatttggacgtggggacggagcgctttcctcttggcggccggtggaagaatcccctggtctccgtgagcgtccattttgtggaacctgagttgcaagcagggaggggcaaatacaactgccctgttcccgattctctagatggccgatctagagaagtcccgcctcataagtggaaggatgaaattctcagaacagctaacctctaatgggagttggcttctgattctcattcaggcttctcacggcattcagcagcagcgttgctgtaaccgacaaagacaccttcgaattaagcacattcctcgattccagcaaagcaccgcaacatgaccgaaatgagcttcctgagcagcgaggtgttggtgggggacttgatgtcccccttcgaccagtcgggtttgggggctgaagaaagcctaggtctcttagatgattacctggaggtggccaagcacttcaaacctcatgggttctccagcgacaaggctaaggcgggctcctccgaatggctggctgtggatgggttggtcagtccctccaacaacagcaaggaggatgccttctccgggacagattggatgttggagaaaatggatttgaaggagttcgacttggatgccctgttgggtatagatgacctggaaaccatgccagatgaccttcttacaacctcttcccctttccccaggggtcctgtcctccactccagatcattcctttagtttagagctgggcagtgaagtggatatcactgaaggagataggaagccagactacactgcttacgttgccatgatccctcagtgcataaaggaggaagacaccccttcagataatgatagtggcatctgtatgagcccagagtcctatctggggtctcctcagcacagcccctctaccaggggctctccaaataggagcctcccatctccaggtgttctctgtgggtctgcccgtcccaaaccttacgatcctcctggagagaagatggtagcagcaaaagtaaagggtgagaaactggataagaagctgaaaaaaatggagcaaaacaagacagcagccactaggtaccgccagaagaagagggcggagcaggaggctcttactggtgagtgcaaagagctggaaaagaagaacgaggctctaaaagagagggcggattccctggccaaggagatccagtacctgaaagatttgatagaagaggtccgcaaggcaagggggaagaaaagggtcccctagttgaggatagtcaggagcgtcaatgtgcttgtacatagagtgctgtagctgtgtgttccaataaattattttgtagggaaagta

SEQ ID NO: 12177 - protein, 202 aa, Homo sapiens
MTWKPCQMTFLQPLPLSPGVLSSTPDHSFSLELGSEVDITEGDRKPDYTAYVAMIPQCIKEEDTPSDNDSGICMSPESYLGSPQHSPSTRGSPNRSLPSPGVLCGSARPKPYDPPGEKMVAAKVKGEKLDKKLKKMEQNKTAATRYRQKKRAEQEALTGECKELEKKNEALKERADSLAKEIQYLKDLIEEVRKARGKKRVP

SEQ ID NO: 12178 - DNA, 1216 bp, Homo sapiens
gggcgtgagtcaagggcgggcggtgggcggggcgcggccgccctggccgtatttggacgtggggacggagcgctttcctcttggcggccggtggaagaatcccctggtctccgtgagcgtccattttgtggaacctgagttgcaagcagggaggggcaaatacaactgccctgttcccgattctctagatggccgatctagagaagtcccgcctcataagtggaaggatgaaattctcagaacagctaacctctaatgggagttggcttctgattctcattcaggcttctcacggcattcagcagcagcgttgctgtaaccgacaaagacaccttcgaattaagcacattcctcgattccagcaaagcaccgcaacatgaccgaaatgagcttcctgagcagcgaggtgttggtgggggacttgatgtcccccttcgaccagtcgggtttgggggctgaagaaagcctaggtctcttagatgattacctggaggtggccaagcacttcaaacctcatgggttctccagcgacaaggctaaggcgggctcctccgaatggctggctgtggatgggttggtcagtccctccaacaacagcaaggaggatgccttctccgggacagattggatgttggagaaaatggatttgaaggagttcgacttggatgccctgttgggtatagatgacctggaaaccatgccagatgaccttctgaccacgttggatgacacttgtgatctctttgcccccctatcctatctggggtctcctcagcacagcccctctaccaggggctctccaaataggagcctcccatctccaggtgttctctgtgggtctgcccgtcccaaaccttacgatcctcctggagagaagatggtagcagcaaaagtaaagggtgagaaactggataagaagctgaaaaaaatggagcaaaacaagacagcagccactaggtaccgccagaagaagagggcggagcaggaggctcttactggtgagtgcaaagagctggaaaagaagaacgaggctctaaaagagagggcggattccctggccaaggagatccagtacctgaaagatttgatagaagaggtccgcaaggcaagggggaagaaaagggtcccctagttgaggatagtcaggagcgtcaatgtgcttgtacatagagtgctgtagctgtgtgttccaataaattattttgtagggaaagta

SEQ ID NO: 12179 - protein, 251 aa, Homo sapiens
MTEMSFLSSEVLVGDLMSPFDQSGLGAEESLGLLDDYLEVAKHFKPHGFSSDKAKAGSSEWLAVDGLVSPSNNSKEDAFSGTDWMLEKMDLKEFDLDALLGIDDLETMPDDLLTTLDDTCDLFAPLSYLGSPQHSPSTRGSPNRSLPSPGVLCGSARPKPYDPPGEKMVAAKVKGEKLDKKLKKMEQNKTAATRYRQKKRAEQEALTGECKELEKKNEALKERADSLAKEIQYLKDLIEEVRKARGKKRVP

SEQ ID NO: 12180 - DNA, 1268 bp, Homo sapiens
acccttttttttgctgctaccatcttctctccaggaggatcgtaaggtttgggacgggcagacccacagagaacacctggagatgggaggctcctatttggagagcccctggtagaggggctgtgctgaggagaccccagataggactctgggctcatacagatgccactatcattatctgaaggggtgtcttcctcctttatgcactgagggatcatggcaacgtaagcagtgtagtctggcttcctatctccttcagtgatatccacttcactgcccagctctaaactaaaggaatgatctggagtggaggacaggacccctggggaaaggggaagaggttgtaagaaggtgaagggggcaacctggtcgggttttgttaaactttctgggagatggccaattgggttcaccgtctgggggggctgcttattagtctcctggactaggggggcaaagagatcacaagtgtcatccaacgtggtcagaaggtcatctggcatggtttccaggtcatctatacccaacagggcatccaagtcgaactccttcaaatccattttctccaacatccaatctgtcccggagaaggcatcctctgcaaaacatttgagtgatggggccaagtgagtcagatacaaaggtaggaggcccctaaccctagatcccaccaggacgatgtggtggtggcccactcacccttgctgttgttggagggactgaccaacccatccacagccagccattcggaggagcccgccttagccttgtcgctggagaacccatgaggtttgaagtgcttggccacctccaggtaatcatctaagagacctaggctttcttcagcccccaaacccgactggtcgaagggggacatcaagtcccccaccaacacctcgctgctcaggaagctcatttcggtcatgttgcggtgctttgctggaatcgaggaatgtgcttaattcgaaggtgtctttgtcggttacagcaacgctgctgctgaatgccgtgagaagcctgaatgagaatcagaagccaactcccattagaggttagctgttctgagaatttcatccttccacttatgaggcgggacttctctagatcggccatctagagaatcgggaacagggcagttgtatttgcccctccctgcttgcaactcaggttccacaaaatggacgctcacggagaccaggggattcttccaccggccgccaagaggaaagcgctccgtccccacgtccaaatacggccagggcggccgc

SEQ ID NO: 12181 - protein, 42 aa, Homo sapiens
MVSRSSIPNRASKSNSFKSIFSNIQSVPEKASSAKHLSDGAK

SEQ ID NO: 12182 - DNA, 1278 bp, Homo sapiens
tactttccctacaaaataatttattggaacacacagctacagcactctatgtacaagcacattgacgctcctgactatcctcaactaggggacccttttcttcccccttgccttgcggacctcttctatcaaatctttcaggtactggatctccttggccagggaatccgccctctcttttagagcctcgttcttcttttccagctctttgcactcaccagtaagagcctcctgctccgccctcttcttctggcggtacctagtggctgctgtcttgttttgctccatttttttcagcttcttatccagtttctcaccctttacttttgctgctaccatcttctctccaggaggatcgtaaggtttgggacgggcagacccacagagaacacctggagatgggagatggccaattgggttcaccgtctgggggggctgcttattagtctcctggactaggggggcaaagagatcacaagtgtcatccaacgtggtcagaaggtcatctggcatggtttccaggtcatctatacccaacagggcatccaagtcgaactccttcaaatccattttctccaacatccaatctgtcccggagaaggcatcctctgcaaaacatttgagtgatggggccaagtgagtcagatacaaaggtaggaggcccctaaccctagatcccaccaggacgatgtggtggtggcccactcacccttgctgttgttggagggactgaccaacccatccacagccagccattcggaggagcccgccttagccttgtcgctggagaacccatgaggtttgaagtgcttggccacctccaggtaatcatctaagagacctaggctttcttcagcccccaaacccgactggtcgaagggggacatcaagtcccccaccaacacctcgctgctcaggaagctcatttcggtcatgttgcggtgctttgctggaatcgaggaatgtgcttaattcgaaggtgtctttgtcggttacagcaacgctgctgctgaatgccgtgagaagcctgaatgagaatcagaagccaactcccattagaggttagctgttctgagaatttcatccttccacttatgaggcgggacttctctagatcggccatctagagaatcgggaacagggcagttgtatttgcccctccctgcttgcaactcaggttccacaaaatggacgctcacggagaccaggggattcttccaccggccgccaagaggaaagcgctccgtccccacgtccaaatacggccagggcggccgc

SEQ ID NO: 12183 - protein, 44 aa, Homo sapiens
MYKHIDAPDYPQLGDPFLPPCLADLFYQIFQVLDLLGQGIRPLF

SEQ ID NO: 12184 - DNA, 822 bp, Homo sapiens
cgaggtgttggtgggggacttgatgtcccccttcgaccagtcgggtttgggggctgaagaaagcctaggtctcttagatgattacctggaggtggccaagcacttcaaacctcatgggttctccagcgacaaggctaaggcgggctcctccgaatggctggctgtggatgggttggtcagtccctccaacaacagcaagggtgagtgggccaccaccacatcgtcctggtgggatctagggttaggggcctcctacctttgtatctgactcacttggccccatcactcaaatgttttgcagaggatgccttctccgggacagattggatgttggagaaaatggatttgaaggagttcgacttggatgccctgttgggtatagatgacctggaaaccatgccagatgaccttctgaccacgttggatgacacttgtgatctctttgcccccctagtccaggagactaataagcagcccccccagacggtgaacccaattggccatctcccagaaagtttaacaaaacccgaccaggttgcccccttcaccttcttacaacctcttcccctttccccaggggtcctgtcctccactccagatcattcctttagtttagaagctggaaaagaagaacgaggctctaaaagagagggcggattccctggccaaggagatccagtacctgaaagatttgatagaagaggtccgcaaggcaagggggaagaaaagggtcccctagttgaggatagtcaggagcgtcaatgtgcttgtacatagagtgctgtagctgtgtgttccaataaattattttgtagggaaagt

SEQ ID NO: 12185 - protein, 149 aa, Homo sapiens
MLEKMDLKEFDLDALLGIDDLETMPDDLLTTLDDTCDLFAPLVQETNKQPPQTVNPIGHLPESLTKPDQVAPFTFLQPLPLSPGVLSSTPDHSFSLEAGKEERGSKREGGFPGQGDPVPERFDRRGPQGKGEEKGPLVEDSQERQCACT

SEQ ID NO: 12186 - DNA, 1133 bp, Homo sapiens
cgaggtgttggtgggggacttgatgtcccccttcgaccagtcgggtttgggggctgaagaaagcctaggtctcttagatgattacctggaggtggccaagcacttcaaacctcatgggttctccagcgacaaggctaaggcgggctcctccgaatggctggctgtggatgggttggtcagtccctccaacaacagcaagggtgagtgggccaccaccacatcgtcctggtgggatctagggttaggggcctcctacctttgtatctgactcacttggccccatcactcaaatgttttgcagaggatgccttctccgggacagattggatgttggagaaaatggatttgaaggagttcgacttggatgccctgttgggtatagatgacctggaaaccatgccagatgaccttctgaccacgttggatgacacttgtgatctctttgcccccctagtccaggagactaataagcagcccccccagacggtgaacccaattggccatctcccagaaagtttaacaaaacccgaccaggttgcccccttcaccttcttacaacctcttcccctttccccaggggtcctgtcctccactccagatcattcctttagtttagagctgggcagtgaagtggatatcactgaaggagataggaagccagactacactgcttacgttgccatgatccctcacacagcccctctaccaggggctctccaaataggagcctcccatctccaggtgttctctgtgggtctgcccgtcccaaaccttacgatcctcctggagagaagatggtagcagcaaaagtaaagggtgagaaactggataagaagctgaaaaaaatggagcaaaacaagacagcagccactaggtaccgccagaagaagagggcggagcaggaggctcttactggtgagtgcaaagagctggaaaagaagaacgaggctctaaaagagagggcggattccctggccaaggagatccagtacctgaaagatttgatagaagaggtccgcaaggcaagggggaagaaaagggtcccctagttgaggatagtcaggagcgtcaatgtgcttgtacatagagtgctgtagctgtgtgttccaataaattattttgtagggaaagta

SEQ ID NO: 12187 - protein, 157 aa, Homo sapiens
MLEKMDLKEFDLDALLGIDDLETMPDDLLTTLDDTCDLFAPLVQETNKQPPQTVNPIGHLPESLTKPDQVAPFTFLQPLPLSPGVLSSTPDHSFSLELGSEVDITEGDRKPDYTAYVAMIPHTAPLPGALQIGASHLQVFSVGLPVPNLTILLERRW

SEQ ID NO: 12188 - DNA, 1157 bp, Homo sapiens
ccgcccgcctcggcctcccaaagtgctgggattacaggcgtgagccaccgccaccacgcccagctcacctaggaggattttgagcaaagaggtagagctgggatttgaacccaggacggctccagtctgggctcttcattttgcctcttgagctggaaacaaatggcccgtaacgacctgcatggtggggcccacgtgacctttctggtgcccagcatagactgtcacctgagagccaactgttgatggaatgcatgcagctggttgtggagaagtggcccgaggcaccactgggagtgggcatcacacatgggtcttggacctggtgctctttgaggtctttcctgttgagattctagaattctccaaaggccatgggcctccatccacatccaggtactaaataggtgttagggtgtggccaggagcatcagagtcatccagtgccagtgggggtcggccctcatttggcagacgagaaactgaggcaccaagaagggcagtgcaggccagtggtgtggagccaggatgctggggctgtgcccttcccaggcccctgcagctaagtcctcccacacccagaaggcaccagctcaggtcacagtggatttgcccttctccctgacctcacctcctcccctcactgtgctcccggcctctctccatctgtctgccaagcttggtcctgcctcagagccttgcacttgctgtttttttgtaacttttttctccattgagtttatctgtatacagatgaactttctgttctccattccctaactacaatataagctcactctatggcagcaggtattttgctgtcttgttcattcccgtatttccaggacttacagcagtgcctgggaaatagcaaaaatgactgcagcgaaaatgttcaaagagctctgaggttctaggcgccttccagtgatgagctcagagtcctcctgagaggctgtgaggagggtcttatgactgtaaccctcttactgatgcagctaagacccagacttaggcacccccttgggaagtctggcctatgggtggacactggcccatgggcaggtggtataggcagtgatagtggcctggacagaccggctggatttggctaggcagatatctgttccggagagcccagcacaataaggggtacg

SEQ ID NO: 12189 - protein, 83 aa, Homo sapiens [sequence omitted]

SEQ ID NO: 12190 - DNA, 3398 bp, Homo sapiens
agggctggccaggggacgtccggcgcgggcaggaggatggtagtggctgcgggcgggagccctggatggaaaacaatccaggccgggcttagccccagtggcatgggaacgctgcgcgccctctgacctgggtctcttcctctctcttcccctacagccccccgggaccctccaggtcaggccaagccgagaggggctccggtgaaacggccccggaagacgaaggcaattcaggcccagaaactgcggaactcggccaagggaaaggtgcccaagtcggcactgggtaagttcgggaaggggctgaaagtgctgcctccggtgctgggacctgcgccccagaggaggtggcgcttgaggcagggcttgaagcgttcgcccggtattgctagacctactgtgtgccaggcgcggagcggggccctggacatacgaaggtgacagaacacgccaccgtcctggtcctcgtggactacggccctagtggggagagaagcatcaaagaatatcaaacccagtgtgtcattgctaagtgcattgaagcctatgaattaaaagactacggtactctgatggggacttaggccaagtcagccttctctgaggaagcgacatttcagccgagagctgaaggatgtataagagtgagctaggtgaaaagtaggagaatattctaggaagaatagtatgtgcaaaggtcctgagtcagaaaggaggttgttgcctttgagaatttgaaaaaataaaggctggtaaaggtgacctagtgaatgaggatcaaagatggagcatttaaacacattcactaacactctgtaccaggtgctgattctaagtgctgtacaaatgtaagctcgtttgatccttacagcagccctttgaggtcgatactactatcacccccgttttacagattcagaaaaaggcacctgcccaggtggtacaggcattgtggctgcccgggcattgtgtctccagagtgctgctattacctactccattgaaataggacatgctgtggcctgggcagtggctatagcagcagagataacaagagaattgtgcaggtggaaaatatgttaaagagggggcagcagagaatttcagcctttagaggggttttagtggtgaattggctgtgaaggtggagcctagtttcttgggggacgtagtgtcacttaatagacataaagactttcggaggggctggtgtaggcaagatggtgatattttgacatgtgtcaggacgtggcaagctcttactgtgtctgaatccctagagtctaatgcataaaagatgttaaagtatttgttaaaagaattatgaattccaaggaggaaatacaacttaagccaaagtctggaggcaggaaagtgagacaggtttgagccccagcgatacttgccatgaagcaggagtgtggagtgccagaggtcattcccatctgtcccagcccttgtctcactgtcgtgtcctgggtgctcacccacctcccctgttggatggaagctcctaaaggcacacacctccttgggcttgtccgcagccttggtgtccaccacaggttttggcacatagatgctgagtgagaggaatggcaagcctcgcagccaatggaaagaacacctctgcagctgccactttgctccaagctgcatcgtctcttgcctgaattattgcagaagcctagccggtctcctgccttccacatgcccctccccccgtaatcttgttctcaacagcaaccaaagtgatcgtgtaaaatcagaagtcattccttgtttttcctctgggtggctctcattgtagtcactaaaaggtggcggtcttagggtgcctgacaagggctatatgacctacccccacccccagccaaacttggtctcttcctgctacccactccccctactccagctgtttttgttgttgtttttggtttgttttttttttttttgagatggagtcttgctttgtcacccaggctggagtacagtggtgcagtctcatctcactccaacctctagcctcccgagttcaaacgatgctcctgcctcagcctcccgagtagctgggattacaggtgcccaccaccacacccagctaattttcgttatttttaatacagacggggtttcaccatgttggccacgctgatctcgaactcctgacctcaggtgacctgcctgcctcggcctcccaaagtgctgagattacaggtgtgagccaccgcacccagccattccagctgttttgtgtttttcaaacacatttgacacatttctgcttcagggcctttgcactgggtgttccctctacctagacaaatgctctttccccggatatccacagctctcttcgagtcatttcagtgagaccttctcattccctcctatttgaaattgcaccctccacccctggaattccccttttctgtttcctcttttgtttttctccatgaaatgtttgcgcttctaaaatactgggtcctttgtccttcatctctcactgaagcgaaagctccagagtagctcccttggtgagtagtattcaggacataattgttggaaaatgggggtgggggccaagagcctggggctttcagcaggacctgtgtggagaatgcatttgatggagaagagcccagccgctgtaataacctgggaagggaacgatgaggtctttggcagggccatgggccagggactgagaatggttccagggggagtgaatctgaaatggtgctccctgcctgctacccacagacgagtaccggaagcgagagtgtcgagaccacctcagagtaaacctgaagtttctgaccaggacgagaagcaccgtggctgagtctgtgagccagcagattttgcgccagaaccggggccgcaaggcctgtgaccggcctgtggccaagaccaagaagaagaaggctgagggcaccgtgttcaccgaggaagacttccagaagttccagcaggaatacttcggcagctaggctccctggagggcacggtgaagaggccttcaagccctgcagcctccgactcctgctggctccaggaaccggccgtgccgcgcggccagcagatggcgatgcaggaccagcctggctcgaggaagccgcggagctgagccgagtggaggctggaatggagctggtgggccggaagtcctggggaggatttacacacagaccggagctggcttccgcaggcctgggcagagcatctgcacctgccggaaaggaacgtatctgttttgtttgcttttgcccaggtggggcctctgggctgtttgctgtggagcaaggctaattcctgagcccttggggacgacagctccaggagtaggaagaagggtgggcttccaagttacaataaatgtgaacccaagagctgtg

SEQ ID NO: 12191 - protein, 91 aa, Homo sapiens [sequence omitted]

SEQ ID NO: 12192 - DNA, 979 bp, Homo sapiens
atgtccgccgccctgctgcggcggggcctggagctgctggcggcgtccgagggtgaggagggctggccaggggacgtccggcgcgggcaggaggatggtagtggctgcgggcgggagccctggatggaaaacaatccaggccgggcttagccccagtggcatgggaacgctgcgcgccctctgacctgggtctcttcctctctcttcccctacagccccccgggaccctccaggtcaggccaagccgagaggggctccggtgaaacggccccggaagacgaaggcaattcaggcccagaaactgcggaactcggccaagggaaaggtgcccaagtcggcactggacgagtaccggaagcgagagtgtcgagaccacctcagagtaaacctgaagtttctgaccaggacgagaagcaccgtggctgagtctgtgagccagcagattttgcgccagaaccggggccgcaaggcctgtgaccggcctgtggccaagaccaagaagaagaaggctgagggcaccgtgttcaccgaggaagacttccagaagttccagcaggaatacttcggcagctaggctccctggagggcacggtgaagaggccttcaagccctgcagcctccgactcctgctggctccaggaaccggccgtgccgcgcggccagcagatggcgatgcaggaccagcctggctcgaggaagccgcggagctgagccgagtggaggctggaatggagctggtgggccggaagtcctggggaggatttacacacagaccggagctggcttccgcaggcctgggcagagcatctgcacctgccggaaaggaacgtatctgttttgtttgcttttgcccaggtggggcctctgggctgtttgctgtggagcaaggctaattcctgagcccttggggacgacagctccaggagtaggaagaagggtgggcttccaagttacaataaatgtgaacccaagagctgtg

SEQ ID NO: 12193 - protein, 54 aa, Homo sapiens [sequence omitted]

SEQ ID NO: 12194 - DNA, 942 bp, Homo sapiens
tagtgtgaggctcgtgggcggagccaagcgccgccatgtccgccgccctgctgcggcggggcctggagctgctggcggcgtccgaggccccccgggaccctccaggtcaggccaagccgagaggggctccggtgaaacggccccggaagacgaaggcaattcaggcccagaaactgcggaactcggccaagggaaaggtgcccaagtcggcactggacggggtttcaccatgttggccacgctgatctcgaactcctgacctcaggtgacctgcctgcctcggcctcccaaagtgctgagattacagacgagtaccggaagcgagagtgtcgagaccacctcagagtaaacctgaagtttctgaccaggacgagaagcaccgtggctgagtctgtgagccagcagattttgcgccagaaccggggccgcaaggcctgtgaccggcctgtggccaagaccaagaagaagaaggctgagggcaccgtgttcaccgaggaagacttccagaagttccagcaggaatacttcggcagctaggctccctggagggcacggtgaagaggccttcaagccctgcagcctccgactcctgctggctccaggaaccggccgtgccgcgcggccagcagatggcgatgcaggaccagcctggctcgaggaagccgcggagctgagccgagtggaggctggaatggagctggtgggccggaagtcctggggaggatttacacacagaccggagctggcttccgcaggcctgggcagagcatctgcacctgccggaaaggaacgtatctgttttgtttgcttttgcccaggtggggcctctgggctgtttgctgtggagcaaggctaattcctgagcccttggggacgacagctccaggagtaggaagaagggtgggcttccaagttacaataaatgtgaacccaagagctgtg

SEQ ID NO: 12195 - protein, 69 aa, Homo sapiens
MSAALLRRGLELLAASEAPRDPPGQAKPRGAPVKRPRKTKAIQAQKLRNSAKGKVPKSALDGVSPCWPR

SEQ ID NO: 12196 - DNA, 1047 bp, Homo sapiens
tagtgtgaggctcgtgggcggagccaagcgccgccatgtccgccgccctgctgcggcggggcctggagctgctggcggcgtccgaggccccccgggaccctccaggtcaggccaagccgagaggggctccggtgaaacggccccggaagacgaaggcaattcaggcccagaaactgcggaactcggccaagggaaaggtgcccaagtcggcactggacgagtaccggaagcgagagtgtcgagaccacctcagagtaaacctgaagtttctgaccaggacgagaagcaccgtggctgagtctgtgagccagcaggttggtcgagggtactataggaagggacctgggaggtgagagccgaggctgttcccctagggacccatggcggtctcagccctgagcatagggtgggaggctgggccagccctgccctgcgccgaactcccctgtgacctttgcgggcctcctctgctcttgaaatgatgggccctcggtcccgcaccctcgccagattttgcgccagaaccggggccgcaaggcctgtgaccggcctgtggccaagaccaagaagaagaaggctgagggcaccgtgttcaccgaggaagacttccagaagttccagcaggaatacttcggcagctaggctccctggagggcacggtgaagaggccttcaagccctgcagcctccgactcctgctggctccaggaaccggccgtgccgcgcggccagcagatggcgatgcaggaccagcctggctcgaggaagccgcggagctgagccgagtggaggctggaatggagctggtgggccggaagtcctggggaggatttacacacagaccggagctggcttccgcaggcctgggcagagcatctgcacctgccggaaaggaacgtatctgttttgtttgcttttgcccaggtggggcctctgggctgtttgctgtggagcaaggctaattcctgagcccttggggacgacagctccaggagtaggaagaagggtgggcttccaagttacaataaatgtgaacccaagagctgtg

SEQ ID NO: 12197 - protein, 105 aa, Homo sapiens
MSAALLRRGLELLAASEAPRDPPGQAKPRGAPVKRPRKTKAIQAQKLRNSAKGKVPKSALDEYRKRECRDHLRVNLKFLTRTRSTVAESVSQQVGRGYYRKGPGR

SEQ ID NO: 12198 - DNA, 933 bp, Homo sapiens
ggcacttccgcccatccccctccggatccctctgttcgggctcgggtttccgccgagacgacagggactgccaggtcggaagtagtgtgaggctcgtgggcggagccaagcgccgccatgtccgccgccctgctgcggcggggcctggagctgctggcggcgtccgaggccccccgggaccctccaggtcaggccaagccgagaggggctccggtgaaacggccccggaagacgaaggcaattcaggcccagaaactgcggaactcggccaagggaaaggtgcccaagtcggcactggacgagtaccggaagcgagagtgtcgagaccacctcagagtaaacctgaagtttctgaccaggacgagaagcaccgtggctgagtctgtgagccagcagattttgcgccagaaccggggccgcaaggcctgtgaccggcctgtggccaagaccaagaagaagaaggctgagggcaccgtgttcaccgaggaagacttccagaagttccagcaggaatacttcggcagctaggctccctggagggcacggtgaagaggccttcaagccctgcagcctccgactcctgctggctccaggaaccggccgtgccgcgcggccagcagatggcgatgcaggaccagcctggctcgaggaagccgcggagctgagccgagtggaggctggaatggagctggtgggccggaagtcctggggaggatttacacacagaccggagctggcttccgcaggcctgggcagagcatctgcacctgccggaaaggaacgtatctgttttgtttgcttttgcccaggtggggcctctgggctgtttgctgtggagcaaggctaattcctgagcccttggggacgacagctccaggagtaggaagaagggtgggcttccaagttacaataaatgtgaacccaagagctgtg

SEQ ID NO: 12199 - protein, 136 aa, Homo sapiens; identical to SEQ ID NO: 2043

SEQ ID NO: 12200 - DNA, 1658 bp, Homo sapiens
gtgggcggagccaagcgccgccatgtccgccgccctgctgcggcggggcctggagctgctggcggcgtccgaggccccccgggaccctccaggtcaggccaagccgagaggggctccggtgaaacggccccggaagacgaaggcaattcaggcccagaaactgcggaactcggccaagggaaaggtgcccaagtcggcactgggtaagttcgggaaggggctgaaagtgctgcctccggtgctgggacctgcgccccagaggaggtggcgcttgaggcagggcttgaagcgttcgcccggtattgctagacctactgtgtgccaggcgcggagcggggccctggacatacgaaggtgacagaacacgccaccgtcctggtcctcgtggactacggccctagtggggagagaagcatcaaagaatatcaaacccagtgtgtcattgctaagtgcattgaagcctatgaattaaaagactacggtactctgatggggacttaggccaagtcagccttctctgaggaagcgacatttcagccgagagctgaaggatgtataagagtgagctaggtgaaaagtaggagaatattctaggaagaatagtatgtgcaaaggtcctgagtcagaaaggaggttgttgcctttgagaatttgaaaaaataaaggctggtaaaggtgacctagtgaatgaggatcaaagatggagcatttaaacacattcactaacactctgtaccaggtgctgattctaagtgctgtacaaatgtaagctcgtttgatccttacagcagccctttgaggtcgatactactatcacccccgttttacagattcagaaaaaggcacctgcccaggtggtacaggcattgtggctgcccgggcattgtgtctccagagtgctgctattacctactccattgaaataggacatgctgtggcctgggcagtggctatagcagcagagataacaagagaattgtgcaggtggaaaatatgttaaagagggggcagcagagaatttcagcctttagaggggttttagtggtgaattggctgtgaaggtggagcctagtttcttgggggacgtagtgtcacttaatagacataaagactttcggaggggctggtgtaggcaagatggtgatattttgacatgtgtcaggacgtggcaagctcttactgtgtctgaatccctagagtctaatgcataaaagatgttaaagtatttgttaaaagaattatgaattccaaggaggaaatacaacttaagccaaagtctggaggcaggaaagtgagacaggtttgagccccagcgatacttgccatgaagcaggagtgtggagtgccagaggtcattcccatctgtcccagcccttgtctcactgtcgtgtcctgggtgctcacccacctcccctgttggatggaagctcctaaaggcacacacctccttgggcttgtccgcagccttggtgtccaccacaggttttggcacatagatgctgagtgagaggaatggcaagcctcgcagccaatggaaagaacacctctgcagctgccactttgctccaagctgcatcgtctcttgcctgaattattgcagaagcctagccggtctcctgccttccacatgcccctccccccgtaatcttgttctcaac

SEQ ID NO: 12201 - protein, 111 aa, Homo sapiens
MSAALLRRGLELLAASEAPRDPPGQAKPRGAPVKRPRKTKAIQAQKLRNSAKGKVPKSALGKFGKGLKVLPPVLGPAPQRRWRLRQGLKRSPGIARPTVCQARSGALDIRR

SEQ ID NO: 12202 - DNA, 4563 bp, Homo sapiens
aagcgcacacacactcctcccatgcacacgcacactgacacatgtccacactcacgctcacctcactttcagctgaggccacacttcacgtttccgagagaaagcgggcgaggcagcaggagctctgagggataactggctcgtccgcttgcctgtgccccggggcacctacagagtgggtacgtgacttccggggtgtctgtgagggcgtttctggaagagcttcgtgtttgcaatggcggactgaacacagcagctggcccctccccaaggtgggtgggcctcgtccaatctgtggaagccggaacaggacaaaaaggtggagggcgtttggattctctctgcctgacccaaggcagacatccgttccctctggccgttggtactcctggttctcagggattcagactctgactggcgtccactccattggatcccggccctcaggtcttggaacttgcactgccagcattcctgggtgtccggcttgcggacagcagatcgtgggacttctcagcctccagaattgcacgaagtgtctccttacgaatctcttcctatgtacgtgtatcctattggctctgtttctctgcagaaccctgactaatgcaaaccctctcatctcacagcagtgcatgtacaaacccactcacatcttcccctcccctgccttccctaccgcaagttccctccgaccagaggccaatcccgctgcggtgccccggacccaccctctgcaccagccttccttcttgttttctaaaagctcgcgttttctgtgggcttccaaggctgctcttcagtatctttacgtcagagcctcccagctccttcccctctctcaaaagcgttttcacagggactgtaggctccttccctccccttgataaccaagtactatgccccaggttcttacctcacagcccaaagttgtcctaagtcgggccctgacctgagtgtctccaaatccagcaggccgtctgctctcctgtgacatgcagcatcccacggcttttcctaaaagaccccctctgtcagctttgctgtcacccaccctccagggctctctcttacaggtctgccctttgctagcatcttagcctctccacctcccggtggtcctgtctgcgatggaccccctccatgtgtcccaaggccctccaaaggaacaggtctgtatcaggtgcaattagattgaggtgcaatgcaagggcttgaattgcagagaggttcatttttctttttgtagaaaagtctgggaccagctgtcagagactgatttggccactccatggtcaccaggaccaggctgtgtccatcttttctgttctgacctttttcacatgggccattgtccatgtcaccgctggtcaccagctgcagcagtcgcattcttgctccgggcagcaggaagaaggtgagaccagaaggcagagggggctggtcctgcctggtcagcccccagggggctttgcccagacaccccttccccacccatggctctgctgatttctctatagctgccaccctctgaaaagggagctggcagagtagttcttagacatggcacctggccacctctgtggctgaagaagaagggggttgaggattggggtacacacctgtcagtctccatgcaatgccccaaagtggaccactgaccccacaccacgctgttctcctctgagttttctcacctctgtccaaatggctgcagaagccaaaagccccagagcccagctccccttccctcctttctcttccatccttccatccttccatgagcctgcccctcatcctcctcagggctggaactggctgccggattcctccctggctccgtgggggctggctcagcaatctgagctgccgatggctctgtggtccagctgggaggattcatgccccattggggctgagaggaatgaggtgagggctgtggggtttgcccagaatctcctgaaatatcgggcccaggaactacagcaggactctcattccgccttctggccactgttgggggtgacactggcaggatccaggggctctggaaagctccaggggaaatttgaggcataacccagcttctctgagacggaactcagggaggatccagctcaatcctacagaggcgaccccaaggaaggacctgcccagggtcacttggagagctgggcgggaggagggagaaacctcccccgttcagagtgacaaagccccccttgcctcagggatggctgagatccaagtcctcaaaacacgccgccatctggagggtgtgagagcgaggtccgtcctcagcatggacgctgcagtgcacactgttccgtgccaggtgctggctgaccctgccctgtgggaggtgatggacaggcacacagggggagccccgcaaacaaggggccctgttacagcagagtgggagagcgcctggtaggacgccaagcaccgtggccgggctgcagagaggcctgcgggacttgtagacaagacgtcatggagaaggcggagctcccatgggccttgcaggtttcaccaagcaagagcggagaagacacaggctggacaaaggaaggtggacgggacagccagccgtgcagcagcctcacaggacacagctaccagacagagagcaccagctgacactcattcctccagcaccaggaaatgccacagcagaagagagtcttcaagatgggccagacccacttctgcagcatggttgctgggagcctgcacaggccaggcatttctctacaggtgcaattgagaactcactgaggcaaaagggcctttgtcaacccacagaagtgacaagtccaagtgcagaccaggcttcaggtccagttgctcttcagaactcaaaatcccatctctgcaggtctcagccaatcctgctcccgcctgtttttatttcctgcccagagcaagtacagaaccgagggccatcgatgggcgagaaatcactgtgcctccaagctgtatttttcaccgtaacaagtcattacttctgtgcccggagtcatttctcaggatcttaatgcattcgtttatcaatcaatacttaactgatgtctataaagcatgttcaaaatcagaggtgagagcagctcaccaggtaccgacttcgtgtctggagccaccttgttaaggagcaacccttggcacgggtcccgtgtctgcaccctcgggagctctgggtgggtgcactggggtcctcacagcccttcccaccaccgcagatggaaatctctacctggcagaggggctcagtcgtccccacctgggagtctggggcctaccggcagcagaaggtgcagtggccaaacacagagacatttctatcatcagacctggtccccagcctgactctgctgcccacttacccctggccagggcgagttcatcgactgtgccgagcctggctgcttctccagcctaacaggagtccccgtctcgacaggactgagtggggtgaatgcagccaagtgctcagcagagactgtcccaccgggaagtgttcacaaatatgggctgttgaacctgctgttgttagatctagatccagttctgcgaccacgttcatgacttagatcataactgaagtgcgggccagccgaggccgggccgtttaggggtttggctgctaattcaagaaggacacctgggtttggatcccagagttccctccagacccagatgtggcctcaggcaggtgatgagcctggagatgcggtttcattttctgcagggtggtcaaaggagatctcaggcttgtaggagacaaagcacatcgccccgaactgctcaggaggcgcagattacagccaccctccttatccaccccgtctcccatcacagccctcatgagtgctcaagcaaggctcagggcctgatggacgtggctgcctcctcctagaggacaggcatgtctcggctgcctgcaccagccagcggcccttctccccggccaggagatcctccaaggaaggccaagggccaagcagctgctggagcagatgaccacaaactcagtgactgcagagtgcacgcgctcatcaccttacagttgtgtaggctgggatcccactgggctaagaccaaggtgttgggaggctgcgtttcttgctggatgctgtaagggagaagtcgtttcctcgtgtttttttaacttccttggcccacggaccttcctccaccttcaaagccagcagcctcgcgtcttctgaccttccattgtcacatcgtcatctgacccacgtaaggacccgtgtgattagggtgggcgcacccgggtaatcttcccatctcaaagtccttgactgaatcacatctgcaaagtcccctttgctacgtaaggtcacatgttcacaagatccagggattaggacttggacatttttggaagcccattgtcctgccaacagcacaagacctccaggtgatcctgatgtgtaacgcacagtgagagacaaatgctctgatggaccatcaacagcagaacagacataaatggaagaaaatgtacataaaagagagtccacttaaacatgtgatcctctc

SEQ ID NO: 12203 - protein, 174 aa, Homo sapiens
MGLAGFTKQERRRHRLDKGRWTGQPAVQQPHRTQLPDREHQLTLIPPAPGNATAEESLQDGPDPLLQHGCWEPAQARHFSTGAIENSLRQKGLCQPTEVTSPSADQASGPVALQNSKSHLCRSQPILLPPVFISCPEQVQNRGPSMGEKSLCLQAVFFTVTSHYFCARSHFSGS

SEQ ID NO: 12204 - DNA, 724 bp, Homo sapiens
gaccggagctgttcctgttcggccatcttggctcctcagagtggctgattttcaagaggacatgaagatacaacaaatggtcccgttgagcagacagtccaagcaagcagatacaatggttgcacctcgtcaccctcacaacctcacagcagactggattggggaagatgcctgacacggtggatgcagtgggtggatgcagcatctatcagttaccagagacaaggtgttgctctgtcacccaggctggagtgcagtagtgtgattatagttcaacgcagccttgaactcttggattcaagcaatcctcccacctcaccctcccaagtagctggaactacaggtgtatgccaccacacccaggtaatattttaaaatttttgtagagatgagggtctcaccatgtttcccatgctgatctcacactctgggccttaagtgatcctcctgcctcagcctcccaaagctctgggattacagacatgagatactgcaccaatcctccccttatttttagatactcagcatccaatacactacttgtgtgttgcatggtatatccttgatacttattttaatgaataaatgcactaaaggaatgtgcaatctctacagatgaagaaaacccagtgatattaaacatgttattagttgttataaactgtattttatatccccataaaatcatatgttaaatctctaacccccagtggctgatatttgg

SEQ ID NO: 12205 - protein, 63 aa, Homo sapiens
MQWVDAASISYQRQGVALSPRLECSSVIIVQRSLELLDSSNPPTSPSQVAGTTGVCHHTQVIF

SEQ ID NO: 12206 - DNA, 3365 bp, Homo sapiens
gcggtaccaacccctgccgcaggactttcctgggccggctcgcggagagcgtagcgcggccttggtggcggaatggcgttgagtgacggcccggccccgccatctggttaaagggactcgttcaacacggaagtgtcccggggctgcattgtgctacagctagaatgaagcacatcaacctatcatttgcagcgtgtggatttctgggcatttaccacttgggggcagcatctgcactttgcagacatggcaaaaaacttgtgaaggatgtcaaagccttcgctggggcgtctgcgggatcgttggttgcttctgttctgctaacagcaccagaaaaaatagaggaatgtaaccaatttacctacaagtttgccgaagaaatcagaaggcagtctttcggggcagtaacgcccggttatgacttcatggcccgactaagaagtgggatggagtcgattcttcctcccagcgctcacgagctggcccagaaccgactgcacgtatccatcaccaacgccaaaaccagagaaaatcacttagtctccactttttcctccagggaggacctcattaaggtcctcctagccagcagttttgtgcccatttatgcaggactgaagctagtggaatacaaagggcagaagtgggtggacggaggcctcaccaacgctcttcccatcctgcccgtcggccggacagtaaccatctcccccttcagtggacgactggacatctccccgcaggacaaagggcagctagatctgtatgttaatatcgccaagcaggatatcatgttgtccctggcaaacctggtgagactcaaccaagccctttttcccccaagcaagaggaaaatggaatctttgtatcagtgtggttttgatgacactgttaagtttttacttaaagaaaattggtttgaataaaatgcataaaagtttataatgcaaaacacgttttagatagtttttgatggaagtttctaatcaaatcctttttagaaaatctatcatgactcaattgtattactccttgtaatatttgtgtttatttttaatatttgaattattacttagcacatggatataagaggcactttattagaatttgacaacgtcattaagaaggatacacttaggtgataaggaatcatttttggtgaactgttgtgtcctttaaaaaatggaggaggataggttctttgggtaaattgaggaacatggaaaatggagggccaccacttaggttccatggagaatatgtggcatgatcttgacgtgaagcatgggtgtttccgtgacttagctgtgtccctgtagctctggaactgaaggaactaggtaggagaggaaggatttgagaaataggcaactcatggttaaagacctttgatcaggactggaggaacaaaggtttgtgtattagtccattttcacactgctgagaaagacatacccaagactgggcaatttacaaaagaaaggtttaatgggctcacagttccacatgactgaggaggcctcacaattgtggtggaaggtgaaaggcatgtctcacatggcagcagacaagagaagaaaacttgtgcagggaaactcccctttataaaaccatcggatctcttgagactcgttcactatcatgagaatagcatgggaaagacctgcctccatgattcagttacctcccactgggtccctcccacaacgtgtggcaattgtgggagctacatacacttcaagatgagatttgggtggggacacagccaaaccataacagtttgctttccacaggtgtgtgcagttgctcccagtgcagttaggggcagatatccagaagcctaggagattttgaagaggcttatcccctctcatcttcctcccctaaaccccaccccagtttaggagattatcaagctggttgtcattcattctctctctctctctctctctctctctctctctctctctctctctctctctctcgccatacctctctgagtatttagctattgttctatatactggatacatctattatgggaacttaaatagataaaatactactaaacacaaagaaccaagtagcctagtaaataagaattaaatccagaataatcattcacttctcatttttaaatcacgttgtactgatcccaggttttttactttctgagtagttgtccatcactttgaggacttgtgtatgggcttgtaccaatttactgacactgtcttaaatcctaaatctgtttttatgaggttttgccaagcaagaactcttgattactaagaggcagttagagacaaaccaatttaattccatgtcttcaattgtcacgcatttcttcttttactctttgaaactattctttgagtcaattttatggttctcagaagccaaaatacacaacttttagcacataaacaccaacgatggcctctttttgaggagttatgcatagacccactctagagtaatgatggtccctgtggtatatactttctcctactctagcaaacatgtagtttaatcttaatgtgttgtttccataagtgacatgaagtggatagattctcaattgttatgtccacttattcactaggtaaattttcagttttaatacttttctccttaccccttcctttgatcatttcatgtgaatattctatttgtatgatacactgtatttcaataaattccttgttgatgtacccttaaattgaagaaatttaagctgcaaaaccaaatctcattgtataagacttttttgaagtatcttgtatcgactacatatgtatttgaccctgtgggaggatggtacttttctttttaacttttattttaagttcaggggtacgtgtacaggtttgttataggtaaacttgtgtcacgggggtttgttgtaaagattaatttatcacccaggtgttggtacttttctttaaaaatactgtaagatcattgacgtatcagtctgcagcaactttcctacatgaggggaatacagcggtgtaatgaaacacatacttggtgcacactaggcgctctccggggctggtgcaccaaattctcctgtgagcatgctaccaagcatgctctgcttacctttgctggagtgtgtgctcatgcagccatactaattgaaaacaggcattcacaacaggatctgcctcacttgtgggatcaaaattttgaggcattgtagaactggcatatagaaaatctgaaaggagtttctgacccagatactgatatgtttgcagggtaattactgtgattggcagcttgataaattcccaattccctgtgggggcaatttccttatatatttgaatctgtcattaaaaatgtcattagtcttc

SEQ ID NO: 12207 - protein, 253 aa, Homo sapiens; identical to SEQ ID NO: 2045

SEQ ID NO: 12208 - DNA, 1628 bp, Homo sapiens
aaggcacttccggggcacagaaaatgaggattattaaaggtcagttgctcgcaggaatgtaaccaatttacctacaagtttgccgaagaaatcagaaggcagtctttcggggcagtaacgcccggttatgacttcatggcccgactaaggtatacagagtacattttgcccaaaagtacatgaagacagaatgttgacgactctctgtacaaactttggcaagctcagcattctctcttgtaaaatatttacagggagttcaataattaaaggtcctcctagccagcagttttgtgcccatttatgcaggactgaagctagtggaatacaaagggcagaagtgggtggacggaggcctcaccaacgctcttcccatcctgcccgtcggccggacagtaaccatctcccccttcagtggacgactggacatctccccgcaggacaaagggcagctagatctgtatgttaatatcgccaagcaggatatcatgttgtccctggcaaacctggtgagactcaaccaagccctttttcccccaagcaagaggaaaatggaatctttgtatcagtgtggttttgatgacactgttaagtttttacttaaagaaaattggtttgaataaaatgcataaaagtttataatgcaaaacacgttttagatagtttttgatggaagtttctaatcaaatcctttttagaaaatctatcatgactcaattgtattactccttgtaatatttgtgtttatttttaatatttgaattattacttagcacatggatataagaggcactttattagaatttgacaacgtcattaagaaggatacacttaggtgataaggaatcatttttggtgaactgttgtgtcctttaaaaaatggaggaggataggttctttgggtaaattgaggaacatggaaaatggagggccaccacttaggttccatggagaatatgtggcatgatcttgacgtgaagcatgggtgtttccgtgacttagctgtgtccctgtagctctggaactgaaggaactaggtaggagaggaaggatttgagaaataggcaactcatggttaaagacctttgatcaggactggaggaacaaaggtttgtgtattagtccattttcacactgctgagaaagacatacccaagactgggcaatttacaaaagaaaggtttaatgggctcacagttccacatgactgaggaggcctcacaattgtggtggaaggtgaaaggcatgtctcacatggcagcagacaagagaagaaaacttgtgcagggaaactcccctttataaaaccatcggatctcttgagactcgttcactatcatgagaatagcatgggaaagacctgcctccatgattcagttacctcccactgggtccctcccacaacgtgtggcaattgtgggagctacatacacttcaagatgagatttgggtggggacacagccaaaccataacagtttgctttccacaggtgtgtgcagttgctcccagtgcagttaggggcagatatccagaagcctaggagattttgaagaggcttatcccctctcatcttcctcccctaaaccccaccccagtttaggagattatcaagctggttgtcattcat

SEQ ID NO: 12209 - protein, 92 aa, Homo sapiens
MLTTLCTNFGKLSILSCKIFTGSSIIKGPPSQQFCAHLCRTEASGIQRAEVGGRRPHQRSSHPARRPDSNHLPLQWTTGHLPAGQRAARSVC

SEQ ID NO: 12210 - DNA, 1849 bp, Homo sapiens
agacgcgaagagggtaaggcacttccggggcacagaaaatgaggattattaaaggtcagttgctcgcagtgctacagctagaatgaagcacatcaacctatcatttgcagcgtgtggatttctgggcatttaccacttgggggcagcatctgcactttgcagacatggcaaaaaacttgtgaaggatgtcaaagccttcgctggggcgtctgcgggatcgttggttgcttctgttctgctaacagcaccagaaaaaatagaggaatgtaaccaatttacctacaagtttgccgaagaaatcagaaggcagtctttcggggcagtaacgcccggttatgacttcatggcccgactaagaagtgggatggagtcgattcttcctcccagcgctcacgagctggcccagaaccgactgcacgtatccatcaccaacgccaaaaccagagaaaatcacttagtctccactttttcctccagggaggacctcattaaggtcctcctagccagcagttttgtgcccatttatgcaggactgaagctagtggaatacaaagggcagaagtgggtggacggaggcctcaccaacgctcttcccatcctgcccgtcggccggacagtaaccatctcccccttcagtggacgactggacatctccccgcaggacaaagggcagctagatctgtatgttaatatcgccaagcaggatatcatgttgtccctggcaaacctggtgagactcaaccaagccctttttcccccaagcaagaggaaaatggaatctttgtatcagtgtggttttgatgacactgttaagtttttacttaaagaaaattggtttgaataaaatgcataaaagtttataatgcaaaacacgttttagatagtttttgatggaagtttctaatcaaatcctttttagaaaatctatcatgactcaattgtattactccttgtaatatttgtgtttatttttaatatttgaattattacttagcacatggatataagaggcactttattagaatttgacaacgtcattaagaaggatacacttaggtgataaggaatcatttttggtgaactgttgtgtcctttaaaaaatggaggaggataggttctttgggtaaattgaggaacatggaaaatggagggccaccacttaggttccatggagaatatgtggcatgatcttgacgtgaagcatgggtgtttccgtgacttagctgtgtccctgtagctctggaactgaaggaactaggtaggagaggaaggatttgagaaataggcaactcatggttaaagacctttgatcaggactggaggaacaaaggtttgtgtattagtccattttcacactgctgagaaagacatacccaagactgggcaatttacaaaagaaaggtttaatgggctcacagttccacatgactgaggaggcctcacaattgtggtggaaggtgaaaggcatgtctcacatggcagcagacaagagaagaaaacttgtgcagggaaactcccctttataaaaccatcggatctcttgagactcgttcactatcatgagaatagcatgggaaagacctgcctccatgattcagttacctcccactgggtccctcccacaacgtgtggcaattgtgggagctacatacacttcaagatgagatttgggtggggacacagccaaaccataacagtttgctttccacaggtgtgtgcagttgctcccagtgcagttaggggcagatatccagaagcctaggagattttgaagaggcttatcccctctcatcttcctcccctaaaccccaccccagtttaggagattatcaagctggttgtcattcat

SEQ ID NO: 12211 - protein, 253 aa, Homo sapiens; identical to SEQ ID NO: 2045

SEQ ID NO: 12212 - DNA, 948 bp, Homo sapiens
gcggtaccaacccctgccgcaggactttcctgggccggctcgcggagagcgtagcgcggccttggtggcggaatggcgttgagtgacggcccggccccgccatctggttaaagggactcgttcaacacggaagtgtcccggggctgcattgtgctacagctagaatgaagcacatcaacctatcatttgcagcgtgtggatttctgggcatttaccacttgggggcagcatctgcactttgcagacatggcaaaaaacttgtgaaggatgtcaaagccttcgctggggcgtctgcgggatcgttggttgcttctgttctgctaacagcaccagaaaaaatagaggaatgtaaccaatttacctacaagtttgccgaagaaatcagaaggcagtctttcggggcagtaacgcccggttatgacttcatggcccgactaagaagtgggatggagtcgattcttcctcccagcgctcacgagctggcccagaaccgactgcacgtatccatcaccaacgccaaaaccagagaaaatcacttagtctccactttttcctccagggaggacctcattaaggtcctcctagccagcagttttgtgcccatttatgcaggactgaagctagtggaatacaaagggcagaagtgggtggacggaggcctcaccaacgctcttcccatcctgcccgtcggccggacagtaaccatctcccccttcagtggacgactggacatctccccgcaggacaaagggcagctagatctgtatgttaatatcgccaagcaggatatcatgttgtccctggcaaacctggtgagactcaaccaagccctttttcccccaagcaagaggaaaatggaatctttgtatcagtgtggttttgatgacactgttaagtttttacttaaagaaaattggtttgaataaaatgcataaaagtttataatgc

SEQ ID NO: 12213 - protein, 253 aa, Homo sapiens; identical to SEQ ID NO: 2045

SEQ ID NO: 12214 - DNA, 645 bp, Homo sapiens
aaggcacttccggggcacagaaaatgaggattattaaaggtcagttgctcgcaggaatgtaaccaatttacctacaagtttgccgaagaaatcagaaggcagtctttcggggcagtaacgcccggttatgacttcatggcccgactaaggtatacagagtacattttgcccaaaagtacatgaagacagaatgttgacgactctctgtacaaactttggcaagctcagcattctctcttgtaaaatatttacagggagttcaataattaaaggtcctcctagccagcagttttgtgcccatttatgcaggactgaagctagtggaatacaaagggcagaagtgggtggacggaggcctcaccaacgctcttcccatcctgcccgtcggccggacagtaaccatctcccccttcagtggacgactggacatctccccgcaggacaaagggcagctagatctgtatgttaatatcgccaagcaggatatcatgttgtccctggcaaacctggtgagactcaaccaagccctttttcccccaagcaagaggaaaatggaatctttgtatcagtgtggttttgatgacactgttaagtttttacttaaagaaaattggtttgaataaaatgcataaaagtttataatgc

SEQ ID NO: 12215 - protein, 92 aa, Homo sapiens; identical to SEQ ID NO: 12209

SEQ ID NO: 12216 - DNA, 866 bp, Homo sapiens
agacgcgaagagggtaaggcacttccggggcacagaaaatgaggattattaaaggtcagttgctcgcagtgctacagctagaatgaagcacatcaacctatcatttgcagcgtgtggatttctgggcatttaccacttgggggcagcatctgcactttgcagacatggcaaaaaacttgtgaaggatgtcaaagccttcgctggggcgtctgcgggatcgttggttgcttctgttctgctaacagcaccagaaaaaatagaggaatgtaaccaatttacctacaagtttgccgaagaaatcagaaggcagtctttcggggcagtaacgcccggttatgacttcatggcccgactaagaagtgggatggagtcgattcttcctcccagcgctcacgagctggcccagaaccgactgcacgtatccatcaccaacgccaaaaccagagaaaatcacttagtctccactttttcctccagggaggacctcattaaggtcctcctagccagcagttttgtgcccatttatgcaggactgaagctagtggaatacaaagggcagaagtgggtggacggaggcctcaccaacgctcttcccatcctgcccgtcggccggacagtaaccatctcccccttcagtggacgactggacatctccccgcaggacaaagggcagctagatctgtatgttaatatcgccaagcaggatatcatgttgtccctggcaaacctggtgagactcaaccaagccctttttcccccaagcaagaggaaaatggaatctttgtatcagtgtggttttgatgacactgttaagtttttacttaaagaaaattggtttgaataaaatgcataaaagtttataatgc

SEQ ID NO: 12217 - protein, 253 aa, Homo sapiens; identical to SEQ ID NO: 2045

SEQ ID NO: 12218 - DNA, 789 bp, Homo sapiens
gagcgtagcgcggccttggtggcggaatggcgttgagtgacggcccggccccgccatctggttaaagggactcgttcaacacggaagtgtcccggggctgcattgtgctacagctagaatgaagcacatcaacctatcatttgcagcgtgtggatttctgggcatttaccacttgggggcagcatctgcactttgcagacatggcaaaaaacttgtgaaggatgtcaaagccttcgctggggcgtctgcgggatcgttggttgcttctgttctgctaacagcaccagaaaaaatagaggaatgtaaccaatttacctacaagtttgccgaagaaatcagaaggcagtctttcggggcagtaacgcccggttatgacttcatggcccgactaagaagtgggatggagtcgattcttcctcccagcgctcacgagctggcccagaaccgactgcacgtatccatcaccaacgccaaaaccagagaaaatcacttagtctccactttttcctccagggaggacctcattaaggtaacaaagccatgtttcctatttgaagaaatcagcaagtgctgatttcaatacttcatataaagtaatgagcattaccacgttctttagatcctgtgtctcttaccaggcccgatagatggttgagtgctcagtaaattacttgtttgatgaaagtattcgccaggatccctcctgaggccgccttatgatgcactgtgatccaaatgctccctgtacttgttcagtgttttcctgcaatgttcagatctcacgttgat

SEQ ID NO: 12219 - protein, 151 aa, Homo sapiens
MKHINLSFAACGFLGIYHLGAASALCRHGKKLVKDVKAFAGASAGSLVASVLLTAPEKIEECNQFTYKFAEEIRRQSFGAVTPGYDFMARLRSGMESILPPSAHELAQNRLHVSITNAKTRENHLVSTFSSREDLIKVTKPCFLFEEISKC

SEQ ID NO: 12220 - DNA, 411 bp, Homo sapiens
attcacatattgaaatactaacccccaaggtgatagtattaggaggtggggcctttgggaggtaattaagtcatgagggtgaagccctcatgaatgggattagtactcttagaaaagggaccccagagaggtctctttccaccatgtaaggataaaagtacacggagaagatggcaatctgcaaactggaaaagggccctcctcagaactgtgagaaataaatttcttttataaacactcagtcaatgctactttattatagcagcctgaatggattaagacaggtggtctggtttaaagtgatgtggtggcatcagaagtttaaggagagactggatttacagaaccagaatctgggatgctgtttacagagcaagttatttcctgcatttggacactgtcagcaggtcg

SEQ ID NO: 12221 - protein, 46 aa, Homo sapiens [sequence omitted]

SEQ ID NO: 12222 - DNA, 904 bp, Homo sapiens
tctgcaaactggaaaagggccctcctcagaacctgaccatcttggcaccttgatctcagacttccatcttccagaactgtgagaaataaatttcttttataaacactcagtcaatgctactttattatagcagcctgaatggattaagacaggtggtctggtttaaagtgatgtggtggcatcagaagtttaaggagagactggatttacagaaccagaatctgggatgctgtttacagagcaagttatttcctgcatttggacactgtcagcaggtcgattcaggagacaggtgaaaactttatcaccgggcagcctggatgaacaccacaactttgatatctttcacttaaaggaaagataagggcatccactatttctacacctggctggcagagtgagagctcaccaaagcacttacaaattcatggactattatgaagacaagttaagagattgtgtcctccaaactcatcatttttcaggtaaggaaacttacgttcagagatattaccctgacagctccaagaatgtaaaggttgtttatagcagaagatagctcacattttctctaggccatgtcaaatggaaaaatcgtatatgaatgacgttatattttttccattatatgattgcagactgaatggatctctgttgtttttaaatcacatctaaattaaagtctttgaagattttcgttaagttcaaactgcacacaattaacggtagtaagttcaatgtcaaagttacagaatatttaaatttaaaaacattgttcttacaacctaagataactttttaatgttttttaaatattaacttggaattatgttttatctactagaaattatattctttatgaaatatttttgcctgcatctttatttaacactatgttggcatc

SEQ ID NO: 12223 - protein, 60 aa, Homo sapiens [sequence omitted]

SEQ ID NO: 12224 - DNA, 590 bp, Homo sapiens
tcagcaggtcgattcaggagacaggtgaaaactttatcaccgggcagcctggatgaacaccacaactttgatatctttcacttaaaggaaagataagggcatccactatttctacacctggctggcagagtgagagctcaccaaaggtggccaccctggttgctgtgggacacctgtctcctcctgccgtccaaaagagcaagaagcactaaactctgtcttcggtcagcatgactctcagcccatgtaagctcaccttggctgtaccccgaggagggagatcaaagtatatgttcctactgtcagctttactcacatccacatcttctccctgcatgtccttgggttggaaggaacagcttattttttgtcctacatcagtggttcttaaactttactgtaccaagaaagcttttaaaaaatgctgatgattggggcctgcagattctcagtcactgatctggatatgtcctgcatgtaagagtgttttgcaaatcgtttctaatgtgcaaccaggattacaaaacgttatcttgtatcctgagttctctctactcttggcataaaattaaaatctgttatatcttgtg

SEQ ID NO: 12225 - protein, 65 aa, Homo sapiens
MTLSPCKLTLAVPRGGRSKYMFLLSALLTSTSSPCMSLGWKEQLIFCPTSVVLKLYCTKKAFKKC

SEQ ID NO: 12226 - DNA, 392 bp, Homo sapiens
caacattggtaggatacagatgctgtgtgaaaagccacatgctggaacaaggttctgaatctttcagctgatgtggccaccctggttgctgtgggacacctgtctcctcctgccgtccaaaagagcaagaagcactaaactctgtcttcggtcagcatgactctcagcccatatgagactgtccagttgcaggaaaacaagctcagggctcccactgattctacatgatgcacttacaaattcatggactattatgaagacaagttaagagattgtgtcctccaaactcatcatttttcagaaattgtatcacaatcctacaagataaatgcacaagataattcttcaaatcattgagagtgtaatctataatcttcctaaacaacgaacag

SEQ ID NO: 12227 - protein, 37 aa, Homo sapiens
MDYYEDKLRDCVLQTHHFSEIVSQSYKINAQDNSSNH

SEQ ID NO: 12228 - DNA, 645 bp, Homo sapiens
gccgcaccccgcccgacaactcggtggtggccactgcgcagaccagacttcgctcgtactcgtgcgcctcgcttcgcttttcctccgcaaccatgtctgacaaacccgatatggctgagatcgagaaattcgataagtcgaaactgaagaagacagagacgcaagagaaaaatccactgccttccaaagaaacgattgaacaggagaagcaagcaggcgaatcgtaatgaggcgtgcgccgccaatatgcactgtacattccacaagcattgccttcttattttacttcttttagctgtttaactttgtaagatgcaaagaggttggatcaagtttaaatgactgtgctgcccctttcacatcaaagaactactgacaacgaaggccgcgcctgcctttcccatctgtctatctatctggctggcagggaaggaaagaacttgcatgttggtgaaggaagaagtggggtggaagaagtggggtgggacgacagtgaaatctagagtaaaaccaagctggcccaaggtgtcctgcaggctgtaatgcagtttaatcagagtgccatttttttttttgttcaaatgattttaattattggaatgcacaatttttttaatatgcaaataaaaagtttaaaaacttagc

SEQ ID NO: 12229 - protein, 44 aa, Homo sapiens; identical to SEQ ID NO: 2047

SEQ ID NO: 12230 - DNA, 1707 bp, Homo sapiens
gacaactcggtggtggccactgcgcagaccagacttcgctcgtactcgtgcgcctcgcttcggtgagccccagggcccctgcctccttcctcctgccgtcctgcctccgtccccgccctttcatcatccgcgtccctgtgaaggcattccctaaatccgagcccgagtggttctccccgggaaggctactttggggagctggggggatgcgaaacaccctagatactggataatggggtggggaaatcgatgatttaagaacaaaaccgaaaaactggcgttttgccgtgccgctcggaggggacattaaaaaatttcttagtgtttgcccgcaaaggtattgtgcgttgccttggaggctgagatatgggggaatagacaagtcctttgttctgaggttcatcttccgagccccgagcctcctcccagcctcggacggctgcgcgggctgcatctgtgcagcctggcggcggcggggctgtgctatgacatctttacagtccttcttgcagagacatgtgtgccagggatgccgaattgccgggagagcaggcaagaccggcttcggggcgcgcggcggccgctttgtgtgcggggctgcattgtgacgcgggcgatgaagccggtagggcggtggtcggaagctccagccgcggccgccgcctttgtgagaggactagaaagccggatccggcccgcatccttgcggagaggccgcggctaggaaatggaaacgcttttcctacctgggctccattttaggaattcttgccgatttttcccacttgaatttggaagtggctttcctcttctttccttgtcctagccagcctttaattttaaacgctgtaattaacaattcgcagtggtcaatttcctttattctgcaagattcggctttgagaggcatccgccctctttggtccacagcgttttgaaatatggggaggaggggcgcggggggtgtcgcctctttttctgtagaaagaggaagctcgtgagcgcggaacggcagcagtaggagagcgagaagggtttttttcaggctgcgggtcggagggcagaagtgcagttcccagcccagagacagcggggcgggtggctcttcctcacgctcgctcttggcttgctccctgcagcttttcctccgcaaccatgtctgacaaacccgatatggctgagatcgagaaattcgataagtcgaaactgaagaagacagagacgcaagagaaaaatccactgccttccaaagaaacgattgaacaggagaagcaagcaggcgaatcgtaatgaggcgtgcgccgccaatatgcactgtacattccacaagcattgccttcttattttacttcttttagctgtttaactttgtaagatgcaaagaggttggatcaagtttaaatgactgtgctgcccctttcacatcaaagaactactgacaacgaaggccgcgcctgcctttcccatctgtctatctatctggctggcagggaaggaaagaacttgcatgttggtgaaggaagaagtggggtggaagaagtggggtgggacgacagtgaaatctagagtaaaaccaagctggcccaaggtgtcctgcaggctgtaatgcagtttaatcagagtgccatttttttttttgttcaaatgattttaattattggaatgcacaatttttttaatatgcaaataaaaagtttaaaaacttag

SEQ ID NO: 12231 - protein, 44 aa, Homo sapiens; identical to SEQ ID NO: 2047

SEQ ID NO: 12232 - DNA, 885 bp, Homo sapiens
gcgcagaccagacttcgctcgtactcgtgcgcctcgcttcggtgagccccagggcccctgcctccttcctcctgccgtcctgcctccgtccccgccctttcatcatccgcgtccctgtgaaggcattccctaaatccgagcccgagtggttctccccgggaaggctactttggggagctggggggatgcgaaacaccctagatactggataatggggtggggaaatcgatgatttaagaacaaaaccgaaaaactggcgttttgccgtgccgctcggaggggacattaaaaaatttcttagtgtttgcccgcaaagcttttcctccgcaaccatgtctgacaaacccgatatggctgagatcgagaaattcgataagtcgaaactgaagaagacagagacgcaagagaaaaatccactgccttccaaagaaacgattgaacaggagaagcaagcaggcgaatcgtaatgaggcgtgcgccgccaatatgcactgtacattccacaagcattgccttcttattttacttcttttagctgtttaactttgtaagatgcaaagaggttggatcaagtttaaatgactgtgctgcccctttcacatcaaagaactactgacaacgaaggccgcgcctgcctttcccatctgtctatctatctggctggcagggaaggaaagaacttgcatgttggtgaaggaagaagtggggtggaagaagtggggtgggacgacagtgaaatctagagtaaaaccaagctggcccaaggtgtcctgcaggctgtaatgcagtttaatcagagtgccatttttttttttgttcaaatgattttaattattggaatgcacaatttttttaatatgcaaataaaaagtttaaaaacttagc

SEQ ID NO: 12233 - protein, 44 aa, Homo sapiens; identical to SEQ ID NO: 2047

SEQ ID NO: 12234 - DNA, 4776 bp, Homo sapiens
gaaagagagagagagagagagatcgagattgagatcttaagaaagagagcaaggaggaagagcccgactgtaggcaccaccgggcgccgaatggctgttttctaactgggatcctcggtgacgtatggctgcctgccccttggcagctgtctttatggaccagtaggcagagcgaaattgacgctgacaagacttttgcatcttggaagggactgtaatctactgtagtgaagaacagagcctctcaatcagacgggtgtaaataagagacggaggggagtccaaaagaaaaggaagaggaggaaaaacaagtgtgtgttggggggaacagggggaaaagcatttttggtggatggtatgaagccagccatggaaactgcagccgaggaaaatactgaacaaagccaagagagaaaaggctgctttgaatgctgcatcaagtgtctgggaggagtcccctacgcctccctggtggccaccatcctctgcttctccggggtggccttattctgcggctgtgggcatgtggctctcgcaggcaccgtggcgattcttgagcaacacttctccaccaacgccagtgaccatgccttgctgagcgaggtgatacaactgatgcagtatgtcatctatggaattgcgtcctttttcttcttgtatgggatcattctgttggcagaaggcttttacaccacaagtgcagtgaaagaactgcacggtgagtttaaaacaaccgcttgtggccgatgcatcagtggaatgttcgttttcctcacctatgtgcttggagtggcctggctgggtgtgtttggtttctcagcggtgcccgtgtttatgttctacaacatatggtcaacttgtgaagtcatcaagtcaccgcagaccaacgggaccacgggtgtggagcagatctgtgtggatatccgacaatacggtatcattccttggaatgctttccccggaaaaatatgtggctctgccctggagaacatctgcaacacaaacgagttctacatgtcctatcacctgttcattgtggcctgtgcaggagctggtgccaccgtcattgccctgctgatctacatgatggctactacatataactatgcggttttgaagtttaagagtcgggaagattgctgcactaaattctaaattgcataaggagttttagagagctatgctctgtagcatgaaatatcactgacactccagactaaagcagagtctaggtttctgcaattttgttacagtaatttgtaaatagctttagtaaactcaccttgcatggtagattaataagatgacttactgtacatgaattacacaataatgagatctggtggctatttccacattttgaaaaggattcagttatttactgacagtggtgagcatcctttttaaaataatgttctcatacttaaacattagagagcagtatctttaaatgaattattaacactttggaatacttacattttctgttatttttgattgcctgataaccagtttcaatgatgaaaatgaaaacaagtgctgaagatgaaatggaagagaaccgttttaatctggattttgttttgtcacacctggaaaatactttgcaaatatgttctaaattgaaaacaatttttttatgatcacatggttcactaccaaatgaccctcaaataagccagatgaaaatttgaagaaaaaggtcacccagttctctggaaaaaaaaaaaaaaaaaaaaaaaaaaggatttatatgtgggtagttttttttttggtacaacacaatcattctgttagagcccacaaaattggtaaccttaaattgtgtgttttggtaagtaataactaactgtttcctcatagctagttctcaagctgcatgtaagattttaacgggaagagaaaataggcctggacctgaaggtctcaaatatgttgagaagaaagtatgaactataaggaacttgagatgtagatttattttgcaggaaatacgaggaaaataggaaagaagtgtttgccgcatcaagtgtaaagaatgatactgaggatttttacattttatgaaatgaaataatggcatttacaaaatgaaaaatgtagtttcacaactaagttttgttaacagagactgcatgctttgcttatagttcttaattttggttttgacattcatttaattttttccatgttaaatatgtagtttaattatttactcaaaataaacattgttcatgcttttaggcctttgggggaattgatttttatccacaggtagaaaatggtctttgcacacactacacttatttcaaatatacaatgtgctcccgaactttcgcattagtctttaaaattactctcaaaatggtattaaaaaaaaaaaaaaaagcaccctctcgtatttcatttttgctttttcttaacaatacctttggccatttttttccagttcactatgtttgtatactaacttttcttcagccttttaatgcgaagccaactagtagagcatgctttcaggatctgacagctctgctagtagagcgagtatttattaatacagaattaaccttcgcccctttaaagtcaagtctgtctaatctaactagcgcctcgctttgccttctcacaatgctcactagccatcatgctcacccttctcttccagatccacttcctcatgatactgtcttctaactgggcttacttaaaggatgcgagcaaaatgcaggcttaccaggatatcaaagcaaaggaagaacaggaactgcaagatatccagtctcggtcaaaagaacaactcaattcttacacataaatgtttgccagagtgtttcggccgacgtatttacagctctgacaaatcatcagacagctgctctgcagtacagatgtgtatcccaccaaactaatgtagatgtacaaacacttcactgtctgtctcaagctgctgggatgtatctctaggaaaaccttccagtgggtaaatctttttctttagaacaaatattggaggtttcatgttagccattttaaaaggcaacactttgacaaaatgatcgttcatactttgggaatttgtggcatgttcacatttattgctagggcaattctaccaagacactcaatggaatatgtcacactccttaatagggacctgtgactccttaataaggacctgtgacatgcccagcatcaagggataagaccgtaaattcacatatatgccatctgtcctcaagtgttatctacataggaaataaaatggaattgatgtaaagttccatttctgacagctgacatttattaaactttggatcaaagataatgtgattcttatgattgatttctcaaactagcttttccctcccaagtccaggacccattaatttcctgagccaatcagaaatatatttttcaataatgctaaaattagctacaattctgctgaccctactattaaagaatctggatgctggactcactgacaagctttccagaagcaattttataacagatttcattttaacaaaatactgatccaattttcattattcttgagaaatgtcagctttgccttaatgagtatttgctttaaatttctaagaatttatatcataactagagacccaaatatctttcacagaattttgttccataaatgtttttcttaattattaagaagtgttaccttattaaaatgaccaccattctaaaccatttttcagtggtctggatacgaagtttacagtttcataccaactatctaaaacctaattgcaaattgaccacagacctctaacctcctacttttatagacttgaatacttaagtaatttaaattagggttggtatttcatttttttcttatctaaatcttagtttcctggaataataaagtttgatgttcagcaagagaactgcttgagtttaagccattttcaaaagaaacttgccttttacattattgtgttccagaacattaagtgactgtaggtactgggtattagtgatggtaaactttgtgttgctctttatgaaatgatccatataactgttgggtgcatcagtgcttttcaaaggggctgcttactatagggttaactatgtatattcattgttaagagttaacttgtggtttggctgtttcctggattttataacatacatgtgcagaaatgtattcaaatgaaaggaagcatacctttatcaagatgctattaaaattgaacatcaagtataatatttcatttggattctcttttttggttaatgcctaaaaatgcctatttgggatttttttttttttttaaattaagagaagctctcttctgtgtagaacagttgttccaaaatagcttagtgttttgttttcctgttgcatgacagatttaactattctttccagcagtggaggtgctgtcagagtccagtgttctagaagaggcagtgtctaaagcctaattttacttttctaattctggtagctattaccaggaatttttgaaagttttgtttaagtagtctaatattttttatgtaaagagcattaaattttgctatgtataaatttttgtaacctaacagtgaatcaatattttctatcagtgccaagggcttcctgtagttctattcaagtgttacaataaatatttgtagataatagtcaatacttgtgtatgcttattttaaagatctatttaggtggaaatagttgtggatgtactaagagtaatgaaataaaattatagcttcattcacttgcctttttaccat

SEQ ID NO: 12235 - protein, 265 aa, Homo sapiens; identical to SEQ ID NO: 2055

SEQ ID NO: 12236 - DNA, 3416 bp, Homo sapiens
gaattaattagcattcattgggtgtacttggctagaagaaatgaggtggggagaaagagagagagagagagagatcgagattgagatcttaagaaagagagcaaggaggaagagcccggtggggagcaggtccttctcccccacccccctacccccaactcccactggagccgcattgagactgtaggcaccaccgggcgccgaatggctgttttctaactgggatcctcggtgacgtatggctgcctgccccttggcagctgtctttatggaccagtaggcagagcgaaattgacgctgacaagacttttgcatcttggaagggactgtaatctactgtagtgaagaacagagcctctcaatcagacgggtgtaaataagagacggaggggagtccaaaagaaaaggaagaggaggaaaaacaagtgtgtgttggggggaacagggggaaaagcatttttggtggatggtatgaagccagccatggaaactgcagccgaggaaaatactgaacaaagccaagagagaaaagtgaacagcagagctgaaatggaaattggcaggtaccactggatgtacccaggctcaaagaaccaccagtaccatcccgtgccaaccctgggggacagggctagccccttgagcagtccaggctgctttgaatgctgcatcaagtgtctgggaggagtcccctacgcctccctggtggccaccatcctctgcttctccggggtggccttattctgcggctgtgggcatgtggctctcgcaggcaccgtggcgattcttgagcaacacttctccaccaacgccagtgaccatgccttgctgagcgaggtgatacaactgatgcagtatgtcatctatggaattgcgtcctttttcttcttgtatgggatcattctgttggcagaaggcttttacaccacaagtgcagtgaaagaactgcacggtgagtttaaaacaaccgcttgtggccgatgcatcagtggaatgttcgttttcctcacctatgtgcttggagtggcctggctgggtgtgtttggtttctcagcggtgcccgtgtttatgttctacaacatatggtcaacttgtgaagtcatcaagtcaccgcagaccaacgggaccacgggtgtggagcagatctgtgtggatatccgacaatacggtatcattccttggaatgctttccccggaaaaatatgtggctctgccctggagaacatctgcaacacaaacgagttctacatgtcctatcacctgttcattgtggcctgtgcaggagctggtgccaccgtcattgccctgatccacttcctcatgatactgtcttctaactgggcttacttaaaggatgcgagcaaaatgcaggcttaccaggatatcaaagcaaaggaagaacaggaactgcaagatatccagtctcggtcaaaagaacaactcaattcttacacataaatgtttgccagagtgtttcggccgacgtatttacagctctgacaaatcatcagacagctgctctgcagtacagatgtgtatcccaccaaactaatgtagatgtacaaacacttcactgtctgtctcaagctgctgggatgtatctctaggaaaaccttccagtgggtaaatctttttctttagaacaaatattggaggtttcatgttagccattttaaaaggcaacactttgacaaaatgatcgttcatactttgggaatttgtggcatgttcacatttattgctagggcaattctaccaagacactcaatggaatatgtcacactccttaatagggacctgtgactccttaataaggacctgtgacatgcccagcatcaagggataagaccgtaaattcacatatatgccatctgtcctcaagtgttatctacataggaaataaaatggaattgatgtaaagttccatttctgacagctgacatttattaaactttggatcaaagataatgtgattcttatgattgatttctcaaactagcttttccctcccaagtccaggacccattaatttcctgagccaatcagaaatatatttttcaataatgctaaaattagctacaattctgctgaccctactattaaagaatctggatgctggactcactgacaagctttccagaagcaattttataacagatttcattttaacaaaatactgatccaattttcattattcttgagaaatgtcagctttgccttaatgagtatttgctttaaatttctaagaatttatatcataactagagacccaaatatctttcacagaattttgttccataaatgtttttcttaattattaagaagtgttaccttattaaaatgaccaccattctaaaccatttttcagtggtctggatacgaagtttacagtttcataccaactatctaaaacctaattgcaaattgaccacagacctctaacctcctacttttatagacttgaatacttaagtaatttaaattagggttggtatttcatttttttcttatctaaatcttagtttcctggaataataaagtttgatgttcagcaagagaactgcttgagtttaagccattttcaaaagaaacttgccttttacattattgtgttccagaacattaagtgactgtaggtactgggtattagtgatggtaaactttgtgttgctctttatgaaatgatccatataactgttgggtgcatcagtgcttttcaaaggggctgcttactatagggttaactatgtatattcattgttaagagttaacttgtggtttggctgtttcctggattttataacatacatgtgcagaaatgtattcaaatgaaaggaagcatacctttatcaagatgctattaaaattgaacatcaagtataatatttcatttggattctcttttttggttaatgcctaaaaatgcctatttgggatttttttttttttttaaattaagagaagctctcttctgtgtagaacagttgttccaaaatagcttagtgttttgttttcctgttgcatgacagatttaactattctttccagcagtggaggtgctgtcagagtccagtgttctagaagaggcagtgtctaaagcctaattttacttttctaattctggtagctattaccaggaatttttgaaagttttgtttaagtagtctaatattttttatgtaaagagcattaaattttgctatgtataaatttttgtaacctaacagtgaatcaatattttctatcagtgccaagggcttcctgtagttctattcaagtgttacaataaatatttgtagataatagtcaatacttgtgtatgcttattttaaagatctatttaggtggaaatagttgtggatgtactaagagtaatgaaataaaattatagcttcattcacttgcctttttaccat

SEQ ID NO: 12237 - protein, 328 aa, Homo sapiens; identical to SEQ ID NO: 2051

SEQ ID NO: 12238 - DNA, 5010 bp, Homo sapiens
gaattaattagcattcattgggtgtacttggctagaagaaatgaggtggggagaaagagagagagagagagagatcgagattgagatcttaagaaagagagcaaggaggaagagcccggtggggagcaggtccttctcccccacccccctacccccaactcccactggagccgcattgagactgtaggcaccaccgggcgccgaatggctgttttctaactgggatcctcggtgacgtatggctgcctgccccttggcagctgtctttatggaccagtaggcagagcgaaattgacgctgacaagacttttgcatcttggaagggactgtaatctactgtagtgaagaacagagcctctcaatcagacgggtgtaaataagagacggaggggagtccaaaagaaaaggaagaggaggaaaaacaagtgtgtgttggggggaacagggggaaaagcatttttggtggatggtatgaagccagccatggaaactgcagccgaggaaaatactgaacaaagccaagagagaaaagtgaacagcagagctgaaatggaaattggcaggtaccactggatgtacccaggctcaaagaaccaccagtaccatcccgtgccaaccctgggggacagggctagccccttgagcagtccaggctgctttgaatgctgcatcaagtgtctgggaggagtcccctacgcctccctggtggccaccatcctctgcttctccggggtggccttattctgcggctgtgggcatgtggctctcgcaggcaccgtggcgattcttgagcaacacttctccaccaacgccagtgaccatgccttgctgagcgaggtgatacaactgatgcagtatgtcatctatggaattgcgtcctttttcttcttgtatgggatcattctgttggcagaaggcttttacaccacaagtgcagtgaaagaactgcacggtgagtttaaaacaaccgcttgtggccgatgcatcagtggaatgttcgttttcctcacctatgtgcttggagtggcctggctgggtgtgtttggtttctcagcggtgcccgtgtttatgttctacaacatatggtcaacttgtgaagtcatcaagtcaccgcagaccaacgggaccacgggtgtggagcagatctgtgtggatatccgacaatacggtatcattccttggaatgctttccccggaaaaatatgtggctctgccctggagaacatctgcaacacaaacgagttctacatgtcctatcacctgttcattgtggcctgtgcaggagctggtgccaccgtcattgccctgctgatctacatgatggctactacatataactatgcggttttgaagtttaagagtcgggaagattgctgcactaaattctaaattgcataaggagttttagagagctatgctctgtagcatgaaatatcactgacactccagactaaagcagagtctaggtttctgcaattttgttacagtaatttgtaaatagctttagtaaactcaccttgcatggtagattaataagatgacttactgtacatgaattacacaataatgagatctggtggctatttccacattttgaaaaggattcagttatttactgacagtggtgagcatcctttttaaaataatgttctcatacttaaacattagagagcagtatctttaaatgaattattaacactttggaatacttacattttctgttatttttgattgcctgataaccagtttcaatgatgaaaatgaaaacaagtgctgaagatgaaatggaagagaaccgttttaatctggattttgttttgtcacacctggaaaatactttgcaaatatgttctaaattgaaaacaatttttttatgatcacatggttcactaccaaatgaccctcaaataagccagatgaaaatttgaagaaaaaggtcacccagttctctggaaaaaaaaaaaaaaaaaaaaaaaaaaggatttatatgtgggtagttttttttttggtacaacacaatcattctgttagagcccacaaaattggtaaccttaaattgtgtgttttggtaagtaataactaactgtttcctcatagctagttctcaagctgcatgtaagattttaacgggaagagaaaataggcctggacctgaaggtctcaaatatgttgagaagaaagtatgaactataaggaacttgagatgtagatttattttgcaggaaatacgaggaaaataggaaagaagtgtttgccgcatcaagtgtaaagaatgatactgaggatttttacattttatgaaatgaaataatggcatttacaaaatgaaaaatgtagtttcacaactaagttttgttaacagagactgcatgctttgcttatagttcttaattttggttttgacattcatttaattttttccatgttaaatatgtagtttaattatttactcaaaataaacattgttcatgcttttaggcctttgggggaattgatttttatccacaggtagaaaatggtctttgcacacactacacttatttcaaatatacaatgtgctcccgaactttcgcattagtctttaaaattactctcaaaatggtattaaaaaaaaaaaaaaaagcaccctctcgtatttcatttttgctttttcttaacaatacctttggccatttttttccagttcactatgtttgtatactaacttttcttcagccttttaatgcgaagccaactagtagagcatgctttcaggatctgacagctctgctagtagagcgagtatttattaatacagaattaaccttcgcccctttaaagtcaagtctgtctaatctaactagcgcctcgctttgccttctcacaatgctcactagccatcatgctcacccttctcttccagatccacttcctcatgatactgtcttctaactgggcttacttaaaggatgcgagcaaaatgcaggcttaccaggatatcaaagcaaaggaagaacaggaactgcaagatatccagtctcggtcaaaagaacaactcaattcttacacataaatgtttgccagagtgtttcggccgacgtatttacagctctgacaaatcatcagacagctgctctgcagtacagatgtgtatcccaccaaactaatgtagatgtacaaacacttcactgtctgtctcaagctgctgggatgtatctctaggaaaaccttccagtgggtaaatctttttctttagaacaaatattggaggtttcatgttagccattttaaaaggcaacactttgacaaaatgatcgttcatactttgggaatttgtggcatgttcacatttattgctagggcaattctaccaagacactcaatggaatatgtcacactccttaatagggacctgtgactccttaataaggacctgtgacatgcccagcatcaagggataagaccgtaaattcacatatatgccatctgtcctcaagtgttatctacataggaaataaaatggaattgatgtaaagttccatttctgacagctgacatttattaaactttggatcaaagataatgtgattcttatgattgatttctcaaactagcttttccctcccaagtccaggacccattaatttcctgagccaatcagaaatatatttttcaataatgctaaaattagctacaattctgctgaccctactattaaagaatctggatgctggactcactgacaagctttccagaagcaattttataacagatttcattttaacaaaatactgatccaattttcattattcttgagaaatgtcagctttgccttaatgagtatttgctttaaatttctaagaatttatatcataactagagacccaaatatctttcacagaattttgttccataaatgtttttcttaattattaagaagtgttaccttattaaaatgaccaccattctaaaccatttttcagtggtctggatacgaagtttacagtttcataccaactatctaaaacctaattgcaaattgaccacagacctctaacctcctacttttatagacttgaatacttaagtaatttaaattagggttggtatttcatttttttcttatctaaatcttagtttcctggaataataaagtttgatgttcagcaagagaactgcttgagtttaagccattttcaaaagaaacttgccttttacattattgtgttccagaacattaagtgactgtaggtactgggtattagtgatggtaaactttgtgttgctctttatgaaatgatccatataactgttgggtgcatcagtgcttttcaaaggggctgcttactatagggttaactatgtatattcattgttaagagttaacttgtggtttggctgtttcctggattttataacatacatgtgcagaaatgtattcaaatgaaaggaagcatacctttatcaagatgctattaaaattgaacatcaagtataatatttcatttggattctcttttttggttaatgcctaaaaatgcctatttgggatttttttttttttttaaattaagagaagctctcttctgtgtagaacagttgttccaaaatagcttagtgttttgttttcctgttgcatgacagatttaactattctttccagcagtggaggtgctgtcagagtccagtgttctagaagaggcagtgtctaaagcctaattttacttttctaattctggtagctattaccaggaatttttgaaagttttgtttaagtagtctaatattttttatgtaaagagcattaaattttgctatgtataaatttttgtaacctaacagtgaatcaatattttctatcagtgccaagggcttcctgtagttctattcaagtgttacaataaatatttgtagataatagtcaatacttgtgtatgcttattttaaagatctatttaggtggaaatagttgtggatgtactaagagtaatgaaataaaattatagcttcattcacttgcctttttaccat

SEQ ID NO: 12239 - protein, 305 aa, Homo sapiens; identical to SEQ ID NO: 2053

SEQ ID NO: 12240 - DNA, 4519 bp, Homo sapiens
aaccatatgcttgcctgcatctaatgtgaaaccatccctgctccatgttcttagcatcctaggttcgtttccttcttggcactcaccgtggcttgaaatcacatggatttatgtgattatttgagtatgcctttccccactaaactgtcagcttcatgaaggctgctttgaatgctgcatcaagtgtctgggaggagtcccctacgcctccctggtggccaccatcctctgcttctccggggtggccttattctgcggctgtgggcatgtggctctcgcaggcaccgtggcgattcttgagcaacacttctccaccaacgccagtgaccatgccttgctgagcgaggtgatacaactgatgcagtatgtcatctatggaattgcgtcctttttcttcttgtatgggatcattctgttggcagaaggcttttacaccacaagtgcagtgaaagaactgcacggtgagtttaaaacaaccgcttgtggccgatgcatcagtggaatgttcgttttcctcacctatgtgcttggagtggcctggctgggtgtgtttggtttctcagcggtgcccgtgtttatgttctacaacatatggtcaacttgtgaagtcatcaagtcaccgcagaccaacgggaccacgggtgtggagcagatctgtgtggatatccgacaatacggtatcattccttggaatgctttccccggaaaaatatgtggctctgccctggagaacatctgcaacacaaacgagttctacatgtcctatcacctgttcattgtggcctgtgcaggagctggtgccaccgtcattgccctgctgatctacatgatggctactacatataactatgcggttttgaagtttaagagtcgggaagattgctgcactaaattctaaattgcataaggagttttagagagctatgctctgtagcatgaaatatcactgacactccagactaaagcagagtctaggtttctgcaattttgttacagtaatttgtaaatagctttagtaaactcaccttgcatggtagattaataagatgacttactgtacatgaattacacaataatgagatctggtggctatttccacattttgaaaaggattcagttatttactgacagtggtgagcatcctttttaaaataatgttctcatacttaaacattagagagcagtatctttaaatgaattattaacactttggaatacttacattttctgttatttttgattgcctgataaccagtttcaatgatgaaaatgaaaacaagtgctgaagatgaaatggaagagaaccgttttaatctggattttgttttgtcacacctggaaaatactttgcaaatatgttctaaattgaaaacaatttttttatgatcacatggttcactaccaaatgaccctcaaataagccagatgaaaatttgaagaaaaaggtcacccagttctctggaaaaaaaaaaaaaaaaaaaaaaaaaaggatttatatgtgggtagttttttttttggtacaacacaatcattctgttagagcccacaaaattggtaaccttaaattgtgtgttttggtaagtaataactaactgtttcctcatagctagttctcaagctgcatgtaagattttaacgggaagagaaaataggcctggacctgaaggtctcaaatatgttgagaagaaagtatgaactataaggaacttgagatgtagatttattttgcaggaaatacgaggaaaataggaaagaagtgtttgccgcatcaagtgtaaagaatgatactgaggatttttacattttatgaaatgaaataatggcatttacaaaatgaaaaatgtagtttcacaactaagttttgttaacagagactgcatgctttgcttatagttcttaattttggttttgacattcatttaattttttccatgttaaatatgtagtttaattatttactcaaaataaacattgttcatgcttttaggcctttgggggaattgatttttatccacaggtagaaaatggtctttgcacacactacacttatttcaaatatacaatgtgctcccgaactttcgcattagtctttaaaattactctcaaaatggtattaaaaaaaaaaaaaaaagcaccctctcgtatttcatttttgctttttcttaacaatacctttggccatttttttccagttcactatgtttgtatactaacttttcttcagccttttaatgcgaagccaactagtagagcatgctttcaggatctgacagctctgctagtagagcgagtatttattaatacagaattaaccttcgcccctttaaagtcaagtctgtctaatctaactagcgcctcgctttgccttctcacaatgctcactagccatcatgctcacccttctcttccagatccacttcctcatgatactgtcttctaactgggcttacttaaaggatgcgagcaaaatgcaggcttaccaggatatcaaagcaaaggaagaacaggaactgcaagatatccagtctcggtcaaaagaacaactcaattcttacacataaatgtttgccagagtgtttcggccgacgtatttacagctctgacaaatcatcagacagctgctctgcagtacagatgtgtatcccaccaaactaatgtagatgtacaaacacttcactgtctgtctcaagctgctgggatgtatctctaggaaaaccttccagtgggtaaatctttttctttagaacaaatattggaggtttcatgttagccattttaaaaggcaacactttgacaaaatgatcgttcatactttgggaatttgtggcatgttcacatttattgctagggcaattctaccaagacactcaatggaatatgtcacactccttaatagggacctgtgactccttaataaggacctgtgacatgcccagcatcaagggataagaccgtaaattcacatatatgccatctgtcctcaagtgttatctacataggaaataaaatggaattgatgtaaagttccatttctgacagctgacatttattaaactttggatcaaagataatgtgattcttatgattgatttctcaaactagcttttccctcccaagtccaggacccattaatttcctgagccaatcagaaatatatttttcaataatgctaaaattagctacaattctgctgaccctactattaaagaatctggatgctggactcactgacaagctttccagaagcaattttataacagatttcattttaacaaaatactgatccaattttcattattcttgagaaatgtcagctttgccttaatgagtatttgctttaaatttctaagaatttatatcataactagagacccaaatatctttcacagaattttgttccataaatgtttttcttaattattaagaagtgttaccttattaaaatgaccaccattctaaaccatttttcagtggtctggatacgaagtttacagtttcataccaactatctaaaacctaattgcaaattgaccacagacctctaacctcctacttttatagacttgaatacttaagtaatttaaattagggttggtatttcatttttttcttatctaaatcttagtttcctggaataataaagtttgatgttcagcaagagaactgcttgagtttaagccattttcaaaagaaacttgccttttacattattgtgttccagaacattaagtgactgtaggtactgggtattagtgatggtaaactttgtgttgctctttatgaaatgatccatataactgttgggtgcatcagtgcttttcaaaggggctgcttactatagggttaactatgtatattcattgttaagagttaacttgtggtttggctgtttcctggattttataacatacatgtgcagaaatgtattcaaatgaaaggaagcatacctttatcaagatgctattaaaattgaacatcaagtataatatttcatttggattctcttttttggttaatgcctaaaaatgcctatttgggatttttttttttttttaaattaagagaagctctcttctgtgtagaacagttgttccaaaatagcttagtgttttgttttcctgttgcatgacagatttaactattctttccagcagtggaggtgctgtcagagtccagtgttctagaagaggcagtgtctaaagcctaattttacttttctaattctggtagctattaccaggaatttttgaaagttttgtttaagtagtctaatattttttatgtaaagagcattaaattttgctatgtataaatttttgtaacctaacagtgaatcaatattttctatcagtgccaagggcttcctgtagttctattcaagtgttacaataaatatttgtagataatagtcaatacttgtgtatgcttattttaaagatctatttaggtggaaatagttgtggatgtactaagagtaatgaaataaaattatagcttcattcacttgcctttttaccat

SEQ ID NO: 12241 - protein, 179 aa, Homo sapiens
MQYVIYGIASFFFLYGIILLAEGFYTTSAVKELHGEFKTTACGRCISGMFVFLTYVLGVAWLGVFGFSAVPVFMFYNIWSTCEVIKSPQTNGTTGVEQICVDIRQYGIIPWNAFPGKICGSALENICNTNEFYMSYHLFIVACAGAGATVIALLIYMMATTYNYAVLKFKSREDCCTKF

SEQ ID NO: 12242 - DNA, 2881 bp, Homo sapiens
gcccttccgagggtcccgcccctcccccgctcaggtggcgcctcctcggccacctctgcgacgaagccgggacgctggaggtgggaggggcgcggcgcaggtgtccggaacgcccaggctgctttgaatgctgcatcaagtgtctgggaggagtcccctacgcctccctggtggccaccatcctctgcttctccggggtggccttattctgcggctgtgggcatgtggctctcgcaggcaccgtggcgattcttgagcaacacttctccaccaacgccagtgaccatgccttgctgagcgaggtgatacaactgatgcagtatgtcatctatggaattgcgtcctttttcttcttgtatgggatcattctgttggcagaaggcttttacaccacaagtgcagtgaaagaactgcacggtgagtttaaaacaaccgcttgtggccgatgcatcagtggaatgttcgttttcctcacctatgtgcttggagtggcctggctgggtgtgtttggtttctcagcggtgcccgtgtttatgttctacaacatatggtcaacttgtgaagtcatcaagtcaccgcagaccaacgggaccacgggtgtggagcagatctgtgtggatatccgacaatacggtatcattccttggaatgctttccccggaaaaatatgtggctctgccctggagaacatctgcaacacaaacgagttctacatgtcctatcacctgttcattgtggcctgtgcaggagctggtgccaccgtcattgccctgatccacttcctcatgatactgtcttctaactgggcttacttaaaggatgcgagcaaaatgcaggcttaccaggatatcaaagcaaaggaagaacaggaactgcaagatatccagtctcggtcaaaagaacaactcaattcttacacataaatgtttgccagagtgtttcggccgacgtatttacagctctgacaaatcatcagacagctgctctgcagtacagatgtgtatcccaccaaactaatgtagatgtacaaacacttcactgtctgtctcaagctgctgggatgtatctctaggaaaaccttccagtgggtaaatctttttctttagaacaaatattggaggtttcatgttagccattttaaaaggcaacactttgacaaaatgatcgttcatactttgggaatttgtggcatgttcacatttattgctagggcaattctaccaagacactcaatggaatatgtcacactccttaatagggacctgtgactccttaataaggacctgtgacatgcccagcatcaagggataagaccgtaaattcacatatatgccatctgtcctcaagtgttatctacataggaaataaaatggaattgatgtaaagttccatttctgacagctgacatttattaaactttggatcaaagataatgtgattcttatgattgatttctcaaactagcttttccctcccaagtccaggacccattaatttcctgagccaatcagaaatatatttttcaataatgctaaaattagctacaattctgctgaccctactattaaagaatctggatgctggactcactgacaagctttccagaagcaattttataacagatttcattttaacaaaatactgatccaattttcattattcttgagaaatgtcagctttgccttaatgagtatttgctttaaatttctaagaatttatatcataactagagacccaaatatctttcacagaattttgttccataaatgtttttcttaattattaagaagtgttaccttattaaaatgaccaccattctaaaccatttttcagtggtctggatacgaagtttacagtttcataccaactatctaaaacctaattgcaaattgaccacagacctctaacctcctacttttatagacttgaatacttaagtaatttaaattagggttggtatttcatttttttcttatctaaatcttagtttcctggaataataaagtttgatgttcagcaagagaactgcttgagtttaagccattttcaaaagaaacttgccttttacattattgtgttccagaacattaagtgactgtaggtactgggtattagtgatggtaaactttgtgttgctctttatgaaatgatccatataactgttgggtgcatcagtgcttttcaaaggggctgcttactatagggttaactatgtatattcattgttaagagttaacttgtggtttggctgtttcctggattttataacatacatgtgcagaaatgtattcaaatgaaaggaagcatacctttatcaagatgctattaaaattgaacatcaagtataatatttcatttggattctcttttttggttaatgcctaaaaatgcctatttgggatttttttttttttttaaattaagagaagctctcttctgtgtagaacagttgttccaaaatagcttagtgttttgttttcctgttgcatgacagatttaactattctttccagcagtggaggtgctgtcagagtccagtgttctagaagaggcagtgtctaaagcctaattttacttttctaattctggtagctattaccaggaatttttgaaagttttgtttaagtagtctaatattttttatgtaaagagcattaaattttgctatgtataaatttttgtaacctaacagtgaatcaatattttctatcagtgccaagggcttcctgtagttctattcaagtgttacaataaatatttgtagataatagtcaatacttgtgtatgcttattttaaagatctatttaggtggaaatagttgtggatgtactaagagtaatgaaataaaattatagcttcattcacttgcctttttaccat

SEQ ID NO: 12243 - protein, 202 aa, Homo sapiens
MQYVIYGIASFFFLYGIILLAEGFYTTSAVKELHGEFKTTACGRCISGMFVFLTYVLGVAWLGVFGFSAVPVFMFYNIWSTCEVIKSPQTNGTTGVEQICVDIRQYGIIPWNAFPGKICGSALENICNTNEFYMSYHLFIVACAGAGATVIALIHFLMILSSNWAYLKDASKMQAYQDIKAKEEQELQDIQSRSKEQLNSYT

SEQ ID NO: 12244 - DNA, 4387 bp, Homo sapiens
agctttgcctgcagactccgcgcgcccgctgcccccaatcgggccctagctccgggcgcacaaagcccccggcgctgacgtcagggcccctctccgcgcggccggcccccagtgcaggcggagccgcgccgcgctcccaccccggccgggagctaggagccagcggccagccccgcgcagcgcagcgcagcccgcagaagcccggtcagcgcacgtgcccgcgagacctgcaaacttgtgccaccggctctgcccgtccccggggagcccgaacgccccgcagccctcacccctcccgccagtctccagccatgggctgctttgaatgctgcatcaagtgtctgggaggagtcccctacgcctccctggtggccaccatcctctgcttctccggggtggccttattctgcggctgtgggcatgtggctctcgcaggcaccgtggcgattcttgaaacatatggtcaacttgtgaagtcatcaagtcaccgcagaccaacgggaccacgggtgtggagcagatctgtgtggatatccgacaatacggtatcattccttggaatgctttccccggaaaaatatgtggctctgccctggagaacatctgcaacacaaacgagttctacatgtcctatcacctgttcattgtggcctgtgcaggagctggtgccaccgtcattgccctgctgatctacatgatggctactacatataactatgcggttttgaagtttaagagtcgggaagattgctgcactaaattctaaattgcataaggagttttagagagctatgctctgtagcatgaaatatcactgacactccagactaaagcagagtctaggtttctgcaattttgttacagtaatttgtaaatagctttagtaaactcaccttgcatggtagattaataagatgacttactgtacatgaattacacaataatgagatctggtggctatttccacattttgaaaaggattcagttatttactgacagtggtgagcatcctttttaaaataatgttctcatacttaaacattagagagcagtatctttaaatgaattattaacactttggaatacttacattttctgttatttttgattgcctgataaccagtttcaatgatgaaaatgaaaacaagtgctgaagatgaaatggaagagaaccgttttaatctggattttgttttgtcacacctggaaaatactttgcaaatatgttctaaattgaaaacaatttttttatgatcacatggttcactaccaaatgaccctcaaataagccagatgaaaatttgaagaaaaaggtcacccagttctctggaaaaaaaaaaaaaaaaaaaaaaaaaaggatttatatgtgggtagttttttttttggtacaacacaatcattctgttagagcccacaaaattggtaaccttaaattgtgtgttttggtaagtaataactaactgtttcctcatagctagttctcaagctgcatgtaagattttaacgggaagagaaaataggcctggacctgaaggtctcaaatatgttgagaagaaagtatgaactataaggaacttgagatgtagatttattttgcaggaaatacgaggaaaataggaaagaagtgtttgccgcatcaagtgtaaagaatgatactgaggatttttacattttatgaaatgaaataatggcatttacaaaatgaaaaatgtagtttcacaactaagttttgttaacagagactgcatgctttgcttatagttcttaattttggttttgacattcatttaattttttccatgttaaatatgtagtttaattatttactcaaaataaacattgttcatgcttttaggcctttgggggaattgatttttatccacaggtagaaaatggtctttgcacacactacacttatttcaaatatacaatgtgctcccgaactttcgcattagtctttaaaattactctcaaaatggtattaaaaaaaaaaaaaaaagcaccctctcgtatttcatttttgctttttcttaacaatacctttggccatttttttccagttcactatgtttgtatactaacttttcttcagccttttaatgcgaagccaactagtagagcatgctttcaggatctgacagctctgctagtagagcgagtatttattaatacagaattaaccttcgcccctttaaagtcaagtctgtctaatctaactagcgcctcgctttgccttctcacaatgctcactagccatcatgctcacccttctcttccagatccacttcctcatgatactgtcttctaactgggcttacttaaaggatgcgagcaaaatgcaggcttaccaggatatcaaagcaaaggaagaacaggaactgcaagatatccagtctcggtcaaaagaacaactcaattcttacacataaatgtttgccagagtgtttcggccgacgtatttacagctctgacaaatcatcagacagctgctctgcagtacagatgtgtatcccaccaaactaatgtagatgtacaaacacttcactgtctgtctcaagctgctgggatgtatctctaggaaaaccttccagtgggtaaatctttttctttagaacaaatattggaggtttcatgttagccattttaaaaggcaacactttgacaaaatgatcgttcatactttgggaatttgtggcatgttcacatttattgctagggcaattctaccaagacactcaatggaatatgtcacactccttaatagggacctgtgactccttaataaggacctgtgacatgcccagcatcaagggataagaccgtaaattcacatatatgccatctgtcctcaagtgttatctacataggaaataaaatggaattgatgtaaagttccatttctgacagctgacatttattaaactttggatcaaagataatgtgattcttatgattgatttctcaaactagcttttccctcccaagtccaggacccattaatttcctgagccaatcagaaatatatttttcaataatgctaaaattagctacaattctgctgaccctactattaaagaatctggatgctggactcactgacaagctttccagaagcaattttataacagatttcattttaacaaaatactgatccaattttcattattcttgagaaatgtcagctttgccttaatgagtatttgctttaaatttctaagaatttatatcataactagagacccaaatatctttcacagaattttgttccataaatgtttttcttaattattaagaagtgttaccttattaaaatgaccaccattctaaaccatttttcagtggtctggatacgaagtttacagtttcataccaactatctaaaacctaattgcaaattgaccacagacctctaacctcctacttttatagacttgaatacttaagtaatttaaattagggttggtatttcatttttttcttatctaaatcttagtttcctggaataataaagtttgatgttcagcaagagaactgcttgagtttaagccattttcaaaagaaacttgccttttacattattgtgttccagaacattaagtgactgtaggtactgggtattagtgatggtaaactttgtgttgctctttatgaaatgatccatataactgttgggtgcatcagtgcttttcaaaggggctgcttactatagggttaactatgtatattcattgttaagagttaacttgtggtttggctgtttcctggattttataacatacatgtgcagaaatgtattcaaatgaaaggaagcatacctttatcaagatgctattaaaattgaacatcaagtataatatttcatttggattctcttttttggttaatgcctaaaaatgcctatttgggatttttttttttttttaaattaagagaagctctcttctgtgtagaacagttgttccaaaatagcttagtgttttgttttcctgttgcatgacagatttaactattctttccagcagtggaggtgctgtcagagtccagtgttctagaagaggcagtgtctaaagcctaattttacttttctaattctggtagctattaccaggaatttttgaaagttttgtttaagtagtctaatattttttatgtaaagagcattaaattttgctatgtataaatttttgtaacctaacagtgaatcaatattttctatcagtgccaagggcttcctgtagttctattcaagtgttacaataaatatttgtagataatagtcaatacttgtgtatgcttattttaaagatctatttaggtggaaatagttgtggatgtactaagagtaatgaaataaaattatagcttcattcacttgcctttttaccat

SEQ ID NO: 12245 - protein, 125 aa, Homo sapiens
MGCFECCIKCLGGVPYASLVATILCFSGVALFCGCGHVALAGTVAILETYGQLVKSSSHRRPTGPRVWSRSVWISDNTVSFLGMLSPEKYVALPWRTSATQTSSTCPITCSLWPVQELVPPSLPC

SEQ ID NO: 12246 - DNA, 4676 bp, Homo sapiens
gcgagctttgcctgcagactccgcgcgcccgctgcccccaatcgggccctagctccgggcgcacaaagcccccggcgctgacgtcagggcccctctccgcgcggccggcccccagtgcaggcggagccgcgccgcgctcccaccccggccgggagctaggagccagcggccagccccgcgcagcgcagcgcagcccgcagaagcccggtcagcgcacgtgcccgcgagacctgcaaacttgtgccaccggctctgcccgtccccggggagcccgaacgccccgcagccctcacccctcccgccagtctccagccatgggctgctttgaatgctgcatcaagtgtctgggaggagtcccctacgcctccctggtggccaccatcctctgcttctccggggtggccttattctgcggctgtgggcatgtggctctcgcaggcaccgtggcgattcttgagcaacacttctccaccaacgccagtgaccatgccttgctgagcgaggtgatacaactgatgcagtatgtcatctatggaattgcgtcctttttcttcttgtatgggatcattctgttggcagaaggcttttacaccacaagtgcagtgaaagaactgcacggtgagtttaaaacaaccgcttgtggccgatgcatcagtggaatgttcgttttcctcacctatgtgcttggagtggcctggctgggtgtgtttggtttctcagcggtgcccgtgtttatgttctacaacatatggtcaacttgtgaagtcatcaagtcaccgcagaccaacgggaccacgggtgtggagcagatctgtgtggatatccgacaatacggtatcattccttggaatgctttccccggaaaaatatgtggctctgccctggagaacatctgcaacacaaacgagttctacatgtcctatcacctgttcattgtggcctgtgcaggagctggtgccaccgtcattgccctgctgatctacatgatggctactacatataactatgcggttttgaagtttaagagtcgggaagattgctgcactaaattctaaattgcataaggagttttagagagctatgctctgtagcatgaaatatcactgacactccagactaaagcagagtctaggtttctgcaattttgttacagtaatttgtaaatagctttagtaaactcaccttgcatggtagattaataagatgacttactgtacatgaattacacaataatgagatctggtggctatttccacattttgaaaaggattcagttatttactgacagtggtgagcatcctttttaaaataatgttctcatacttaaacattagagagcagtatctttaaatgaattattaacactttggaatacttacattttctgttatttttgattgcctgataaccagtttcaatgatgaaaatgaaaacaagtgctgaagatgaaatggaagagaaccgttttaatctggattttgttttgtcacacctggaaaatactttgcaaatatgttctaaattgaaaacaatttttttatgatcacatggttcactaccaaatgaccctcaaataagccagatgaaaatttgaagaaaaaggtcacccagttctctggaaaaaaaaaaaaaaaaaaaaaaaaaaggatttatatgtgggtagttttttttttggtacaacacaatcattctgttagagcccacaaaattggtaaccttaaattgtgtgttttggtaagtaataactaactgtttcctcatagctagttctcaagctgcatgtaagattttaacgggaagagaaaataggcctggacctgaaggtctcaaatatgttgagaagaaagtatgaactataaggaacttgagatgtagatttattttgcaggaaatacgaggaaaataggaaagaagtgtttgccgcatcaagtgtaaagaatgatactgaggatttttacattttatgaaatgaaataatggcatttacaaaatgaaaaatgtagtttcacaactaagttttgttaacagagactgcatgctttgcttatagttcttaattttggttttgacattcatttaattttttccatgttaaatatgtagtttaattatttactcaaaataaacattgttcatgcttttaggcctttgggggaattgatttttatccacaggtagaaaatggtctttgcacacactacacttatttcaaatatacaatgtgctcccgaactttcgcattagtctttaaaattactctcaaaatggtattaaaaaaaaaaaaaaaagcaccctctcgtatttcatttttgctttttcttaacaatacctttggccatttttttccagttcactatgtttgtatactaacttttcttcagccttttaatgcgaagccaactagtagagcatgctttcaggatctgacagctctgctagtagagcgagtatttattaatacagaattaaccttcgcccctttaaagtcaagtctgtctaatctaactagcgcctcgctttgccttctcacaatgctcactagccatcatgctcacccttctcttccagatccacttcctcatgatactgtcttctaactgggcttacttaaaggatgcgagcaaaatgcaggcttaccaggatatcaaagcaaaggaagaacaggaactgcaagatatccagtctcggtcaaaagaacaactcaattcttacacataaatgtttgccagagtgtttcggccgacgtatttacagctctgacaaatcatcagacagctgctctgcagtacagatgtgtatcccaccaaactaatgtagatgtacaaacacttcactgtctgtctcaagctgctgggatgtatctctaggaaaaccttccagtgggtaaatctttttctttagaacaaatattggaggtttcatgttagccattttaaaaggcaacactttgacaaaatgatcgttcatactttgggaatttgtggcatgttcacatttattgctagggcaattctaccaagacactcaatggaatatgtcacactccttaatagggacctgtgactccttaataaggacctgtgacatgcccagcatcaagggataagaccgtaaattcacatatatgccatctgtcctcaagtgttatctacataggaaataaaatggaattgatgtaaagttccatttctgacagctgacatttattaaactttggatcaaagataatgtgattcttatgattgatttctcaaactagcttttccctcccaagtccaggacccattaatttcctgagccaatcagaaatatatttttcaataatgctaaaattagctacaattctgctgaccctactattaaagaatctggatgctggactcactgacaagctttccagaagcaattttataacagatttcattttaacaaaatactgatccaattttcattattcttgagaaatgtcagctttgccttaatgagtatttgctttaaatttctaagaatttatatcataactagagacccaaatatctttcacagaattttgttccataaatgtttttcttaattattaagaagtgttaccttattaaaatgaccaccattctaaaccatttttcagtggtctggatacgaagtttacagtttcataccaactatctaaaacctaattgcaaattgaccacagacctctaacctcctacttttatagacttgaatacttaagtaatttaaattagggttggtatttcatttttttcttatctaaatcttagtttcctggaataataaagtttgatgttcagcaagagaactgcttgagtttaagccattttcaaaagaaacttgccttttacattattgtgttccagaacattaagtgactgtaggtactgggtattagtgatggtaaactttgtgttgctctttatgaaatgatccatataactgttgggtgcatcagtgcttttcaaaggggctgcttactatagggttaactatgtatattcattgttaagagttaacttgtggtttggctgtttcctggattttataacatacatgtgcagaaatgtattcaaatgaaaggaagcatacctttatcaagatgctattaaaattgaacatcaagtataatatttcatttggattctcttttttggttaatgcctaaaaatgcctatttgggatttttttttttttttaaattaagagaagctctcttctgtgtagaacagttgttccaaaatagcttagtgttttgttttcctgttgcatgacagatttaactattctttccagcagtggaggtgctgtcagagtccagtgttctagaagaggcagtgtctaaagcctaattttacttttctaattctggtagctattaccaggaatttttgaaagttttgtttaagtagtctaatattttttatgtaaagagcattaaattttgctatgtataaatttttgtaacctaacagtgaatcaatattttctatcagtgccaagggcttcctgtagttctattcaagtgttacaataaatatttgtagataatagtcaatacttgtgtatgcttattttaaagatctatttaggtggaaatagttgtggatgtactaagagtaatgaaataaaattatagcttcattcacttgcctttttaccat

SEQ ID NO: 12247 - protein, 246 aa, Homo sapiens; identical to SEQ ID NO: 2049

SEQ ID NO: 12248 - DNA, 4668 bp, Homo sapiens
gaaagagagagagagagagagatcgagattgagatcttaagaaagagagcaaggaggaagagcccgactgtaggcaccaccgggcgccgaatggctgttttctaactgggatcctcggtgacgtatggctgcctgccccttggcagctgtctttatggaccagtaggcagagcgaaattgacgctgacaagacttttgcatcttggaagggactgtaatctactgtagtgaagaacagagcctctcaatcagacgggtgtaaataagagacggaggggagtccaaaagaaaaggaagaggaggaaaaacaagtgtgtgttggggggaacagggggaaaagcatttttggtggatggtatgaagccagccatggaaactgcagccgaggaaaatactgaacaaagccaagagagaaaaggctgctttgaatgctgcatcaagtgtctgggaggagtcccctacgcctccctggtggccaccatcctctgcttctccggggtggccttattctgcggctgtgggcatgtggctctcgcaggcaccgtggcgattcttgagcaacacttctccaccaacgccagtgaccatgccttgctgagcgaggtgatacaactgatgcagtatgtcatctatggaattgcgtcctttttcttcttgtatgggatcattctgttggcagaaggcttttacaccacaagtgcagtgaaagaactgcacggtgagtttaaaacaaccgcttgtggccgatgcatcagtggaatgttcgttttcctcacctatgtgcttggagtggcctggctgggtgtgtttggtttctcagcggtgcccgtgtttatgttctacaacatatggtcaacttgtgaagtcatcaagtcaccgcagaccaacgggaccacgggtgtggagcagatctgtgtggatatccgacaatacggtatcattccttggaatgctttccccggaaaaatatgtggctctgccctggagaacatctgcaacacaaacgagttctacatgtcctatcacctgttcattgtggcctgtgcaggagctggtgccaccgtcattgccctgctgatctacatgatggctactacatataactatgcggttttgaagtttaagagtcgggaagattgctgcactaaattctaaattgcataaggagttttagagagctatgctctgtagcatgaaatatcactgacactccagactaaagcagagtctaggtttctgcaattttgttacagtaatttgtaaatagctttagtaaactcaccttgcatggtagattaataagatgacttactgtacatgaattacacaataatgagatctggtggctatttccacattttgaaaaggattcagttatttactgacagtggtgagcatcctttttaaaataatgttctcatacttaaacattagagagcagtatctttaaatgaattattaacactttggaatacttacattttctgttatttttgattgcctgataaccagtttcaatgatgaaaatgaaaacaagtgctgaagatgaaatggaagagaaccgttttaatctggattttgttttgtcacacctggaaaatactttgcaaatatgttctaaattgaaaacaatttttttatgatcacatggttcactaccaaatgaccctcaaataagccagatgaaaatttgaagaaaaaggtcacccagttctctggaaaaaaaaaaaaaaaaaaaaaaaaaaggatttatatgtgggtagttttttttttggtacaacacaatcattctgttagagcccacaaaattggtaaccttaaattgtgtgttttggtaagtaataactaactgtttcctcatagctagttctcaagctgcatgtaagattttaacgggaagagaaaataggcctggacctgaaggtctcaaatatgttgagaagaaagtatgaactataaggaacttgagatgtagatttattttgcaggaaatacgaggaaaataggaaagaagtgtttgccgcatcaagtgtaaagaatgatactgaggatttttacattttatgaaatgaaataatggcatttacaaaatgaaaaatgtagtttcacaactaagttttgttaacagagactgcatgctttgcttatagttcttaattttggttttgacattcatttaattttttccatgttaaatatgtagtttaattatttactcaaaataaacattgttcatgcttttaggcctttgggggaattgatttttatccacaggtagaaaatggtctttgcacacactacacttatttcaaatatacaatgtgctcccgaactttcgcattagtctttaaaattactctcaaaatggtattaaaaaaaaaaaaaaaagcaccctctcgtatttcatttttgctttttcttaacaatacctttggccatttttttccagttcactatgtttgtatactaacttttcttcagccttttaatgcgaagccaactagtagagcatgctttcaggatctgacagctctgctagtagagcgagtatttattaatacagaattaaccttcgcccctttaaagtcaagtctgtctaatctaactagcgcctcgctttgccttctcacaatgctcactagccatcatgctcacccttctcttccagatccacttcctcatgatactgtcttctaactgggcttacttaaaggatgcgagcaaaatgcaggcttaccaggatatcaaagcaaaggaagaacaggaactgcaagatatccagtctcggtcaaaagaacaactcaattcttacacataaatgtttgccagagtgtttcggccgacgtatttacagctctgacaaatcatcagacagctgctctgcagtacagatgtgtatcccaccaaactaatgtagatgtacaaacacttcactgtctgtctcaagctgctgggatgtatctctaggaaaaccttccagtgggtaaatctttttctttagaacaaatattggaggtttcatgttagccattttaaaaggcaacactttgacaaaatgatcgttcatactttgggaatttgtggcatgttcacatttattgctagggcaattctaccaagacactcaatggaatatgtcacactccttaatagggacctgtgactccttaataaggacctgtgacatgcccagcatcaagggataagaccgtaaattcacatatatgccatctgtcctcaagtgttatctacataggaaataaaatggaattgatgtaaagttccatttctgacagctgacatttattaaactttggatcaaagataatgtgattcttatgattgatttctcaaactagcttttccctcccaagtccaggacccattaatttcctgagccaatcagaaatatatttttcaataatgctaaaattagctacaattctgctgaccctactattaaagaatctggatgctggactcactgacaagctttccagaagcaattttataacagatttcattttaacaaaatactgatccaattttcattattcttgagaaatgtcagctttgccttaatgagtatttgctttaaatttctaagaatttatatcataactagagacccaaatatctttcacagaattttgttccataaatgtttttcttaattattaagaagtgttaccttattaaaatgaccaccattctaaaccatttttcagtggtctggatacgaagtttacagtttcataccaactatctaaaacctaattgcaaattgaccacagacctctaacctcctacttttatagacttgaatacttaagtaatttaaattagggttggtatttcatttttttcttatctaaatcttagtttcctggaataataaagtttgatgttcagcaagagaactgcttgagtttaagccattttcaaaagaaacttgccttttacattattgtgttccagaacattaagtgactgtaggtactgggtattagtgatggtaaactttgtgttgctctttatgaaatgatccatataactgttgggtgcatcagtgcttttcaaaggggctgcttactatagggttaactatgtatattcattgttaagagttaacttgtggtttggctgtttcctggattttataacatacatgtgcagaaatgtattcaaatgaaaggaagcatacctttatcaagatgctattaaaattgaacatcaagtataatatttcatttggattctcttttttggttaatgcctaaaaatgcctatttgggatttttttttttttttaaattaagagaagctctcttctgtgtagaacagttgttccaaaatagcttagtgttttgttttcctgttgcatgacagatttaactattctttccagcagtggaggtgctgtcagagtccagtgttctagaagaggcagtgtctaaagcctaattttacttttctaattctggtagctattaccaggaatttttgaaagttttgtttaagtagtctaatattttttatgtaaagagcattaaattttgctatgtataaatttttgtaacctaacagtgaatcaatattttctatcagtgccaagggcttcctgtagttctattcaagtgttacaataaatatttgtagataatagtc

SEQ ID NO: 12249 - protein, 265 aa, Homo sapiens; identical to SEQ ID NO: 2055

SEQ ID NO: 12250 - DNA, 3308 bp, Homo sapiens
gaattaattagcattcattgggtgtacttggctagaagaaatgaggtggggagaaagagagagagagagagagatcgagattgagatcttaagaaagagagcaaggaggaagagcccggtggggagcaggtccttctcccccacccccctacccccaactcccactggagccgcattgagactgtaggcaccaccgggcgccgaatggctgttttctaactgggatcctcggtgacgtatggctgcctgccccttggcagctgtctttatggaccagtaggcagagcgaaattgacgctgacaagacttttgcatcttggaagggactgtaatctactgtagtgaagaacagagcctctcaatcagacgggtgtaaataagagacggaggggagtccaaaagaaaaggaagaggaggaaaaacaagtgtgtgttggggggaacagggggaaaagcatttttggtggatggtatgaagccagccatggaaactgcagccgaggaaaatactgaacaaagccaagagagaaaagtgaacagcagagctgaaatggaaattggcaggtaccactggatgtacccaggctcaaagaaccaccagtaccatcccgtgccaaccctgggggacagggctagccccttgagcagtccaggctgctttgaatgctgcatcaagtgtctgggaggagtcccctacgcctccctggtggccaccatcctctgcttctccggggtggccttattctgcggctgtgggcatgtggctctcgcaggcaccgtggcgattcttgagcaacacttctccaccaacgccagtgaccatgccttgctgagcgaggtgatacaactgatgcagtatgtcatctatggaattgcgtcctttttcttcttgtatgggatcattctgttggcagaaggcttttacaccacaagtgcagtgaaagaactgcacggtgagtttaaaacaaccgcttgtggccgatgcatcagtggaatgttcgttttcctcacctatgtgcttggagtggcctggctgggtgtgtttggtttctcagcggtgcccgtgtttatgttctacaacatatggtcaacttgtgaagtcatcaagtcaccgcagaccaacgggaccacgggtgtggagcagatctgtgtggatatccgacaatacggtatcattccttggaatgctttccccggaaaaatatgtggctctgccctggagaacatctgcaacacaaacgagttctacatgtcctatcacctgttcattgtggcctgtgcaggagctggtgccaccgtcattgccctgatccacttcctcatgatactgtcttctaactgggcttacttaaaggatgcgagcaaaatgcaggcttaccaggatatcaaagcaaaggaagaacaggaactgcaagatatccagtctcggtcaaaagaacaactcaattcttacacataaatgtttgccagagtgtttcggccgacgtatttacagctctgacaaatcatcagacagctgctctgcagtacagatgtgtatcccaccaaactaatgtagatgtacaaacacttcactgtctgtctcaagctgctgggatgtatctctaggaaaaccttccagtgggtaaatctttttctttagaacaaatattggaggtttcatgttagccattttaaaaggcaacactttgacaaaatgatcgttcatactttgggaatttgtggcatgttcacatttattgctagggcaattctaccaagacactcaatggaatatgtcacactccttaatagggacctgtgactccttaataaggacctgtgacatgcccagcatcaagggataagaccgtaaattcacatatatgccatctgtcctcaagtgttatctacataggaaataaaatggaattgatgtaaagttccatttctgacagctgacatttattaaactttggatcaaagataatgtgattcttatgattgatttctcaaactagcttttccctcccaagtccaggacccattaatttcctgagccaatcagaaatatatttttcaataatgctaaaattagctacaattctgctgaccctactattaaagaatctggatgctggactcactgacaagctttccagaagcaattttataacagatttcattttaacaaaatactgatccaattttcattattcttgagaaatgtcagctttgccttaatgagtatttgctttaaatttctaagaatttatatcataactagagacccaaatatctttcacagaattttgttccataaatgtttttcttaattattaagaagtgttaccttattaaaatgaccaccattctaaaccatttttcagtggtctggatacgaagtttacagtttcataccaactatctaaaacctaattgcaaattgaccacagacctctaacctcctacttttatagacttgaatacttaagtaatttaaattagggttggtatttcatttttttcttatctaaatcttagtttcctggaataataaagtttgatgttcagcaagagaactgcttgagtttaagccattttcaaaagaaacttgccttttacattattgtgttccagaacattaagtgactgtaggtactgggtattagtgatggtaaactttgtgttgctctttatgaaatgatccatataactgttgggtgcatcagtgcttttcaaaggggctgcttactatagggttaactatgtatattcattgttaagagttaacttgtggtttggctgtttcctggattttataacatacatgtgcagaaatgtattcaaatgaaaggaagcatacctttatcaagatgctattaaaattgaacatcaagtataatatttcatttggattctcttttttggttaatgcctaaaaatgcctatttgggatttttttttttttttaaattaagagaagctctcttctgtgtagaacagttgttccaaaatagcttagtgttttgttttcctgttgcatgacagatttaactattctttccagcagtggaggtgctgtcagagtccagtgttctagaagaggcagtgtctaaagcctaattttacttttctaattctggtagctattaccaggaatttttgaaagttttgtttaagtagtctaatattttttatgtaaagagcattaaattttgctatgtataaatttttgtaacctaacagtgaatcaatattttctatcagtgccaagggcttcctgtagttctattcaagtgttacaataaatatttgtagataatagtc

SEQ ID NO: 12251 - protein, 328 aa, Homo sapiens; identical to SEQ ID NO: 2051

SEQ ID NO: 12252 - DNA, 4902 bp, Homo sapiens
gaattaattagcattcattgggtgtacttggctagaagaaatgaggtggggagaaagagagagagagagagagatcgagattgagatcttaagaaagagagcaaggaggaagagcccggtggggagcaggtccttctcccccacccccctacccccaactcccactggagccgcattgagactgtaggcaccaccgggcgccgaatggctgttttctaactgggatcctcggtgacgtatggctgcctgccccttggcagctgtctttatggaccagtaggcagagcgaaattgacgctgacaagacttttgcatcttggaagggactgtaatctactgtagtgaagaacagagcctctcaatcagacgggtgtaaataagagacggaggggagtccaaaagaaaaggaagaggaggaaaaacaagtgtgtgttggggggaacagggggaaaagcatttttggtggatggtatgaagccagccatggaaactgcagccgaggaaaatactgaacaaagccaagagagaaaagtgaacagcagagctgaaatggaaattggcaggtaccactggatgtacccaggctcaaagaaccaccagtaccatcccgtgccaaccctgggggacagggctagccccttgagcagtccaggctgctttgaatgctgcatcaagtgtctgggaggagtcccctacgcctccctggtggccaccatcctctgcttctccggggtggccttattctgcggctgtgggcatgtggctctcgcaggcaccgtggcgattcttgagcaacacttctccaccaacgccagtgaccatgccttgctgagcgaggtgatacaactgatgcagtatgtcatctatggaattgcgtcctttttcttcttgtatgggatcattctgttggcagaaggcttttacaccacaagtgcagtgaaagaactgcacggtgagtttaaaacaaccgcttgtggccgatgcatcagtggaatgttcgttttcctcacctatgtgcttggagtggcctggctgggtgtgtttggtttctcagcggtgcccgtgtttatgttctacaacatatggtcaacttgtgaagtcatcaagtcaccgcagaccaacgggaccacgggtgtggagcagatctgtgtggatatccgacaatacggtatcattccttggaatgctttccccggaaaaatatgtggctctgccctggagaacatctgcaacacaaacgagttctacatgtcctatcacctgttcattgtggcctgtgcaggagctggtgccaccgtcattgccctgctgatctacatgatggctactacatataactatgcggttttgaagtttaagagtcgggaagattgctgcactaaattctaaattgcataaggagttttagagagctatgctctgtagcatgaaatatcactgacactccagactaaagcagagtctaggtttctgcaattttgttacagtaatttgtaaatagctttagtaaactcaccttgcatggtagattaataagatgacttactgtacatgaattacacaataatgagatctggtggctatttccacattttgaaaaggattcagttatttactgacagtggtgagcatcctttttaaaataatgttctcatacttaaacattagagagcagtatctttaaatgaattattaacactttggaatacttacattttctgttatttttgattgcctgataaccagtttcaatgatgaaaatgaaaacaagtgctgaagatgaaatggaagagaaccgttttaatctggattttgttttgtcacacctggaaaatactttgcaaatatgttctaaattgaaaacaatttttttatgatcacatggttcactaccaaatgaccctcaaataagccagatgaaaatttgaagaaaaaggtcacccagttctctggaaaaaaaaaaaaaaaaaaaaaaaaaaggatttatatgtgggtagttttttttttggtacaacacaatcattctgttagagcccacaaaattggtaaccttaaattgtgtgttttggtaagtaataactaactgtttcctcatagctagttctcaagctgcatgtaagattttaacgggaagagaaaataggcctggacctgaaggtctcaaatatgttgagaagaaagtatgaactataaggaacttgagatgtagatttattttgcaggaaatacgaggaaaataggaaagaagtgtttgccgcatcaagtgtaaagaatgatactgaggatttttacattttatgaaatgaaataatggcatttacaaaatgaaaaatgtagtttcacaactaagttttgttaacagagactgcatgctttgcttatagttcttaattttggttttgacattcatttaattttttccatgttaaatatgtagtttaattatttactcaaaataaacattgttcatgcttttaggcctttgggggaattgatttttatccacaggtagaaaatggtctttgcacacactacacttatttcaaatatacaatgtgctcccgaactttcgcattagtctttaaaattactctcaaaatggtattaaaaaaaaaaaaaaaagcaccctctcgtatttcatttttgctttttcttaacaatacctttggccatttttttccagttcactatgtttgtatactaacttttcttcagccttttaatgcgaagccaactagtagagcatgctttcaggatctgacagctctgctagtagagcgagtatttattaatacagaattaaccttcgcccctttaaagtcaagtctgtctaatctaactagcgcctcgctttgccttctcacaatgctcactagccatcatgctcacccttctcttccagatccacttcctcatgatactgtcttctaactgggcttacttaaaggatgcgagcaaaatgcaggcttaccaggatatcaaagcaaaggaagaacaggaactgcaagatatccagtctcggtcaaaagaacaactcaattcttacacataaatgtttgccagagtgtttcggccgacgtatttacagctctgacaaatcatcagacagctgctctgcagtacagatgtgtatcccaccaaactaatgtagatgtacaaacacttcactgtctgtctcaagctgctgggatgtatctctaggaaaaccttccagtgggtaaatctttttctttagaacaaatattggaggtttcatgttagccattttaaaaggcaacactttgacaaaatgatcgttcatactttgggaatttgtggcatgttcacatttattgctagggcaattctaccaagacactcaatggaatatgtcacactccttaatagggacctgtgactccttaataaggacctgtgacatgcccagcatcaagggataagaccgtaaattcacatatatgccatctgtcctcaagtgttatctacataggaaataaaatggaattgatgtaaagttccatttctgacagctgacatttattaaactttggatcaaagataatgtgattcttatgattgatttctcaaactagcttttccctcccaagtccaggacccattaatttcctgagccaatcagaaatatatttttcaataatgctaaaattagctacaattctgctgaccctactattaaagaatctggatgctggactcactgacaagctttccagaagcaattttataacagatttcattttaacaaaatactgatccaattttcattattcttgagaaatgtcagctttgccttaatgagtatttgctttaaatttctaagaatttatatcataactagagacccaaatatctttcacagaattttgttccataaatgtttttcttaattattaagaagtgttaccttattaaaatgaccaccattctaaaccatttttcagtggtctggatacgaagtttacagtttcataccaactatctaaaacctaattgcaaattgaccacagacctctaacctcctacttttatagacttgaatacttaagtaatttaaattagggttggtatttcatttttttcttatctaaatcttagtttcctggaataataaagtttgatgttcagcaagagaactgcttgagtttaagccattttcaaaagaaacttgccttttacattattgtgttccagaacattaagtgactgtaggtactgggtattagtgatggtaaactttgtgttgctctttatgaaatgatccatataactgttgggtgcatcagtgcttttcaaaggggctgcttactatagggttaactatgtatattcattgttaagagttaacttgtggtttggctgtttcctggattttataacatacatgtgcagaaatgtattcaaatgaaaggaagcatacctttatcaagatgctattaaaattgaacatcaagtataatatttcatttggattctcttttttggttaatgcctaaaaatgcctatttgggatttttttttttttttaaattaagagaagctctcttctgtgtagaacagttgttccaaaatagcttagtgttttgttttcctgttgcatgacagatttaactattctttccagcagtggaggtgctgtcagagtccagtgttctagaagaggcagtgtctaaagcctaattttacttttctaattctggtagctattaccaggaatttttgaaagttttgtttaagtagtctaatattttttatgtaaagagcattaaattttgctatgtataaatttttgtaacctaacagtgaatcaatattttctatcagtgccaagggcttcctgtagttctattcaagtgttacaataaatatttgtagataatagtc

SEQ ID NO: 12253 - protein, 305 aa, Homo sapiens; identical to SEQ ID NO: 2053

SEQ ID NO: 12254 - DNA, 4411 bp, Homo sapiens
aaccatatgcttgcctgcatctaatgtgaaaccatccctgctccatgttcttagcatcctaggttcgtttccttcttggcactcaccgtggcttgaaatcacatggatttatgtgattatttgagtatgcctttccccactaaactgtcagcttcatgaaggctgctttgaatgctgcatcaagtgtctgggaggagtcccctacgcctccctggtggccaccatcctctgcttctccggggtggccttattctgcggctgtgggcatgtggctctcgcaggcaccgtggcgattcttgagcaacacttctccaccaacgccagtgaccatgccttgctgagcgaggtgatacaactgatgcagtatgtcatctatggaattgcgtcctttttcttcttgtatgggatcattctgttggcagaaggcttttacaccacaagtgcagtgaaagaactgcacggtgagtttaaaacaaccgcttgtggccgatgcatcagtggaatgttcgttttcctcacctatgtgcttggagtggcctggctgggtgtgtttggtttctcagcggtgcccgtgtttatgttctacaacatatggtcaacttgtgaagtcatcaagtcaccgcagaccaacgggaccacgggtgtggagcagatctgtgtggatatccgacaatacggtatcattccttggaatgctttccccggaaaaatatgtggctctgccctggagaacatctgcaacacaaacgagttctacatgtcctatcacctgttcattgtggcctgtgcaggagctggtgccaccgtcattgccctgctgatctacatgatggctactacatataactatgcggttttgaagtttaagagtcgggaagattgctgcactaaattctaaattgcataaggagttttagagagctatgctctgtagcatgaaatatcactgacactccagactaaagcagagtctaggtttctgcaattttgttacagtaatttgtaaatagctttagtaaactcaccttgcatggtagattaataagatgacttactgtacatgaattacacaataatgagatctggtggctatttccacattttgaaaaggattcagttatttactgacagtggtgagcatcctttttaaaataatgttctcatacttaaacattagagagcagtatctttaaatgaattattaacactttggaatacttacattttctgttatttttgattgcctgataaccagtttcaatgatgaaaatgaaaacaagtgctgaagatgaaatggaagagaaccgttttaatctggattttgttttgtcacacctggaaaatactttgcaaatatgttctaaattgaaaacaatttttttatgatcacatggttcactaccaaatgaccctcaaataagccagatgaaaatttgaagaaaaaggtcacccagttctctggaaaaaaaaaaaaaaaaaaaaaaaaaaggatttatatgtgggtagttttttttttggtacaacacaatcattctgttagagcccacaaaattggtaaccttaaattgtgtgttttggtaagtaataactaactgtttcctcatagctagttctcaagctgcatgtaagattttaacgggaagagaaaataggcctggacctgaaggtctcaaatatgttgagaagaaagtatgaactataaggaacttgagatgtagatttattttgcaggaaatacgaggaaaataggaaagaagtgtttgccgcatcaagtgtaaagaatgatactgaggatttttacattttatgaaatgaaataatggcatttacaaaatgaaaaatgtagtttcacaactaagttttgttaacagagactgcatgctttgcttatagttcttaattttggttttgacattcatttaattttttccatgttaaatatgtagtttaattatttactcaaaataaacattgttcatgcttttaggcctttgggggaattgatttttatccacaggtagaaaatggtctttgcacacactacacttatttcaaatatacaatgtgctcccgaactttcgcattagtctttaaaattactctcaaaatggtattaaaaaaaaaaaaaaaagcaccctctcgtatttcatttttgctttttcttaacaatacctttggccatttttttccagttcactatgtttgtatactaacttttcttcagccttttaatgcgaagccaactagtagagcatgctttcaggatctgacagctctgctagtagagcgagtatttattaatacagaattaaccttcgcccctttaaagtcaagtctgtctaatctaactagcgcctcgctttgccttctcacaatgctcactagccatcatgctcacccttctcttccagatccacttcctcatgatactgtcttctaactgggcttacttaaaggatgcgagcaaaatgcaggcttaccaggatatcaaagcaaaggaagaacaggaactgcaagatatccagtctcggtcaaaagaacaactcaattcttacacataaatgtttgccagagtgtttcggccgacgtatttacagctctgacaaatcatcagacagctgctctgcagtacagatgtgtatcccaccaaactaatgtagatgtacaaacacttcactgtctgtctcaagctgctgggatgtatctctaggaaaaccttccagtgggtaaatctttttctttagaacaaatattggaggtttcatgttagccattttaaaaggcaacactttgacaaaatgatcgttcatactttgggaatttgtggcatgttcacatttattgctagggcaattctaccaagacactcaatggaatatgtcacactccttaatagggacctgtgactccttaataaggacctgtgacatgcccagcatcaagggataagaccgtaaattcacatatatgccatctgtcctcaagtgttatctacataggaaataaaatggaattgatgtaaagttccatttctgacagctgacatttattaaactttggatcaaagataatgtgattcttatgattgatttctcaaactagcttttccctcccaagtccaggacccattaatttcctgagccaatcagaaatatatttttcaataatgctaaaattagctacaattctgctgaccctactattaaagaatctggatgctggactcactgacaagctttccagaagcaattttataacagatttcattttaacaaaatactgatccaattttcattattcttgagaaatgtcagctttgccttaatgagtatttgctttaaatttctaagaatttatatcataactagagacccaaatatctttcacagaattttgttccataaatgtttttcttaattattaagaagtgttaccttattaaaatgaccaccattctaaaccatttttcagtggtctggatacgaagtttacagtttcataccaactatctaaaacctaattgcaaattgaccacagacctctaacctcctacttttatagacttgaatacttaagtaatttaaattagggttggtatttcatttttttcttatctaaatcttagtttcctggaataataaagtttgatgttcagcaagagaactgcttgagtttaagccattttcaaaagaaacttgccttttacattattgtgttccagaacattaagtgactgtaggtactgggtattagtgatggtaaactttgtgttgctctttatgaaatgatccatataactgttgggtgcatcagtgcttttcaaaggggctgcttactatagggttaactatgtatattcattgttaagagttaacttgtggtttggctgtttcctggattttataacatacatgtgcagaaatgtattcaaatgaaaggaagcatacctttatcaagatgctattaaaattgaacatcaagtataatatttcatttggattctcttttttggttaatgcctaaaaatgcctatttgggatttttttttttttttaaattaagagaagctctcttctgtgtagaacagttgttccaaaatagcttagtgttttgttttcctgttgcatgacagatttaactattctttccagcagtggaggtgctgtcagagtccagtgttctagaagaggcagtgtctaaagcctaattttacttttctaattctggtagctattaccaggaatttttgaaagttttgtttaagtagtctaatattttttatgtaaagagcattaaattttgctatgtataaatttttgtaacctaacagtgaatcaatattttctatcagtgccaagggcttcctgtagttctattcaagtgttacaataaatatttgtagataatagtc

SEQ ID NO: 12255 - protein, 179 aa, Homo sapiens; identical to SEQ ID NO: 12241

SEQ ID NO: 12256 - DNA, 2773 bp, Homo sapiens
gcccttccgagggtcccgcccctcccccgctcaggtggcgcctcctcggccacctctgcgacgaagccgggacgctggaggtgggaggggcgcggcgcaggtgtccggaacgcccaggctgctttgaatgctgcatcaagtgtctgggaggagtcccctacgcctccctggtggccaccatcctctgcttctccggggtggccttattctgcggctgtgggcatgtggctctcgcaggcaccgtggcgattcttgagcaacacttctccaccaacgccagtgaccatgccttgctgagcgaggtgatacaactgatgcagtatgtcatctatggaattgcgtcctttttcttcttgtatgggatcattctgttggcagaaggcttttacaccacaagtgcagtgaaagaactgcacggtgagtttaaaacaaccgcttgtggccgatgcatcagtggaatgttcgttttcctcacctatgtgcttggagtggcctggctgggtgtgtttggtttctcagcggtgcccgtgtttatgttctacaacatatggtcaacttgtgaagtcatcaagtcaccgcagaccaacgggaccacgggtgtggagcagatctgtgtggatatccgacaatacggtatcattccttggaatgctttccccggaaaaatatgtggctctgccctggagaacatctgcaacacaaacgagttctacatgtcctatcacctgttcattgtggcctgtgcaggagctggtgccaccgtcattgccctgatccacttcctcatgatactgtcttctaactgggcttacttaaaggatgcgagcaaaatgcaggcttaccaggatatcaaagcaaaggaagaacaggaactgcaagatatccagtctcggtcaaaagaacaactcaattcttacacataaatgtttgccagagtgtttcggccgacgtatttacagctctgacaaatcatcagacagctgctctgcagtacagatgtgtatcccaccaaactaatgtagatgtacaaacacttcactgtctgtctcaagctgctgggatgtatctctaggaaaaccttccagtgggtaaatctttttctttagaacaaatattggaggtttcatgttagccattttaaaaggcaacactttgacaaaatgatcgttcatactttgggaatttgtggcatgttcacatttattgctagggcaattctaccaagacactcaatggaatatgtcacactccttaatagggacctgtgactccttaataaggacctgtgacatgcccagcatcaagggataagaccgtaaattcacatatatgccatctgtcctcaagtgttatctacataggaaataaaatggaattgatgtaaagttccatttctgacagctgacatttattaaactttggatcaaagataatgtgattcttatgattgatttctcaaactagcttttccctcccaagtccaggacccattaatttcctgagccaatcagaaatatatttttcaataatgctaaaattagctacaattctgctgaccctactattaaagaatctggatgctggactcactgacaagctttccagaagcaattttataacagatttcattttaacaaaatactgatccaattttcattattcttgagaaatgtcagctttgccttaatgagtatttgctttaaatttctaagaatttatatcataactagagacccaaatatctttcacagaattttgttccataaatgtttttcttaattattaagaagtgttaccttattaaaatgaccaccattctaaaccatttttcagtggtctggatacgaagtttacagtttcataccaactatctaaaacctaattgcaaattgaccacagacctctaacctcctacttttatagacttgaatacttaagtaatttaaattagggttggtatttcatttttttcttatctaaatcttagtttcctggaataataaagtttgatgttcagcaagagaactgcttgagtttaagccattttcaaaagaaacttgccttttacattattgtgttccagaacattaagtgactgtaggtactgggtattagtgatggtaaactttgtgttgctctttatgaaatgatccatataactgttgggtgcatcagtgcttttcaaaggggctgcttactatagggttaactatgtatattcattgttaagagttaacttgtggtttggctgtttcctggattttataacatacatgtgcagaaatgtattcaaatgaaaggaagcatacctttatcaagatgctattaaaattgaacatcaagtataatatttcatttggattctcttttttggttaatgcctaaaaatgcctatttgggatttttttttttttttaaattaagagaagctctcttctgtgtagaacagttgttccaaaatagcttagtgttttgttttcctgttgcatgacagatttaactattctttccagcagtggaggtgctgtcagagtccagtgttctagaagaggcagtgtctaaagcctaattttacttttctaattctggtagctattaccaggaatttttgaaagttttgtttaagtagtctaatattttttatgtaaagagcattaaattttgctatgtataaatttttgtaacctaacagtgaatcaatattttctatcagtgccaagggcttcctgtagttctattcaagtgttacaataaatatttgtagataatagtc

SEQ ID NO: 12257 - protein, 202 aa, Homo sapiens; identical to SEQ ID NO: 12243

SEQ ID NO: 12258 - DNA, 4279 bp, Homo sapiens
agctttgcctgcagactccgcgcgcccgctgcccccaatcgggccctagctccgggcgcacaaagcccccggcgctgacgtcagggcccctctccgcgcggccggcccccagtgcaggcggagccgcgccgcgctcccaccccggccgggagctaggagccagcggccagccccgcgcagcgcagcgcagcccgcagaagcccggtcagcgcacgtgcccgcgagacctgcaaacttgtgccaccggctctgcccgtccccggggagcccgaacgccccgcagccctcacccctcccgccagtctccagccatgggctgctttgaatgctgcatcaagtgtctgggaggagtcccctacgcctccctggtggccaccatcctctgcttctccggggtggccttattctgcggctgtgggcatgtggctctcgcaggcaccgtggcgattcttgaaacatatggtcaacttgtgaagtcatcaagtcaccgcagaccaacgggaccacgggtgtggagcagatctgtgtggatatccgacaatacggtatcattccttggaatgctttccccggaaaaatatgtggctctgccctggagaacatctgcaacacaaacgagttctacatgtcctatcacctgttcattgtggcctgtgcaggagctggtgccaccgtcattgccctgctgatctacatgatggctactacatataactatgcggttttgaagtttaagagtcgggaagattgctgcactaaattctaaattgcataaggagttttagagagctatgctctgtagcatgaaatatcactgacactccagactaaagcagagtctaggtttctgcaattttgttacagtaatttgtaaatagctttagtaaactcaccttgcatggtagattaataagatgacttactgtacatgaattacacaataatgagatctggtggctatttccacattttgaaaaggattcagttatttactgacagtggtgagcatcctttttaaaataatgttctcatacttaaacattagagagcagtatctttaaatgaattattaacactttggaatacttacattttctgttatttttgattgcctgataaccagtttcaatgatgaaaatgaaaacaagtgctgaagatgaaatggaagagaaccgttttaatctggattttgttttgtcacacctggaaaatactttgcaaatatgttctaaattgaaaacaatttttttatgatcacatggttcactaccaaatgaccctcaaataagccagatgaaaatttgaagaaaaaggtcacccagttctctggaaaaaaaaaaaaaaaaaaaaaaaaaaggatttatatgtgggtagttttttttttggtacaacacaatcattctgttagagcccacaaaattggtaaccttaaattgtgtgttttggtaagtaataactaactgtttcctcatagctagttctcaagctgcatgtaagattttaacgggaagagaaaataggcctggacctgaaggtctcaaatatgttgagaagaaagtatgaactataaggaacttgagatgtagatttattttgcaggaaatacgaggaaaataggaaagaagtgtttgccgcatcaagtgtaaagaatgatactgaggatttttacattttatgaaatgaaataatggcatttacaaaatgaaaaatgtagtttcacaactaagttttgttaacagagactgcatgctttgcttatagttcttaattttggttttgacattcatttaattttttccatgttaaatatgtagtttaattatttactcaaaataaacattgttcatgcttttaggcctttgggggaattgatttttatccacaggtagaaaatggtctttgcacacactacacttatttcaaatatacaatgtgctcccgaactttcgcattagtctttaaaattactctcaaaatggtattaaaaaaaaaaaaaaaagcaccctctcgtatttcatttttgctttttcttaacaatacctttggccatttttttccagttcactatgtttgtatactaacttttcttcagccttttaatgcgaagccaactagtagagcatgctttcaggatctgacagctctgctagtagagcgagtatttattaatacagaattaaccttcgcccctttaaagtcaagtctgtctaatctaactagcgcctcgctttgccttctcacaatgctcactagccatcatgctcacccttctcttccagatccacttcctcatgatactgtcttctaactgggcttacttaaaggatgcgagcaaaatgcaggcttaccaggatatcaaagcaaaggaagaacaggaactgcaagatatccagtctcggtcaaaagaacaactcaattcttacacataaatgtttgccagagtgtttcggccgacgtatttacagctctgacaaatcatcagacagctgctctgcagtacagatgtgtatcccaccaaactaatgtagatgtacaaacacttcactgtctgtctcaagctgctgggatgtatctctaggaaaaccttccagtgggtaaatctttttctttagaacaaatattggaggtttcatgttagccattttaaaaggcaacactttgacaaaatgatcgttcatactttgggaatttgtggcatgttcacatttattgctagggcaattctaccaagacactcaatggaatatgtcacactccttaatagggacctgtgactccttaataaggacctgtgacatgcccagcatcaagggataagaccgtaaattcacatatatgccatctgtcctcaagtgttatctacataggaaataaaatggaattgatgtaaagttccatttctgacagctgacatttattaaactttggatcaaagataatgtgattcttatgattgatttctcaaactagcttttccctcccaagtccaggacccattaatttcctgagccaatcagaaatatatttttcaataatgctaaaattagctacaattctgctgaccctactattaaagaatctggatgctggactcactgacaagctttccagaagcaattttataacagatttcattttaacaaaatactgatccaattttcattattcttgagaaatgtcagctttgccttaatgagtatttgctttaaatttctaagaatttatatcataactagagacccaaatatctttcacagaattttgttccataaatgtttttcttaattattaagaagtgttaccttattaaaatgaccaccattctaaaccatttttcagtggtctggatacgaagtttacagtttcataccaactatctaaaacctaattgcaaattgaccacagacctctaacctcctacttttatagacttgaatacttaagtaatttaaattagggttggtatttcatttttttcttatctaaatcttagtttcctggaataataaagtttgatgttcagcaagagaactgcttgagtttaagccattttcaaaagaaacttgccttttacattattgtgttccagaacattaagtgactgtaggtactgggtattagtgatggtaaactttgtgttgctctttatgaaatgatccatataactgttgggtgcatcagtgcttttcaaaggggctgcttactatagggttaactatgtatattcattgttaagagttaacttgtggtttggctgtttcctggattttataacatacatgtgcagaaatgtattcaaatgaaaggaagcatacctttatcaagatgctattaaaattgaacatcaagtataatatttcatttggattctcttttttggttaatgcctaaaaatgcctatttgggatttttttttttttttaaattaagagaagctctcttctgtgtagaacagttgttccaaaatagcttagtgttttgttttcctgttgcatgacagatttaactattctttccagcagtggaggtgctgtcagagtccagtgttctagaagaggcagtgtctaaagcctaattttacttttctaattctggtagctattaccaggaatttttgaaagttttgtttaagtagtctaatattttttatgtaaagagcattaaattttgctatgtataaatttttgtaacctaacagtgaatcaatattttctatcagtgccaagggcttcctgtagttctattcaagtgttacaataaatatttgtagataatagtc

SEQ ID NO: 12259 - protein, 125 aa, Homo sapiens; identical to SEQ ID NO: 12245

SEQ ID NO: 12260 - DNA, 4568 bp, Homo sapiens
gcgagctttgcctgcagactccgcgcgcccgctgcccccaatcgggccctagctccgggcgcacaaagcccccggcgctgacgtcagggcccctctccgcgcggccggcccccagtgcaggcggagccgcgccgcgctcccaccccggccgggagctaggagccagcggccagccccgcgcagcgcagcgcagcccgcagaagcccggtcagcgcacgtgcccgcgagacctgcaaacttgtgccaccggctctgcccgtccccggggagcccgaacgccccgcagccctcacccctcccgccagtctccagccatgggctgctttgaatgctgcatcaagtgtctgggaggagtcccctacgcctccctggtggccaccatcctctgcttctccggggtggccttattctgcggctgtgggcatgtggctctcgcaggcaccgtggcgattcttgagcaacacttctccaccaacgccagtgaccatgccttgctgagcgaggtgatacaactgatgcagtatgtcatctatggaattgcgtcctttttcttcttgtatgggatcattctgttggcagaaggcttttacaccacaagtgcagtgaaagaactgcacggtgagtttaaaacaaccgcttgtggccgatgcatcagtggaatgttcgttttcctcacctatgtgcttggagtggcctggctgggtgtgtttggtttctcagcggtgcccgtgtttatgttctacaacatatggtcaacttgtgaagtcatcaagtcaccgcagaccaacgggaccacgggtgtggagcagatctgtgtggatatccgacaatacggtatcattccttggaatgctttccccggaaaaatatgtggctctgccctggagaacatctgcaacacaaacgagttctacatgtcctatcacctgttcattgtggcctgtgcaggagctggtgccaccgtcattgccctgctgatctacatgatggctactacatataactatgcggttttgaagtttaagagtcgggaagattgctgcactaaattctaaattgcataaggagttttagagagctatgctctgtagcatgaaatatcactgacactccagactaaagcagagtctaggtttctgcaattttgttacagtaatttgtaaatagctttagtaaactcaccttgcatggtagattaataagatgacttactgtacatgaattacacaataatgagatctggtggctatttccacattttgaaaaggattcagttatttactgacagtggtgagcatcctttttaaaataatgttctcatacttaaacattagagagcagtatctttaaatgaattattaacactttggaatacttacattttctgttatttttgattgcctgataaccagtttcaatgatgaaaatgaaaacaagtgctgaagatgaaatggaagagaaccgttttaatctggattttgttttgtcacacctggaaaatactttgcaaatatgttctaaattgaaaacaatttttttatgatcacatggttcactaccaaatgaccctcaaataagccagatgaaaatttgaagaaaaaggtcacccagttctctggaaaaaaaaaaaaaaaaaaaaaaaaaaggatttatatgtgggtagttttttttttggtacaacacaatcattctgttagagcccacaaaattggtaaccttaaattgtgtgttttggtaagtaataactaactgtttcctcatagctagttctcaagctgcatgtaagattttaacgggaagagaaaataggcctggacctgaaggtctcaaatatgttgagaagaaagtatgaactataaggaacttgagatgtagatttattttgcaggaaatacgaggaaaataggaaagaagtgtttgccgcatcaagtgtaaagaatgatactgaggatttttacattttatgaaatgaaataatggcatttacaaaatgaaaaatgtagtttcacaactaagttttgttaacagagactgcatgctttgcttatagttcttaattttggttttgacattcatttaattttttccatgttaaatatgtagtttaattatttactcaaaataaacattgttcatgcttttaggcctttgggggaattgatttttatccacaggtagaaaatggtctttgcacacactacacttatttcaaatatacaatgtgctcccgaactttcgcattagtctttaaaattactctcaaaatggtattaaaaaaaaaaaaaaaagcaccctctcgtatttcatttttgctttttcttaacaatacctttggccatttttttccagttcactatgtttgtatactaacttttcttcagccttttaatgcgaagccaactagtagagcatgctttcaggatctgacagctctgctagtagagcgagtatttattaatacagaattaaccttcgcccctttaaagtcaagtctgtctaatctaactagcgcctcgctttgccttctcacaatgctcactagccatcatgctcacccttctcttccagatccacttcctcatgatactgtcttctaactgggcttacttaaaggatgcgagcaaaatgcaggcttaccaggatatcaaagcaaaggaagaacaggaactgcaagatatccagtctcggtcaaaagaacaactcaattcttacacataaatgtttgccagagtgtttcggccgacgtatttacagctctgacaaatcatcagacagctgctctgcagtacagatgtgtatcccaccaaactaatgtagatgtacaaacacttcactgtctgtctcaagctgctgggatgtatctctaggaaaaccttccagtgggtaaatctttttctttagaacaaatattggaggtttcatgttagccattttaaaaggcaacactttgacaaaatgatcgttcatactttgggaatttgtggcatgttcacatttattgctagggcaattctaccaagacactcaatggaatatgtcacactccttaatagggacctgtgactccttaataaggacctgtgacatgcccagcatcaagggataagaccgtaaattcacatatatgccatctgtcctcaagtgttatctacataggaaataaaatggaattgatgtaaagttccatttctgacagctgacatttattaaactttggatcaaagataatgtgattcttatgattgatttctcaaactagcttttccctcccaagtccaggacccattaatttcctgagccaatcagaaatatatttttcaataatgctaaaattagctacaattctgctgaccctactattaaagaatctggatgctggactcactgacaagctttccagaagcaattttataacagatttcattttaacaaaatactgatccaattttcattattcttgagaaatgtcagctttgccttaatgagtatttgctttaaatttctaagaatttatatcataactagagacccaaatatctttcacagaattttgttccataaatgtttttcttaattattaagaagtgttaccttattaaaatgaccaccattctaaaccatttttcagtggtctggatacgaagtttacagtttcataccaactatctaaaacctaattgcaaattgaccacagacctctaacctcctacttttatagacttgaatacttaagtaatttaaattagggttggtatttcatttttttcttatctaaatcttagtttcctggaataataaagtttgatgttcagcaagagaactgcttgagtttaagccattttcaaaagaaacttgccttttacattattgtgttccagaacattaagtgactgtaggtactgggtattagtgatggtaaactttgtgttgctctttatgaaatgatccatataactgttgggtgcatcagtgcttttcaaaggggctgcttactatagggttaactatgtatattcattgttaagagttaacttgtggtttggctgtttcctggattttataacatacatgtgcagaaatgtattcaaatgaaaggaagcatacctttatcaagatgctattaaaattgaacatcaagtataatatttcatttggattctcttttttggttaatgcctaaaaatgcctatttgggatttttttttttttttaaattaagagaagctctcttctgtgtagaacagttgttccaaaatagcttagtgttttgttttcctgttgcatgacagatttaactattctttccagcagtggaggtgctgtcagagtccagtgttctagaagaggcagtgtctaaagcctaattttacttttctaattctggtagctattaccaggaatttttgaaagttttgtttaagtagtctaatattttttatgtaaagagcattaaattttgctatgtataaatttttgtaacctaacagtgaatcaatattttctatcagtgccaagggcttcctgtagttctattcaagtgttacaataaatatttgtagataatagtc

SEQ ID NO: 12261 - protein, 246 aa, Homo sapiens; identical to SEQ ID NO: 2049

SEQ ID NO: 12262 - DNA, 4244 bp, Homo sapiens
gaaagagagagagagagagagatcgagattgagatcttaagaaagagagcaaggaggaagagcccgactgtaggcaccaccgggcgccgaatggctgttttctaactgggatcctcggtgacgtatggctgcctgccccttggcagctgtctttatggaccagtaggcagagcgaaattgacgctgacaagacttttgcatcttggaagggactgtaatctactgtagtgaagaacagagcctctcaatcagacgggtgtaaataagagacggaggggagtccaaaagaaaaggaagaggaggaaaaacaagtgtgtgttggggggaacagggggaaaagcatttttggtggatggtatgaagccagccatggaaactgcagccgaggaaaatactgaacaaagccaagagagaaaaggctgctttgaatgctgcatcaagtgtctgggaggagtcccctacgcctccctggtggccaccatcctctgcttctccggggtggccttattctgcggctgtgggcatgtggctctcgcaggcaccgtggcgattcttgagcaacacttctccaccaacgccagtgaccatgccttgctgagcgaggtgatacaactgatgcagtatgtcatctatggaattgcgtcctttttcttcttgtatgggatcattctgttggcagaaggcttttacaccacaagtgcagtgaaagaactgcacggtgagtttaaaacaaccgcttgtggccgatgcatcagtggaatgttcgttttcctcacctatgtgcttggagtggcctggctgggtgtgtttggtttctcagcggtgcccgtgtttatgttctacaacatatggtcaacttgtgaagtcatcaagtcaccgcagaccaacgggaccacgggtgtggagcagatctgtgtggatatccgacaatacggtatcattccttggaatgctttccccggaaaaatatgtggctctgccctggagaacatctgcaacacaaacgagttctacatgtcctatcacctgttcattgtggcctgtgcaggagctggtgccaccgtcattgccctgctgatctacatgatggctactacatataactatgcggttttgaagtttaagagtcgggaagattgctgcactaaattctaaattgcataaggagttttagagagctatgctctgtagcatgaaatatcactgacactccagactaaagcagagtctaggtttctgcaattttgttacagtaatttgtaaatagctttagtaaactcaccttgcatggtagattaataagatgacttactgtacatgaattacacaataatgagatctggtggctatttccacattttgaaaaggattcagttatttactgacagtggtgagcatcctttttaaaataatgttctcatacttaaacattagagagcagtatctttaaatgaattattaacactttggaatacttacattttctgttatttttgattgcctgataaccagtttcaatgatgaaaatgaaaacaagtgctgaagatgaaatggaagagaaccgttttaatctggattttgttttgtcacacctggaaaatactttgcaaatatgttctaaattgaaaacaatttttttatgatcacatggttcactaccaaatgaccctcaaataagccagatgaaaatttgaagaaaaaggtcacccagttctctggaaaaaaaaaaaaaaaaaaaaaaaaaaggatttatatgtgggtagttttttttttggtacaacacaatcattctgttagagcccacaaaattggtaaccttaaattgtgtgttttggtaagtaataactaactgtttcctcatagctagttctcaagctgcatgtaagattttaacgggaagagaaaataggcctggacctgaaggtctcaaatatgttgagaagaaagtatgaactataaggaacttgagatgtagatttattttgcaggaaatacgaggaaaataggaaagaagtgtttgccgcatcaagtgtaaagaatgatactgaggatttttacattttatgaaatgaaataatggcatttacaaaatgaaaaatgtagtttcacaactaagttttgttaacagagactgcatgctttgcttatagttcttaattttggttttgacattcatttaattttttccatgttaaatatgtagtttaattatttactcaaaataaacattgttcatgcttttaggcctttgggggaattgatttttatccacaggtagaaaatggtctttgcacacactacacttatttcaaatatacaatgtgctcccgaactttcgcattagtctttaaaattactctcaaaatggtattaaaaaaaaaaaaaaaagcaccctctcgtatttcatttttgctttttcttaacaatacctttggccatttttttccagttcactatgtttgtatactaacttttcttcagccttttaatgcgaagccaactagtagagcatgctttcaggatctgacagctctgctagtagagcgagtatttattaatacagaattaaccttcgcccctttaaagtcaagtctgtctaatctaactagcgcctcgctttgccttctcacaatgctcactagccatcatgctcacccttctcttccagatccacttcctcatgatactgtcttctaactgggcttacttaaaggatgcgagcaaaatgcaggcttaccaggatatcaaagcaaaggaagaacaggaactgcaagatatccagtctcggtcaaaagaacaactcaattcttacacataaatgtttgccagagtgtttcggccgacgtatttacagctctgacaaatcatcagacagctgctctgcagtacagatgtgtatcccaccaaactaatgtagatgtacaaacacttcactgtctgtctcaagctgctgggatgtatctctaggaaaaccttccagtgggtaaatctttttctttagaacaaatattggaggtttcatgttagccattttaaaaggcaacactttgacaaaatgatcgttcatactttgggaatttgtggcatgttcacatttattgctagggcaattctaccaagacactcaatggaatatgtcacactccttaatagggacctgtgactccttaataaggacctgtgacatgcccagcatcaagggataagaccgtaaattcacatatatgccatctgtcctcaagtgttatctacataggaaataaaatggaattgatgtaaagttccatttctgacagctgacatttattaaactttggatcaaagataatgtgattcttatgattgatttctcaaactagcttttccctcccaagtccaggacccattaatttcctgagccaatcagaaatatatttttcaataatgctaaaattagctacaattctgctgaccctactattaaagaatctggatgctggactcactgacaagctttccagaagcaattttataacagatttcattttaacaaaatactgatccaattttcattattcttgagaaatgtcagctttgccttaatgagtatttgctttaaatttctaagaatttatatcataactagagacccaaatatctttcacagaattttgttccataaatgtttttcttaattattaagaagtgttaccttattaaaatgaccaccattctaaaccatttttcagtggtctggatacgaagtttacagtttcataccaactatctaaaacctaattgcaaattgaccacagacctctaacctcctacttttatagacttgaatacttaagtaatttaaattagggttggtatttcatttttttcttatctaaatcttagtttcctggaataataaagtttgatgttcagcaagagaactgcttgagtttaagccattttcaaaagaaacttgccttttacattattgtgttccagaacattaagtgactgtaggtactgggtattagtgatggtaaactttgtgttgctctttatgaaatgatccatataactgttgggtgcatcagtgcttttcaaaggggctgcttactatagggttaactatgtatattcattgttaagagttaacttgtggtttggctgtttcctggattttataacatacatgtgcagaaatgtattcaaatgaaaggaagcatacctttatcaagatgctattaaaattgaacatcaagtataat

SEQ ID NO: 12263 - protein, 265 aa, Homo sapiens; identical to SEQ ID NO: 2055

SEQ ID NO: 12264 - DNA, 4478 bp, Homo sapiens
gaattaattagcattcattgggtgtacttggctagaagaaatgaggtggggagaaagagagagagagagagagatcgagattgagatcttaagaaagagagcaaggaggaagagcccggtggggagcaggtccttctcccccacccccctacccccaactcccactggagccgcattgagactgtaggcaccaccgggcgccgaatggctgttttctaactgggatcctcggtgacgtatggctgcctgccccttggcagctgtctttatggaccagtaggcagagcgaaattgacgctgacaagacttttgcatcttggaagggactgtaatctactgtagtgaagaacagagcctctcaatcagacgggtgtaaataagagacggaggggagtccaaaagaaaaggaagaggaggaaaaacaagtgtgtgttggggggaacagggggaaaagcatttttggtggatggtatgaagccagccatggaaactgcagccgaggaaaatactgaacaaagccaagagagaaaagtgaacagcagagctgaaatggaaattggcaggtaccactggatgtacccaggctcaaagaaccaccagtaccatcccgtgccaaccctgggggacagggctagccccttgagcagtccaggctgctttgaatgctgcatcaagtgtctgggaggagtcccctacgcctccctggtggccaccatcctctgcttctccggggtggccttattctgcggctgtgggcatgtggctctcgcaggcaccgtggcgattcttgagcaacacttctccaccaacgccagtgaccatgccttgctgagcgaggtgatacaactgatgcagtatgtcatctatggaattgcgtcctttttcttcttgtatgggatcattctgttggcagaaggcttttacaccacaagtgcagtgaaagaactgcacggtgagtttaaaacaaccgcttgtggccgatgcatcagtggaatgttcgttttcctcacctatgtgcttggagtggcctggctgggtgtgtttggtttctcagcggtgcccgtgtttatgttctacaacatatggtcaacttgtgaagtcatcaagtcaccgcagaccaacgggaccacgggtgtggagcagatctgtgtggatatccgacaatacggtatcattccttggaatgctttccccggaaaaatatgtggctctgccctggagaacatctgcaacacaaacgagttctacatgtcctatcacctgttcattgtggcctgtgcaggagctggtgccaccgtcattgccctgctgatctacatgatggctactacatataactatgcggttttgaagtttaagagtcgggaagattgctgcactaaattctaaattgcataaggagttttagagagctatgctctgtagcatgaaatatcactgacactccagactaaagcagagtctaggtttctgcaattttgttacagtaatttgtaaatagctttagtaaactcaccttgcatggtagattaataagatgacttactgtacatgaattacacaataatgagatctggtggctatttccacattttgaaaaggattcagttatttactgacagtggtgagcatcctttttaaaataatgttctcatacttaaacattagagagcagtatctttaaatgaattattaacactttggaatacttacattttctgttatttttgattgcctgataaccagtttcaatgatgaaaatgaaaacaagtgctgaagatgaaatggaagagaaccgttttaatctggattttgttttgtcacacctggaaaatactttgcaaatatgttctaaattgaaaacaatttttttatgatcacatggttcactaccaaatgaccctcaaataagccagatgaaaatttgaagaaaaaggtcacccagttctctggaaaaaaaaaaaaaaaaaaaaaaaaaaggatttatatgtgggtagttttttttttggtacaacacaatcattctgttagagcccacaaaattggtaaccttaaattgtgtgttttggtaagtaataactaactgtttcctcatagctagttctcaagctgcatgtaagattttaacgggaagagaaaataggcctggacctgaaggtctcaaatatgttgagaagaaagtatgaactataaggaacttgagatgtagatttattttgcaggaaatacgaggaaaataggaaagaagtgtttgccgcatcaagtgtaaagaatgatactgaggatttttacattttatgaaatgaaataatggcatttacaaaatgaaaaatgtagtttcacaactaagttttgttaacagagactgcatgctttgcttatagttcttaattttggttttgacattcatttaattttttccatgttaaatatgtagtttaattatttactcaaaataaacattgttcatgcttttaggcctttgggggaattgatttttatccacaggtagaaaatggtctttgcacacactacacttatttcaaatatacaatgtgctcccgaactttcgcattagtctttaaaattactctcaaaatggtattaaaaaaaaaaaaaaaagcaccctctcgtatttcatttttgctttttcttaacaatacctttggccatttttttccagttcactatgtttgtatactaacttttcttcagccttttaatgcgaagccaactagtagagcatgctttcaggatctgacagctctgctagtagagcgagtatttattaatacagaattaaccttcgcccctttaaagtcaagtctgtctaatctaactagcgcctcgctttgccttctcacaatgctcactagccatcatgctcacccttctcttccagatccacttcctcatgatactgtcttctaactgggcttacttaaaggatgcgagcaaaatgcaggcttaccaggatatcaaagcaaaggaagaacaggaactgcaagatatccagtctcggtcaaaagaacaactcaattcttacacataaatgtttgccagagtgtttcggccgacgtatttacagctctgacaaatcatcagacagctgctctgcagtacagatgtgtatcccaccaaactaatgtagatgtacaaacacttcactgtctgtctcaagctgctgggatgtatctctaggaaaaccttccagtgggtaaatctttttctttagaacaaatattggaggtttcatgttagccattttaaaaggcaacactttgacaaaatgatcgttcatactttgggaatttgtggcatgttcacatttattgctagggcaattctaccaagacactcaatggaatatgtcacactccttaatagggacctgtgactccttaataaggacctgtgacatgcccagcatcaagggataagaccgtaaattcacatatatgccatctgtcctcaagtgttatctacataggaaataaaatggaattgatgtaaagttccatttctgacagctgacatttattaaactttggatcaaagataatgtgattcttatgattgatttctcaaactagcttttccctcccaagtccaggacccattaatttcctgagccaatcagaaatatatttttcaataatgctaaaattagctacaattctgctgaccctactattaaagaatctggatgctggactcactgacaagctttccagaagcaattttataacagatttcattttaacaaaatactgatccaattttcattattcttgagaaatgtcagctttgccttaatgagtatttgctttaaatttctaagaatttatatcataactagagacccaaatatctttcacagaattttgttccataaatgtttttcttaattattaagaagtgttaccttattaaaatgaccaccattctaaaccatttttcagtggtctggatacgaagtttacagtttcataccaactatctaaaacctaattgcaaattgaccacagacctctaacctcctacttttatagacttgaatacttaagtaatttaaattagggttggtatttcatttttttcttatctaaatcttagtttcctggaataataaagtttgatgttcagcaagagaactgcttgagtttaagccattttcaaaagaaacttgccttttacattattgtgttccagaacattaagtgactgtaggtactgggtattagtgatggtaaactttgtgttgctctttatgaaatgatccatataactgttgggtgcatcagtgcttttcaaaggggctgcttactatagggttaactatgtatattcattgttaagagttaacttgtggtttggctgtttcctggattttataacatacatgtgcagaaatgtattcaaatgaaaggaagcatacctttatcaagatgctattaaaattgaacatcaagtataat

SEQ ID NO: 12265 - protein, 305 aa, Homo sapiens; identical to SEQ ID NO: 2053

SEQ ID NO: 12266 - DNA, 3987 bp, Homo sapiens
aaccatatgcttgcctgcatctaatgtgaaaccatccctgctccatgttcttagcatcctaggttcgtttccttcttggcactcaccgtggcttgaaatcacatggatttatgtgattatttgagtatgcctttccccactaaactgtcagcttcatgaaggctgctttgaatgctgcatcaagtgtctgggaggagtcccctacgcctccctggtggccaccatcctctgcttctccggggtggccttattctgcggctgtgggcatgtggctctcgcaggcaccgtggcgattcttgagcaacacttctccaccaacgccagtgaccatgccttgctgagcgaggtgatacaactgatgcagtatgtcatctatggaattgcgtcctttttcttcttgtatgggatcattctgttggcagaaggcttttacaccacaagtgcagtgaaagaactgcacggtgagtttaaaacaaccgcttgtggccgatgcatcagtggaatgttcgttttcctcacctatgtgcttggagtggcctggctgggtgtgtttggtttctcagcggtgcccgtgtttatgttctacaacatatggtcaacttgtgaagtcatcaagtcaccgcagaccaacgggaccacgggtgtggagcagatctgtgtggatatccgacaatacggtatcattccttggaatgctttccccggaaaaatatgtggctctgccctggagaacatctgcaacacaaacgagttctacatgtcctatcacctgttcattgtggcctgtgcaggagctggtgccaccgtcattgccctgctgatctacatgatggctactacatataactatgcggttttgaagtttaagagtcgggaagattgctgcactaaattctaaattgcataaggagttttagagagctatgctctgtagcatgaaatatcactgacactccagactaaagcagagtctaggtttctgcaattttgttacagtaatttgtaaatagctttagtaaactcaccttgcatggtagattaataagatgacttactgtacatgaattacacaataatgagatctggtggctatttccacattttgaaaaggattcagttatttactgacagtggtgagcatcctttttaaaataatgttctcatacttaaacattagagagcagtatctttaaatgaattattaacactttggaatacttacattttctgttatttttgattgcctgataaccagtttcaatgatgaaaatgaaaacaagtgctgaagatgaaatggaagagaaccgttttaatctggattttgttttgtcacacctggaaaatactttgcaaatatgttctaaattgaaaacaatttttttatgatcacatggttcactaccaaatgaccctcaaataagccagatgaaaatttgaagaaaaaggtcacccagttctctggaaaaaaaaaaaaaaaaaaaaaaaaaaggatttatatgtgggtagttttttttttggtacaacacaatcattctgttagagcccacaaaattggtaaccttaaattgtgtgttttggtaagtaataactaactgtttcctcatagctagttctcaagctgcatgtaagattttaacgggaagagaaaataggcctggacctgaaggtctcaaatatgttgagaagaaagtatgaactataaggaacttgagatgtagatttattttgcaggaaatacgaggaaaataggaaagaagtgtttgccgcatcaagtgtaaagaatgatactgaggatttttacattttatgaaatgaaataatggcatttacaaaatgaaaaatgtagtttcacaactaagttttgttaacagagactgcatgctttgcttatagttcttaattttggttttgacattcatttaattttttccatgttaaatatgtagtttaattatttactcaaaataaacattgttcatgcttttaggcctttgggggaattgatttttatccacaggtagaaaatggtctttgcacacactacacttatttcaaatatacaatgtgctcccgaactttcgcattagtctttaaaattactctcaaaatggtattaaaaaaaaaaaaaaaagcaccctctcgtatttcatttttgctttttcttaacaatacctttggccatttttttccagttcactatgtttgtatactaacttttcttcagccttttaatgcgaagccaactagtagagcatgctttcaggatctgacagctctgctagtagagcgagtatttattaatacagaattaaccttcgcccctttaaagtcaagtctgtctaatctaactagcgcctcgctttgccttctcacaatgctcactagccatcatgctcacccttctcttccagatccacttcctcatgatactgtcttctaactgggcttacttaaaggatgcgagcaaaatgcaggcttaccaggatatcaaagcaaaggaagaacaggaactgcaagatatccagtctcggtcaaaagaacaactcaattcttacacataaatgtttgccagagtgtttcggccgacgtatttacagctctgacaaatcatcagacagctgctctgcagtacagatgtgtatcccaccaaactaatgtagatgtacaaacacttcactgtctgtctcaagctgctgggatgtatctctaggaaaaccttccagtgggtaaatctttttctttagaacaaatattggaggtttcatgttagccattttaaaaggcaacactttgacaaaatgatcgttcatactttgggaatttgtggcatgttcacatttattgctagggcaattctaccaagacactcaatggaatatgtcacactccttaatagggacctgtgactccttaataaggacctgtgacatgcccagcatcaagggataagaccgtaaattcacatatatgccatctgtcctcaagtgttatctacataggaaataaaatggaattgatgtaaagttccatttctgacagctgacatttattaaactttggatcaaagataatgtgattcttatgattgatttctcaaactagcttttccctcccaagtccaggacccattaatttcctgagccaatcagaaatatatttttcaataatgctaaaattagctacaattctgctgaccctactattaaagaatctggatgctggactcactgacaagctttccagaagcaattttataacagatttcattttaacaaaatactgatccaattttcattattcttgagaaatgtcagctttgccttaatgagtatttgctttaaatttctaagaatttatatcataactagagacccaaatatctttcacagaattttgttccataaatgtttttcttaattattaagaagtgttaccttattaaaatgaccaccattctaaaccatttttcagtggtctggatacgaagtttacagtttcataccaactatctaaaacctaattgcaaattgaccacagacctctaacctcctacttttatagacttgaatacttaagtaatttaaattagggttggtatttcatttttttcttatctaaatcttagtttcctggaataataaagtttgatgttcagcaagagaactgcttgagtttaagccattttcaaaagaaacttgccttttacattattgtgttccagaacattaagtgactgtaggtactgggtattagtgatggtaaactttgtgttgctctttatgaaatgatccatataactgttgggtgcatcagtgcttttcaaaggggctgcttactatagggttaactatgtatattcattgttaagagttaacttgtggtttggctgtttcctggattttataacatacatgtgcagaaatgtattcaaatgaaaggaagcatacctttatcaagatgctattaaaattgaacatcaagtataat

SEQ ID NO: 12267 - protein, 179 aa, Homo sapiens; identical to SEQ ID NO: 12241

SEQ ID NO: 12268 - DNA, 2349 bp, Homo sapiens
gcccttccgagggtcccgcccctcccccgctcaggtggcgcctcctcggccacctctgcgacgaagccgggacgctggaggtgggaggggcgcggcgcaggtgtccggaacgcccaggctgctttgaatgctgcatcaagtgtctgggaggagtcccctacgcctccctggtggccaccatcctctgcttctccggggtggccttattctgcggctgtgggcatgtggctctcgcaggcaccgtggcgattcttgagcaacacttctccaccaacgccagtgaccatgccttgctgagcgaggtgatacaactgatgcagtatgtcatctatggaattgcgtcctttttcttcttgtatgggatcattctgttggcagaaggcttttacaccacaagtgcagtgaaagaactgcacggtgagtttaaaacaaccgcttgtggccgatgcatcagtggaatgttcgttttcctcacctatgtgcttggagtggcctggctgggtgtgtttggtttctcagcggtgcccgtgtttatgttctacaacatatggtcaacttgtgaagtcatcaagtcaccgcagaccaacgggaccacgggtgtggagcagatctgtgtggatatccgacaatacggtatcattccttggaatgctttccccggaaaaatatgtggctctgccctggagaacatctgcaacacaaacgagttctacatgtcctatcacctgttcattgtggcctgtgcaggagctggtgccaccgtcattgccctgatccacttcctcatgatactgtcttctaactgggcttacttaaaggatgcgagcaaaatgcaggcttaccaggatatcaaagcaaaggaagaacaggaactgcaagatatccagtctcggtcaaaagaacaactcaattcttacacataaatgtttgccagagtgtttcggccgacgtatttacagctctgacaaatcatcagacagctgctctgcagtacagatgtgtatcccaccaaactaatgtagatgtacaaacacttcactgtctgtctcaagctgctgggatgtatctctaggaaaaccttccagtgggtaaatctttttctttagaacaaatattggaggtttcatgttagccattttaaaaggcaacactttgacaaaatgatcgttcatactttgggaatttgtggcatgttcacatttattgctagggcaattctaccaagacactcaatggaatatgtcacactccttaatagggacctgtgactccttaataaggacctgtgacatgcccagcatcaagggataagaccgtaaattcacatatatgccatctgtcctcaagtgttatctacataggaaataaaatggaattgatgtaaagttccatttctgacagctgacatttattaaactttggatcaaagataatgtgattcttatgattgatttctcaaactagcttttccctcccaagtccaggacccattaatttcctgagccaatcagaaatatatttttcaataatgctaaaattagctacaattctgctgaccctactattaaagaatctggatgctggactcactgacaagctttccagaagcaattttataacagatttcattttaacaaaatactgatccaattttcattattcttgagaaatgtcagctttgccttaatgagtatttgctttaaatttctaagaatttatatcataactagagacccaaatatctttcacagaattttgttccataaatgtttttcttaattattaagaagtgttaccttattaaaatgaccaccattctaaaccatttttcagtggtctggatacgaagtttacagtttcataccaactatctaaaacctaattgcaaattgaccacagacctctaacctcctacttttatagacttgaatacttaagtaatttaaattagggttggtatttcatttttttcttatctaaatcttagtttcctggaataataaagtttgatgttcagcaagagaactgcttgagtttaagccattttcaaaagaaacttgccttttacattattgtgttccagaacattaagtgactgtaggtactgggtattagtgatggtaaactttgtgttgctctttatgaaatgatccatataactgttgggtgcatcagtgcttttcaaaggggctgcttactatagggttaactatgtatattcattgttaagagttaacttgtggtttggctgtttcctggattttataacatacatgtgcagaaatgtattcaaatgaaaggaagcatacctttatcaagatgctattaaaattgaacatcaagtataat

SEQ ID NO: 12269 - protein, 202 aa, Homo sapiens; identical to SEQ ID NO: 12243

SEQ ID NO: 12270 - DNA, 3855 bp, Homo sapiens
agctttgcctgcagactccgcgcgcccgctgcccccaatcgggccctagctccgggcgcacaaagcccccggcgctgacgtcagggcccctctccgcgcggccggcccccagtgcaggcggagccgcgccgcgctcccaccccggccgggagctaggagccagcggccagccccgcgcagcgcagcgcagcccgcagaagcccggtcagcgcacgtgcccgcgagacctgcaaacttgtgccaccggctctgcccgtccccggggagcccgaacgccccgcagccctcacccctcccgccagtctccagccatgggctgctttgaatgctgcatcaagtgtctgggaggagtcccctacgcctccctggtggccaccatcctctgcttctccggggtggccttattctgcggctgtgggcatgtggctctcgcaggcaccgtggcgattcttgaaacatatggtcaacttgtgaagtcatcaagtcaccgcagaccaacgggaccacgggtgtggagcagatctgtgtggatatccgacaatacggtatcattccttggaatgctttccccggaaaaatatgtggctctgccctggagaacatctgcaacacaaacgagttctacatgtcctatcacctgttcattgtggcctgtgcaggagctggtgccaccgtcattgccctgctgatctacatgatggctactacatataactatgcggttttgaagtttaagagtcgggaagattgctgcactaaattctaaattgcataaggagttttagagagctatgctctgtagcatgaaatatcactgacactccagactaaagcagagtctaggtttctgcaattttgttacagtaatttgtaaatagctttagtaaactcaccttgcatggtagattaataagatgacttactgtacatgaattacacaataatgagatctggtggctatttccacattttgaaaaggattcagttatttactgacagtggtgagcatcctttttaaaataatgttctcatacttaaacattagagagcagtatctttaaatgaattattaacactttggaatacttacattttctgttatttttgattgcctgataaccagtttcaatgatgaaaatgaaaacaagtgctgaagatgaaatggaagagaaccgttttaatctggattttgttttgtcacacctggaaaatactttgcaaatatgttctaaattgaaaacaatttttttatgatcacatggttcactaccaaatgaccctcaaataagccagatgaaaatttgaagaaaaaggtcacccagttctctggaaaaaaaaaaaaaaaaaaaaaaaaaaggatttatatgtgggtagttttttttttggtacaacacaatcattctgttagagcccacaaaattggtaaccttaaattgtgtgttttggtaagtaataactaactgtttcctcatagctagttctcaagctgcatgtaagattttaacgggaagagaaaataggcctggacctgaaggtctcaaatatgttgagaagaaagtatgaactataaggaacttgagatgtagatttattttgcaggaaatacgaggaaaataggaaagaagtgtttgccgcatcaagtgtaaagaatgatactgaggatttttacattttatgaaatgaaataatggcatttacaaaatgaaaaatgtagtttcacaactaagttttgttaacagagactgcatgctttgcttatagttcttaattttggttttgacattcatttaattttttccatgttaaatatgtagtttaattatttactcaaaataaacattgttcatgcttttaggcctttgggggaattgatttttatccacaggtagaaaatggtctttgcacacactacacttatttcaaatatacaatgtgctcccgaactttcgcattagtctttaaaattactctcaaaatggtattaaaaaaaaaaaaaaaagcaccctctcgtatttcatttttgctttttcttaacaatacctttggccatttttttccagttcactatgtttgtatactaacttttcttcagccttttaatgcgaagccaactagtagagcatgctttcaggatctgacagctctgctagtagagcgagtatttattaatacagaattaaccttcgcccctttaaagtcaagtctgtctaatctaactagcgcctcgctttgccttctcacaatgctcactagccatcatgctcacccttctcttccagatccacttcctcatgatactgtcttctaactgggcttacttaaaggatgcgagcaaaatgcaggcttaccaggatatcaaagcaaaggaagaacaggaactgcaagatatccagtctcggtcaaaagaacaactcaattcttacacataaatgtttgccagagtgtttcggccgacgtatttacagctctgacaaatcatcagacagctgctctgcagtacagatgtgtatcccaccaaactaatgtagatgtacaaacacttcactgtctgtctcaagctgctgggatgtatctctaggaaaaccttccagtgggtaaatctttttctttagaacaaatattggaggtttcatgttagccattttaaaaggcaacactttgacaaaatgatcgttcatactttgggaatttgtggcatgttcacatttattgctagggcaattctaccaagacactcaatggaatatgtcacactccttaatagggacctgtgactccttaataaggacctgtgacatgcccagcatcaagggataagaccgtaaattcacatatatgccatctgtcctcaagtgttatctacataggaaataaaatggaattgatgtaaagttccatttctgacagctgacatttattaaactttggatcaaagataatgtgattcttatgattgatttctcaaactagcttttccctcccaagtccaggacccattaatttcctgagccaatcagaaatatatttttcaataatgctaaaattagctacaattctgctgaccctactattaaagaatctggatgctggactcactgacaagctttccagaagcaattttataacagatttcattttaacaaaatactgatccaattttcattattcttgagaaatgtcagctttgccttaatgagtatttgctttaaatttctaagaatttatatcataactagagacccaaatatctttcacagaattttgttccataaatgtttttcttaattattaagaagtgttaccttattaaaatgaccaccattctaaaccatttttcagtggtctggatacgaagtttacagtttcataccaactatctaaaacctaattgcaaattgaccacagacctctaacctcctacttttatagacttgaatacttaagtaatttaaattagggttggtatttcatttttttcttatctaaatcttagtttcctggaataataaagtttgatgttcagcaagagaactgcttgagtttaagccattttcaaaagaaacttgccttttacattattgtgttccagaacattaagtgactgtaggtactgggtattagtgatggtaaactttgtgttgctctttatgaaatgatccatataactgttgggtgcatcagtgcttttcaaaggggctgcttactatagggttaactatgtatattcattgttaagagttaacttgtggtttggctgtttcctggattttataacatacatgtgcagaaatgtattcaaatgaaaggaagcatacctttatcaagatgctattaaaattgaacatcaagtataat

SEQ ID NO: 12271 - protein, 125 aa, Homo sapiens; identical to SEQ ID NO: 12245

SEQ ID NO: 12272 - DNA, 4144 bp, Homo sapiens
gcgagctttgcctgcagactccgcgcgcccgctgcccccaatcgggccctagctccgggcgcacaaagcccccggcgctgacgtcagggcccctctccgcgcggccggcccccagtgcaggcggagccgcgccgcgctcccaccccggccgggagctaggagccagcggccagccccgcgcagcgcagcgcagcccgcagaagcccggtcagcgcacgtgcccgcgagacctgcaaacttgtgccaccggctctgcccgtccccggggagcccgaacgccccgcagccctcacccctcccgccagtctccagccatgggctgctttgaatgctgcatcaagtgtctgggaggagtcccctacgcctccctggtggccaccatcctctgcttctccggggtggccttattctgcggctgtgggcatgtggctctcgcaggcaccgtggcgattcttgagcaacacttctccaccaacgccagtgaccatgccttgctgagcgaggtgatacaactgatgcagtatgtcatctatggaattgcgtcctttttcttcttgtatgggatcattctgttggcagaaggcttttacaccacaagtgcagtgaaagaactgcacggtgagtttaaaacaaccgcttgtggccgatgcatcagtggaatgttcgttttcctcacctatgtgcttggagtggcctggctgggtgtgtttggtttctcagcggtgcccgtgtttatgttctacaacatatggtcaacttgtgaagtcatcaagtcaccgcagaccaacgggaccacgggtgtggagcagatctgtgtggatatccgacaatacggtatcattccttggaatgctttccccggaaaaatatgtggctctgccctggagaacatctgcaacacaaacgagttctacatgtcctatcacctgttcattgtggcctgtgcaggagctggtgccaccgtcattgccctgctgatctacatgatggctactacatataactatgcggttttgaagtttaagagtcgggaagattgctgcactaaattctaaattgcataaggagttttagagagctatgctctgtagcatgaaatatcactgacactccagactaaagcagagtctaggtttctgcaattttgttacagtaatttgtaaatagctttagtaaactcaccttgcatggtagattaataagatgacttactgtacatgaattacacaataatgagatctggtggctatttccacattttgaaaaggattcagttatttactgacagtggtgagcatcctttttaaaataatgttctcatacttaaacattagagagcagtatctttaaatgaattattaacactttggaatacttacattttctgttatttttgattgcctgataaccagtttcaatgatgaaaatgaaaacaagtgctgaagatgaaatggaagagaaccgttttaatctggattttgttttgtcacacctggaaaatactttgcaaatatgttctaaattgaaaacaatttttttatgatcacatggttcactaccaaatgaccctcaaataagccagatgaaaatttgaagaaaaaggtcacccagttctctggaaaaaaaaaaaaaaaaaaaaaaaaaaggatttatatgtgggtagttttttttttggtacaacacaatcattctgttagagcccacaaaattggtaaccttaaattgtgtgttttggtaagtaataactaactgtttcctcatagctagttctcaagctgcatgtaagattttaacgggaagagaaaataggcctggacctgaaggtctcaaatatgttgagaagaaagtatgaactataaggaacttgagatgtagatttattttgcaggaaatacgaggaaaataggaaagaagtgtttgccgcatcaagtgtaaagaatgatactgaggatttttacattttatgaaatgaaataatggcatttacaaaatgaaaaatgtagtttcacaactaagttttgttaacagagactgcatgctttgcttatagttcttaattttggttttgacattcatttaattttttccatgttaaatatgtagtttaattatttactcaaaataaacattgttcatgcttttaggcctttgggggaattgatttttatccacaggtagaaaatggtctttgcacacactacacttatttcaaatatacaatgtgctcccgaactttcgcattagtctttaaaattactctcaaaatggtattaaaaaaaaaaaaaaaagcaccctctcgtatttcatttttgctttttcttaacaatacctttggccatttttttccagttcactatgtttgtatactaacttttcttcagccttttaatgcgaagccaactagtagagcatgctttcaggatctgacagctctgctagtagagcgagtatttattaatacagaattaaccttcgcccctttaaagtcaagtctgtctaatctaactagcgcctcgctttgccttctcacaatgctcactagccatcatgctcacccttctcttccagatccacttcctcatgatactgtcttctaactgggcttacttaaaggatgcgagcaaaatgcaggcttaccaggatatcaaagcaaaggaagaacaggaactgcaagatatccagtctcggtcaaaagaacaactcaattcttacacataaatgtttgccagagtgtttcggccgacgtatttacagctctgacaaatcatcagacagctgctctgcagtacagatgtgtatcccaccaaactaatgtagatgtacaaacacttcactgtctgtctcaagctgctgggatgtatctctaggaaaaccttccagtgggtaaatctttttctttagaacaaatattggaggtttcatgttagccattttaaaaggcaacactttgacaaaatgatcgttcatactttgggaatttgtggcatgttcacatttattgctagggcaattctaccaagacactcaatggaatatgtcacactccttaatagggacctgtgactccttaataaggacctgtgacatgcccagcatcaagggataagaccgtaaattcacatatatgccatctgtcctcaagtgttatctacataggaaataaaatggaattgatgtaaagttccatttctgacagctgacatttattaaactttggatcaaagataatgtgattcttatgattgatttctcaaactagcttttccctcccaagtccaggacccattaatttcctgagccaatcagaaatatatttttcaataatgctaaaattagctacaattctgctgaccctactattaaagaatctggatgctggactcactgacaagctttccagaagcaattttataacagatttcattttaacaaaatactgatccaattttcattattcttgagaaatgtcagctttgccttaatgagtatttgctttaaatttctaagaatttatatcataactagagacccaaatatctttcacagaattttgttccataaatgtttttcttaattattaagaagtgttaccttattaaaatgaccaccattctaaaccatttttcagtggtctggatacgaagtttacagtttcataccaactatctaaaacctaattgcaaattgaccacagacctctaacctcctacttttatagacttgaatacttaagtaatttaaattagggttggtatttcatttttttcttatctaaatcttagtttcctggaataataaagtttgatgttcagcaagagaactgcttgagtttaagccattttcaaaagaaacttgccttttacattattgtgttccagaacattaagtgactgtaggtactgggtattagtgatggtaaactttgtgttgctctttatgaaatgatccatataactgttgggtgcatcagtgcttttcaaaggggctgcttactatagggttaactatgtatattcattgttaagagttaacttgtggtttggctgtttcctggattttataacatacatgtgcagaaatgtattcaaatgaaaggaagcatacctttatcaagatgctattaaaattgaacatcaagtataat

SEQ ID NO: 12273 - protein, 246 aa, Homo sapiens; identical to SEQ ID NO: 2049

SEQ ID NO: 12274 - DNA, 1719 bp, Homo sapiens
gaaagagagagagagagagagatcgagattgagatcttaagaaagagagcaaggaggaagagcccgactgtaggcaccaccgggcgccgaatggctgttttctaactgggatcctcggtgacgtatggctgcctgccccttggcagctgtctttatggaccagtaggcagagcgaaattgacgctgacaagacttttgcatcttggaagggactgtaatctactgtagtgaagaacagagcctctcaatcagacgggtgtaaataagagacggaggggagtccaaaagaaaaggaagaggaggaaaaacaagtgtgtgttggggggaacagggggaaaagcatttttggtggatggtatgaagccagccatggaaactgcagccgaggaaaatactgaacaaagccaagagagaaaaggctgctttgaatgctgcatcaagtgtctgggaggagtcccctacgcctccctggtggccaccatcctctgcttctccggggtggccttattctgcggctgtgggcatgtggctctcgcaggcaccgtggcgattcttgagcaacacttctccaccaacgccagtgaccatgccttgctgagcgaggtgatacaactgatgcagtatgtcatctatggaattgcgtcctttttcttcttgtatgggatcattctgttggcagaaggcttttacaccacaagtgcagtgaaagaactgcacggtgagtttaaaacaaccgcttgtggccgatgcatcagtggaatgttcgttttcctcacctatgtgcttggagtggcctggctgggtgtgtttggtttctcagcggtgcccgtgtttatgttctacaacatatggtcaacttgtgaagtcatcaagtcaccgcagaccaacgggaccacgggtgtggagcagatctgtgtggatatccgacaatacggtatcattccttggaatgctttccccggaaaaatatgtggctctgccctggagaacatctgcaacacaaacgagttctacatgtcctatcacctgttcattgtggcctgtgcaggagctggtgccaccgtcattgccctgctgatctacatgatggctactacatataactatgcggttttgaagtttaagagtcgggaagattgctgcactaaattctaaattgcataaggagttttagagagctatgctctgtagcatgaaatatcactgacactccagactaaagcagagtctaggtttctgcaattttgttacagtaatttgtaaatagctttagtaaactcaccttgcatggtagattaataagatgacttactgtacatgaattacacaataatgagatctggtggctatttccacattttgaaaaggattcagttatttactgacagtggtgagcatcctttttaaaataatgttctcatacttaaacattagagagcagtatctttaaatgaattattaacactttggaatacttacattttctgttatttttgattgcctgataaccagtttcaatgatgaaaatgaaaacaagtgctgaagatgaaatggaagagaaccgttttaatctggattttgttttgtcacacctggaaaatactttgcaaatatgttctaaattgaaaacaatttttttatgatcacatggttcactaccaaatgaccctcaaataagccagatgaaaatttgaagaaaaaggtcacccagttctctgg

SEQ ID NO: 12275 - protein, 265 aa, Homo sapiens; identical to SEQ ID NO: 2055

SEQ ID NO: 12276 - DNA, 1953 bp, Homo sapiens
gaattaattagcattcattgggtgtacttggctagaagaaatgaggtggggagaaagagagagagagagagagatcgagattgagatcttaagaaagagagcaaggaggaagagcccggtggggagcaggtccttctcccccacccccctacccccaactcccactggagccgcattgagactgtaggcaccaccgggcgccgaatggctgttttctaactgggatcctcggtgacgtatggctgcctgccccttggcagctgtctttatggaccagtaggcagagcgaaattgacgctgacaagacttttgcatcttggaagggactgtaatctactgtagtgaagaacagagcctctcaatcagacgggtgtaaataagagacggaggggagtccaaaagaaaaggaagaggaggaaaaacaagtgtgtgttggggggaacagggggaaaagcatttttggtggatggtatgaagccagccatggaaactgcagccgaggaaaatactgaacaaagccaagagagaaaagtgaacagcagagctgaaatggaaattggcaggtaccactggatgtacccaggctcaaagaaccaccagtaccatcccgtgccaaccctgggggacagggctagccccttgagcagtccaggctgctttgaatgctgcatcaagtgtctgggaggagtcccctacgcctccctggtggccaccatcctctgcttctccggggtggccttattctgcggctgtgggcatgtggctctcgcaggcaccgtggcgattcttgagcaacacttctccaccaacgccagtgaccatgccttgctgagcgaggtgatacaactgatgcagtatgtcatctatggaattgcgtcctttttcttcttgtatgggatcattctgttggcagaaggcttttacaccacaagtgcagtgaaagaactgcacggtgagtttaaaacaaccgcttgtggccgatgcatcagtggaatgttcgttttcctcacctatgtgcttggagtggcctggctgggtgtgtttggtttctcagcggtgcccgtgtttatgttctacaacatatggtcaacttgtgaagtcatcaagtcaccgcagaccaacgggaccacgggtgtggagcagatctgtgtggatatccgacaatacggtatcattccttggaatgctttccccggaaaaatatgtggctctgccctggagaacatctgcaacacaaacgagttctacatgtcctatcacctgttcattgtggcctgtgcaggagctggtgccaccgtcattgccctgctgatctacatgatggctactacatataactatgcggttttgaagtttaagagtcgggaagattgctgcactaaattctaaattgcataaggagttttagagagctatgctctgtagcatgaaatatcactgacactccagactaaagcagagtctaggtttctgcaattttgttacagtaatttgtaaatagctttagtaaactcaccttgcatggtagattaataagatgacttactgtacatgaattacacaataatgagatctggtggctatttccacattttgaaaaggattcagttatttactgacagtggtgagcatcctttttaaaataatgttctcatacttaaacattagagagcagtatctttaaatgaattattaacactttggaatacttacattttctgttatttttgattgcctgataaccagtttcaatgatgaaaatgaaaacaagtgctgaagatgaaatggaagagaaccgttttaatctggattttgttttgtcacacctggaaaatactttgcaaatatgttctaaattgaaaacaatttttttatgatcacatggttcactaccaaatgaccctcaaataagccagatgaaaatttgaagaaaaaggtcacccagttctctgg

SEQ ID NO: 12277 - protein, 305 aa, Homo sapiens; identical to SEQ ID NO: 2053

SEQ ID NO: 12278 - DNA, 1462 bp, Homo sapiens
aaccatatgcttgcctgcatctaatgtgaaaccatccctgctccatgttcttagcatcctaggttcgtttccttcttggcactcaccgtggcttgaaatcacatggatttatgtgattatttgagtatgcctttccccactaaactgtcagcttcatgaaggctgctttgaatgctgcatcaagtgtctgggaggagtcccctacgcctccctggtggccaccatcctctgcttctccggggtggccttattctgcggctgtgggcatgtggctctcgcaggcaccgtggcgattcttgagcaacacttctccaccaacgccagtgaccatgccttgctgagcgaggtgatacaactgatgcagtatgtcatctatggaattgcgtcctttttcttcttgtatgggatcattctgttggcagaaggcttttacaccacaagtgcagtgaaagaactgcacggtgagtttaaaacaaccgcttgtggccgatgcatcagtggaatgttcgttttcctcacctatgtgcttggagtggcctggctgggtgtgtttggtttctcagcggtgcccgtgtttatgttctacaacatatggtcaacttgtgaagtcatcaagtcaccgcagaccaacgggaccacgggtgtggagcagatctgtgtggatatccgacaatacggtatcattccttggaatgctttccccggaaaaatatgtggctctgccctggagaacatctgcaacacaaacgagttctacatgtcctatcacctgttcattgtggcctgtgcaggagctggtgccaccgtcattgccctgctgatctacatgatggctactacatataactatgcggttttgaagtttaagagtcgggaagattgctgcactaaattctaaattgcataaggagttttagagagctatgctctgtagcatgaaatatcactgacactccagactaaagcagagtctaggtttctgcaattttgttacagtaatttgtaaatagctttagtaaactcaccttgcatggtagattaataagatgacttactgtacatgaattacacaataatgagatctggtggctatttccacattttgaaaaggattcagttatttactgacagtggtgagcatcctttttaaaataatgttctcatacttaaacattagagagcagtatctttaaatgaattattaacactttggaatacttacattttctgttatttttgattgcctgataaccagtttcaatgatgaaaatgaaaacaagtgctgaagatgaaatggaagagaaccgttttaatctggattttgttttgtcacacctggaaaatactttgcaaatatgttctaaattgaaaacaatttttttatgatcacatggttcactaccaaatgaccctcaaataagccagatgaaaatttgaagaaaaaggtcacccagttctctgg

SEQ ID NO: 12279 - protein, 179 aa, Homo sapiens; identical to SEQ ID NO: 12241

SEQ ID NO: 12280 - DNA, 1330 bp, Homo sapiens
agctttgcctgcagactccgcgcgcccgctgcccccaatcgggccctagctccgggcgcacaaagcccccggcgctgacgtcagggcccctctccgcgcggccggcccccagtgcaggcggagccgcgccgcgctcccaccccggccgggagctaggagccagcggccagccccgcgcagcgcagcgcagcccgcagaagcccggtcagcgcacgtgcccgcgagacctgcaaacttgtgccaccggctctgcccgtccccggggagcccgaacgccccgcagccctcacccctcccgccagtctccagccatgggctgctttgaatgctgcatcaagtgtctgggaggagtcccctacgcctccctggtggccaccatcctctgcttctccggggtggccttattctgcggctgtgggcatgtggctctcgcaggcaccgtggcgattcttgaaacatatggtcaacttgtgaagtcatcaagtcaccgcagaccaacgggaccacgggtgtggagcagatctgtgtggatatccgacaatacggtatcattccttggaatgctttccccggaaaaatatgtggctctgccctggagaacatctgcaacacaaacgagttctacatgtcctatcacctgttcattgtggcctgtgcaggagctggtgccaccgtcattgccctgctgatctacatgatggctactacatataactatgcggttttgaagtttaagagtcgggaagattgctgcactaaattctaaattgcataaggagttttagagagctatgctctgtagcatgaaatatcactgacactccagactaaagcagagtctaggtttctgcaattttgttacagtaatttgtaaatagctttagtaaactcaccttgcatggtagattaataagatgacttactgtacatgaattacacaataatgagatctggtggctatttccacattttgaaaaggattcagttatttactgacagtggtgagcatcctttttaaaataatgttctcatacttaaacattagagagcagtatctttaaatgaattattaacactttggaatacttacattttctgttatttttgattgcctgataaccagtttcaatgatgaaaatgaaaacaagtgctgaagatgaaatggaagagaaccgttttaatctggattttgttttgtcacacctggaaaatactttgcaaatatgttctaaattgaaaacaatttttttatgatcacatggttcactaccaaatgaccctcaaataagccagatgaaaatttgaagaaaaaggtcacccagttctctgg

SEQ ID NO: 12281 - protein, 125 aa, Homo sapiens; identical to SEQ ID NO: 12245

SEQ ID NO: 12282 - DNA, 1619 bp, Homo sapiens
gcgagctttgcctgcagactccgcgcgcccgctgcccccaatcgggccctagctccgggcgcacaaagcccccggcgctgacgtcagggcccctctccgcgcggccggcccccagtgcaggcggagccgcgccgcgctcccaccccggccgggagctaggagccagcggccagccccgcgcagcgcagcgcagcccgcagaagcccggtcagcgcacgtgcccgcgagacctgcaaacttgtgccaccggctctgcccgtccccggggagcccgaacgccccgcagccctcacccctcccgccagtctccagccatgggctgctttgaatgctgcatcaagtgtctgggaggagtcccctacgcctccctggtggccaccatcctctgcttctccggggtggccttattctgcggctgtgggcatgtggctctcgcaggcaccgtggcgattcttgagcaacacttctccaccaacgccagtgaccatgccttgctgagcgaggtgatacaactgatgcagtatgtcatctatggaattgcgtcctttttcttcttgtatgggatcattctgttggcagaaggcttttacaccacaagtgcagtgaaagaactgcacggtgagtttaaaacaaccgcttgtggccgatgcatcagtggaatgttcgttttcctcacctatgtgcttggagtggcctggctgggtgtgtttggtttctcagcggtgcccgtgtttatgttctacaacatatggtcaacttgtgaagtcatcaagtcaccgcagaccaacgggaccacgggtgtggagcagatctgtgtggatatccgacaatacggtatcattccttggaatgctttccccggaaaaatatgtggctctgccctggagaacatctgcaacacaaacgagttctacatgtcctatcacctgttcattgtggcctgtgcaggagctggtgccaccgtcattgccctgctgatctacatgatggctactacatataactatgcggttttgaagtttaagagtcgggaagattgctgcactaaattctaaattgcataaggagttttagagagctatgctctgtagcatgaaatatcactgacactccagactaaagcagagtctaggtttctgcaattttgttacagtaatttgtaaatagctttagtaaactcaccttgcatggtagattaataagatgacttactgtacatgaattacacaataatgagatctggtggctatttccacattttgaaaaggattcagttatttactgacagtggtgagcatcctttttaaaataatgttctcatacttaaacattagagagcagtatctttaaatgaattattaacactttggaatacttacattttctgttatttttgattgcctgataaccagtttcaatgatgaaaatgaaaacaagtgctgaagatgaaatggaagagaaccgttttaatctggattttgttttgtcacacctggaaaatactttgcaaatatgttctaaattgaaaacaatttttttatgatcacatggttcactaccaaatgaccctcaaataagccagatgaaaatttgaagaaaaaggtcacccagttctctgg

SEQ ID NO: 12283 - protein, 246 aa, Homo sapiens; identical to SEQ ID NO: 2049

SEQ ID NO: 12284 - DNA, 324 bp, Homo sapiens
ggtgtgctgagcgggttccaatgcaacgggggaacgactagcaacggcaaaaggctcagctccggagggttaaaatctgaaatctccaacctggcccgaggctggtgtaaggcggctgtaggattctttttgtcacttcctaacaccctgaaatgctgccgtcagcaacatgtctttaagtggaggctgcagtgagccaatattgcagcactccactccagcctgggcgacagagcaagactgtctcaaaaaaaaaaaaaaacaaaccaatttgattttcagtccaaaaatattttctaatacgtttataagacataataaaaa

SEQ ID NO: 12285 - protein, 50 aa, Homo sapiens [sequence omitted]

SEQ ID NO: 12286 - DNA, 669 bp, Homo sapiens
gaattaattagcattcattgggtgtacttggctagaagaaatgaggtggggagaaagagagagagagagagagatcgagattgagatcttaagaaagagagcaaggaggaagagcccggtggggagcaggtccttctcccccacccccctacccccaactcccactggagccgcattgagactgtaggcaccaccgggcgccgaatggctgttttctaactgggatcctcggtgacgtatggctgcctgccccttggcagctgtctttatggaccagtaggcagagcgaaattgacgctgacaagacttttgcatcttggaagggactgtaatctactgtagtgaagaacagagcctctcaatcagacgggtgtaaataagagacggaggggagtccaaaagaaaaggaagaggaggaaaaacaagtgtgtgttggggggaacagggggaaaagcatttttggtggatggtatgaagccagccatggaaactgcagccgaggaaaatactgaacaaagccaagagagaaaaggctgctttgaatgctgcatcaagtgtctgggaggagtcccctacgcctccctggtggccaccatcctctgcttctccggggtggccttattctgcggctgtgggcatgtggctctcgcaggcaccgtggcgattctt

SEQ ID NO: 12287 - protein, 65 aa, Homo sapiens
MKPAMETAAEENTEQSQERKGCFECCIKCLGGVPYASLVATILCFSGVALFCGCGHVALAGTVAI

SEQ ID NO: 12288 - DNA, 768 bp, Homo sapiens
gaattaattagcattcattgggtgtacttggctagaagaaatgaggtggggagaaagagagagagagagagagatcgagattgagatcttaagaaagagagcaaggaggaagagcccggtggggagcaggtccttctcccccacccccctacccccaactcccactggagccgcattgagactgtaggcaccaccgggcgccgaatggctgttttctaactgggatcctcggtgacgtatggctgcctgccccttggcagctgtctttatggaccagtaggcagagcgaaattgacgctgacaagacttttgcatcttggaagggactgtaatctactgtagtgaagaacagagcctctcaatcagacgggtgtaaataagagacggaggggagtccaaaagaaaaggaagaggaggaaaaacaagtgtgtgttggggggaacagggggaaaagcatttttggtggatggtatgaagccagccatggaaactgcagccgaggaaaatactgaacaaagccaagagagaaaagtgaacagcagagctgaaatggaaattggcaggtaccactggatgtacccaggctcaaagaaccaccagtaccatcccgtgccaaccctgggggacagggctagccccttgagcagtccaggctgctttgaatgctgcatcaagtgtctgggaggagtcccctacgcctccctggtggccaccatcctctgcttctccggggtggccttattctgcggctgtgggcatgtggctctc

SEQ ID NO: 12289 - protein, 98 aa, Homo sapiens
MKPAMETAAEENTEQSQERKVNSRAEMEIGRYHWMYPGSKNHQYHPVPTLGDRASPLSSPGCFECCIKCLGGVPYASLVATILCFSGVALFCGCGHVA

SEQ ID NO: 12290 - DNA, 4630 bp, Homo sapiens
ggctcctgcccgggcctcattgtgcctcggacaacgagtgtacgcagttaccacacagttaccaagcagttacctcagagccgcggcgcagacgtaggcctcaggtctcgggcctcaggtctcgggcctcagagccagaccccgccatctcacgatgtcagagaggacccaggaacaggattttgttattataactgtcgacgacagtgatgataacaatgattgcagtattgagatggtggaagtttctgaaacagcagataattccactaatgacatagcagatgattccacttatgtcacagcagataatcccactgatgacacagccacacaaccaaattttccaggcggcaatgatggccatcaccgtccactccaaatgtcatatgggtctggctctgtcacccaggctggagtgcagtggcatgatcacagctcactgcagcctcaacctcttggactcaagcaattcttccacctcagccttcccagtagctgggatgacaggcgcacgccaccatgcccagtagcccatggtgaccaaatagtttcacagataaaccacccagtacatttaagaagatacagttacaactcagaggaagtggattttccaaaaagaggaagattctatactccagaggtacagtctagcatatcaccaccagcggaaaggcaggaaacccatgcctgggccagccctgctgtaacatctcttgagtcagcagcatgtcatgaactgcaggaagcagacctcagtgagagtttatcatatcccagaattgtctcctcaagttcattacagcagtatgtcgcacaaggtggctcatttccttgtttcggtatgccatggaactttatcagtggaggtgctgaaagtaccaatgctgtcatctcatttgccaatgctactacagcagtacctatggcagttctgtcacgaagagaatccagtctggcaaataaccctggtgtggtgaattactctgctctaccagaaaatgaaaatgtgggcccaggtagagccttgtcatctttctgcttccatcccaatttggaaatgccagaaagaccagcaaacagcagtaaaaacagcactgagacagcgaattatccaactttaatgggaaattacaatggccaaaatactgcctctttatctgtcttcatccctccctattttgctgagaaaattatacttactgaaatgccaggaacaacagaaaccaacgtggaaaataactctcagacagtgtattacccagctttatcgggaaatacgagtgccccatatccagcctcttcatatcttcccatcacttctaattttgaatctggcccacaaatgagttatgggacaatgagttactcaactgaaatgaaaaataactgtgaccaagatgatgcttcagcatctgcctgcctcactcccgattttgcactgttacctctgaatattttggtaaaagtagacaccaacacggaaaacagcgtcaacacaatgaatcgctcaactttattggacagtgacagtggccaggattcttcctcatcatctgtctgtatccctcccaagtatggctatcttggtgatccaaaaagaaatgtcagagtacttaaaatccatttgctggccgtacaaaatatggccaaacctaagcaagcagcctgctacttggttcgtattttgttctccaaggaaatcctgattagcagctcagtggatatccatttgaaagacagccaatccctcgacccgaacaaaatggctgcattgagagaatatctggcaacaacttttcccacctgtgatttgcatgaacatggaaaagactggcaggactgtatttctggtatcaattctatgatctactgtttatgttctgaaggcaagagtactccaaaaactgttcgcaaaaataaaaaacgtaccaaccgtgttgcatcggcatctgcagatagaaatgaccaaaggggcagagatggtggtgaaggctgttcttggatgtttcagccaatgaataactccaaaatgagagaaaagaggaacttgcagccaaacagtaatgctatccctgaaggaatgcgagaaccttccactgataatccagaggaacctggtgaagcatggagctattttggaagaccatggagaaatatacggatgccatgttcagtactgactttggcaaaaactaagtcttgcgcaagcctgtcggctagataccttattcagaaactcttcacaaaagatgtcctggtccaaagtaacgtctatggcaatctgaagcatggcctgtgtgcccttgaccccaataagattagtgctctccgagagttcctccaagaaaactacccaatttgtgatctctcggaaaatggaagagactggaagtcgtgtgtgacctccatcaacagcggtatccgtagccttagacatgacgtcagaagggctgaagccaggtctcagtcgcttccagcagtgacccctccagagctggagcaggagtcaaagccaggagatcccgacgccactgacccaagcacctgaacggcagctgccaaactttttttttttttttaactgttaagactattttgtaagtttctcaagttctaattccaaaatcagcctgctgtactggcagagtagtttgcattgacacctgtagtaatcgccaaacctctttttctgctcataaaggaggtagaatcacattaggaagatacgtaatgtttcatctgtggatttgatgacaacctctgattgagggaatggtagtaaactcctcatgggcttgtgacccatggctttgacttagataattgacattaatatactttgtttttttgataaggtagagaaagaaattcaatagaaagtaaggagccactcagtcaaataatataattcgtataaaacttgacaagtctttttatttttgtgacttgtgagatagtttaagatatttttatgtgaccaatttgtagaatgaatacatattttcaaagttatcttttcaaaattcaacttttagagtattttagcaaaatatatgtatagtttataatatagaagtatagctttataaagatattaaggatttattttttaaaataattctctgaatagtttgctgtagtagttgccttcagcttaataaaaccatagtacttctacatacatctttataagttaggctatgcctacaaaggtcttaaaaagtagataatttaccgggtgtagtggctcacacctgtaatcccagcactttgggaggccgagacgggtggatcacctgaggtcaggggttcgagaccagcctggccaacatgacgaaaccccatctctactaaaaatacaaaaaaagtagccaggcatggtggcaagcacctgtagtcccagttactcgggtggctgaggcaggagaatcacttgaacctgggaggtggagactgcagtgagccgagattgtgccactgcactcgagcctgggtgacagagtgagactccgtctcgggaaaagaaaaaaaagaagtagataattaaaaaaatcttgcataaaaaaaaatcttccataaagggcaaaaaggctttaacttccattattcagatttaatccaactaagatagtctttggcttcattcactgttcagtttcacaagttttttacaactactagtaacagagctaatacagaatagtaatccacattataaacatagatcaaaataccacatcataccccataaatacatgcagttattatttgtcaattaaaaataaaatttttttaaaagaaaagtacagttcgaccctaggcaagaagaaatttcaaattgtatatgcatattttgaatttggtttatattttgtggtatctgaaatattccctggactagaagcaaaaccacagaaacaaaactttacatttagaaaaaaatttcaagacttctattgctaactttattacattagtggtttttagaagttatttagagcagtcttgtctgatagaactttccaccatgatggaaatgtaaataaatataccacattaaaaatataaatttgcaatgtccaataggctcgtatggctattgagcatttaagatgtaattaattagacagaggaagtaaatttaacattttctctcattttagctaattagaatttaaagtgaaatagccacaagtggatagtggctactgtgttggatggcacagttcaaaatgcctcttatttataaaaaaaagtgtttaaaagtggttcccatggcttgaagaggaataatatacacataacttctttaaaatcacattttgtttgagatggagatcttgctatattgcccaggcttatctggaactcctgggctcaagagggaggatcacatttgactggacaaaatacattttataaaggtgttttgtattttatgttaaagtggaattgtgtcttcaaaattgtgtcttcaaaatttcacaagttaatactattactgtattagtccaatgttaaacattttaaatgcctgctcataagactcatttttgataaataaatgtatctttaatgttttgtttcccaaatagatacaataaataaacatttaaaatgcctt

SEQ ID NO: 12291 - protein, 799 aa, Homo sapiens
MSERTQEQDFVIITVDDSDDNNDCSIEMVEVSETADNSTNDIADDSTYVTADNPTDDTATQPNFPGGNDGHHRPLQMSYGSGSVTQAGVQWHDHSSLQPQPLGLKQFFHLSLPSSWDDRRTPPCPVAHGDQIVSQINHPVHLRRYSYNSEEVDFPKRGRFYTPEVQSSISPPAERQETHAWASPAVTSLESAACHELQEADLSESLSYPRIVSSSSLQQYVAQGGSFPCFGMPWNFISGGAESTNAVISFANATTAVPMAVLSRRESSLANNPGVVNYSALPENENVGPGRALSSFCFHPNLEMPERPANSSKNSTETANYPTLMGNYNGQNTASLSVFIPPYFAEKIILTEMPGTTETNVENNSQTVYYPALSGNTSAPYPASSYLPITSNFESGPQMSYGTMSYSTEMKNNCDQDDASASACLTPDFALLPLNILVKVDTNTENSVNTMNRSTLLDSDSGQDSSSSSVCIPPKYGYLGDPKRNVRVLKIHLLAVQNMAKPKQAACYLVRILFSKEILISSSVDIHLKDSQSLDPNKMAALREYLATTFPTCDLHEHGKDWQDCISGINSMIYCLCSEGKSTPKTVRKNKKRTNRVASASADRNDQRGRDGGEGCSWMFQPMNNSKMREKRNLQPNSNAIPEGMREPSTDNPEEPGEAWSYFGRPWRNIRMPCSVLTLAKTKSCASLSARYLIQKLFTKDVLVQSNVYGNLKHGLCALDPNKISALREFLQENYPICDLSENGRDWKSCVTSINSGIRSLRHDVRRAEARSQSLPAVTPPELEQESKPGDPDATDPST

SEQ ID NO: 12292 - DNA, 2128 bp, Homo sapiens
ggctcctgcccgggcctcattgtgcctcggacaacgagtgtacgcagttaccacacagttaccaagcagttacctcagagccgcggcgcagacgtaggcctcaggtctcgggcctcaggtctcgggcctcagagccagaccccgccatctcacgatgtcagagaggacccaggaacaggattttgttattataactgtcgacgacagtgatgataacaatgattgcagtattgagatggtggaagtttctgaaacagcagataattccactaatgacatagcagatgattccacttatgtcacagcagataatcccactgatgacacagccacacaaccaaattttccaggcggcaatgatggccatcaccgtccactccaaatgtcatatgggtctggctctgtcacccaggctggagtgcagtggcatgatcacagctcactgcagcctcaacctcttggactcaagcaattcttccacctcagccttcccagtagctgggatgacaggcgcacgccaccatgcccagtagcccatggtgaccaaatagtttcacagataaaccacccagtacatttaagaagatacagttacaactcagaggaagtggattttccaaaaagaggaagattctatactccagaggtacagtctagcatatcaccaccagcggaaaggcaggaaacccatgcctgggccagccctgctgtaacatctcttgagtcagcagcatgtcatgaactgcaggaagcagacctcagtgagagtttatcatatcccagaattgtctcctcaagttcattacagcagtatgtcgcacaaggtggctcatttccttgtttcggtatgccatggaactttatcagtggaggtgctgaaagtaccaatgctgtcatctcatttgccaatgctactacagcagtacctatggcagttctgtcacgaagagaatccagtctggcaaataaccctggtgtggtgaattactctgctctaccagaaaatgaaaatgtgggcccaggtagagccttgtcatctttctgcttccatcccaatttggaatctggcccacaaatgagttatgggacaatgagttactcaactgaaatgaaaaataactgtgaccaagatgatgcttcagcatctgcctgcctcactcccgattttgcactgttacctctgaatattttggtaaaagtagacaccaacacggaaaacagcgtcaacacaatgaatcgctcaactttattggacagtgacagtggccaggattcttcctcatcatctgtctgtatccctcccaagtatggctatcttggtgatccaaaaagaaatgtcagagtacttaaaatccatttgctggccgtacaaaatatggccaaacctaagcaagcagcctgctacttggttcgtattttgttctccaaggaaatcctgattagcagctcagtggatatccatttgaaagacagccaatccctcgacccgaacaaaatggctgcattgagagaatatctggcaacaacttttcccacctgtgatttgcatgaacatggaaaagactggcaggactgtatttctggtatcaattctatgatctactgtttatgttctgaaggcaagagtactccaaaaactgttcgcaaaaataaaaaacgtaccaaccgtgttgcatcggcatctgcagatagaaatgaccaaaggggcagagatggtggtgaaggctgttcttggatgtttcagccaatgaataactccaaaatgagagaaaagaggaacttgcagccaaacagtaatgctatccctgaaggaatgcgagaaccttccactgataatccagaggaacctggtgaagcatggagctattttggaagaccatggagaaatatacggatgccatgttcagtactgactttggcaaaaactaagtcttgcgcaagcctgtcggctagataccttattcagaaactcttcacaaaagatgtcctggtccaaagtaacgtctatggcaatctgaagcatggcctgtgtgcccttgaccccaataagattagtgctctccgaggtttgttacacatagagtatgtctgaataaataaaagccaattgtgtttaagagaagggtag

SEQ ID NO: 12293 - protein, 645 aa, Homo sapiens
MSERTQEQDFVIITVDDSDDNNDCSIEMVEVSETADNSTNDIADDSTYVTADNPTDDTATQPNFPGGNDGHHRPLQMSYGSGSVTQAGVQWHDHSSLQPQPLGLKQFFHLSLPSSWDDRRTPPCPVAHGDQIVSQINHPVHLRRYSYNSEEVDFPKRGRFYTPEVQSSISPPAERQETHAWASPAVTSLESAACHELQEADLSESLSYPRIVSSSSLQQYVAQGGSFPCFGMPWNFISGGAESTNAVISFANATTAVPMAVLSRRESSLANNPGVVNYSALPENENVGPGRALSSFCFHPNLESGPQMSYGTMSYSTEMKNNCDQDDASASACLTPDFALLPLNILVKVDTNTENSVNTMNRSTLLDSDSGQDSSSSSVCIPPKYGYLGDPKRNVRVLKIHLLAVQNMAKPKQAACYLVRILFSKEILISSSVDIHLKDSQSLDPNKMAALREYLATTFPTCDLHEHGKDWQDCISGINSMIYCLCSEGKSTPKTVRKNKKRTNRVASASADRNDQRGRDGGEGCSWMFQPMNNSKMREKRNLQPNSNAIPEGMREPSTDNPEEPGEAWSYFGRPWRNIRMPCSVLTLAKTKSCASLSARYLIQKLFTKDVLVQSNVYGNLKHGLCALDPNKISALRGLLHIEYV

SEQ ID NO: 12294 - DNA, 3164 bp, Homo sapiens
ggcagtggcggttgcggggcatgcgcggctccgcgcgcggcttctcaaacatggcggcggcggtgtgaagctcggtgccggctcgcgcgatcggtgggacagaatttcgttgttttcaccgacgagactggaggaaacaacaccaaatagggataccatgggacaaacagtgaatgaagattccatggatgtcaagaaggagaatcaagagaaaactcctcagtcaagtacatcttctgtacaaagggatgatttccactgggaggagtatttgaaagagactgggtctataagtgctccttcagagtgcttccgtcagtctcagattccacctgtgaatgatttcaaagttggtatgaaattggaagcccgtgaccctcgcaatgccacttcagtatgtattgctacggttattggaattactggggccaggttacggttacgactggatggtagtgacaacagaaatgatttttggaggcttgtcgattccccagacatacaacctgttgggacatgtgaaaaggaaggagacttacttcaacctccactagggtaccagatgaatacatcctcctggccgatgttcctcttaaagacactaaatgggtctgaaatggcatctgccacattatttaagaaggaaccaccaaagcccccactaaataattttaaagtggggatgaaactggaagctattgacaaaaagaacccgtatctcatctgtcctgcgaccattggagatgttaaaggggatgaagttcatatcacatttgatggctggagtggagcttttgattactggtgcaagtatgattctcgagatattttcccagctgggtggtgtcgcctgacaggagatgtattacaacccccaggaactagtgttcctattgtaaagaatatagcaaaaacagagtcttctccttccgaagcaagccagcattcaatgcagtctccacagaaaactactctaatattaccaacacagcaggtcaggagatcaagtcgaattaaaccacctggacctactgcagtccccaaaaggagcagttctgttaaaaatatcacaccaaggaaaaaaggtccaaactcaggaaaaaaggaaaaacctttgcccgtgatatgttctacatctgcagcttctctaaaatcgctgaccagagaccgtggcatgttatataaagatgtcgcttctgggccatgtaaaatagtgatgtctacagtctgtgtctatgtaaacaaacatggaaactttggccctcatctggatcccaagagaatccagcagctgcctgaccacttcggcccgggcccggtgaatgtggtgcttcgccggattgtgcaggcctgtgtggattgtgcccttgaaactaaaactgtttttggatacctgaagccagataatcgtggaggagaagtgataactgcctcctttgatggggaaactcattccatccagctccctccagtgaacagtgcatcatttgctcttcgctttcttgagaacttctgccacagtctgcagtgtgataaccttttgagtagccagccttttagttcttccaggggtcatactcacagctctgcagagcatgataaaaatcagtcagcaaaagaagatgtaacagaaaggcaaagcaccaaacgatctcctcagcaaactgtaccatatgttgttcctctctctcctaagctccccaaaacaaaggagtatgcgtctgaaggagaaccattgtttgctgggggaagtgccattcccaaagaggagaatctttcagaagattctaagagctcatcactaaattcaggaaattatttgaatcctgcctgtagaaatcctatgtatattcatacttcagtctcccaggatttttctcgaagtgtgccaggcaccacaagttcaccactagttggggacatatcccccaagagcagtccccatgaagttaaattccaaatgcagaggaaaagtgaagctccaagttatatagctgtacctgatcccagtgtcctgaaacaaggcttctctaaggacccttcaacctggtctgtggatgaagtgatacagtttatgaaacatacagatcctcagatatcaggccccctcgccgacctcttcaggcaacatgaaattgatgggaaggctctgttcctactcaagagtgatgtgatgatgaagtatatggggctgaagctggggccagcattaaagctgtgttactacattgaaaagcttaaagaaggaaaatacagttaaaaaaatgtgtaagtttagattggacataattctcaggtgtactgttaacattttaatttaaaagtatttctcttagcagtttttgttttgtagacagttcccataaaaatattttatcagaattgcagaactgtagtaacagttcagtcaactttgtttttttcctggagtcaccaaccagctttgggagacacagccgccactcccccagtctacttctttaaaaagcatttaacagatggagtttcactcttgttgcccaggctggagtgcaatagctcgatctcggctcactgcaacctcgcctccctggttcaagcaattctcctgcctcagcgattacaggaatgcaccaccacgcccagctaattttgtagagatggggtttctccatgttggtcaggctggtctcaaactcctgacctcaggtgatccgcccacctcggccttgcaaaatgctgggattacaggcatgagccaccatgcccagccatgtttggggctttattttataagttagaactttgaagaggaaatggtgctatatgtttattgttattactttgtgtaactttgatgtaatgtttataagctatgagaatcagttataaaagtattagccatttgttgtaaatgccaataaaatattcaccaggggcaagaatgtacattttctttttagaaaaccaaatgtactttagacatgaatgcaactatttaaagaatagcttcatttatgttattccttacatgtcataagattcttacttaaacttggtcttctttcaagttgtttgtatgaagatgctgtacccacttgaacagtcctcaggtgtttacataaatactatgttttacagttttcatattttaaaatattaataaagttaatcgcaacgattca

SEQ ID NO: 12295 - protein, 700 aa, Homo sapiens; identical to SEQ ID NO: 2059

SEQ ID NO: 12296 - DNA, 4198 bp, Homo sapiens
ggcagtggcggttgcggggcatgcgcggctccgcgcgcggcttctcaaacatggcggcggcggtgtgaagctcggtgccggctcgcgcgatcggtgggacagaatttcgttgttttcaccgacgagactggaggaaacaacaccaaatagggataccatgggacaaacagtgaatgaagattccatggatgtcaagaaggagaatcaagagaaaactcctcagtcaagtacatcttctgtacaaagggatgatttccactgggaggagtatttgaaagagactgggtctataagtgctccttcagagtgcttccgtcagtctcagattccacctgtgaatgatttcaaagttggtatgaaattggaagcccgtgaccctcgcaatgccacttcagtatgtattgctacggttattggaattactggggccaggttacggttacgactggatggtagtgacaacagaaatgatttttggaggcttgtcgattccccagacatacaacctgttgggacatgtgaaaaggaaggagacttacttcaacctccactagggtaccagatgaatacatcctcctggccgatgttcctcttaaagacactaaatgggtctgaaatggcatctgccacattatttaagaaggaaccaccaaagcccccactaaataattttaaagtggggatgaaactggaagctattgacaaaaagaacccgtatctcatctgtcctgcgaccattggagatgttaaaggggatgaagttcatatcacatttgatggctggagtggagcttttgattactggtgcaagtatgattctcgagatattttcccagctgggtggtgtcgcctgacaggagatgtattacaacccccaggaactagtgttcctattgtaaagaatatagcaaaaacagagtcttctccttccgaagcaagccagcattcaatgcagtctccacagaaaactactctaatattaccaacacagcaggtcaggagatcaagtcgaattaaaccacctggacctactgcagtccccaaaaggagcagttctgttaaaaatatcacaccaaggaaaaaaggtccaaactcaggaaaaaaggaaaaacctttgcccgtgatatgttctacatctgcagcttctctaaaatcgctgaccagagaccgtggcatgttatataaagatgtcgcttctgggccatgtaaaatagtgatgtctacagtctgtgtctatgtaaacaaacatggaaactttggccctcatctggatcccaagagaatccagcagctgcctgaccacttcggcccgggcccggtgaatgtggtgcttcgccggattgtgcaggcctgtgtggattgtgcccttgaaactaaaactgtttttggatacctgaagccagataatcgtggaggagaagtgataactgcctcctttgatggggaaactcattccatccagctccctccagtgaacagtgcatcatttgctcttcgctttcttgagaacttctgccacagtctgcagtgtgataaccttttgagtagccagccttttagttcttccaggggtcatactcacagctctgcagagcatgataaaaatcagtcagcaaaagaagatgtaacagaaaggcaaagcaccaaacgatctcctcagcaaactgtaccatatgttgttcctctctctcctaagctccccaaaacaaaggagtatgcgtctgaaggagaaccattgtttgctgggggaagtgccattcccaaagaggagaatctttcagaagattctaagagctcatcactaaattcaggaaattatttgaatcctgcctgtagaaatcctatgtatattcatacttcagtctcccaggatttttctcgaagtgtgccaggcaccacaagttcaccactagttggggacatatcccccaagagcagtccccatgaagttaaattccaaatgcagaggaaaagtgaagctccaagttatatagctgtacctgatcccagtgtcctgaaacaaggcttctctaaggacccttcaacctggtctgtggatgaagtgatacagtttatgaaacatacagatcctcagatatcaggccccctcgccgacctcttcaggcaacatgaaattgatgggaaggctctgttcctactcaagagtgatgtgatgatgaagtatatggggctgaagctggggccagcattaaagctgtgttactacattgaaaagcttaaagaaggaaaatacagttaaaaaaatgtgtaagtttagattggacataattctcaggtgtactgttaacattttaatttaaaagtatttctcttagcagtttttgttttgtagacagttcccataaaaatattttatcagaattgcagaactgtagtaacagttcagtcaactttgtttttttcctggagtcaccaaccagctttgggagacacagccgccactcccccagtctacttctttaaaaagcatttaacaggttagtattggcatattcaaattggcagttctttatgtctttttaaattttcattgtacagtttacaaatatacttaatgtagttaacagagaaaaacctttgattttggttaacctttatatctagaaccaaaacagctaaatcccaaaggggaaaatatcagggattgacaacttctataattaaatccatgagaatttttcctcactagagaatttaaaggtgcacctgtagatatcatcttttctcagatattttgtgtgatactctgtggtgttctgttcatgttctatcagtatatctagaaagggaatagccatataaattattttccttttattatttctctgtatgttgtatttgatcatatttaaaggaaaaaagcaagcttataagctttcatgaagtgttcttaccagtttttgataaattttttaaattataggatagaattgtcattttatgcaggagatatttatactacgagggttgtttggatggagtcagattaaattttttcagtgaaattcctattattttaaaactttccatattttcactacgcttggacatttaactaggcattcttttcttacatctctatatgaagatacctgtgtccaaaatttttgaagatatatattgtatgtgtttattcttcatatggtactttaccatatttatatattgttttatacctgtaggtttacacacaagtaaatcttttttttcttgaatttaatctggcactttgcactgccacagaggtgacgatgaactatgtatatagttagatgttttgatttcgtaaaaaatatatgtccatcgtttgctatcaccagtacctctcagcttactcttcaggggatatgaaacaatctgtagattggtttccatacagggaagttctctgtcctatgcaatgtttctaattaatttgcttagttctgagccatttattctgctacactttgaaagatatattagttctgacttattgtttggggctttattttatttttatttttttgagatggagtttcactcttgttgcccaggctggagtgcaatagctcgatctcggctcactgcaacctcgcctccctggttcaagcaattctcctgcctcagcgattacaggaatgcaccaccacgcccagctaattttgtagagatggggtttctccatgttggtcaggctggtctcaaactcctgacctcaggtgatccgcccacctcggccttgcaaaatgctgggattacaggcatgagccaccatgcccagccatgtttggggctttattttataagttagaactttgaagaggaaatggtgctatatgtttattgttattactttgtgtaactttgatgtaatgtttataagctatgagaatcagttataaaagtattagccatttgttgtaaatgccaataaaatattcaccaggggcaagaatgtacattttctttttagaaaaccaaatgtactttagacatgaatgcaactatttaaagaatagcttcatttatgttattccttacatgtcataagattcttacttaaacttggtcttctttcaagttgtttgtatgaagatgctgtacccacttgaacagtcctcaggtgtttacataaatactatgttttacagttttcatattttaaaatattaataaagttaatcgcaacgattca

SEQ ID NO: 12297 - protein, 700 aa, Homo sapiens; identical to SEQ ID NO: 2059

SEQ ID NO: 12298 - DNA, 564 bp, Homo sapiens
gctgagatggaggagggagagaaaacttctagtatgaaggagagttgtcctatcctaaatgccaatagggtccttgttgagaaatactttaccccccgtcaggtgatctggagacagttatgtgcaattcatattcagaaggtttaactacacaaacaaaatatgtcaagcaagtgaaagcagatttaaggagcgtattcagaaagaagtgtagttaagcctgtttttggacatttagagagcatgatcactttgcccaaaaccgaaaaggagcactggccttaagtggaatacggaggatatcaggaagagaagactctcaaatgttgaaatttcaaatgtgggcgaggaagctggctgaaatgcaatgattcccagggaaacttggaacccatgtgttgaaggtggtagcacttccatcagcctgggtcctgaatgcctgcaggagaatatccttttgatccatgtacctgccgaggactgatggggtcttgttctgtcgcccaggctggagtgtagtggctcgactggctcactgcaaccttcgtctcctgagctcaagtg

SEQ ID NO: 12299 - protein, 32 aa, Homo sapiens
MYLPRTDGVLFCRPGWSVVARLAHCNLRLLSS

SEQ ID NO: 12300 - DNA, 13736 bp, Homo sapiens
tgttggtttctcattgtttttaagcctactggagcaataaagtttgaagaacttttaccaggttttttttatcgctgccttgatatacacttttcaaaatgctttggtgggaagaagtagaggactgttagtttgggaagcagcatattgagaacctcttcagtgacctacaggatgggaggcgcctcctagacctcctcgaaggcctgacagggcaaaaactgccaaaagaaaaaggatccacaagagttcatgccctgaacaatgtcaacaaggcactgcgggttttgcagaacaataatgttgatttagtgaatattggaagtactgacatcgtagatggaaatcataaactgactcttggtttgatttggaatataatcctccactggcaggtcaaaaatgtaatgaaaaatatcatggctggattgcaacaaaccaacagtgaaaagattctcctgagctgggtccgacaatcaactcgtaattatccacaggttaatgtaatcaacttcaccaccagctggtctgatggcctggctttgaatgctctcatccatagtcataggccagacctatttgactggaatagtgtggtttgccagcagtcagccacacaacgactggaacatgcattcaacatcgccagatatcaattaggcatagagaaactactcgatcctgaagatgttgataccacctatccagataagaagtccatcttaatgtacatcacatcactcttccaagttttgcctcaacaagtgagcattgaagccatccaggaagtggaaatgttgccaaggccacctaaagtgactaaagaagaacattttcagttacatcatcaaatgcactattctcaacagatcacggtcagtctagcacagggatatgagagaacttcttcccctaagcctcgattcaagagctatgcctacacacaggctgcttatgtcaccacctctgaccctacacggagcccatttccttcacagcatttggaagctcctgaagacaagtcatttggcagttcattgatggagagtgaagtaaacctggaccgttatcaaacagctttagaagaagtattatcgtggcttctttctgctgaggacacattgcaagcacaaggagagatttctaatgatgtggaagtggtgaaagaccagtttcatactcatgaggggtacatgatggatttgacagcccatcagggccgggttggtaatattctacaattgggaagtaagctgattggaacaggaaaattatcagaagatgaagaaactgaagtacaagagcagatgaatctcctaaattcaagatgggaatgcctcagggtagctagcatggaaaaacaaagcaatttacatagagttttaatggatctccagaatcagaaactgaaagagttgaatgactggctaacaaaaacagaagaaagaacaaggaaaatggaggaagagcctcttggacctgatcttgaagacctaaaacgccaagtacaacaacataaggtgcttcaagaagatctagaacaagaacaagtcagggtcaattctctcactcacatggtggtggtagttgatgaatctagtggagatcacgcaactgctgctttggaagaacaacttaaggtattgggagatcgatgggcaaacatctgtagatggacagaagaccgctgggttcttttacaagacatccttctcaaatggcaacgtcttactgaagaacagtgcctttttagtgcatggctttcagaaaaagaagatgcagtgaacaagattcacacaactggctttaaagatcaaaatgaaatgttatcaagtcttcaaaaactggccgttttaaaagcggatctagaaaagaaaaagcaatccatgggcaaactgtattcactcaaacaagatcttctttcaacactgaagaataagtcagtgacccagaagacggaagcatggctggataactttgcccggtgttgggataatttagtccaaaaacttgaaaagagtacagcacagatttcacaggctgtcaccaccactcagccatcactaacacagacaactgtaatggaaacagtaactacggtgaccacaagggaacagatcctggtaaagcatgctcaagaggaacttccaccaccacctccccaaaagaagaggcagattactgtggattctgaaattaggaaaaggttggatgttgatataactgaacttcacagctggattactcgctcagaagctgtgttgcagagtcctgaatttgcaatctttcggaaggaaggcaacttctcagacttaaaagaaaaagtcaatgccatagagcgagaaaaagctgagaagttcagaaaactgcaagatgccagcagatcagctcaggccctggtggaacagatggtgaatgagggtgttaatgcagatagcatcaaacaagcctcagaacaactgaacagccggtggatcgaattctgccagttgctaagtgagagacttaactggctggagtatcagaacaacatcatcgctttctataatcagctacaacaattggagcagatgacaactactgctgaaaactggttgaaaatccaacccaccaccccatcagagccaacagcaattaaaagtcagttaaaaatttgtaaggatgaagtcaaccggctatcagatcttcaacctcaaattgaacgattaaaaattcaaagcatagccctgaaagagaaaggacaaggacccatgttcctggatgcagactttgtggcctttacaaatcattttaagcaagtcttttctgatgtgcaggccagagagaaagagctacagacaatttttgacactttgccaccaatgcgctatcaggagaccatgagtgccatcaggacatgggtccagcagtcagaaaccaaactctccatacctcaacttagtgtcaccgactatgaaatcatggagcagagactcggggaattgcaggctttacaaagttctctgcaagagcaacaaagtggcctatactatctcagcaccactgtgaaagagatgtcgaagaaagcgccctctgaaattagccggaaatatcaatcagaatttgaagaaattgagggacgctggaagaagctctcctcccagctggttgagcattgtcaaaagctagaggagcaaatgaataaactccgaaaaattcagaatcacatacaaaccctgaagaaatggatggctgaagttgatgtttttctgaaggaggaatggcctgcccttggggattcagaaattctaaaaaagcagctgaaacagtgcagacttttagtcagtgatattcagacaattcagcccagtctaaacagtgtcaatgaaggtgggcagaagataaagaatgaagcagagccagagtttgcttcgagacttgagacagaactcaaagaacttaacactcagtgggatcacatgtgccaacaggtctatgccagaaaggaggccttgaagggaggtttggagaaaactgtaagcctccagaaagatctatcagagatgcacgaatggatgacacaagctgaagaagagtatcttgagagagattttgaatataaaactccagatgaattacagaaagcagttgaagagatgaagagagctaaagaagaggcccaacaaaaagaagcgaaagtgaaactccttactgagtctgtaaatagtgtcatagctcaagctccacctgtagcacaagaggccttaaaaaaggaacttgaaactctaaccaccaactaccagtggctctgcactaggctgaatgggaaatgcaagactttggaagaagtttgggcatgttggcatgagttattgtcatacttggagaaagcaaacaagtggctaaatgaagtagaatttaaacttaaaaccactgaaaacattcctggcggagctgaggaaatctctgaggtgctagattcacttgaaaatttgatgcgacattcagaggataacccaaatcagattcgcatattggcacagaccctaacagatggcggagtcatggatgagctaatcaatgaggaacttgagacatttaattctcgttggagggaactacatgaagaggctgtaaggaggcaaaagttgcttgaacagagcatccagtctgcccaggagactgaaaaatccttacacttaatccaggagtccctcacattcattgacaagcagttggcagcttatattgcagacaaggtggacgcagctcaaatgcctcaggaagcccagaaaatccaatctgatttgacaagtcatgagatcagtttagaagaaatgaagaaacataatcaggggaaggaggctgcccaaagagtcctgtctcagattgatgttgcacagaaaaaattacaagatgtctccatgaagtttcgattattccagaaaccagccaattttgagcagcgtctacaagaaagtaagatgattttagatgaagtgaagatgcacttgcctgcattggaaacaaagagtgtggaacaggaagtagtacagtcacagctaaatcattgtgtgaacttgtataaaagtctgagtgaagtgaagtctgaagtggaaatggtgataaagactggacgtcagattgtacagaaaaagcagacggaaaatcccaaagaacttgatgaaagagtaacagctttgaaattgcattataatgagctgggagcaaaggtaacagaaagaaagcaacagttggagaaatgcttgaaattgtcccgtaagatgcgaaaggaaatgaatgtcttgacagaatggctggcagctacagatatggaattgacaaagagatcagcagttgaaggaatgcctagtaatttggattctgaagttgcctggggaaaggctactcaaaaagagattgagaaacagaaggtgcacctgaagagtatcacagaggtaggagaggccttgaaaacagttttgggcaagaaggagacgttggtggaagataaactcagtcttctgaatagtaactggatagctgtcacctcccgagcagaagagtggttaaatcttttgttggaataccagaaacacatggaaacttttgaccagaatgtggaccacatcacaaagtggatcattcaggctgacacacttttggatgaatcagagaaaaagaaaccccagcaaaaagaagacgtgcttaagcgtttaaaggcagaactgaatgacatacgcccaaaggtggactctacacgtgaccaagcagcaaacttgatggcaaaccgcggtgaccactgcaggaaattagtagagccccaaatctcagagctcaaccatcgatttgcagccatttcacacagaattaagactggaaaggcctccattcctttgaaggaattggagcagtttaactcagatatacaaaaattgcttgaaccactggaggctgaaattcagcagggggtgaatctgaaagaggaagacttcaataaagatatgaatgaagacaatgagggtactgtaaaagaattgttgcaaagaggagacaacttacaacaaagaatcacagatgagagaaagcgagaggaaataaagataaaacagcagctgttacagacaaaacataatgctctcaaggatttgaggtctcaaagaagaaaaaaggctctagaaatttctcatcagtggtatcagtacaagaggcaggctgatgatctcctgaaatgcttggatgacattgaaaaaaaattagccagcctacctgagcccagagatgaaaggaaaataaaggaaattgatcgggaattgcagaagaagaaagaggagctgaatgcagtgcgtaggcaagctgagggcttgtctgaggatggggccgcaatggcagtggagccaactcagatccagctcagcaagcgctggcgggaaattgagagcaaatttgctcagtttcgaagactcaactttgcacaaattcacactgtccgtgaagaaacgatgatggtgatgactgaagacatgcctttggaaatttcttatgtgccttctacttatttgactgaaatcactcatgtctcacaagccctattagaagtggaacaacttctcaatgctcctgacctctgtgctaaggactttgaagatctctttaagcaagaggagtctctgaagaatataaaagatagtctacaacaaagctcaggtcggattgacattattcatagcaagaagacagcagcattgcaaagtgcaacgcctgtggaaagggtgaagctacaggaagctctctcccagcttgatttccaatgggaaaaagttaacaaaatgtacaaggaccgacaagggcgatttgacagatctgttgagaaatggcggcgttttcattatgatataaagatatttaatcagtggctaacagaagctgaacagtttctcagaaagacacaaattcctgagaattgggaacatgctaaatacaaatggtatcttaaggaactccaggatggcattgggcagcggcaaactgttgtcagaacattgaatgcaactggggaagaaataattcagcaatcctcaaaaacagatgccagtattctacaggaaaaattgggaagcctgaatctgcggtggcaggaggtctgcaaacagctgtcagacagaaaaaagaggctagaagaacaaaagaatatcttgtcagaatttcaaagagatttaaatgaatttgttttatggttggaggaagcagataacattgctagtatcccacttgaacctggaaaagagcagcaactaaaagaaaagcttgagcaagtcaagttactggtggaagagttgcccctgcgccagggaattctcaaacaattaaatgaaactggaggacccgtgcttgtaagtgctcccataagcccagaagagcaagataaacttgaaaataagctcaagcagacaaatctccagtggataaaggtttccagagctttacctgagaaacaaggagaaattgaagctcaaataaaagaccttgggcagcttgaaaaaaagcttgaagaccttgaagagcagttaaatcatctgctgctgtggttatctcctattaggaatcagttggaaatttataaccaaccaaaccaagaaggaccatttgacgttaaggaaactgaaatagcagttcaagctaaacaaccggatgtggaagagattttgtctaaagggcagcatttgtacaaggaaaaaccagccactcagccagtgaagaggaagttagaagatctgagctctgagtggaaggcggtaaaccgtttacttcaagagctgagggcaaagcagcctgacctagctcctggactgaccactattggagcctctcctactcagactgttactctggtgacacaacctgtggttactaaggaaactgccatctccaaactagaaatgccatcttccttgatgttggaggtacctgctctggcagatttcaaccgggcttggacagaacttaccgactggctttctctgcttgatcaagttataaaatcacagagggtgatggtgggtgaccttgaggatatcaacgagatgatcatcaagcagaaggcaacaatgcaggatttggaacagaggcgtccccagttggaagaactcattaccgctgcccaaaatttgaaaaacaagaccagcaatcaagaggctagaacaatcattacggatcgaattgaaagaattcagaatcagtgggatgaagtacaagaacaccttcagaaccggaggcaacagttgaatgaaatgttaaaggattcaacacaatggctggaagctaaggaagaagctgagcaggtcttaggacaggccagagccaagcttgagtcatggaaggagggtccctatacagtagatgcaatccaaaagaaaatcacagaaaccaagcagttggccaaagacctccgccagtggcagacaaatgtagatgtggcaaatgacttggccctgaaacttctccgggattattctgcagatgataccagaaaagtccacatgataacagagaatatcaatgcctcttggagaagcattcataaaagggtgagtgagcgagaggctgctttggaagaaactcatagattactgcaacagttccccctggacctggaaaagtttcttgcctggcttacagaagctgaaacaactgccaatgtcctacaggatgctacccgtaaggaaaggctcctagaagactccaagggagtaaaagagctgatgaaacaatggcaagacctccaaggtgaaattgaagctcacacagatgtttatcacaacctggatgaaaacagccaaaaaatcctgagatccctggaaggttccgatgatgcagtcctgttacaaagacgtttggataacatgaacttcaagtggagtgaacttcggaaaaagtctctcaacattaggtcccatttggaagccagttctgaccagtggaagcgtctgcacctttctctgcaggaacttctggtgtggctacagctgaaagatgatgaattaagccggcaggcacctattggaggcgactttccagcagttcagaagcagaacgatgtacatagggccttcaagagggaattgaaaactaaagaacctgtaatcatgagtactcttgagactgtacgaatatttctgacagagcagcctttggaaggactagagaaactctaccaggagcccagagagctgcctcctgaggagagagcccagaatgtcactcggcttctacgaaagcaggctgaggaggtcaatactgagtgggaaaaattgaacctgcactccgctgactggcagagaaaaatagatgagacccttgaaagactccgggaacttcaagaggccacggatgagctggacctcaagctgcgccaagctgaggtgatcaagggatcctggcagcccgtgggcgatctcctcattgactctctccaagatcacctcgagaaagtcaaggcacttcgaggagaaattgcgcctctgaaagagaacgtgagccacgtcaatgaccttgctcgccagcttaccactttgggcattcagctctcaccgtataacctcagcactctggaagacctgaacaccagatggaagcttctgcaggtggccgtcgaggaccgagtcaggcagctgcatgaagcccacagggactttggtccagcatctcagcactttctttccacgtctgtccagggtccctgggagagagccatctcgccaaacaaagtgccctactatatcaaagctgacctgaataatgtcagattctcagcttataggactgccatgaaactccgaagactgcagaaggccctttgcttggatctcttgagcctgtcagctgcatgtgatgccttggaccagcacaacctcaagcaaaatgaccagcccatggatatcctgcagattattaattgtttgaccactatttatgaccgcctggagcaagagcacaacaatttggtcaacgtccctctctgcgtggatatgtgtctgaactggctgctgaatgtttatgatacgggacgaacagggaggatccgtgtcctgtcttttaaaactggcatcatttccctgtgtaaagcacatttggaagacaagtacagataccttttcaagcaagtggcaagttcaacaggattttgtgaccagcgcaggctgggcctccttctgcatgattctatccaaattccaagacagttgggtgaagttgcatcctttgggggcagtaacattgagccaagtgtccggagctgcttccaatttgctaataataagccagagatcgaagcggccctcttcctagactggatgagactggaaccccagtccatggtgtggctgcccgtcctgcacagagtggctgctgcagaaactgccaagcatcaggccaaatgtaacatctgcaaagagtgtccaatcattggattcaggtacaggagtctaaagcactttaattatgacatctgccaaagctgctttttttctggtcgagttgcaaaaggccataaaatgcactatcccatggtggaatattgcactccgactacatcaggagaagatgttcgagactttgccaaggtactaaaaaacaaatttcgaaccaaaaggtattttgcgaagcatccccgaatgggctacctgccagtgcagactgtcttagagggggacaacatggaaactcccgttactctgatcaacttctggccagtagattctgcgcctgcctcgtcccctcagctttcacacgatgatactcattcacgcattgaacattatgctagcaggctagcagaaatggaaaacagcaatggatcttatctaaatgatagcatctctcctaatgagagcatagatgatgaacatttgttaatccagcattactgccaaagtttgaaccaggactcccccctgagccagcctcgtagtcctgcccagatcttgatttccttagagagtgaggaaagaggggagctagagagaatcctagcagatcttgaggaagaaaacaggaatctgcaagcagaatatgaccgtctaaagcagcagcacgaacataaaggcctgtccccactgccgtcccctcctgaaatgatgcccacctctccccagagtccccgggatgctgagctcattgctgaggccaagctactgcgtcaacacaaaggccgcctggaagccaggatgcaaatcctggaagaccacaataaacagctggagtcacagttacacaggctaaggcagctgctggagcaaccccaggcagaggccaaagtgaatggcacaacggtgtcctctccttctacctctctacagaggtccgacagcagtcagcctatgctgctccgagtggttggcagtcaaacttcggactccatgggtgaggaagatcttctcagtcctccccaggacacaagcacagggttagaggaggtgatggagcaactcaacaactccttccctagttcaagaggaagaaatacccctggaaagccaatgagagaggacacaatgtaggaagtcttttccacatggcagatgatttgggcagagcgatggagtccttagtatcagtcatgacagatgaagaaggagcagaataaatgttttacaactcctgattcccgcatggtttttataatattcatacaacaaagaggattagacagtaagagtttacaagaaataaatctatatttttgtgaagggtagtggtattatactgtagatttcagtagtttctaagtctgttattgttttgttaacaatggcaggttttacacgtctatgcaattgtacaaaaaagttataagaaaactacatgtaaaatcttgatagctaaataacttgccatttctttatatggaacgcattttgggttgtttaaaaatttataacagttataaagaaagattgtaaactaaagtgtgctttataaaaaaaagttgtttataaaaacccctaaaaacaaaacaaacacacacacacacacatacacacacacacacaaaactttgaggcagcgcattgttttgcatccttttggcgtgatatccatatgaaattcatggctttttctttttttgcatattaaagataagacttcctctaccaccacaccaaatgactactacacactgctcatttgagaactgtcagctgagtggggcaggcttgagttttcatttcatatatctatatgtctataagtatataaatactatagttatatagataaagagatacgaatttctatagactgactttttccattttttaaatgttcatgtcacatcctaatagaaagaaattacttctagtcagtcatccaggcttacctgcttggtctagaatggatttttcccggagccggaagccaggaggaaactacaccacactaaaacattgtctacagctccagatgtttctcattttaaacaactttccactgacaacgaaagtaaagtaaagtattggatttttttaaagggaacatgtgaatgaatacacaggacttattatatcagagtgagtaatcggttggttggttgattgattgattgattgatacattcagcttcctgctgctagcaatgccacgatttagatttaatgatgcttcagtggaaatcaatcagaaggtattctgaccttgtgaacatcagaaggtattttttaactcccaagcagtagcaggacgatgatagggctggagggctatggattcccagcccatccctgtgaaggagtaggccactctttaagtgaaggattggatgattgttcataatacataaagttctctgtaattacaactaaattattatgccctcttctcacagtcaaaaggaactgggtggtttggtttttgttgcttttttagatttattgtcccatgtgggatgagtttttaaatgccacaagacataatttaaaataaataaactttgggaaaaggtgtaaaacagtagccccatcacatttgtgatactgacaggtatcaacccagaagcccatgaactgtgtttccatcctttgcatttctctgcgagtagttccacacaggtttgtaagtaagtaagaaagaaggcaaattgattcaaatgttacaaaaaaacccttcttggtggattagacaggttaaatatataaacaaacaaacaaaaattgctcaaaaaagaggagaaaagctcaagaggaaaagctaaggactggtaggaaaaagctttactctttcatgccattttatttctttttgatttttaaatcattcattcaatagataccaccgtgtgacctataattttgcaaatctgttacctctgacatcaagtgtaattagcttttggagagtgggctgacatcaagtgtaattagcttttggagagtgggttttgtccattattaataattaattaattaacatcaaacacggcttctcatgctatttctacctcactttggttttggggtgttcctgataattgtgcacacctgagttcacagcttcaccacttgtccattgcgttattttctttttcctttataattctttctttttccttcataattttcaaaagaaaacccaaagctctaaggtaacaaattaccaaattacatgaagatttggtttttgtcttgcatttttttcctttatgtgacgctggaccttttctttacccaaggatttttaaaactcagatttaaaacaaggggttactttacatcctactaagaagtttaagtaagtaagtttcattctaaaatcagaggtaaatagagtgcataaataattttgttttaatctttttgtttttcttttagacacattagctctggagtgagtctgtcataatatttgaacaaaaattgagagctttattgctgcattttaagcataattaatttggacattatttcgtgttgtgttctttataaccaccaagtattaaactgtaaatcataatgtaactgaagcataaacatcacatggcatgttttgtcattgttttcaggtactgagttcttacttgagtatcataatatattgtgttttaacaccaacactgtaacatttacgaattatttttttaaacttcagttttactgcattttcacaacatatcagacttcaccaaatatatgccttactattgtattatagtactgctttactgtgtatctcaataaagcacgcagttatgttacaaaaaagta

SEQ ID NO: 12301 - protein, 3542 aa, Homo sapiens
MKNIMAGLQQTNSEKILLSWVRQSTRNYPQVNVINFTTSWSDGLALNALIHSHRPDLFDWNSVVCQQSATQRLEHAFNIARYQLGIEKLLDPEDVDTTYPDKKSILMYITSLFQVLPQQVSIEAIQEVEMLPRPPKVTKEEHFQLHHQMHYSQQITVSLAQGYERTSSPKPRFKSYAYTQAAYVTTSDPTRSPFPSQHLEAPEDKSFGSSLMESEVNLDRYQTALEEVLSWLLSAEDTLQAQGEISNDVEVVKDQFHTHEGYMMDLTAHQGRVGNILQLGSKLIGTGKLSEDEETEVQEQMNLLNSRWECLRVASMEKQSNLHRVLMDLQNQKLKELNDWLTKTEERTRKMEEEPLGPDLEDLKRQVQQHKVLQEDLEQEQVRVNSLTHMVVVVDESSGDHATAALEEQLKVLGDRWANICRWTEDRWVLLQDILLKWQRLTEEQCLFSAWLSEKEDAVNKIHTTGFKDQNEMLSSLQKLAVLKADLEKKKQSMGKLYSLKQDLLSTLKNKSVTQKTEAWLDNFARCWDNLVQKLEKSTAQISQAVTTTQPSLTQTTVMETVTTVTTREQILVKHAQEELPPPPPQKKRQITVDSEIRKRLDVDITELHSWITRSEAVLQSPEFAIFRKEGNFSDLKEKVNAIEREKAEKFRKLQDASRSAQALVEQMVNEGVNADSIKQASEQLNSRWIEFCQLLSERLNWLEYQNNIIAFYNQLQQLEQMTTTAENWLKIQPTTPSEPTAIKSQLKICKDEVNRLSDLQPQIERLKIQSIALKEKGQGPMFLDADFVAFTNHFKQVFSDVQAREKELQTIFDTLPPMRYQETMSAIRTWVQQSETKLSIPQLSVTDYEIMEQRLGELQALQSSLQEQQSGLYYLSTTVKEMSKKAPSEISRKYQSEFEEIEGRWKKLSSQLVEHCQKLEEQMNKLRKIQNHIQTLKKWMAEVDVFLKEEWPALGDSEILKKQLKQCRLLVSDIQTIQPSLNSVNEGGQKIKNEAEPEFASRLETELKELNTQWDHMCQQVYARKEALKGGLEKTVSLQKDLSEMHEWMTQAEEEYLERDFEYKTPDELQKAVEEMKRAKEEAQQKEAKVKLLTESVNSVIAQAPPVAQEALKKELETLTTNYQWLCTRLNGKCKTLEEVWACWHELLSYLEKANKWLNEVEFKLKTTENIPGGAEEISEVLDSLENLMRHSEDNPNQIRILAQTLTDGGVMDELINEELETFNSRWRELHEEAVRRQKLLEQSIQSAQETEKSLHLIQESLTFIDKQLAAYIADKVDAAQMPQEAQKIQSDLTSHEISLEEMKKHNQGKEAAQRVLSQIDVAQKKLQDVSMKFRLFQKPANFEQRLQESKMILDEVKMHLPALETKSVEQEVVQSQLNHCVNLYKSLSEVKSEVEMVIKTGRQIVQKKQTENPKELDERVTALKLHYNELGAKVTERKQQLEKCLKLSRKMRKEMNVLTEWLAATDMELTKRSAVEGMPSNLDSEVAWGKATQKEIEKQKVHLKSITEVGEALKTVLGKKETLVEDKLSLLNSNWIAVTSRAEEWLNLLLEYQKHMETFDQNVDHITKWIIQADTLLDESEKKKPQQKEDVLKRLKAELNDIRPKVDSTRDQAANLMANRGDHCRKLVEPQISELNHRFAAISHRIKTGKASIPLKELEQFNSDIQKLLEPLEAEIQQGVNLKEEDFNKDMNEDNEGTVKELLQRGDNLQQRITDERKREEIKIKQQLLQTKHNALKDLRSQRRKKALEISHQWYQYKRQADDLLKCLDDIEKKLASLPEPRDERKIKEIDRELQKKKEELNAVRRQAEGLSEDGAAMAVEPTQIQLSKRWREIESKFAQFRRLNFAQIHTVREETMMVMTEDMPLEISYVPSTYLTEITHVSQALLEVEQLLNAPDLCAKDFEDLFKQEESLKNIKDSLQQSSGRIDIIHSKKTAALQSATPVERVKLQEALSQLDFQWEKVNKMYKDRQGRFDRSVEKWRRFHYDIKIFNQWLTEAEQFLRKTQIPENWEHAKYKWYLKELQDGIGQRQTVVRTLNATGEEIIQQSSKTDASILQEKLGSLNLRWQEVCKQLSDRKKRLEEQKNILSEFQRDLNEFVLWLEEADNIASIPLEPGKEQQLKEKLEQVKLLVEELPLRQGILKQLNETGGPVLVSAPISPEEQDKLENKLKQTNLQWIKVSRALPEKQGEIEAQIKDLGQLEKKLEDLEEQLNHLLLWLSPIRNQLEIYNQPNQEGPFDVKETEIAVQAKQPDVEEILSKGQHLYKEKPATQPVKRKLEDLSSEWKAVNRLLQELRAKQPDLAPGLTTIGASPTQTVTLVTQPVVTKETAISKLEMPSSLMLEVPALADFNRAWTELTDWLSLLDQVIKSQRVMVGDLEDINEMIIKQKATMQDLEQRRPQLEELITAAQNLKNKTSNQEARTIITDRIERIQNQWDEVQEHLQNRRQQLNEMLKDSTQWLEAKEEAEQVLGQARAKLESWKEGPYTVDAIQKKITETKQLAKDLRQWQTNVDVANDLALKLLRDYSADDTRKVHMITENINASWRSIHKRVSEREAALEETHRLLQQFPLDLEKFLAWLTEAETTANVLQDATRKERLLEDSKGVKELMKQWQDLQGEIEAHTDVYHNLDENSQKILRSLEGSDDAVLLQRRLDNMNFKWSELRKKSLNIRSHLEASSDQWKRLHLSLQELLVWLQLKDDELSRQAPIGGDFPAVQKQNDVHRAFKRELKTKEPVIMSTLETVRIFLTEQPLEGLEKLYQEPRELPPEERAQNVTRLLRKQAEEVNTEWEKLNLHSADWQRKIDETLERLRELQEATDELDLKLRQAEVIKGSWQPVGDLLIDSLQDHLEKVKALRGEIAPLKENVSHVNDLARQLTTLGIQLSPYNLSTLEDLNTRWKLLQVAVEDRVRQLHEAHRDFGPASQHFLSTSVQGPWERAISPNKVPYYIKADLNNVRFSAYRTAMKLRRLQKALCLDLLSLSAACDALDQHNLKQNDQPMDILQIINCLTTIYDRLEQEHNNLVNVPLCVDMCLNWLLNVYDTGRTGRIRVLSFKTGIISLCKAHLEDKYRYLFKQVASSTGFCDQRRLGLLLHDSIQIPRQLGEVASFGGSNIEPSVRSCFQFANNKPEIEAALFLDWMRLEPQSMVWLPVLHRVAAAETAKHQAKCNICKECPIIGFRYRSLKHFNYDICQSCFFSGRVAKGHKMHYPMVEYCTPTTSGEDVRDFAKVLKNKFRTKRYFAKHPRMGYLPVQTVLEGDNMETPVTLINFWPVDSAPASSPQLSHDDTHSRIEHYASRLAEMENSNGSYLNDSISPNESIDDEHLLIQHYCQSLNQDSPLSQPRSPAQILISLESEERGELERILADLEEENRNLQAEYDRLKQQHEHKGLSPLPSPPEMMPTSPQSPRDAELIAEAKLLRQHKGRLEARMQILEDHNKQLESQLHRLRQLLEQPQAEAKVNGTTVSSPSTSLQRSDSSQPMLLRVVGSQTSDSMGEEDLLSPPQDTSTGLEEVMEQLNNSFPSSRGRNTPGKPMREDTM

SEQ ID NO: 12302 - DNA, 3855 bp, Homo sapiens
atgcgaaaggggagctgttggaattcaaatagactttctggttcccagcagtcggcagtaatagaatgctttcaggaagatgacagaatcaggagaaagatgctgttttgcactatcttgatttgttacagcagccaacttattggcatgatggagtgacaggaaaaacagctggcatggaagatgaaagagaagatgttcaaaagaaaacattcacaaaatgggtaaatgcacaattttctaagtttgggaagcagcatattgagaacctcttcagtgacctacaggatgggaggcgcctcctagacctcctcgaaggcctgacagggcaaaaactgccaaaagaaaaaggatccacaagagttcatgccctgaacaatgtcaacaaggcactgcgggttttgcagaacaataatgttgatttagtgaatattggaagtactgacatcgtagatggaaatcataaactgactcttggtttgatttggaatataatcctccactggcaggtcaaaaatgtaatgaaaaatatcatggctggattgcaacaaaccaacagtgaaaagattctcctgagctgggtccgacaatcaactcgtaattatccacaggttaatgtaatcaacttcaccaccagctggtctgatggcctggctttgaatgctctcatccatagtcataggccagacctatttgactggaatagtgtggtttgccagcagtcagccacacaacgactggaacatgcattcaacatcgccagatatcaattaggcatagagaaactactcgatcctgaagatgttgataccacctatccagataagaagtccatcttaatgtacatcacatcactcttccaagttttgcctcaacaagtgagcattgaagccatccaggaagtggaaatgttgccaaggccacctaaagtgactaaagaagaacattttcagttacatcatcaaatgcactattctcaacagatcacggtcagtctagcacagggatatgagagaacttcttcccctaagcctcgattcaagagctatgcctacacacaggctgcttatgtcaccacctctgaccctacacggagcccatttccttcacagcatttggaagctcctgaagacaagtcatttggcagttcattgatggagagtgaagtaaacctggaccgttatcaaacagctttagaagaagtattatcgtggcttctttctgctgaggacacattgcaagcacaaggagagatttctaatgatgtggaagtggtgaaagaccagtttcatactcatgaggggtacatgatggatttgacagcccatcagggccgggttggtaatattctacaattgggaagtaagctgattggaacaggaaaattatcagaagatgaagaaactgaagtacaagagcagatgaatctcctaaattcaagatgggaatgcctcagggtagctagcatggaaaaacaaagcaatttacatagagttttaatggatctccagaatcagaaactgaaagagttgaatgactggctaacaaaaacagaagaaagaacaaggaaaatggaggaagagcctcttggacctgatcttgaagacctaaaacgccaagtacaacaacataaggtgcttcaagaagatctagaacaagaacaagtcagggtcaattctctcactcacatggtggtggtagttgatgaatctagtggagatcacgcaactgctgctttggaagaacaacttaaggtattgggagatcgatgggcaaacatctgtagatggacagaagaccgctgggttcttttacaagacatccttctcaaatggcaacgtcttactgaagaacagtgcctttttagtgcatggctttcagaaaaagaagatgcagtgaacaagattcacacaactggctttaaagatcaaaatgaaatgttatcaagtcttcaaaaactggccgttttaaaagcggatctagaaaagaaaaagcaatccatgggcaaactgtattcactcaaacaagatcttctttcaacactgaagaataagtcagtgacccagaagacggaagcatggctggataactttgcccggtgttgggataatttagtccaaaaacttgaaaagagtacagcacagatttcacaggctgtcaccaccactcagccatcactaacacagacaactgtaatggaaacagtaactacggtgaccacaagggaacagatcctggtaaagcatgctcaagaggaacttccaccaccacctccccaaaagaagaggcagattactgtggattctgaaattaggaaaaggttggatgttgatataactgaacttcacagctggattactcgctcagaagctgtgttgcagagtcctgaatttgcaatctttcggaaggaaggcaacttctcagacttaaaagaaaaagtcaatgtaggttatgcattaatttttatatctgtactcattttgtgctgcttgtaaactccgtgctttgttatctgtgattctactagttgatagattaatgcgatatgataaaatgctgtttaatatgtcttaaaaatatattttagatagcaagcaaaatcaaagtttagcctagagaaatctttctggattcttctgtgactgactagggatgcctttcataaacttgccttaacttacatattatttaactataaattaacaattttatgacattaattcatgttgattcctttcatatattgttcagttacctcaaggctaggccttagcaagcttgcacaattgtgtagagtagaatagagtaaaatagaatagaataatataatagataccatacttaggactatgtctatattctcactgttatcaaaaagttattctttatagtcatcaatccctgtcatatattataagatatttaaatttcccagatatttgtgtattaccttatctaaaaggtgtccagcctttctcagtatttacatgtggtagcagatgctttgttgttgttattcccttctgagatggtataattttgaccttcacaaataggaagttttattaatttaatataaagtgtttcatctttagggaaattgtcaaggctttaatttttcaacttcaacaattataaaacatgcatctttgtatatgattggcaacagtttgtaaaataatttctaacaggcagagtaaataaaatgggcaagctaaggaagcagtgattatgaatgaaaagtaattttatccatgggaagatcacatctaaatgtgtatattagctctgctttttctctccaggattcaaatcatgaagttcaaaatccattgtatttttacaaatacgacattacctcagttacaagctaatgtttgctgttggggttggaacttttggagatcaacaaaagatatatatatattctggaaaaaaaatctattttttaggctgcttgaaaaagggaagacaattttgtcaccagttcttcttagagttaactacttataaattggaaagctattttaaattacttattagctttataagacatgctgttgtcagcattataatagactattctaaattgtttcaagaaatgggaaatatgaaaactgaaagataatatataattgtagaaaattagctaaatgtcttttttcaagtatacttctttgaaggtaaattgtttgctgtgatttttgagggaaattctcttagtagtagaaaattaattagagaacattaaactctaattttcaaacatcatgttacatatttgaccactgaaagtatgaatcacctttagcattttattagctaattaaaaatgattattgatctgattctcac

SEQ ID NO: 12303 - protein, 772 aa, Homo sapiens
MEDEREDVQKKTFTKWVNAQFSKFGKQHIENLFSDLQDGRRLLDLLEGLTGQKLPKEKGSTRVHALNNVNKALRVLQNNNVDLVNIGSTDIVDGNHKLTLGLIWNIILHWQVKNVMKNIMAGLQQTNSEKILLSWVRQSTRNYPQVNVINFTTSWSDGLALNALIHSHRPDLFDWNSVVCQQSATQRLEHAFNIARYQLGIEKLLDPEDVDTTYPDKKSILMYITSLFQVLPQQVSIEAIQEVEMLPRPPKVTKEEHFQLHHQMHYSQQITVSLAQGYERTSSPKPRFKSYAYTQAAYVTTSDPTRSPFPSQHLEAPEDKSFGSSLMESEVNLDRYQTALEEVLSWLLSAEDTLQAQGEISNDVEVVKDQFHTHEGYMMDLTAHQGRVGNILQLGSKLIGTGKLSEDEETEVQEQMNLLNSRWECLRVASMEKQSNLHRVLMDLQNQKLKELNDWLTKTEERTRKMEEEPLGPDLEDLKRQVQQHKVLQEDLEQEQVRVNSLTHMVVVVDESSGDHATAALEEQLKVLGDRWANICRWTEDRWVLLQDILLKWQRLTEEQCLFSAWLSEKEDAVNKIHTTGFKDQNEMLSSLQKLAVLKADLEKKKQSMGKLYSLKQDLLSTLKNKSVTQKTEAWLDNFARCWDNLVQKLEKSTAQISQAVTTTQPSLTQTTVMETVTTVTTREQILVKHAQEELPPPPPQKKRQITVDSEIRKRLDVDITELHSWITRSEAVLQSPEFAIFRKEGNFSDLKEKVNVGYALIFISVLILCCL

SEQ ID NO: 12304 - DNA, 5731 bp, Homo sapiens
atgtcggaatctgaaggcgggaaaggtgagagaatccttccatccctgcagacccttggagcaagcatcgtggagtggaagcccttcgacatcctcatcctgctgaccatctttgccaactgcgtggccctgggagtttacatccccttccctgaggacgactccaacactgccaaccacaacctggagcaggtggagtacgtattcctggtgattttcactgtggagacggtgctcaagatcgtggcctacgggctggtgctccaccccagcgcctacatccgcaatggctggaacctactcgacttcatcatcgtcgtggtcgggctgttcagcgttctgctggagcagggccccggacggccaggcgacgccccgcacaccgggggaaagccaggaggcttcgatgtgaaggcattgagggcgtttcgggtgctgcggccactgaggctggtgtctggggtcccgagcctgcacatagtgctcaattccatcatgaaggctctggtgccgctgctgcacattgcactgctcgtgctcttcgtcatcatcatttatgccatcattgggctcgagctgttccttggacgaatgcacaagacgtgctacttcctgggatccgacatggaagcggaggaggacccatcgccctgtgcgtcttcgggatcagggcgtgcgtgcacgctgaaccagactgagtgccgcgggcgctggccagggcccaatggaggcatcaccaactttgacaacttcttcttcgccatgctgacagtcttccagtgtgtcaccatggaaggctggaccgatgtgctctactggatgcaagatgccatggggtatgaactgccctgggtgtactttgtgagccttgtcatctttgggtccttcttcgtcctcaaccttgtgcttggcgtcctgagtggggagttctccaaggagagagagaaagcgaaagctcgcggggacttccagaagcagcgggagaagcagcagatggaggaagacctgcggggctacctggactggatcactcaagccgaagagctggacatggaggacccctccgccgatgacaaccttggttctatggctgaagagggccgggcgggccatcggccacagctggccgagctgaccaataggaggcgtggacgtctgcgctggttcagtcattctactcgctccacacactccaccagcagccatgccagcctcccagccagtgacaccggttccatgacagagacccaaggcgatgaggatgaggaggagggggctctggccagctgtacacgctgcctaaacaagatcatgaaaaccagagtctgccgccgcctccgccgagccaaccgggtccttcgggcacgctgccgtcgggcagtgaagtccaatgcctgctactgggctgtgctgttgctcgtcttcctcaacacgttgaccatcgcctctgagcaccacgggcagcctgtgtggctcacccagatccaggagtatgccaacaaagtgttgctctgtctgttcacggtggagatgcttctcaaattgtacggtctgggcccctctgcctatgtgtcttccttcttcaaccgctttgactgctttgtggtctgtgggggcatcctagagaccaccttggtggaggtgggcgccatgcagcccttgggcatctcagtgctccgatgtgtgcgcctcctcaggatctttaaggtcaccagacactgggcttctctgagcaatctggtggcatccctgctcaattcaatgaaatccatcgcatccttgctgcttctcctcttcctcttcatcattatcttctccctgcttggcatgcagctgtttgggggcaagttcaactttgaccagacccacaccaagcgaagcacctttgacacgttcccccaggccctcctcactgtctttcagatcctgacaggtgaggactggaacgtggtcatgtatgatggtatcatggcatatggtggccccttcttcccaggaatgttggtgtgcatctatttcatcattctcttcatctgtggcaactacatcctgttgaacgtgtttcttgccattgctgtggacaacctggccagtggagatgcaggcactgccaaggacaagggcggggagaagagcaatgagaaggatctcccacaggagaatgaaggcctggtgcctggtgtggagaaagaggaagaggagggtgcaaggagggaaggagcaggtgcagggggtgtggaactcctgcaggaagttgtacccaaggagaaggtggtacccatccctgagggcagcgccttcttctgcctcagccaaaccaacccgctgaggaagggctgccacaccctcatccaccatcatgtcttcaccaatcttatcctggtgttcatcatcctcagcagtgtgtccctggccgctgaggaccccatccgagcccactccttccgcaaccatattctgggttacttcgattatgccttcacctccattttcactgtggagattctactaaagatgacagtgtttggggccttcctgcaccgcggctccttctgccgtagctggtttaatatgttggatctgctggtggtcagtgtgtccctcatctcctttggcatccactccagcgccatctcggtggtgaagattctgcgagtactccgagtactgcggcccctccgagccatcaacagggccaagggactcaagcatgtggtgcagtgtgtatttgtggccatccggaccatcggaaacatcatgattgtcaccacacttctgcaatttatgttcgcctgcatcggggtgcagctcttcaaggggaaattctacacctgcacggacgaggccaaacacacccctcaagaatgcaagggctccttcctggtatacccagatggagacgtgtcacggcccctggtccgggagcggctctgggtcaacagtgatttcaactttgacaatgtcctttcagccatgatggccctgttcactgtctccacctttgaaggctggcctgcactgctatacaaggccatcgatgcatatgcagaggaccatggccccatctataattaccgtgtggagatctcagtgttcttcattgtctacatcatcatcattgcgttcttcatgatgaacatcttcgtgggcttcgtcatcatcactttccgtgcccagggcgagcaggagtaccaaaactgtgagctggacaagaaccagcgtcaatgtgtggaatatgccctcaaggcccagccactccgccgttacatccccaagaacccgcatcagtatcgtgtgtgggccactgtgaactctgctgcctttgagtacctgatgttcctgctcatcctgctcaacacagttgccctagccatgcagcactatgagcagactgctcccttcaactatgccatggacatcctcaacatggtcttcactggcctcttcactattgagatggtgctcaaaatcatcgccttcaagcccaagcgtttgacgctcttattgtggtgggcagcatagtggatattgccgtcactgaagtcaataatggtggccaccttggcgagagctctgaggacagctcccgcatttccattaccttctttcgcctcttccgagttatgcggctggtcaagcttctcagtaagggtgaagggatccgcacattgctctggacattcatcaagtccttccaggccttgccctatgtggctcttctcatcgcaatgatattcttcatctatgccgtcattggcatgcagatgttcggcaaggtggctcttcaggatggcacacagataaaccgaaacaacaacttccagacctttccacaggctgtgctgcttctgttcaggtgtgccactggtgaggcatggcaggagataatgcttgccagccttcccggaaatcggtgtgatcctgagtctgacttcggccctggtgaagagtttacctgtggtagcaattttgccatcgcctatttcatcagcttcttcatgctctgtgccttcctgatcataaatctctttgtggctgtgatcatggacaactttgattatctcaccagagattggtccatcctgggcccccatcaccttgatgaattcaagaggatctggtctgaatatgaccctggggccaagggccgcatcaaacacttggatgtggttgccctgctgagacgtatccagccccctctgggatttgggaagctgtgcccacaccgagtggcctgcaagagacttgtggcaatgaacatgcccctcaactcagatgggacggtgacattcaacgccacactctttgccctggtccggacatccctgaagatcaaaacagaagggaacctggagcaagccaaccaggagctgcggattgtcatcaaaaagatctggaagcggatgaaacagaagctgctagatgaggtcatccccccaccagacgaggaggaggtcaccgtgggcaaattctacgccacatttctgatccaggactatttccgcaaattccggcggaggaaagaaaaagggctactaggcaacgacgccgcccctagcacctcttccgcccttcaggctggtctgcggagcctgcaggacttgggtcctgagatgcggcaggccctcacctgtgacacagaggaggaggaagaagaggggcaggagggagtggaggaggaagatgaaaaggacttggaaactaacaaagccacgatggtctcccagccctcagctcgccggggctccgggatttctgtgtctctgcctgtcggggacagacttccagattcactctcctttgggcccagtgatgatgacagggggactcccacctccagtcagcccagtgtgccccaggctggatccaacacccacaggagaggctctggggctctcattttcaccatcccagaagaaggaaattctcagcccaagggaaccaaagggcaaaacaagcaagatgaggatgaggaagtccctgatcggctttcctacctagatgagcaggcagggactcccccgtgctcagtccttttgccacctcacagagctcagagatacatggatgggcacctggtaccacgccgccgtctgctgccccccacacctgcaggtcggaagccctccttcaccatccagtgtctgcagcgccagggcagttgtgaggatttacccatcccaggcacctatcatcgtgggcgaaattcagggcccaatagggctcagggttcctgggcaacaccacctcagcggggtcggctcctgtatgccccgctgttgttggtggaagagggcgcagcgggggaggggtacctcggcagatccagtggcccactgcgcaccttcacctgtctgcacgtgcctggaacccactcggaccccagccatgggaagaggggcagtgccgacagcttggtggaggctgtgcttatctcagagggtctgggcctctttgctcgagacccacgtttcgtggccctggccaagcaggagattgcagatgcgtgtcgcctgacgctggatgagatggacaatgctgccagtgacctgctggcacagggaaccagctctctctatagcgacgaggagtccatcctctcccgcttcgatgaggaggacttgggagacgagatggcctgcgtccacgccctctgaattcccacccctccccaactgctcaataaacctcctgccctcccctccccagcaggaggcaggcatggaccaca

SEQ ID NO: 12305 - protein, 1173 aa, Homo sapiens
MSESEGGKGERILPSLQTLGASIVEWKPFDILILLTIFANCVALGVYIPFPEDDSNTANHNLEQVEYVFLVIFTVETVLKIVAYGLVLHPSAYIRNGWNLLDFIIVVVGLFSVLLEQGPGRPGDAPHTGGKPGGFDVKALRAFRVLRPLRLVSGVPSLHIVLNSIMKALVPLLHIALLVLFVIIIYAIIGLELFLGRMHKTCYFLGSDMEAEEDPSPCASSGSGRACTLNQTECRGRWPGPNGGITNFDNFFFAMLTVFQCVTMEGWTDVLYWMQDAMGYELPWVYFVSLVIFGSFFVLNLVLGVLSGEFSKEREKAKARGDFQKQREKQQMEEDLRGYLDWITQAEELDMEDPSADDNLGSMAEEGRAGHRPQLAELTNRRRGRLRWFSHSTRSTHSTSSHASLPASDTGSMTETQGDEDEEEGALASCTRCLNKIMKTRVCRRLRRANRVLRARCRRAVKSNACYWAVLLLVFLNTLTIASEHHGQPVWLTQIQEYANKVLLCLFTVEMLLKLYGLGPSAYVSSFFNRFDCFVVCGGILETTLVEVGAMQPLGISVLRCVRLLRIFKVTRHWASLSNLVASLLNSMKSIASLLLLLFLFIIIFSLLGMQLFGGKFNFDQTHTKRSTFDTFPQALLTVFQILTGEDWNVVMYDGIMAYGGPFFPGMLVCIYFIILFICGNYILLNVFLAIAVDNLASGDAGTAKDKGGEKSNEKDLPQENEGLVPGVEKEEEEGARREGAGAGGVELLQEVVPKEKVVPIPEGSAFFCLSQTNPLRKGCHTLIHHHVFTNLILVFIILSSVSLAAEDPIRAHSFRNHILGYFDYAFTSIFTVEILLKMTVFGAFLHRGSFCRSWFNMLDLLVVSVSLISFGIHSSAISVVKILRVLRVLRPLRAINRAKGLKHVVQCVFVAIRTIGNIMIVTTLLQFMFACIGVQLFKGKFYTCTDEAKHTPQECKGSFLVYPDGDVSRPLVRERLWVNSDFNFDNVLSAMMALFTVSTFEGWPALLYKAIDAYAEDHGPIYNYRVEISVFFIVYIIIIAFFMMNIFVGFVIITFRAQGEQEYQNCELDKNQRQCVEYALKAQPLRRYIPKNPHQYRVWATVNSAAFEYLMFLLILLNTVALAMQHYEQTAPFNYAMDILNMVFTGLFTIEMVLKIIAFKPKRLTLLLWWAA

SEQ ID NO: 12306 - DNA, 5955 bp, Homo sapiens
ctccaaagctgggggaagagaggggggttgtgtgcagatggcccttcaatctcgaaagaaagatgtcggaatctgaaggcgggaaagacaccaccccagagcccagtccagccaatggggcaggccctggtcccgaatgggggctgtgccccgggcccccagctgtggaaggtgaaagcagtggggcatcaggcctagggacccctaagcgaagaaaccagcacagcaagcacaagacagtggcagtggccagtgcccagcggtcacctcgggcactcttctgcctcaccctggccaatcctctgcgacggtcctgcatcagcatcgtggagtggaagcccttcgacatcctcatcctgctgaccatctttgccaactgcgtggccctgggagtttacatccccttccctgaggacgactccaacactgccaaccacaacctggagcaggtggagtacgtattcctggtgattttcactgtggagacggtgctcaagatcgtggcctacgggctggtgctccaccccagcgcctacatccgcaatggctggaacctactcgacttcatcatcgtcgtggtcgggctgttcagcgttctgctggagcagggccccggacggccaggcgacgccccgcacaccgggggaaagccaggaggcttcgatgtgaaggcattgagggcgtttcgggtgctgcggccactgaggctggtgtctggggtcccgagcctgcacatagtgctcaattccatcatgaaggctctggtgccgctgctgcacattgcactgctcgtgctcttcgtcatcatcatttatgccatcattgggctcgagctgttccttggacgaatgcacaagacgtgctacttcctgggatccgacatggaagcggaggaggacccatcgccctgtgcgtcttcgggatcagggcgtgcgtgcacgctgaaccagactgagtgccgcgggcgctggccagggcccaatggaggcatcaccaactttgacaacttcttcttcgccatgctgacagtcttccagtgtgtcaccatggaaggctggaccgatgtgctctactggatgcaagatgccatggggtatgaactgccctgggtgtactttgtgagccttgtcatctttgggtccttcttcgtcctcaaccttgtgcttggcgtcctgagtggggagttctccaaggagagagagaaagcgaaagctcgcggggacttccagaagcagcgggagaagcagcagatggaggaagacctgcggggctacctggactggatcactcaagccgaagagctggacatggaggacccctccgccgatgacaaccttgggccacagctggccgagctgaccaataggaggcgtggacgtctgcgctggttcagtcattctactcgctccacacactccaccagcagccatgccagcctcccagccagtgacaccggttccatgacagagacccaaggcgatgaggatgaggaggagggggctctggccagctgtacacgctgcctaaacaagatcatgaaaaccagagtctgccgccgcctccgccgagccaaccgggtccttcgggcacgctgccgtcgggcagtgaagtccaatgcctgctactgggctgtgctgttgctcgtcttcctcaacacgttgaccatcgcctctgagcaccacgggcagcctgtgtggctcacccagatccaggagtatgccaacaaagtgttgctctgtctgttcacggtggagatgcttctcaaattgtacggtctgggcccctctgcctatgtgtcttccttcttcaaccgctttgactgctttgtggtctgtgggggcatcctagagaccaccttggtggaggtgggcgccatgcagcccttgggcatctcagtgctccgatgtgtgcgcctcctcaggatctttaaggtcaccagacactgggcttctctgagcaatctggtggcatccctgctcaattcaatgaaatccatcgcatccttgctgcttctcctcttcctcttcatcattatcttctccctgcttggcatgcagctgtttgggggcaagttcaactttgaccagacccacaccaagcgaagcacctttgacacgttcccccaggccctcctcactgtctttcagatcctgacaggtgaggactggaacgtggtcatgtatgatggtatcatggcatatggtggccccttcttcccaggaatgttggtgtgcatctatttcatcattctcttcatctgtggcaactacatcctgttgaacgtgtttcttgccattgctgtggacaacctggccagtggagatgcaggcactgccaaggacaagggcggggagaagagcaatgagaaggatctcccacaggagaatgaaggcctggtgcctggtgtggagaaagaggaagaggagggtgcaaggagggaaggagcaggtgcagggggtgtggaactcctgcaggaagttgtacccaaggagaaggtggtacccatccctgagggcagcgccttcttctgcctcagccaaaccaacccgctgaggaagggctgccacaccctcatccaccatcatgtcttcaccaatcttatcctggtgttcatcatcctcagcagtgtgtccctggccgctgaggaccccatccgagcccactccttccgcaaccatattctgggttacttcgattatgccttcacctccattttcactgtggagattctactaaagatgacagtgtttggggccttcctgcaccgcggctccttctgccgtagctggtttaatatgttggatctgctggtggtcagtgtgtccctcatctcctttggcatccactccagcgccatctcggtggtgaagattctgcgagtactccgagtactgcggcccctccgagccatcaacagggccaagggactcaagcatgtggtgcagtgtgtatttgtggccatccggaccatcggaaacatcatgattgtcaccacacttctgcaatttatgttcgcctgcatcggggtgcagctcttcaaggggaaattctacacctgcacggacgaggccaaacacacccctcaagaatgcaagggctccttcctggtatacccagatggagacgtgtcacggcccctggtccgggagcggctctgggtcaacagtgatttcaactttgacaatgtcctttcagccatgatggccctgttcactgtctccacctttgaaggctggcctgcactgctatacaaggccatcgatgcatatgcagaggaccatggccccatctataattaccgtgtggagatctcagtgttcttcattgtctacatcatcatcattgcgttcttcatgatgaacatcttcgtgggcttcgtcatcatcactttccgtgcccagggcgagcaggagtaccaaaactgtgagctggacaagaaccagcgtcaatgtgtggaatatgccctcaaggcccagccactccgccgttacatccccaagaacccgcatcagtatcgtgtgtgggccactgtgaactctgctgcctttgagtacctgatgttcctgctcatcctgctcaacacagttgccctagccatgcagcactatgagcagactgctcccttcaactatgccatggacatcctcaacatggtcttcactggcctcttcactattgagatggtgctcaaaatcatcgccttcaagcccaagcgtttgacgctcttattgtggtgggcagcatagtggatattgccgtcactgaagtcaataatggtggccaccttggcgagagctctgaggacagctcccgcatttccattaccttctttcgcctcttccgagttatgcggctggtcaagcttctcagtaagggtgaagggatccgcacattgctctggacattcatcaagtccttccaggccttgccctatgtggctcttctcatcgcaatgatattcttcatctatgccgtcattggcatgcagatgttcggcaaggtggctcttcaggatggcacacagataaaccgaaacaacaacttccagacctttccacaggctgtgctgcttctgttcaggtgtgccactggtgaggcatggcaggagataatgcttgccagccttcccggaaatcggtgtgatcctgagtctgacttcggccctggtgaagagtttacctgtggtagcaattttgccatcgcctatttcatcagcttcttcatgctctgtgccttcctgatcataaatctctttgtggctgtgatcatggacaactttgattatctcaccagagattggtccatcctgggcccccatcaccttgatgaattcaagaggatctggtctgaatatgaccctggggccaagggccgcatcaaacacttggatgtggttgccctgctgagacgtatccagccccctctgggatttgggaagctgtgcccacaccgagtggcctgcaagagacttgtggcaatgaacatgcccctcaactcagatgggacggtgacattcaacgccacactctttgccctggtccggacatccctgaagatcaaaacagaagggaacctggagcaagccaaccaggagctgcggattgtcatcaaaaagatctggaagcggatgaaacagaagctgctagatgaggtcatccccccaccagacgaggaggaggtcaccgtgggcaaattctacgccacatttctgatccaggactatttccgcaaattccggcggaggaaagaaaaagggctactaggcaacgacgccgcccctagcacctcttccgcccttcaggctggtctgcggagcctgcaggacttgggtcctgagatgcggcaggccctcacctgtgacacagaggaggaggaagaagaggggcaggagggagtggaggaggaagatgaaaaggacttggaaactaacaaagccacgatggtctcccagccctcagctcgccggggctccgggatttctgtgtctctgcctgtcggggacagacttccagattcactctcctttgggcccagtgatgatgacagggggactcccacctccagtcagcccagtgtgccccaggctggatccaacacccacaggagaggctctggggctctcattttcaccatcccagaagaaggaaattctcagcccaagggaaccaaagggcaaaacaagcaagatgaggatgaggaagtccctgatcggctttcctacctagatgagcaggcagggactcccccgtgctcagtccttttgccacctcacagagctcagagatacatggatgggcacctggtaccacgccgccgtctgctgccccccacacctgcaggtcggaagccctccttcaccatccagtgtctgcagcgccagggcagttgtgaggatttacccatcccaggcacctatcatcgtgggcgaaattcagggcccaatagggctcagggttcctgggcaacaccacctcagcggggtcggctcctgtatgccccgctgttgttggtggaagagggcgcagcgggggaggggtacctcggcagatccagtggcccactgcgcaccttcacctgtctgcacgtgcctggaacccactcggaccccagccatgggaagaggggcagtgccgacagcttggtggaggctgtgcttatctcagagggtctgggcctctttgctcgagacccacgtttcgtggccctggccaagcaggagattgcagatgcgtgtcgcctgacgctggatgagatggacaatgctgccagtgacctgctggcacagggaaccagctctctctatagcgacgaggagtccatcctctcccgcttcgatgaggaggacttgggagacgagatggcctgcgtccacgccctctgaattcccacccctccccaactgctcaataaacctcctgccctcccctccccagcaggaggcaggcatggaccaca

SEQ ID NO: 12307 - protein, 1227 aa, Homo sapiens
MSESEGGKDTTPEPSPANGAGPGPEWGLCPGPPAVEGESSGASGLGTPKRRNQHSKHKTVAVASAQRSPRALFCLTLANPLRRSCISIVEWKPFDILILLTIFANCVALGVYIPFPEDDSNTANHNLEQVEYVFLVIFTVETVLKIVAYGLVLHPSAYIRNGWNLLDFIIVVVGLFSVLLEQGPGRPGDAPHTGGKPGGFDVKALRAFRVLRPLRLVSGVPSLHIVLNSIMKALVPLLHIALLVLFVIIIYAIIGLELFLGRMHKTCYFLGSDMEAEEDPSPCASSGSGRACTLNQTECRGRWPGPNGGITNFDNFFFAMLTVFQCVTMEGWTDVLYWMQDAMGYELPWVYFVSLVIFGSFFVLNLVLGVLSGEFSKEREKAKARGDFQKQREKQQMEEDLRGYLDWITQAEELDMEDPSADDNLGPQLAELTNRRRGRLRWFSHSTRSTHSTSSHASLPASDTGSMTETQGDEDEEEGALASCTRCLNKIMKTRVCRRLRRANRVLRARCRRAVKSNACYWAVLLLVFLNTLTIASEHHGQPVWLTQIQEYANKVLLCLFTVEMLLKLYGLGPSAYVSSFFNRFDCFVVCGGILETTLVEVGAMQPLGISVLRCVRLLRIFKVTRHWASLSNLVASLLNSMKSIASLLLLLFLFIIIFSLLGMQLFGGKFNFDQTHTKRSTFDTFPQALLTVFQILTGEDWNVVMYDGIMAYGGPFFPGMLVCIYFIILFICGNYILLNVFLAIAVDNLASGDAGTAKDKGGEKSNEKDLPQENEGLVPGVEKEEEEGARREGAGAGGVELLQEVVPKEKVVPIPEGSAFFCLSQTNPLRKGCHTLIHHHVFTNLILVFIILSSVSLAAEDPIRAHSFRNHILGYFDYAFTSIFTVEILLKMTVFGAFLHRGSFCRSWFNMLDLLVVSVSLISFGIHSSAISVVKILRVLRVLRPLRAINRAKGLKHVVQCVFVAIRTIGNIMIVTTLLQFMFACIGVQLFKGKFYTCTDEAKHTPQECKGSFLVYPDGDVSRPLVRERLWVNSDFNFDNVLSAMMALFTVSTFEGWPALLYKAIDAYAEDHGPIYNYRVEISVFFIVYIIIIAFFMMNIFVGFVIITFRAQGEQEYQNCELDKNQRQCVEYALKAQPLRRYIPKNPHQYRVWATVNSAAFEYLMFLLILLNTVALAMQHYEQTAPFNYAMDILNMVFTGLFTIEMVLKIIAFKPKRLTLLLWWAA

SEQ ID NO: 12308 - DNA, 5988 bp, Homo sapiens
ctccaaagctgggggaagagaggggggttgtgtgcagatggcccttcaatctcgaaagaaagatgtcggaatctgaaggcgggaaagacaccaccccagagcccagtccagccaatggggcaggccctggtcccgaatgggggctgtgccccgggcccccagctgtggaaggtgaaagcagtggggcatcaggcctagggacccctaagcgaagaaaccagcacagcaagcacaagacagtggcagtggccagtgcccagcggtcacctcgggcactcttctgcctcaccctggccaatcctctgcgacggtcctgcatcagcatcgtggagtggaagcccttcgacatcctcatcctgctgaccatctttgccaactgcgtggccctgggagtttacatccccttccctgaggacgactccaacactgccaaccacaacctggagcaggtggagtacgtattcctggtgattttcactgtggagacggtgctcaagatcgtggcctacgggctggtgctccaccccagcgcctacatccgcaatggctggaacctactcgacttcatcatcgtcgtggtcgggctgttcagcgttctgctggagcagggccccggacggccaggcgacgccccgcacaccgggggaaagccaggaggcttcgatgtgaaggcattgagggcgtttcgggtgctgcggccactgaggctggtgtctggggtcccgagcctgcacatagtgctcaattccatcatgaaggctctggtgccgctgctgcacattgcactgctcgtgctcttcgtcatcatcatttatgccatcattgggctcgagctgttccttggacgaatgcacaagacgtgctacttcctgggatccgacatggaagcggaggaggacccatcgccctgtgcgtcttcgggatcagggcgtgcgtgcacgctgaaccagactgagtgccgcgggcgctggccagggcccaatggaggcatcaccaactttgacaacttcttcttcgccatgctgacagtcttccagtgtgtcaccatggaaggctggaccgatgtgctctactggatgcaagatgccatggggtatgaactgccctgggtgtactttgtgagccttgtcatctttgggtccttcttcgtcctcaaccttgtgcttggcgtcctgagtggggagttctccaaggagagagagaaagcgaaagctcgcggggacttccagaagcagcgggagaagcagcagatggaggaagacctgcggggctacctggactggatcactcaagccgaagagctggacatggaggacccctccgccgatgacaaccttggttctatggctgaagagggccgggcgggccatcggccacagctggccgagctgaccaataggaggcgtggacgtctgcgctggttcagtcattctactcgctccacacactccaccagcagccatgccagcctcccagccagtgacaccggttccatgacagagacccaaggcgatgaggatgaggaggagggggctctggccagctgtacacgctgcctaaacaagatcatgaaaaccagagtctgccgccgcctccgccgagccaaccgggtccttcgggcacgctgccgtcgggcagtgaagtccaatgcctgctactgggctgtgctgttgctcgtcttcctcaacacgttgaccatcgcctctgagcaccacgggcagcctgtgtggctcacccagatccaggagtatgccaacaaagtgttgctctgtctgttcacggtggagatgcttctcaaattgtacggtctgggcccctctgcctatgtgtcttccttcttcaaccgctttgactgctttgtggtctgtgggggcatcctagagaccaccttggtggaggtgggcgccatgcagcccttgggcatctcagtgctccgatgtgtgcgcctcctcaggatctttaaggtcaccagacactgggcttctctgagcaatctggtggcatccctgctcaattcaatgaaatccatcgcatccttgctgcttctcctcttcctcttcatcattatcttctccctgcttggcatgcagctgtttgggggcaagttcaactttgaccagacccacaccaagcgaagcacctttgacacgttcccccaggccctcctcactgtctttcagatcctgacaggtgaggactggaacgtggtcatgtatgatggtatcatggcatatggtggccccttcttcccaggaatgttggtgtgcatctatttcatcattctcttcatctgtggcaactacatcctgttgaacgtgtttcttgccattgctgtggacaacctggccagtggagatgcaggcactgccaaggacaagggcggggagaagagcaatgagaaggatctcccacaggagaatgaaggcctggtgcctggtgtggagaaagaggaagaggagggtgcaaggagggaaggagcaggtgcagggggtgtggaactcctgcaggaagttgtacccaaggagaaggtggtacccatccctgagggcagcgccttcttctgcctcagccaaaccaacccgctgaggaagggctgccacaccctcatccaccatcatgtcttcaccaatcttatcctggtgttcatcatcctcagcagtgtgtccctggccgctgaggaccccatccgagcccactccttccgcaaccatattctgggttacttcgattatgccttcacctccattttcactgtggagattctactaaagatgacagtgtttggggccttcctgcaccgcggctccttctgccgtagctggtttaatatgttggatctgctggtggtcagtgtgtccctcatctcctttggcatccactccagcgccatctcggtggtgaagattctgcgagtactccgagtactgcggcccctccgagccatcaacagggccaagggactcaagcatgtggtgcagtgtgtatttgtggccatccggaccatcggaaacatcatgattgtcaccacacttctgcaatttatgttcgcctgcatcggggtgcagctcttcaaggggaaattctacacctgcacggacgaggccaaacacacccctcaagaatgcaagggctccttcctggtatacccagatggagacgtgtcacggcccctggtccgggagcggctctgggtcaacagtgatttcaactttgacaatgtcctttcagccatgatggccctgttcactgtctccacctttgaaggctggcctgcactgctatacaaggccatcgatgcatatgcagaggaccatggccccatctataattaccgtgtggagatctcagtgttcttcattgtctacatcatcatcattgcgttcttcatgatgaacatcttcgtgggcttcgtcatcatcactttccgtgcccagggcgagcaggagtaccaaaactgtgagctggacaagaaccagcgtcaatgtgtggaatatgccctcaaggcccagccactccgccgttacatccccaagaacccgcatcagtatcgtgtgtgggccactgtgaactctgctgcctttgagtacctgatgttcctgctcatcctgctcaacacagttgccctagccatgcagcactatgagcagactgctcccttcaactatgccatggacatcctcaacatggtcttcactggcctcttcactattgagatggtgctcaaaatcatcgccttcaagcccaagcgtttgacgctcttattgtggtgggcagcatagtggatattgccgtcactgaagtcaataatggtggccaccttggcgagagctctgaggacagctcccgcatttccattaccttctttcgcctcttccgagttatgcggctggtcaagcttctcagtaagggtgaagggatccgcacattgctctggacattcatcaagtccttccaggccttgccctatgtggctcttctcatcgcaatgatattcttcatctatgccgtcattggcatgcagatgttcggcaaggtggctcttcaggatggcacacagataaaccgaaacaacaacttccagacctttccacaggctgtgctgcttctgttcaggtgtgccactggtgaggcatggcaggagataatgcttgccagccttcccggaaatcggtgtgatcctgagtctgacttcggccctggtgaagagtttacctgtggtagcaattttgccatcgcctatttcatcagcttcttcatgctctgtgccttcctgatcataaatctctttgtggctgtgatcatggacaactttgattatctcaccagagattggtccatcctgggcccccatcaccttgatgaattcaagaggatctggtctgaatatgaccctggggccaagggccgcatcaaacacttggatgtggttgccctgctgagacgtatccagccccctctgggatttgggaagctgtgcccacaccgagtggcctgcaagagacttgtggcaatgaacatgcccctcaactcagatgggacggtgacattcaacgccacactctttgccctggtccggacatccctgaagatcaaaacagaagggaacctggagcaagccaaccaggagctgcggattgtcatcaaaaagatctggaagcggatgaaacagaagctgctagatgaggtcatccccccaccagacgaggaggaggtcaccgtgggcaaattctacgccacatttctgatccaggactatttccgcaaattccggcggaggaaagaaaaagggctactaggcaacgacgccgcccctagcacctcttccgcccttcaggctggtctgcggagcctgcaggacttgggtcctgagatgcggcaggccctcacctgtgacacagaggaggaggaagaagaggggcaggagggagtggaggaggaagatgaaaaggacttggaaactaacaaagccacgatggtctcccagccctcagctcgccggggctccgggatttctgtgtctctgcctgtcggggacagacttccagattcactctcctttgggcccagtgatgatgacagggggactcccacctccagtcagcccagtgtgccccaggctggatccaacacccacaggagaggctctggggctctcattttcaccatcccagaagaaggaaattctcagcccaagggaaccaaagggcaaaacaagcaagatgaggatgaggaagtccctgatcggctttcctacctagatgagcaggcagggactcccccgtgctcagtccttttgccacctcacagagctcagagatacatggatgggcacctggtaccacgccgccgtctgctgccccccacacctgcaggtcggaagccctccttcaccatccagtgtctgcagcgccagggcagttgtgaggatttacccatcccaggcacctatcatcgtgggcgaaattcagggcccaatagggctcagggttcctgggcaacaccacctcagcggggtcggctcctgtatgccccgctgttgttggtggaagagggcgcagcgggggaggggtacctcggcagatccagtggcccactgcgcaccttcacctgtctgcacgtgcctggaacccactcggaccccagccatgggaagaggggcagtgccgacagcttggtggaggctgtgcttatctcagagggtctgggcctctttgctcgagacccacgtttcgtggccctggccaagcaggagattgcagatgcgtgtcgcctgacgctggatgagatggacaatgctgccagtgacctgctggcacagggaaccagctctctctatagcgacgaggagtccatcctctcccgcttcgatgaggaggacttgggagacgagatggcctgcgtccacgccctctgaattcccacccctccccaactgctcaataaacctcctgccctcccctccccagcaggaggcaggcatggaccaca

SEQ ID NO: 12309 - protein, 1238 aa, Homo sapiens
MSESEGGKDTTPEPSPANGAGPGPEWGLCPGPPAVEGESSGASGLGTPKRRNQHSKHKTVAVASAQRSPRALFCLTLANPLRRSCISIVEWKPFDILILLTIFANCVALGVYIPFPEDDSNTANHNLEQVEYVFLVIFTVETVLKIVAYGLVLHPSAYIRNGWNLLDFIIVVVGLFSVLLEQGPGRPGDAPHTGGKPGGFDVKALRAFRVLRPLRLVSGVPSLHIVLNSIMKALVPLLHIALLVLFVIIIYAIIGLELFLGRMHKTCYFLGSDMEAEEDPSPCASSGSGRACTLNQTECRGRWPGPNGGITNFDNFFFAMLTVFQCVTMEGWTDVLYWMQDAMGYELPWVYFVSLVIFGSFFVLNLVLGVLSGEFSKEREKAKARGDFQKQREKQQMEEDLRGYLDWITQAEELDMEDPSADDNLGSMAEEGRAGHRPQLAELTNRRRGRLRWFSHSTRSTHSTSSHASLPASDTGSMTETQGDEDEEEGALASCTRCLNKIMKTRVCRRLRRANRVLRARCRRAVKSNACYWAVLLLVFLNTLTIASEHHGQPVWLTQIQEYANKVLLCLFTVEMLLKLYGLGPSAYVSSFFNRFDCFVVCGGILETTLVEVGAMQPLGISVLRCVRLLRIFKVTRHWASLSNLVASLLNSMKSIASLLLLLFLFIIIFSLLGMQLFGGKFNFDQTHTKRSTFDTFPQALLTVFQILTGEDWNVVMYDGIMAYGGPFFPGMLVCIYFIILFICGNYILLNVFLAIAVDNLASGDAGTAKDKGGEKSNEKDLPQENEGLVPGVEKEEEEGARREGAGAGGVELLQEVVPKEKVVPIPEGSAFFCLSQTNPLRKGCHTLIHHHVFTNLILVFIILSSVSLAAEDPIRAHSFRNHILGYFDYAFTSIFTVEILLKMTVFGAFLHRGSFCRSWFNMLDLLVVSVSLISFGIHSSAISVVKILRVLRVLRPLRAINRAKGLKHVVQCVFVAIRTIGNIMIVTTLLQFMFACIGVQLFKGKFYTCTDEAKHTPQECKGSFLVYPDGDVSRPLVRERLWVNSDFNFDNVLSAMMALFTVSTFEGWPALLYKAIDAYAEDHGPIYNYRVEISVFFIVYIIIIAFFMMNIFVGFVIITFRAQGEQEYQNCELDKNQRQCVEYALKAQPLRRYIPKNPHQYRVWATVNSAAFEYLMFLLILLNTVALAMQHYEQTAPFNYAMDILNMVFTGLFTIEMVLKIIAFKPKRLTLLLWWAA

SEQ ID NO: 12310 - DNA, 790 bp, Homo sapiens
ctcacatccggcatgcgccgtgctcgctcacagaactacactttccaactctccccacacgacccgtgacactctgtggaccgcgagcacggagcagggtttctacagctgctccccactttctcggacccggtcctggacccagcccccgactccgacacggctccaccatggaggaggcggaccgaatcctcatccattcgctgcgccaggccggcacggcagttcctccagatgtgcagaccttgcgcgccttcaccactgagctggttgtagaggctgtggtccgctgcctgcgtgtgatcaaccctgcggtgggctctggcctcagccctctgctgcctcttgccatgtctgcccggttccgcctggccatgagcctggctcaggcctgcatggacctgggctatcccttggagcttggctatcagaacttcctctaccccagtgagcctgacctccgagacctgcttctcttcttggctgagcgtctgcccaccgatgcctctgaggatgcagaccagcctgcaggtactgggtgtctgggatgtgggcgggggcggtgaggggagaggagggccttctaggggctgtagggctgagagaggtagaggtggtaaaaaggttgatgggtaggggtggcggtatgtgccttcaggagagctaggcaggaggattaggcatcagagaggggctacagggcagggggcagggggctgaggttgagctgaccccggtggtgcgttggtgcggggaggggcctccctgactcaacccctgtgccctccct

SEQ ID NO: 12311 - protein, 131 aa, Homo sapiens
MEEADRILIHSLRQAGTAVPPDVQTLRAFTTELVVEAVVRCLRVINPAVGSGLSPLLPLAMSARFRLAMSLAQACMDLGYPLELGYQNFLYPSEPDLRDLLLFLAERLPTDASEDADQPAGTGCLGCGRGR

SEQ ID NO: 12312 - DNA, 2317 bp, Homo sapiens
ctcacatccggcatgcgccgtgctcgctcacagaactacactttccaactctccccacacgacccgtgacactctgtggaccgcgagcacggagcagggtttctacagctgctccccactttctcggacccggtcctggacccagcccccgactccgacacggctccaccatggaggaggcggaccgaatcctcatccattcgctgcgccaggccggcacggcagttcctccagatgtgcagaccttgcgcgccttcaccactgagctggttgtagaggctgtggtccgctgcctgcgtgtgatcaaccctgcggtgggctctggcctcagccctctgctgcctcttgccatgtctgcccggttccgcctggccatgagcctggctcaggcctgcatggacctgggctatcccttggagcttggctatcagaacttcctctaccccagtgagcctgacctccgagacctgcttctcttcttggctgagcgtctgcccaccgatgcctctgaggatgcagaccagcctgcaggtgactcagctattctcctccgggccattgggagccaaattcgggaccagctggcactgccttgggtcccgccccaccttcgcactcccaagctgcagcacctccagggctcggccctccagaagcctttccatgccagcaggctggtcgtgccagaattgagttccagaggtgagccacgggagttccaggcgagtcccctgctgcttccagtccctacccaggtgcctcagcctgttggaagggtggcctcgctcctcgaacaccatgccctgcagctctgccagcagacgggccgggaccggccaggggatgaggactgggtccaccggacatcccgcctcccaccccaggaggacacacgggctcagcggcagcggctgcagaagcaactgactgagcatctgcgccaaagctggggcctgcttggggcccccatacaagcccgggacctgggagaactgctgcaggcctggggtgctggggccaagactggtgctcctaagggctcccgcttcacgcactcagagaagttcaccttccatctggagccccaggcccaggccactcaggtgtcagatgtgccagccacctcccggcggcctgaacaggtcacgtgggcagctcaggaacaggagctcgagtcccttcgggagcagctggaaggagtgaaccgcagcattgaggaggttgaggccgacatgaagaccctgggcgtcagctttgtgcaggcagagtctgagtgccggcacagcaagctcagtacagcagagcgtgagcaggccctgcgcctgaagagccgcgcggtggagctgctgcccgatgggactgccaaccttgccaagctgcagcttgtggtggagaatagtgcccagcgggtcatccacttggcgggtcagtgggagaagcaccgggtcccactcctcgctgagtaccgccacctccgaaagctgcaggattgcagagagctggaatcttctcgacggctggcagagatccaagaactgcaccagagtgtccgggcggctgctgaagaggcccgcaggaaggaggaggtctataagcagctgatgtcagagctggagactctgcccagagatgtgtcccggctggcctacacccagcgcatcctggagatcgtgggcaacatccggaagcagaaggaagagatcaccaagatcttgtctgatacgaaggagcttcagaaggaaatcaactccctatctgggaagctggaccggacgtttgcggtgactgatgagcttgtgttcaaggatgccaagaaggacgatgctgttcggaaggcctataagtatctagctgctctgcacgagaactgcagccagctcatccagaccatcgaggacacaggcaccatcatgcgggaggttcgagacctcgaggagcagatcgagacagagctgggcaagaagaccctcagcaacctggagaagatccgggaggactaccgagccctccgccaggagaacgctggcctcctaggccgggtccgggaggcctgaggagccgccggcagaggtctctccccagcctcaggcagggatttggggtgctggaggcagtggccaagcacatgccctagctacttcctccgctgtccagttcctcctgctgcggccttggacccagacccctgcccactgaccgcaacccttatatggggtgatagtccagcatgtggggagctcggctgcagtttattggggacggtactgtgggttgggggccttggatcccaaataaatgagtagttcctctgcagtct

SEQ ID NO: 12313 - protein, 627 aa, Homo sapiens; identical to SEQ ID NO: 2100

SEQ ID NO: 12314 - DNA, 2729 bp, Homo sapiens
ctcacatccggcatgcgccgtgctcgctcacagaactacactttccaactctccccacacgacccgtgacactctgtggaccgcgagcacggagcagggtttctacagctgctccccactttctcggacccggtcctggacccagcccccgactccgacacggctccaccatggaggaggcggaccgaatcctcatccattcgctgcgccaggccggcacggcagttcctccagatgtgcagaccttgcgcgccttcaccactgagctggttgtagaggctgtggtccgctgcctgcgtgtgatcaaccctgcggtgggctctggcctcagccctctgctgcctcttgccatgtctgcccggttccgcctggccatgagcctggctcaggcctgcatggacctgggctatcccttggagcttggctatcagaacttcctctaccccagtgagcctgacctccgagacctgcttctcttcttggctgagcgtctgcccaccgatgcctctgaggatgcagaccagcctgcaggtgactcagctattctcctccgggccattgggagccaaattcgggaccagctggcactgccttgggtcccgccccaccttcgcactcccaagctgcagcacctccagggctcggccctccagaagcctttccatgccagcaggctggtcgtgccagaattgagttccagaggtgagccacgggagttccaggcgagtcccctgctgcttccagtccctacccaggtgcctcagcctgttggaagggtggcctcgctcctcgaacaccatgccctgcagctctgccagcagacgggccgggaccggccaggggatgaggactgggtccaccggacatcccgcctcccaccccaggaggacacacgggctcagcggcagcggctgcagaagcaactgactgagcatctgcgccaaagctggggcctgcttggggcccccatacaagcccgggacctgggagaactgctgcaggcctggggtgctggggccaagactggtgctcctaagggctcccgcttcacgcactcagagaagttcaccttccatctggagccccaggcccaggccactcaggtgtcagatgtgccagccacctcccggcggcctgaacaggtcacgtgggcagctcaggaacaggagctcgagtcccttcgggagcagctggaaggagtgaaccgcagcattgaggaggttgaggccgacatgaagaccctgggcgtcagctttgtgcaggcagagtctgagtgccggcacagcaagctcagtacagcagagcgtgagcaggccctgcgcctgaagagccgcgcggtggagctgctgcccgatgggactgccaaccttgccaagctgcagcttgtggtggagaatagtgcccagcgggtcatccacttggcgggtcagtgggagaagcaccgggtcccactcctcgctgagtaccgccacctccgaaagctgcaggattgcagagagctggaatcttctcgacggctggcagagatccaagaactgcaccagagtgtccgggcggctgctgaagaggcccgcaggaaggaggaggtctataagcagctgatgtcagagctggagactctgcccagagatgtgtcccggctggcctacacccagcgcatcctggagatcgtgggcaacatccggaagcagaaggaagagatcaccaagatcttgtctgatacgaaggagcttcagaaggaaatcaactccctatctgggaagctggaccggacgtttgcggtgactgatgagcttgtgttcaaggatgccaagaaggacgatgctgttcggaaggcctataagtatctagctgctctgcacgagaactgcagccagctcatccagaccatcgaggacacaggcaccatcatgcgggaggttcgagacctcgaggagcagatcgagacagagctgggcaagaagaccctcagcaacctggagaagatccgggaggactaccgagccctccgccaggagaacgctggcctcctaggccgggtccgggaggcctgaggagccgccggcagaggtctctccccagcctcaggcagggatttggggtgctggaggcagtggccaagcacatgccctagctacttcctccgctgtccagttcctcctgctgcggccttggacccagacccctgcccactgaccgcaacccttatatggggtgatagtccagcatgtggggagctcggctgcagtttattggggacggtactgtgggttgggggccttggatcccaaataaatgagtagttcctctgcagtctaagctgaggcatggatcagggctcagggaatgggagtgaggtgagtggcaggggagacacggggtatttttggcaaggcagtgtgtgtggctgtgtgtgtctgcacgggactcaagagacccactggggggctgtgcgtgtgcatatgcgtgagatacacaggtgaattctaacaggccgtgtgtgtgagcgagcacgtgttgggacctcagatcctgagggtactgacgctgcttctgtgtaggcctctgggcacacccctgtgttgacagtgcccctgtgggccctgaggctggctgtgggtgcgtgccttggggtgtgtgggttgtcagggctgtgcttgtgtgtgattgtgtgatgatgcagctttgaggttgtttgagtgtactgaggcaggctctctgtgttttgg

SEQ ID NO: 12315 - protein, 627 aa, Homo sapiens; identical to SEQ ID NO: 2100

SEQ ID NO: 12316 - DNA, 2480 bp, Homo sapiens
aaaatttccgtttaagtctcataatcaagaaaaggagaaacacagagagagagaaaaaaaaaactatgagaacccccccccaccccgtgattatcagcgcacacactcatcgaaaaaaatttggattattagaagagagaggtctgcggcttccacaccgtacagcgtggtttttcttctcggtataaaagcaaagttgtttttgatacgtgacagtttcccacaagccaggctgatccttttctgtcagtccacttcaccaagcctgcccttggacaaggacccgatgcccaaccccaggcctggcaagccctcggccccttccttggcccttggcccatccccaggagcctcgcccagctggagggctgcacccaaagcctcagacctgctgggggcccggggcccagggggaaccttccagggccgagatcttcgaggcggggcccatgcctcctcttcttccttgaaccccatgccaccatcgcagctgcagctgcccacactgcccctagtcatggtggcaccctccggggcacggctgggccccttgccccacttacaggcactcctccaggacaggccacatttcatgcaccagctctcaacggtggatgcccacgcccggacccctgtgctgcaggtgcaccccctggagagcccagccatgatcagcctcacaccacccaccaccgccactggggtcttctccctcaaggcccggcctggcctcccacctgggatcaacgtggccagcctggaatgggtgtccagggagccggcactgctctgcaccttcccaaatcccagtgcacccaggaaggacagcaccctttcggctgtgccccagagctcctacccactgctggcaaatggtgtctgcaagtggcccggatgtgagaaggtcttcgaagagccagaggacttcctcaagcactgccaggcggaccatcttctggatgagaagggcagggcacaatgtctcctccagagagagatggtacagtctctggagcagcagctggtgctggagaaggagaagctgagtgccatgcaggcccacctggctgggaaaatggcactgaccaaggcttcatctgtggcatcatccgacaagggctcctgctgcatcgtagctgctggcagccaaggccctgtcgtcccagcctggtctggcccccgggaggcccctgacagcctgtttgctgtccggaggcacctgtggggtagccatggaaacagcacattcccagagttcctccacaacatggactacttcaagttccacaacatgcgaccccctttcacctacgccacgctcatccgctgggccatcctggaggctccagagaagcagcggacactcaatgagatctaccactggttcacacgcatgtttgccttcttcagaaaccatcctgccacctggaagaacgccatccgccacaacctgagtctgcacaagtgctttgtgcgggtggagagcgagaagggggctgtgtggaccgtggatgagctggagttccgcaagaaacggagccagaggcccagcaggtgttccaaccctacacctggcccctgacctcaagatcaaggaaaggaggatggacgaacaggggccaaactggtgggaggcagaggtggtgggggcagggatgataggccctggatgtgcccacagggaccaagaagtgaggtttccactgtcttgcctgccagggcccctgttcccccgctggcagccaccccctcccccatcatatcctttgccccaaggctgctcagaggggccccggtcctggccccagcccccacctccgccccagacacaccccccagtcgagccctgcagccaaacagagccttcacaaccagccacacagagcctgcctcagctgctcgcacagattacttcagggctggaaaagtcacacagacacacaaaatgtcacaatcctgtccctcactcaacacaaaccccaaaacacagagagcctgcctcagtacactcaaacaacctcaaagctgcatcatcacacaatcacacacaagcacagccctgacaacccacacaccccaaggcacgcacccacagccagcctcagggcccacaggggcactgtcaacacaggggtgtgcccagaggcctacacagaagcagcgtcagtaccctcaggatctgaggtcccaacacgtgctcgctcacacacacggcctgttagaattcacctgtgtatctcacgcatatgcacacgcacagccccccagtgggtctcttgagtcccgtgcagacacacacagccacacacactgccttgccaaaaataccccgtgtctcccctgccactcacctcactcccattccctgagccctgatccatgcctcagcttagactgcagaggaactactcatttatttgggatccaaggcccccaacccacagtaccgtccccaataaactgcagccgagctccccaca

SEQ ID NO: 12317 - protein, 431 aa, Homo sapiens; identical to SEQ ID NO: 2102

SEQ ID NO: 12318 - DNA, 2844 bp, Homo sapiens
cgccgccgccgccgatatggcgcgtacggcccctgtggagcccccgctgcggcattccgcgcccccctcgccggccgcgggtgagccccgcacctcggtcgaggcggcggtggccccgcggagggtgctgttcgccgacgaggccttggggctgccgctggcgcagttgcgccgctaccggccgtggggcgggcccggggcgggcaagatggcggcggcggccgggcaagatggcggcggcggcggcggggccgacgaggacgacgatggcgaggatggggatgaaggggaggaggaagaggaggcttgccccgagccctcaccgctgtgccccgtccccgctggcggggggttttacctggtccccacattttcgctgccgcccgcgccgggccgtctggagcgcttggggcgcgtcatggtggagctggaggcgctgctgccgcctcccggagcggtccccgggggtgccggggtgtgggtgcctgggggccgcccgccggtgctgcgcgggttggtacgcgtgctgaaccgctccttcgagaaggcggtgcacgtgcgggcctcacacgacggctgggcttccttttgcgaccacccagcgcgctacgtcccgcgcagcccgccgtgggcaggagcgggaggaacaggagcaggagatcccatcctggatccggggctcggcctgggtcccggccaggcatccgcctcctcgcccgacgacggcggccgcaccgaccgctttgccttccagctgccctttgctgagggcgcgggcgatggggcgcgcctcgacttcgtggtgcgctatgagacccctgagggcactttctgggccaacaaccacggccgcaactacacagtcctgctccggatcgcacccgctcccacacccactgatgccgaagggctgccccagcagcagcagctgccgcagctggagccacagcccgagtgccagggtcccgtggaggctgaggccaggcagctgaagagctgcatgaagccggtgaggcgcaggcctgccgaggaggaactgaagacgaagaacatggatgataacacctttgccatggcagagcatcctgatgtccaggagtcagtgggtccactggtagcccccacccctctccgtccatggccccagatgacacttcaggtttctgacgttccgatgactggcaaccccgcagaagaaggtgatgtccccagaagcagtccacctgtggcttttacagaggtcctccaggcaccggccatcaggattcccccctcctcccctctctgtggcctgggtggctcccccagagaccaggcctcagggcccgatgcgagcgagggggccaccgggcctttcctggagcccagtcagcagcaggcagaggccacatggggagtatcgagtgagaatggaggggggctggaggctgtgagtgggtcagaggagctgctcggtgaggacaccatcgaccaggagctggagcagctctacctgtctcacctgagccgcctacgggctgctgtggctgcgggtggggcagggggtggtggggagggctccacagatggagggatgtcccccagccatcccctgggcatactgacggaccgcgacctgatcttgaagtggcctggccctgagcgggccctgaacagcgccctggctgaggagatcacgctgcactatgcccggctggggcgtggcgtggagctcatcaaggacaccgaagaccctgatgatgaaggggagggtgaagaggggctctctgtcacaccctccagcccagaaggggacagccccaaggaatcgcctccagaaatcctctccggggcccgttctgtggtagccacgatgggagatgtgtggctcccatgggcagagggctcaggatgtgacggccctgtggttctgggtacagagggtcagttcattggggatcctgagaaagggatgggcaaggacaccagctctttgcacatgaatagggtgatagctggggtgactgagtccctgggggaggccgggacagaagcccagatagaggtcaccagtgagtgggcaggcagcttggatcccatatctggcaaggagccagcctctcccgtccttctgcaggggcaaaatcccaccctcctcagtcccttgggggccgaagtctgtctctctagtgtagccaggcctcatgtgagctcccaggatgaaaaggatgcaggcccaagccttgaacccccaaagaagtctcccaccctagcagtccctgcagaatgtgtgtgtgcactgcctcctcagctccgggggcccttgacccagactctgggggtcctggccgggctagtggtggtccctgtggctctgaacagcggtgtgtccctcctggtgcttgcgctgtgcctctctctggcttggttctcataggctctgcttgtgggatcagcagaggcttaagatgggatacatggcctgtgcagtgaggggacctgggtcctttgcttctgagaatgctcaactgaaagagaggccttctcatccccaagctctccagtcaacacagggctccctgtggtgacaccagtggagatgagggaacgggtagatggtgtgagtgaggggaacttttagagtggaactgggcatgtcctccgcctaccccccgagcctgtatttatttttgtataattctctggatgagggagagtggtcgtgagctggtcttggggcacaattacccagagatatatttattaacagccaacctgtgcaacctgctggagctttatttttaatttaatttatatagagtacctattattatatgccacaatagagctctatgagaaacagtg

SEQ ID NO: 12319 - protein, 799 aa, Homo sapiens; identical to SEQ ID NO: 2104

SEQ ID NO: 12320 - DNA, 3413 bp, Homo sapiens
cgccgccgccgccgatatggcgcgtacggcccctgtggagcccccgctgcggcattccgcgcccccctcgccggccgcgggtgagccccgcacctcggtcgaggcggcggtggccccgcggagggtgctgttcgccgacgaggccttggggctgccgctggcgcagttgcgccgctaccggccgtggggcgggcccggggcgggcaagatggcggcggcggccgggcaagatggcggcggcggcggcggggccgacgaggacgacgatggcgaggatggggatgaaggggaggaggaagaggaggcttgccccgagccctcaccgctgtgccccgtccccgctggcggggggttttacctggtccccacattttcgctgccgcccgcgccgggccgtctggagcgcttggggcgcgtcatggtggagctggaggcgctgctgccgcctcccggagcggtccccgggggtgccggggtgtgggtgcctgggggccgcccgccggtgctgcgcgggttggtacgcgtgctgaaccgctccttcgagaaggcggtgcacgtgcgggcctcacacgacggctgggcttccttttgcgaccacccagcgcgctacgtcccgcgcagcccgccgtgggcaggagcgggaggaacaggagcaggagatcccatcctggatccggggctcggcctgggtcccggccaggcatccgcctcctcgcccgacgacggcggccgcaccgaccgctttgccttccagctgccctttgctgagggcgcgggcgatggggcgcgcctcgacttcgtggtgcgctatgagacccctgagggcactttctgggccaacaaccacggccgcaactacacagtcctgctccggatcgcacccgctcccacacccactgatgccgaagggctgccccagcagcagcagctgccgcagctggagccacagcccgagtgccagggtcccgtggaggctgaggccaggcagctgaagagctgcatgaagccggtgaggcgcaggcctgccgaggaggaactgaagacgaagaacatggatgataacacctttgccatggcagagcatcctgatgtccaggagtcagtgggtccactggtagcccccacccctctccgtccatggccccagatgacacttcaggtttctgacgttccgatgactggcaaccccgcagaagaaggtgatgtccccagaagcagtccacctgtggcttttacagaggtcctccaggcaccggccatcaggattcccccctcctcccctctctgtggcctgggtggctcccccagagaccaggcctcagggcccgatgcgagcgagggggccaccgggcctttcctggagcccagtcagcagcaggcagaggccacatggggagtatcgagtgagaatggaggggggctggaggctgtgagtgggtcagaggagctgctcggtgaggacaccatcgaccaggagctggagcagctctacctgtctcacctgagccgcctacgggctgctgtggctgcgggtggggcagggggtggtggggagggctccacagatggagggatgtcccccagccatcccctgggcatactgacggaccgcgacctgatcttgaagtggcctggccctgagcgggccctgaacagcgccctggctgaggagatcacgctgcactatgcccggctggggcgtggcgtggagctcatcaaggacaccgaagaccctgatgatgaaggggagggtgaagaggggctctctgtcacaccctccagcccagaaggggacagccccaaggaatcgcctccagaaatcctctccggggcccgttctgtggtagccacgatgggagatgtgtggctcccatgggcagagggctcaggatgtgacggccctgtggttctgggtacagagggtcagttcattggggatcctgagaaagggatgggcaaggacaccagctctttgcacatgaatagggtgatagctggggtgactgagtccctgggggaggccgggacagaagcccagatagaggtcaccagtgagtgggcaggcagcttggatcccatatctggcaaggagccagcctctcccgtccttctgcaggggcaaaatcccaccctcctcagtcccttgggggccgaagtctgtctctctagtgtagccaggcctcatgtgagctcccaggatgaaaaggatgcaggcccaagccttgaacccccaaagaagtctcccaccctagcagtccctgcagaatgtgtgtgtgcactgcctcctcagctccgggggcccttgacccagactctgggggtcctggccgggctagtggtggtccctgtggctctgaacagcggtgtgtccctcctggtgcttgcgctgtgcctctctctggcttggttctcataggctctgcttgtgggatcagcagaggcttaagatgggatacatggcctgtgcagtgaggggacctgggtcctttgcttctgagaatgctcaactgaaagagaggccttctcatccccaagctctccagtcaacacagggctccctgtggtgacaccagtggagatgagggaacgggtagatggtgtgagtgaggggaacttttagagtggaactgggcatgtcctccgcctaccccccgagcctgtatttatttttgtataattctctggatgagggagagtggtcgtgagctggtcttggggcacaattacccagagatatatttattaacagccaacctgtgcaacctgctggagctttatttttaatttaatttatatagagtacctattattatatgccacaatagagctctatgagaaacagtgtcttgcggtgtagtgttctcctgtttgggcatgagtgtgcagggtggtcactttctgtgggaggatcacagtggggagttgggggtgggacgtggtcgcctgctgctgcttcaacatgtctttccttgaagatgtgtgtctcctcgtctcgtggtcctaatccatatggttctttgtcttttccacattctgcctgtgggaccctacaggtgtgtatttggatggtggtggtgggagccagggaggaagagtggcagccacatgagggtttggtgtcagtcacatggttgcagtggtagctgtggtctcctgtggatgtggggacatcagttgtgaatcagccacaaggttttgaggttactgaaaaaacagcctttgacaccagcagggagaccccttagtccctgagataaggaaggcctcagaaaggaaagaggagttaatgtactgcagtacttggtagcacagttgctgtccacagacatcacatttctactaaaaacaggaagcccagaagctttgaaagaaagatatatatttattgcatgcaaataaaaaactgctcaaca

SEQ ID NO: 12321 - protein, 799 aa, Homo sapiens; identical to SEQ ID NO: 2104

SEQ ID NO: 12322 - DNA, 1083 bp, Homo sapiens
agttgcgccgctaccggccgtggggcgggcccggggcgggcaagatggcggcggcggccgggcaagatggcggcggcggcggcggggccgacgaggacgacgatggcgaggatggggatgaaggggaggaggaagaggaggcttgccccgagccctcaccgctgtgccccgtccccgctggcggggggttttacctggtccccacattttcgctgccgcccgcgccgggccgtctggagcgcttggggcgcgtcatggtggagctggaggcgctgctgccgcctcccggagcggtccccgggggtgccggggtgtgggtgcctgggggccgcccgccggtgctgcgcgggttggtacgcgtgctgaaccgctccttcgagaaggcggtgcacgtgcgggcctcacacgacggctgggcttccttttgcgaccacccagcgcgctacgtcccgcgcagcccgccgtgggcaggagcgggaggaacaggagcaggagatcccatcctggatccggggctcggcctgggtcccggccaggcatccgcctcctcgcccgacgacggcggccgcaccgaccgctttgccttccagctgccctttgctgagggcgcgggcgatggggcgcgcctcgacttcgtggtgcgctatgagacccctgagggcactttctgggccaacaaccacggccgcaactacacagtcctgctccggatcgcacccgctcccacacccactgatgccgaagggctgccccagcagcagcagctgccgcagctggagccacagcccgagtgccagggtcccgtggaggctgaggccaggcagctgaagagctgcatgaagccggtgaggcgcaggcctgccgaggaggaactgaagacgaagaacatggatgataacacctttgccatggcagagcatcctgatgtccaggagtcagtgggtccactggtagcccccacccctctccgtccatggccccagatgacacttcaggtttctgacgttccgatgactggcaaccccgcagaagaaggtgaaaagcaatcacggagttaaaagaagacaagctgaaatgatgcag

SEQ ID NO: 12323 - protein, 337 aa, Homo sapiens
MAAAAGQDGGGGGGADEDDDGEDGDEGEEEEEACPEPSPLCPVPAGGGFYLVPTFSLPPAPGRLERLGRVMVELEALLPPPGAVPGGAGVWVPGGRPPVLRGLVRVLNRSFEKAVHVRASHDGWASFCDHPARYVPRSPPWAGAGGTGAGDPILDPGLGLGPGQASASSPDDGGRTDRFAFQLPFAEGAGDGARLDFVVRYETPEGTFWANNHGRNYTVLLRIAPAPTPTDAEGLPQQQQLPQLEPQPECQGPVEAEARQLKSCMKPVRRRPAEEELKTKNMDDNTFAMAEHPDVQESVGPLVAPTPLRPWPQMTLQVSDVPMTGNPAEEGEKQSRS

SEQ ID NO: 12324 - DNA, 1095 bp, Homo sapiens
agttgcgccgctaccggccgtggggcgggcccggggcgggcaagatggcggcggcggccgggcaagatggcggcggcggcggcggggccgacgaggacgacgatggcgaggatggggatgaaggggaggaggaagaggaggcttgccccgagccctcaccgctgtgccccgtccccgctggcggggggttttacctggtccccacattttcgctgccgcccgcgccgggccgtctggagcgcttggggcgcgtcatggtggagctggaggcgctgctgccgcctcccggagcggtccccgggggtgccggggtgtgggtgcctgggggccgcccgccggtgctgcgcgggttggtacgcgtgctgaaccgctccttcgagaaggcggtgcacgtgcgggcctcacacgacggctgggcttccttttgcgaccacccagcgcgctacgtcccgcgcagcccgccgtgggcaggagcgggaggaacaggagcaggagatcccatcctggatccggggctcggcctgggtcccggccaggcatccgcctcctcgcccgacgacggcggccgcaccgaccgctttgccttccagctgccctttgctgagggcgcgggcgatggggcgcgcctcgacttcgtggtgcgctatgagacccctgagggcactttctgggccaacaaccacggccgcaactacacagtcctgctccggatcgcacccgctcccacacccactgatgccgaagggctgccccagcagcagcagctgccgcagctggagccacagcccgagtgccagggtcccgtggaggctgaggccaggcagctgaagagctgcatgaagccggtgaggcgcaggcctgccgaggaggaactgaagacgaagaacatggatgataacacctttgccatggcagagcatcctgatgtccaggagtcagtgggtccactggtagcccccacccctctccgtccatggccccagatgacacttcaggtgaaaagcaatcacggagttaaaagaagacaagctgaaatgatgcaggctgctcctatgttggaaatttgttcattaaaattctcccaataaagcttta

SEQ ID NO: 12325 - protein, 347 aa, Homo sapiens
MAAAAGQDGGGGGGADEDDDGEDGDEGEEEEEACPEPSPLCPVPAGGGFYLVPTFSLPPAPGRLERLGRVMVELEALLPPPGAVPGGAGVWVPGGRPPVLRGLVRVLNRSFEKAVHVRASHDGWASFCDHPARYVPRSPPWAGAGGTGAGDPILDPGLGLGPGQASASSPDDGGRTDRFAFQLPFAEGAGDGARLDFVVRYETPEGTFWANNHGRNYTVLLRIAPAPTPTDAEGLPQQQQLPQLEPQPECQGPVEAEARQLKSCMKPVRRRPAEEELKTKNMDDNTFAMAEHPDVQESVGPLVAPTPLRPWPQMTLQVKSNHGVKRRQAEMMQAAPMLEICSLKFSQ

SEQ ID NO: 12326 - DNA, 1309 bp, Homo sapiens
agttgcgccgctaccggccgtggggcgggcccggggcgggcaagatggcggcggcggccgggcaagatggcggcggcggcggcggggccgacgaggacgacgatggcgaggatggggatgaaggggaggaggaagaggaggcttgccccgagccctcaccgctgtgccccgtccccgctggcggggggttttacctggtccccacattttcgctgccgcccgcgccgggccgtctggagcgcttggggcgcgtcatggtggagctggaggcgctgctgccgcctcccggagcggtccccgggggtgccggggtgtgggtgcctgggggccgcccgccggtgctgcgcgggttggtacgcgtgctgaaccgctccttcgagaaggcggtgcacgtgcgggcctcacacgacggctgggcttccttttgcgaccacccagcgcgctacgtcccgcgcagcccgccgtgggcaggagcgggaggaacaggagcaggagatcccatcctggatccggggctcggcctgggtcccggccaggcatccgcctcctcgcccgacgacggcggccgcaccgaccgctttgccttccagctgccctttgctgagggcgcgggcgatggggcgcgcctcgacttcgtggtgcgctatgagacccctgagggcactttctgggccaacaaccacggccgcaactacacagtcctgctccggatcgcacccgctcccacacccactgatgccgaagggctgccccagcagcagcagctgccgcagctggagccacagcccgagtgccagggtcccgtggaggctgaggccaggcagctgaagagctgcatgaagccggtgaggcgcaggcctgccgaggaggaactgaagacgaagaacatggatgataacacctttgccatggcagagcatcctgatgtccaggagtcagtgggtccactggtagcccccacccctctccgtccatggccccagatgacacttcaggtttctgacgttccgatgactggcaaccccgcagaagaaggtctgctggagtttgttggagttccactccagaccctgtttgcctgggtatcaccagcagaggctgcagaacagcaaagattgctgccttttccttcctctgggaagcttcgtcccagaggggcacctgccagatgccagccggagctcttgtatatgaggtgaaaagcaatcacggagttaaaagaagacaagctgaaatgatgcaggctgctcctatgttggaaatttgttcattaaaattctcccaataaagctttacagccttctgcaaa

SEQ ID NO: 12327 - protein, 384 aa, Homo sapiens
MAAAAGQDGGGGGGADEDDDGEDGDEGEEEEEACPEPSPLCPVPAGGGFYLVPTFSLPPAPGRLERLGRVMVELEALLPPPGAVPGGAGVWVPGGRPPVLRGLVRVLNRSFEKAVHVRASHDGWASFCDHPARYVPRSPPWAGAGGTGAGDPILDPGLGLGPGQASASSPDDGGRTDRFAFQLPFAEGAGDGARLDFVVRYETPEGTFWANNHGRNYTVLLRIAPAPTPTDAEGLPQQQQLPQLEPQPECQGPVEAEARQLKSCMKPVRRRPAEEELKTKNMDDNTFAMAEHPDVQESVGPLVAPTPLRPWPQMTLQVSDVPMTGNPAEEGLLEFVGVPLQTLFAWVSPAEAAEQQRLLPFPSSGKLRPRGAPARCQPELLYMR

SEQ ID NO: 12328 - DNA, 1269 bp, Homo sapiens
agttgcgccgctaccggccgtggggcgggcccggggcgggcaagatggcggcggcggccgggcaagatggcggcggcggcggcggggccgacgaggacgacgatggcgaggatggggatgaaggggaggaggaagaggaggcttgccccgagccctcaccgctgtgccccgtccccgctggcggggggttttacctggtccccacattttcgctgccgcccgcgccgggccgtctggagcgcttggggcgcgtcatggtggagctggaggcgctgctgccgcctcccggagcggtccccgggggtgccggggtgtgggtgcctgggggccgcccgccggtgctgcgcgggttggtacgcgtgctgaaccgctccttcgagaaggcggtgcacgtgcgggcctcacacgacggctgggcttccttttgcgaccacccagcgcgctacgtcccgcgcagcccgccgtgggcaggagcgggaggaacaggagcaggagatcccatcctggatccggggctcggcctgggtcccggccaggcatccgcctcctcgcccgacgacggcggccgcaccgaccgctttgccttccagctgccctttgctgagggcgcgggcgatggggcgcgcctcgacttcgtggtgcgctatgagacccctgagggcactttctgggccaacaaccacggccgcaactacacagtcctgctccggatcgcacccgctcccacacccactgatgccgaagggctgccccagcagcagcagctgccgcagctggagccacagcccgagtgccagggtcccgtggaggctgaggccaggcagctgaagagctgcatgaagccggtgaggcgcaggcctgccgaggaggaactgaagacgaagaacatggatgataacacctttgccatggcagagcatcctgatgtccaggagtcagtgggtccactggtagcccccacccctctccgtccatggccccagatgacacttcaggtctgctggagtttgttggagttccactccagaccctgtttgcctgggtatcaccagcagaggctgcagaacagcaaagattgctgccttttccttcctctgggaagcttcgtcccagaggggcacctgccagatgccagccggagctcttgtatatgaggtgaaaagcaatcacggagttaaaagaagacaagctgaaatgatgcaggctgctcctatgttggaaatttgttcattaaaattctcccaataaagctttacagccttctgcaaa

SEQ ID NO: 12329 - protein, 369 aa, Homo sapiens
MAAAAGQDGGGGGGADEDDDGEDGDEGEEEEEACPEPSPLCPVPAGGGFYLVPTFSLPPAPGRLERLGRVMVELEALLPPPGAVPGGAGVWVPGGRPPVLRGLVRVLNRSFEKAVHVRASHDGWASFCDHPARYVPRSPPWAGAGGTGAGDPILDPGLGLGPGQASASSPDDGGRTDRFAFQLPFAEGAGDGARLDFVVRYETPEGTFWANNHGRNYTVLLRIAPAPTPTDAEGLPQQQQLPQLEPQPECQGPVEAEARQLKSCMKPVRRRPAEEELKTKNMDDNTFAMAEHPDVQESVGPLVAPTPLRPWPQMTLQVCWSLLEFHSRPCLPGYHQQRLQNSKDCCLFLPLGSFVPEGHLPDASRSSCI

SEQ ID NO: 12330 - DNA, 2454 bp, Homo sapiens
acctcaagtggtctccctgcctcggcctcccaaagtgctggaattacaggtgtaagccaccacgcccagccgaaaagatgggttcttctatcttttctctttccatagccaggaatgtatcctaaagaaatgatacaagtgtcgataaaactatgcccaatgctgtttgctggtttgctttgcaacctctaaatgaaagaacttagctgctcagtaggaagggaatggtatgatatgagtattaagcagccatttgaaatgtttgcaaaagtgtataatgatgtttcttactgttaaatggacaaagctagctgtgaaattatgtctgtagaatctaaatgatttcgtagaatatctggaaggaaattttccagaatggtaacagtagttgtctctggctgatgtgtgattgtttttcttgcttctttagactttcctgtattttgcgaattttctataatgaggctgtaggacttttaggatgaggggataaacaaaggcagcagaagagaaaacagcagctgtcaggtgaaggtgggctagcacagaggctcagaaggtgccagtgggtggcagaagtgacctctcagggtattattagatccatgtactctctcctctgccctgcaggcctgccgaggaggaactgaagacgaagaacatggatgataacacctttgccatggcagagcatcctgatgtccaggagtcagtgggtccactggtagcccccacccctctccgtccatggccccagatgacacttcaggtttctgacgttccgatgactggcaaccccgcagaagaaggtgatgtccccagaagcagtccacctgtggcttttacagaggtcctccaggcaccggccatcaggattcccccctcctcccctctctgtggcctgggtggctcccccagagaccaggcctcagggcccgatgcgagcgagggggccaccgggcctttcctggagcccagtcagcagcaggcagaggccacatggggagtatcgagtgagaatggaggggggctggaggctgtgagtgggtcagaggagctgctcggtgaggacaccatcgaccaggagctggagcagctctacctgtctcacctgagccgcctacgggctgctgtggctgcgggtggggcagggggtggtggggagggctccacagatggagggatgtcccccagccatcccctgggcatactgacggaccgcgacctgatcttgaagtggcctggccctgagcgggccctgaacagcgccctggctgaggagatcacgctgcactatgcccggctggggcgtggcgtggagctcatcaaggacaccgaagaccctgatgatgaaggggagggtgaagaggggctctctgtcacaccctccagcccagaaggggacagccccaaggaatcgcctccagaaatcctctccggggcccgttctgtggtagccacgatgggagatgtgtggctcccatgggcagagggctcaggatgtgacggccctgtggttctgggtacagagggtcagttcattggggatcctgagaaagggatgggcaaggacaccagctctttgcacatgaatagggtgatagctggggtgactgagtccctgggggaggccgggacagaagcccagatagaggtcaccagtgagtgggcaggcagcttggatcccatatctggcaaggagccagcctctcccgtccttctgcaggggcaaaatcccaccctcctcagtcccttgggggccgaagtctgtctctctagtgtagccaggcctcatgtgagctcccaggatgaaaaggatgcaggcccaagccttgaacccccaaagaagtctcccaccctagcagtccctgcagaatgtgtgtgtgcactgcctcctcagctccgggggcccttgacccagactctgggggtcctggccgggctagtggtggtccctgtggctctgaacagcggtgtgtccctcctggtgcttgcgctgtgcctctctctggcttggttctcataggctctgcttgtgggatcagcagaggcttaagatgggatacatggcctgtgcagtgaggggacctgggtcctttgcttctgagaatgctcaactgaaagagaggccttctcatccccaagctctccagtcaacacagggctccctgtggtgacaccagtggagatgagggaacgggtagatggtgtgagtgaggggaacttttagagtggaactgggcatgtcctccgcctaccccccgagcctgtatttatttttgtataattctctggatgagggagagtggtcgtgagctggtcttggggcacaattacccagagatatatttattaacagccaacctgtgcaacctgctggagctttatttttaatttaatttatatagagtacctattattatatgccacaatagagctctatgagaaacagtg

SEQ ID NO: 12331 - protein, 454 aa, Homo sapiens
MDDNTFAMAEHPDVQESVGPLVAPTPLRPWPQMTLQVSDVPMTGNPAEEGDVPRSSPPVAFTEVLQAPAIRIPPSSPLCGLGGSPRDQASGPDASEGATGPFLEPSQQQAEATWGVSSENGGGLEAVSGSEELLGEDTIDQELEQLYLSHLSRLRAAVAAGGAGGGGEGSTDGGMSPSHPLGILTDRDLILKWPGPERALNSALAEEITLHYARLGRGVELIKDTEDPDDEGEGEEGLSVTPSSPEGDSPKESPPEILSGARSVVATMGDVWLPWAEGSGCDGPVVLGTEGQFIGDPEKGMGKDTSSLHMNRVIAGVTESLGEAGTEAQIEVTSEWAGSLDPISGKEPASPVLLQGQNPTLLSPLGAEVCLSSVARPHVSSQDEKDAGPSLEPPKKSPTLAVPAECVCALPPQLRGPLTQTLGVLAGLVVVPVALNSGVSLLVLALCLSLAWFS

SEQ ID NO: 12332 - DNA, 513 bp, Homo sapiens
tggagaacgccagggagctgtgagggtgtgtggtctcgttcctgtcgtctggaatatttttcctctactgagattcatctgtgtgaaatatgagttggcgaggaagatcgacctatcggtctagaccaagactctatgtagagccccctgaaatgattgggcctatgctgcccgagcagttcagtgatgaagtggaaccagcaacacctgaagaaggggaaccagcaactcaacgtcaggatcctgcagctgctcaggagggagaggatgagggagcatctgcaggtcaagggccgaagcctgaagctgatagccaggaacaggttcacccaaagactgggtgtgagtgtggagatggtcctgatggccaggagatgggcctgccaaatccagaggaggtgaaaaggcctgaagaaggtgaaaagcaatcacagtgttaaaagaagacacgttgaaatgatgcaggctgctcctatgttggaaatttgttcattaaaattctcccaataaagc

SEQ ID NO: 12333 - protein, 116 aa, Homo sapiens [sequence omitted]

SEQ ID NO: 12334 - DNA, 417 bp, Homo sapiens
gcgtcttctgcccggccccttcgcccacgtgaagaacgccagggagctgtgaggcagtgctgtgtggttcctgccgtccggactctttttcctctactgagattcatctgtgtgaaatatgagttggcgaggaagatcgacctattattggcctagaccaagaccctatgtacagcctcctgaaatgattgggcctatgcggcccgagcagttcagtgatgaagtggaaccagcaacacctgaagaaggggaaccagcaactcaacgtcaggatcctgcagctgctcaggagggagaggatgagggagcatctgcaggtcaagggccgaagcctgaagctgatagccaggaacagggtcacccacagactgggtgtgagtgtgaagatggtcctgatgggcaggagatggacccgcc

SEQ ID NO: 12335 - protein, 98 aa, Homo sapiens
MSWRGRSTYYWPRPRPYVQPPEMIGPMRPEQFSDEVEPATPEEGEPATQRQDPAAAQEGEDEGASAGQGPKPEADSQEQGHPQTGCECEDGPDGQEMD

SEQ ID NO: 12336 - DNA, 645 bp, Homo sapiens
gcgtcttctgcccggccccttcgcccacgtgaagaacgccagggagctgtgaggcagtgctgtgtggttcctgccgtccggactctttttcctctactgagattcatctgtgtgaaatatgagttggcgaggaagatcgacctattattggcctagaccaagaccctatgtacagcctcctgaaatgattgggcctatgcggcccgagcagttcagtgatgaagtggaaccagcaacacctgaagaaggggaaccagcaactcaacgtcaggatcctgcagctgctcaggagggagaggatgagggagcatctgcaggtcaagggccgaagcctgaagctgatagccaggaacagggtcacccacagactgggtgtgagtgtgaagatggtcctgatgggcaggagatggacccgccaaatccagaggaggtgaaaacgcctgaagaagagggtttctctggcttttaatgaacaattgtgcttcttaaatctttccccacggaaaccttgagtgactgaaataaatatcaaatggcgagagaccgtttagttcctatcatctgtggcatgtaaaaagcaatcacagtgttaaaagaagacacgttgaaatgatgcaggctgctcctatgttggaaatttgttca

SEQ ID NO: 12337 - protein, 116 aa, Homo sapiens
MSWRGRSTYYWPRPRPYVQPPEMIGPMRPEQFSDEVEPATPEEGEPATQRQDPAAAQEGEDEGASAGQGPKPEADSQEQGHPQTGCECEDGPDGQEMDPPNPEEVKTPEEEGFSGF

SEQ ID NO: 12338 - DNA, 560 bp, Homo sapiens
gcgtcttctgcccggccccttcgcccacgtgaagaacgccagggagctgtgaggcagtgctgtgtggttcctgccgtccggactctttttcctctactgagattcatctgtgtgaaatatgagttggcgaggaagatcgacctattattggcctagaccaagaccctatgtacagcctcctgaaatgattgggcctatgcggcccgagcagttcagtgatgaagtggaaccagcaacacctgaagaaggggaaccagcaactcaacgtcaggatcctgcagctgctcaggagggagaggatgagggagcatctgcaggtcaagggccgaagcctgaagctgatagccaggaacagggtcacccacagactgggtgtgagtgtgaagatggtcctgatgggcaggagatggacccgccaaatccagaggaggtgaaaacgcctgaagaaggtaaaaagcaatcacagtgttaaaagaagacacgttgaaatgatgcaggctgctcctatgttggaaatttgttcattaaaattctcccaataaagctttacagccttctgc

SEQ ID NO: 12339 - protein, 117 aa, Homo sapiens
MSWRGRSTYYWPRPRPYVQPPEMIGPMRPEQFSDEVEPATPEEGEPATQRQDPAAAQEGEDEGASAGQGPKPEADSQEQGHPQTGCECEDGPDGQEMDPPNPEEVKTPEEGKKQSQC

SEQ ID NO: 12340 - DNA, 381 bp, Homo sapiens
gcagtgctgtgtggttcctgccgtccggactctttttcctctactgagattcatctgtgtgaaatatgagttggcgaggaagatcgacctattattggcctagaccaagaccctatgtacagcctcctgaaatgattgggcctatgcggcccgagcagttcagtgatgaagtggaaccagcaacacctgaagaaggggaaccagcaactcaacgtcaggatcctgcagctgctcaggagggagaggatgagggagcatctgcaggtcaaggtaaaaagcaatcacagtgttaaaagaagacacgttgaaatgatgcaggctgctcctatgttggaaatttgttcattaaaattctcccaataaagctttacagccttctgc

SEQ ID NO: 12341 - protein, 75 aa, Homo sapiens; identical to SEQ ID NO: 2106

SEQ ID NO: 12342 - DNA, 398 bp, Homo sapiens
aaacttattttctatttgcacacccacacgtattccccagcccgagcagttcagtgatgaagtggaaccagcaacacctgaagaaggggaaccagcaactcaacgtcaggatcctgcagctgctcaggagggagaggatgagggagcatctgcaggtcaagggccgaagcctgaagctgatagccaggaacagggtcacccacagactgggtgtgagtgtgaagatggtcctgatgggcaggagatggacccgccaaatccagaggaggtgaaaacgcctgaagaaggtaaaaagcaatcacagtgttaaaagaagacacgttgaaatgatgcaggctgctcctatgttggaaatttgttcattaaaattctcccaataaagctttacagccttctgc

SEQ ID NO: 12343 - protein, 71 aa, Homo sapiens
MKWNQQHLKKGNQQLNVRILQLLRRERMREHLQVKGRSLKLIARNRVTHRLGVSVKMVLMGRRWTRQIQRR

SEQ ID NO: 12344 - DNA, 552 bp, Homo sapiens
gcccggccccttcgcccacgtgaagaacgccagggagctgtgaggcagtgctgtgtggttcctgccgtccggactctttttcctctactgagattcatctgtgtgaaatatgagttggcgaggaagatcgacctatcggcctagaccaagacgctacgtagagcctcctgaaatgattgggcctatgcggcccgagcagttcagtgatgaagtggaaccagcaacacctgaagaaggggaaccagcaactcaacgtcaggatcctgcagctgctcaggagggagaggatgagggagcatctgcaggtcaagggccgaagcctgaagctgatagccaggaacagggtcacccacagactgggtgtgagtgtgaagatggtcctgatgggcaggagatggacccgccaaatccagaggaggtgaaaacgcctgaagaaggtaaaaagcaatcacagtgttaaaagaagacacgttgaaatgatgcaggctgctcctatgttggaaatttgttcattaaaattctcccaataaagctttacagccttctgcaaag

SEQ ID NO: 12345 - protein, 116 aa, Homo sapiens
MSWRGRSTYRPRPRRYVEPPEMIGPMRPEQFSDEVEPATPEEGEPATQRQDPAAAQEGEDEGASAGQGPKPEADSQEQGHPQTGCECEDGPDGQEMDPPNPEEVKTPEEGKKQSQC

SEQ ID NO: 12346 - DNA, 398 bp, Homo sapiens; identical to SEQ ID NO: 12342

SEQ ID NO: 12347 - protein, 71 aa, Homo sapiens; identical to SEQ ID NO: 12343

SEQ ID NO: 12348 - DNA, 555 bp, Homo sapiens
tctgcccggccccttcgcccacgtgaagaacgccagggagctgtgaggcagtgctgtgtggttcctgccgtccggactctttttcctctactgagattcatctgtgtgaaatatgagttggcgaggaagatcgacctatcggcctagaccaagacgctacgtagagcctcctgaaatgattgggcctatgcggcccgagcagttcagtgatgaagtggaaccagcaacacctgaagaaggggaaccagcaactcaacgtcaggatcctgcagctgctcaggagggagaggatgagggagcatctgcaggtcaagggccgaagcctgaagctgatagccaggaacagggtcacccacagactgggtgtgagtgtgaagatggtcctgatgggcaggagatggacccgccaaatccagaggaggtgaaaacgcctgaagaaggtgaaaagcaatcacagtgttaaaagaaggcacgttgaaatgatgcaggctgctcctatgttggaaatttgttcattaaaattctcccaataaagctttacagccttctgcaaag

SEQ ID NO: 12349 - protein, 116 aa, Homo sapiens; identical to SEQ ID NO: 2108

SEQ ID NO: 12350 - DNA, 422 bp, Homo sapiens
gcccggccccttcgcccacgtgaagaacgccagggagctgtgaggcagtgctgtgtggttcctgccgtccggactctttttcctctactgagattcatctgtgtgaaatatgagttggcgaggaagatcgacctatcggcctagaccaagacgctacgtagagcctcctgaaatgattgggcctatgcggcccgagcagttcagtgatgaagtggaaccagcaacacctgaagaaggggaaccagcaactcaacgtcaggatcctgcagctgctcaggagggagaggatgagggagcatctgcaggtcaaggtgaaaagcaatcacagtgttaaaagaaggcacgttgaaatgatgcaggctgctcctatgttggaaatttgttcattaaaattctcccaataaagctttacagccttctgc

SEQ ID NO: 12351 - protein, 74 aa, Homo sapiens; identical to SEQ ID NO: 2110

SEQ ID NO: 12352 - DNA, 398 bp, Homo sapiens
aaacttattttctatttgcacacccacacgtattccccagcccgagcagttcagtgatgaagtggaaccagcaacacctgaagaaggggaaccagcaactcaacgtcaggatcctgcagctgctcaggagggagaggatgagggagcatctgcaggtcaagggccgaagcctgaagctgatagccaggaacagggtcacccacagactgggtgtgagtgtgaagatggtcctgatgggcaggagatggacccgccaaatccagaggaggtgaaaacgcctgaagaaggtgaaaagcaatcacagtgttaaaagaaggcacgttgaaatgatgcaggctgctcctatgttggaaatttgttcattaaaattctcccaataaagctttacagccttctgc

SEQ ID NO: 12353 - protein, 71 aa, Homo sapiens; identical to SEQ ID NO: 12343

SEQ ID NO: 12354 - DNA, 555 bp, Homo sapiens
ccggccccttcgcccacgtgaagaacgccagggagctgtgaggcagtgctgtgtggttcctgccgtccggactctttttcctctactgagattcatctgtgtgaaatatgagttggcgaggaagatcgacctattattggcctagaccaaggcgctatgtacagcctcctgaaatgattgggcctatgcggcccgagcagttcagtgatgaagtggaaccagcaacacctgaagaaggggaaccagcaactcaacgtcaggatcctgcagctgctcaggagggagaggatgagggagcatctgcaggtcaagggccgaagcctgaagctcatagccaggaacagggtcacccacagactgggtgtgagtgtgaagatggtcctgatgggcaggagatggacccgccaaatccagaggaggtgaaaacgcctgaagaaggtgaaaagcaatcacagtgttaaaagaaggcacgttgaaatgatgcaggctgctcctatgttggaaatttgttcattaaaattctcccaataaagctttacagccttctgcaaagaa

SEQ ID NO: 12355 - protein, 117 aa, Homo sapiens; identical to SEQ ID NO: 2116

SEQ ID NO: 12356 - DNA, 408 bp, Homo sapiens
ataacgaaacttattttttatttgcacacccacacgtattccccagcccgagcagttcagtgatgaagtggaaccagcaacacctgaagaaggggaaccagcaactcaacgtcaggatcctgcagctgctcaggagggagaggatgagggagcatctgcaggtcaagggccgaagcctgaagctcatagccaggaacagggtcacccacagactgggtgtgagtgtgaagatggtcctgatgggcaggagatggacccgccaaatccagaggaggtgaaaacgcctgaagaaggtgaaaagcaatcacagtgttaaaagaaggcacgttgaaatgatgcaggctgctcctatgttggaaatttgttcattaaaattctcccaataaagctttacagccttctgcaaag

SEQ ID NO: 12357 - protein, 71 aa, Homo sapiens; identical to SEQ ID NO: 12343

SEQ ID NO: 12358 - DNA, 633 bp, Homo sapiens
tctgcccggccccttcgcccacgtgaagaacgccagggagctgtgaggcagtgctgtgtggttcctgccgtccggactctttttcctctactgagattcatctgtgtgaaatatgagttggcgaggaagatcgacctatcggcctagaccaagacgctacgtagagcctcctgaaatgattgggcctatgcggcccgagcagttcagtgatgaagtggaaccagcaacacctgaagaaggggaaccagcaactcaacgtcaggatcctgcagctgctcaggagggagaggatgagggagcatctgcaggtcaagggccgaagcctgaagctcatagccaggaacagggtcacccacagactgggtgtgagtgtgaagatggtcctgatgggcaggagatggacccgccaaatccagaggaggtgaaaacgcctgaagaaggtttctctggcttttaatgaacaattgtgcttcttaaatctttccccacggaaaccttgagtgactgaaataaatatcaaatggcgagagaccgtttagttcctatcatctgtggcatgtgaaaagcaatcacagtgttaaaagaaggcacgttgaaatgatgcaggctgctcctatgttggaaatttgttca

SEQ ID NO: 12359 - protein, 114 aa, Homo sapiens
MSWRGRSTYRPRPRRYVEPPEMIGPMRPEQFSDEVEPATPEEGEPATQRQDPAAAQEGEDEGASAGQGPKPEAHSQEQGHPQTGCECEDGPDGQEMDPPNPEEVKTPEEGFSGF

SEQ ID NO: 12360 - DNA, 422 bp, Homo sapiens; identical to SEQ ID NO: 12350

SEQ ID NO: 12361 - protein, 74 aa, Homo sapiens; identical to SEQ ID NO: 2110

SEQ ID NO: 12362 - DNA, 552 bp, Homo sapiens
gcccggccccttcgcccacgtgaagaacgccagggagctgtgaggcagtgctgtgtggttcctgccgtccggactctttttcctctactgagattcatctgtgtgaaatatgagttggcgaggaagatcgacctatcggcctagaccaagacgctacgtagagcctcctgaaatgattgggcctatgcggcccgagcagttcagtgatgaagtggaaccagcaacacctgaagaaggggaaccagcaactcaacgtcaggatcctgcagctgctcaggagggagaggatgagggagcatctgcaggtcaagggccgaagcctgaagctcatagccaggaacagggtcacccacagactgggtgtgagtgtgaagatggtcctgatgggcaggagatggacccgccaaatccagaggaggtgaaaacgcctgaagaaggtgaaaagcaatcacagtgttaaaagaaggcacgttgaaatgatgcaggctgctcctatgttggaaatttgttcattaaaattctcccaataaagctttacagccttctgcaaag

SEQ ID NO: 12363 - protein, 116 aa, Homo sapiens; identical to SEQ ID NO: 2120

SEQ ID NO: 12364 - DNA, 402 bp, Homo sapiens
aaacttattttctatttgcacacccacacgtattccccagcccgagcagttcagtgatgaagtggaaccagcaacacctgaagaaggggaaccagcaactcaacgtcaggatcctgcagctgctcaggagggagaggatgagggagcatctgcaggtcaagggccgaagcctgaagctcatagccaggaacagggtcacccacagactgggtgtgagtgtgaagatggtcctgatgggcaggagatggacccgccaaatccagaggaggtgaaaacgcctgaagaaggtgaaaagcaatcacagtgttaaaagaaggcacgttgaaatgatgcaggctgctcctatgttggaaatttgttcattaaaattctcccaataaagctttacagccttctgcaaag

SEQ ID NO: 12365 - protein, 71 aa, Homo sapiens; identical to SEQ ID NO: 12343

SEQ ID NO: 12366 - DNA, 532 bp, Homo sapiens
tctgcccggccccttcgcccacgtgaagaacgccagggagctgtgaggcagtgctgtgtggttcctgccgtccggactctttttcctctattgagattcatctgtgtgaaatatgagttggcgaggaagatcgacctatcggcctagaccaagacgctacgtagagcctcctgaaatgattgggcctatgcggcccgagcagttcagtgatgaagtggaaccagcaacacctgaagaaggggaaccagcaactcaacgtcaggatcctgcagctgctcaggagggagaggatgagggagcatctgcaggtcaagggccgaagcctgaagctcatagccaggaacagggtcacccacagactgggtgtgagtgtgaagatggtcctgatgggcaggagatggacccgccaaatccagaggaggtgaaaacgcctgaagaaggtgaaaagcaatcacagtgttaaaagaaggcacgttgaaatgatgcaggctgctcctatgttggaaatttgttcattaaaattctcccaata

SEQ ID NO: 12367 - protein, 116 aa, Homo sapiens; identical to SEQ ID NO: 2120

SEQ ID NO: 12368 - DNA, 375 bp, Homo sapiens
aaacttattttctatttgcacacccacacgtattccccagcccgagcagttcagtgatgaagtggaaccagcaacacctgaagaaggggaaccagcaactcaacgtcaggatcctgcagctgctcaggagggagaggatgagggagcatctgcaggtcaagggccgaagcctgaagctcatagccaggaacagggtcacccacagactgggtgtgagtgtgaagatggtcctgatgggcaggagatggacccgccaaatccagaggaggtgaaaacgcctgaagaaggtgaaaagcaatcacagtgttaaaagaaggcacgttgaaatgatgcaggctgctcctatgttggaaatttgttcattaaaattctccc

SEQ ID NO: 12369 - protein, 71 aa, Homo sapiens; identical to SEQ ID NO: 12343

SEQ ID NO: 12370 - DNA, 558 bp, Homo sapiens
tctgcccggccccttcgcccacgtgaagaacgccagggagctgtgaggcagtgctgtgtggttcctgccgtccggactctttttcctctactgagattcatctgtgtgaaatatgagttggcgaggaagatcgacctattattggcctagaccaaggcgctatgtacagcctcctgaaatgattgggcctatgcggcccgagcagttcagtgatgaagtggaaccagcaacacctgaagaaggggaaccagcaactcaatgtcaggatcctgcagctgctcaggagggagaggatgagggagcatctgcaggtcaagggccgaagcctgaagctcatagccaggaacagggtcacccacagactgggtgtgagtgtgaagatggtcctgatgggcaggagatggacccgccaaatccagaggaggtgaaaacgcctgaagaaggtgaaaagcaatcacagtgttaaaagaagacacgttgaaatgatgcaggctgctcctatgttggaaatttgttcattaaaattctcccaataaagctttacagccttctgcaaag

SEQ ID NO: 12371 - protein, 117 aa, Homo sapiens
MSWRGRSTYYWPRPRRYVQPPEMIGPMRPEQFSDEVEPATPEEGEPATQCQDPAAAQEGEDEGASAGQGPKPEAHSQEQGHPQTGCECEDGPDGQEMDPPNPEEVKTPEEGEKQSQC

SEQ ID NO: 12372 - DNA, 388 bp, Homo sapiens
tgtgaggcagtgctgtgtggttcctgccgtccggactctttttcctctactgagattcatctgtgtgaaatatgagttggcgaggaagatcgacctattattggcctagaccaaggcgctatgtacagcctcctgaaatgattgggcctatgcggcccgagcagttcagtgatgaagtggaaccagcaacacctgaagaaggggaaccagcaactcaatgtcaggatcctgcagctgctcaggagggagaggatgagggagcatctgcaggtcaaggtgaaaagcaatcacagtgttaaaagaagacacgttgaaatgatgcaggctgctcctatgttggaaatttgttcattaaaattctcccaataaagctttacagccttctgca

SEQ ID NO: 12373 - protein, 75 aa, Homo sapiens; identical to SEQ ID NO: 2122

SEQ ID NO: 12374 - DNA, 402 bp, Homo sapiens
aaacttattttctatttgcacacccacacgtattccccagcccgagcagttcagtgatgaagtggaaccagcaacacctgaagaaggggaaccagcaactcaatgtcaggatcctgcagctgctcaggagggagaggatgagggagcatctgcaggtcaagggccgaagcctgaagctcatagccaggaacagggtcacccacagactgggtgtgagtgtgaagatggtcctgatgggcaggagatggacccgccaaatccagaggaggtgaaaacgcctgaagaaggtgaaaagcaatcacagtgttaaaagaagacacgttgaaatgatgcaggctgctcctatgttggaaatttgttcattaaaattctcccaataaagctttacagccttctgcaaag

SEQ ID NO: 12375 - protein, 71 aa, Homo sapiens; identical to SEQ ID NO: 12343

SEQ ID NO: 12376 - DNA, 701 bp, Homo sapiens
tctgcccggccccttcgcccacgtgaagaacgccagggagctgtgaggcagtgctgtgtggttcctgccgtccggactctttttcctctactgagattcatctgtgtgaaatatgagttggcgaggaagatcgacctattattggcctagaccaaggcgctatgtacagcctcctgaaatgattgggcctatgcggcccgagcagttcagtgatgaagtggaaccagcaacacctgaagaaggggaaccagcaactcaatgtcaggatcctgcagctgctcaggagggagaggatgagggagcatctgcaggtcaagggccgaagcctgaagctcatagccaggaacagggtcacccacagactgggtgtgagtgtgaagatggtcctgatgggcaggagatggacccgccaaatccagaggaggtgaaaacgcctgaagaagagatgaggtctcactgtgttgcccaggcagggtttctctggcttttaatgaacaattgcttcttaaaactttccccacggaaaccttgagtgactgaaataaatatcaaatggcgagagaccgtttagttcgtatcatctgtggcatgtgaaaagcaatcacagtgttaaaagaagacacgttgaaatgatgcaggctgctcctatgttggaaatttgttcattaaaattctcccaataaagctttacagccttctgc

SEQ ID NO: 12377 - protein, 139 aa, Homo sapiens
MSWRGRSTYYWPRPRRYVQPPEMIGPMRPEQFSDEVEPATPEEGEPATQCQDPAAAQEGEDEGASAGQGPKPEAHSQEQGHPQTGCECEDGPDGQEMDPPNPEEVKTPEEEMRSHCVAQAGFLWLLMNNCFLKLSPRKP

SEQ ID NO: 12378 - DNA, 558 bp, Homo sapiens; identical to SEQ ID NO: 12370

SEQ ID NO: 12379 - protein, 117 aa, Homo sapiens; identical to SEQ ID NO: 12371

SEQ ID NO: 12380 - DNA, 388 bp, Homo sapiens; identical to SEQ ID NO: 12372

SEQ ID NO: 12381 - protein, 75 aa, Homo sapiens; identical to SEQ ID NO: 2122

SEQ ID NO: 12382 - DNA, 402 bp, Homo sapiens
aaacttattttttatttgcacacccacacgtattccccagcccgagcagttcagtgatgaagtggaaccagcaacacctgaagaaggggaaccagcaactcaatgtcaggatcctgcagctgctcaggagggagaggatgagggagcatctgcaggtcaagggccgaagcctgaagctcatagccaggaacagggtcacccacagactgggtgtgagtgtgaagatggtcctgatgggcaggagatggacccgccaaatccagaggaggtgaaaacgcctgaagaaggtgaaaagcaatcacagtgttaaaagaagacacgttgaaatgatgcaggctgctcctatgttggaaatttgttcattaaaattctcccaataaagctttacagccttctgcaaag

SEQ ID NO: 12383 - protein, 71 aa, Homo sapiens; identical to SEQ ID NO: 12343

SEQ ID NO: 12384 - DNA, 558 bp, Homo sapiens; identical to SEQ ID NO: 12370

SEQ ID NO: 12385 - protein, 117 aa, Homo sapiens; identical to SEQ ID NO: 12371

SEQ ID NO: 12386 - DNA, 388 bp, Homo sapiens; identical to SEQ ID NO: 12372

SEQ ID NO: 12387 - protein, 75 aa, Homo sapiens; identical to SEQ ID NO: 2122

SEQ ID NO: 12388 - DNA, 402 bp, Homo sapiens; identical to SEQ ID NO: 12374

SEQ ID NO: 12389 - protein, 71 aa, Homo sapiens; identical to SEQ ID NO: 12343

SEQ ID NO: 12390 - DNA, 558 bp, Homo sapiens
tctgcccggccccttcgcccacgtgaagaacgccagggagctgtgaggcagtgctgtgtggttcctgccgtccggactctttttcctctactgagattcatctgtgtgaaatatgagttggcgaggaagatcgacctattattggcctagaccaaggcgctatgtacagcctcctgaaatgattgggcctatgcggcccgagcagttcagtgatgaagtggaaccagcaacacctgaagaaggggaaccagcaactcaacgtcaggatcctgcagctgctcaggagggagaggatgagggagcatctgcaggtcaagggccgaagcctgaagctcatagccaggaacagggtcacccacagactgggtgtgagtgtgaagatggtcctgatgggcaggagatggacccgccaaatccagaggaggtgaaaacgcctgaagaaggtgaaaagcaatcacagtgttaaaagaagacacgttgaaatgatgcaggctgctcctatgttggaaatttgttcattaaaattctcccaataaagctttacagccttctgcaaag

SEQ ID NO: 12391 - protein, 117 aa, Homo sapiens; identical to SEQ ID NO: 2116

SEQ ID NO: 12392 - DNA, 391 bp, Homo sapiens
tgtgaggcagtgctgtgtggttcctgccgtccggactctttttcctctactgagattcatctgtgtgaaatatgagttggcgaggaagatcgacctattattggcctagaccaaggcgctatgtacagcctcctgaaatgattgggcctatgcggcccgagcagttcagtgatgaagtggaaccagcaacacctgaagaaggggaaccagcaactcaacgtcaggatcctgcagctgctcaggagggagaggatgagggagcatctgcaggtcaaggtgaaaagcaatcacagtgttaaaagaagacacgttgaaatgatgcaggctgctcctatgttggaaatttgttcattaaaattctcccaataaagctttacagccttctgcaaag

SEQ ID NO: 12393 - protein, 75 aa, Homo sapiens; identical to SEQ ID NO: 2128

SEQ ID NO: 12394 - DNA, 701 bp, Homo sapiens
tctgcccggccccttcgcccacgtgaagaacgccagggagctgtgaggcagtgctgtgtggttcctgccgtccggactctttttcctctactgagattcatctgtgtgaaatatgagttggcgaggaagatcgacctattattggcctagaccaaggcgctatgtacagcctcctgaaatgattgggcctatgcggcccgagcagttcagtgatgaagtggaaccagcaacacctgaagaaggggaaccagcaactcaacgtcaggatcctgcagctgctcaggagggagaggatgagggagcatctgcaggtcaagggccgaagcctgaagctcatagccaggaacagggtcacccacagactgggtgtgagtgtgaagatggtcctgatgggcaggagatggacccgccaaatccagaggaggtgaaaacgcctgaagaagagatgaggtctcactgtgttgcccaggcagggtttctctggcttttaatgaacaattgcttcttaaaactttccccacggaaaccttgagtgactgaaataaatatcaaatggcgagagaccgtttagttcgtatcatctgtggcatgtgaaaagcaatcacagtgttaaaagaagacacgttgaaatgatgcaggctgctcctatgttggaaatttgttcattaaaattctcccaataaagctttacagccttctgc

SEQ ID NO: 12395 - protein, 139 aa, Homo sapiens
MSWRGRSTYYWPRPRRYVQPPEMIGPMRPEQFSDEVEPATPEEGEPATQRQDPAAAQEGEDEGASAGQGPKPEAHSQEQGHPQTGCECEDGPDGQEMDPPNPEEVKTPEEEMRSHCVAQAGFLWLLMNNCFLKLSPRKP

SEQ ID NO: 12396 - DNA, 558 bp, Homo sapiens; identical to SEQ ID NO: 12390

SEQ ID NO: 12397 - protein, 117 aa, Homo sapiens; identical to SEQ ID NO: 2116

SEQ ID NO: 12398 - DNA, 391 bp, Homo sapiens; identical to SEQ ID NO: 12392

SEQ ID NO: 12399 - protein, 75 aa, Homo sapiens; identical to SEQ ID NO: 2128

SEQ ID NO: 12400 - DNA, 402 bp, Homo sapiens
aaacttattttctatttgcacacccacacgtattccccagcccgagcagttcagtgatgaagtggaaccagcaacacctgaagaaggggaaccagcaactcaacgtcaggatcctgcagctgctcaggagggagaggatgagggagcatctgcaggtcaagggccgaagcctgaagctcatagccaggaacagggtcacccacagactgggtgtgagtgtgaagatggtcctgatgggcaggagatggacccgccaaatccagaggaggtgaaaacgcctgaagaaggtgaaaagcaatcacagtgttaaaagaagacacgttgaaatgatgcaggctgctcctatgttggaaatttgttcattaaaattctcccaataaagctttacagccttctgcaaag

SEQ ID NO: 12401 - protein, 71 aa, Homo sapiens; identical to SEQ ID NO: 12343

SEQ ID NO: 12402 - DNA, 701 bp, Homo sapiens
tctgcccggccccttcgcccacgtgaagaacgccagggagctgtgaggcagtgctgtgtggttcctgccgtccggactctttttcctctactgagattcatctgtgtgaaatatgagttggcgaggaagatcgacctattattggcctagaccaaggcgctatgtacagcctcctgaaatgattgggcctatgcggcccgagcagttcagtgatgaagtggaaccagcaacacctgaagaaggggaaccagcaactcaatgtcaggatcctgcagctgctcagaagggagaggatgagggagcatctgcaggtcaagggccgaagcctgaagctcatagccaggaacagggtcacccacagactgggtgtgagtgtgaagatggtcctgatgggcaggagatggacccgccaaatccagaggaggtgaaaacgcctgaagaagagatgaggtctcactgtgttgcccaggcagggtttctctggcttttaatgaacaattgcttcttaaaactttccccacggaaaccttgagtgactgaaataaatatcaaatggcgagagaccgtttagttcgtatcatctgtggcatgtgaaaagcaatcacagtgttaaaagaagacacgttgaaatgatgcaggctgctcctatgttggaaatttgttcattaaaattctcccaataaagctttacagccttctgc

SEQ ID NO: 12403 - protein, 139 aa, Homo sapiens
MSWRGRSTYYWPRPRRYVQPPEMIGPMRPEQFSDEVEPATPEEGEPATQCQDPAAAQKGEDEGASAGQGPKPEAHSQEQGHPQTGCECEDGPDGQEMDPPNPEEVKTPEEEMRSHCVAQAGFLWLLMNNCFLKLSPRKP

SEQ ID NO: 12404 - DNA, 558 bp, Homo sapiens
tctgcccggccccttcgcccacgtgaagaacgccagggagctgtgaggcagtgctgtgtggttcctgccgtccggactctttttcctctactgagattcatctgtgtgaaatatgagttggcgaggaagatcgacctattattggcctagaccaaggcgctatgtacagcctcctgaaatgattgggcctatgcggcccgagcagttcagtgatgaagtggaaccagcaacacctgaagaaggggaaccagcaactcaatgtcaggatcctgcagctgctcagaagggagaggatgagggagcatctgcaggtcaagggccgaagcctgaagctcatagccaggaacagggtcacccacagactgggtgtgagtgtgaagatggtcctgatgggcaggagatggacccgccaaatccagaggaggtgaaaacgcctgaagaaggtgaaaagcaatcacagtgttaaaagaagacacgttgaaatgatgcaggctgctcctatgttggaaatttgttcattaaaattctcccaataaagctttacagccttctgcaaag

SEQ ID NO: 12405 - protein, 117 aa, Homo sapiens
MSWRGRSTYYWPRPRRYVQPPEMIGPMRPEQFSDEVEPATPEEGEPATQCQDPAAAQKGEDEGASAGQGPKPEAHSQEQGHPQTGCECEDGPDGQEMDPPNPEEVKTPEEGEKQSQC

SEQ ID NO: 12406 - DNA, 381 bp, Homo sapiens
gcagtgctgtgtggttcctgccgtccggactctttttcctctactgagattcatctgtgtgaaatatgagttggcgaggaagatcgacctattattggcctagaccaaggcgctatgtacagcctcctgaaatgattgggcctatgcggcccgagcagttcagtgatgaagtggaaccagcaacacctgaagaaggggaaccagcaactcaatgtcaggatcctgcagctgctcagaagggagaggatgagggagcatctgcaggtcaaggtgaaaagcaatcacagtgttaaaagaagacacgttgaaatgatgcaggctgctcctatgttggaaatttgttcattaaaattctcccaataaagctttacagccttctgc

SEQ ID NO: 12407 - protein, 75 aa, Homo sapiens; identical to SEQ ID NO: 2130

SEQ ID NO: 12408 - DNA, 400 bp, Homo sapiens
atgagttggcgaggaagatcgacctattattggcctagaccaaggcgctatgtacagcctcctgaaatgattgggcctatgcggcccgagcagttcagtgatgaagtggaaccagcaacacctgaagaaggggaaccagcaactcaatgtcaggatcctggccgaagcctgaagctcatagccaggaacagggtcacccacagactgggtgtgagtgtgaagatggtcctgatgggcaggagatggacccgccaaatccagaggaggtgaaaacgcctgaagaaggtgaaaagcaatcacagtgttaaaagaagacacgttgaaatgatgcaggctgctcctatgttggaaatttgttcattaaaattctcccaataaagctttacagccttctgcaaag

SEQ ID NO: 12409 - protein, 89 aa, Homo sapiens
MSWRGRSTYYWPRPRRYVQPPEMIGPMRPEQFSDEVEPATPEEGEPATQCQDPGRSLKLIARNRVTHRLGVSVKMVLMGRRWTRQIQRR

SEQ ID NO: 12410 - DNA, 402 bp, Homo sapiens
aaacttattttttatttgcacacccacacgtattccccagcccgagcagttcagtgatgaagtggaaccagcaacacctgaagaaggggaaccagcaactcaatgtcaggatcctgcagctgctcagaagggagaggatgagggagcatctgcaggtcaagggccgaagcctgaagctcatagccaggaacagggtcacccacagactgggtgtgagtgtgaagatggtcctgatgggcaggagatggacccgccaaatccagaggaggtgaaaacgcctgaagaaggtgaaaagcaatcacagtgttaaaagaagacacgttgaaatgatgcaggctgctcctatgttggaaatttgttcattaaaattctcccaataaagctttacagccttctgcaaag

SEQ ID NO: 12411 - protein, 71 aa, Homo sapiens; identical to SEQ ID NO: 12343

SEQ ID NO: 12412 - DNA, 633 bp, Homo sapiens
tctgcccggccccttcgcccacgtgaagaacgccagggagctgtgaggcagtgctgtgtggttcctgccgtccggactctttttcctctactgagattcatctgtgtgaaatatgagttggcgaggaagatcgacctatcggcctagaccaagacgctacgtagagcctcctgaaatgattgggcctatgcggcccgagcagttcagtgatgaagtggaaccagcaacacctgaagaaggggaaccagcaactcaacgtcaggatcctgcagctgctcaggagggacaggatgagggagcatctgcaggtcaagggccgaagcctgaagctcatagccaggaacagggtcacccacagactgggtgtgagtgtgaagatggtcctgatgggcaggagatggacccgccaaatccagaggaggtgaaaacgcctgaagaagagggtttctctggcttttaatgaacaattgttcttaaatctttccccacggaaaccttgagtgactgaaataaatatcaaatggcgagagaccgtttagttcgtatcatctgtggcatgtgaaaagcaatcacagtgttaaaagaagacacgttgaaatgatgcaggctgctcctatgttggaaatttgttca

SEQ ID NO: 12413 - protein, 115 aa, Homo sapiens
MSWRGRSTYRPRPRRYVEPPEMIGPMRPEQFSDEVEPATPEEGEPATQRQDPAAAQEGQDEGASAGQGPKPEAHSQEQGHPQTGCECEDGPDGQEMDPPNPEEVKTPEEEGFSGF

SEQ ID NO: 12414 - DNA, 555 bp, Homo sapiens
tctgcccggccccttcgcccacgtgaagaacgccagggagctgtgaggcagtgctgtgtggttcctgccgtccggactctttttcctctactgagattcatctgtgtgaaatatgagttggcgaggaagatcgacctatcggcctagaccaagacgctacgtagagcctcctgaaatgattgggcctatgcggcccgagcagttcagtgatgaagtggaaccagcaacacctgaagaaggggaaccagcaactcaacgtcaggatcctgcagctgctcaggagggacaggatgagggagcatctgcaggtcaagggccgaagcctgaagctcatagccaggaacagggtcacccacagactgggtgtgagtgtgaagatggtcctgatgggcaggagatggacccgccaaatccagaggaggtgaaaacgcctgaagaaggtgaaaagcaatcacagtgttaaaagaagacacgttgaaatgatgcaggctgctcctatgttggaaatttgttcattaaaattctcccaataaagctttacagccttctgcaaag

SEQ ID NO: 12415 - protein, 116 aa, Homo sapiens; identical to SEQ ID NO: 2134

SEQ ID NO: 12416 - DNA, 422 bp, Homo sapiens
gcccggccccttcgcccacgtgaagaacgccagggagctgtgaggcagtgctgtgtggttcctgccgtccggactctttttcctctactgagattcatctgtgtgaaatatgagttggcgaggaagatcgacctatcggcctagaccaagacgctacgtagagcctcctgaaatgattgggcctatgcggcccgagcagttcagtgatgaagtggaaccagcaacacctgaagaaggggaaccagcaactcaacgtcaggatcctgcagctgctcaggagggacaggatgagggagcatctgcaggtcaaggtgaaaagcaatcacagtgttaaaagaagacacgttgaaatgatgcaggctgctcctatgttggaaatttgttcattaaaattctcccaataaagctttacagccttctgc

SEQ ID NO: 12417 - protein, 74 aa, Homo sapiens; identical to SEQ ID NO: 2132

SEQ ID NO: 12418 - DNA, 634 bp, Homo sapiens
ctgccgtccggactctttttcctctactgagattcatctgtgtgaaatatgagttggcgaggaagatcgacctatcggcctagaccaagacgctacgtagagcctcctgaaatgattgggcctatgcggcccgagcagttcagtgatgaagtggaaccagcaacacctgaagaaggggaaccagcaactcaacgtcaggatcctgcagctgctcaggagggagaggatgagggagcatctgcaggtcaagggccgaagcctgaagctgatagccaggaacagggtcacccacagactgggtgtgagtgtgaagatggtcctgatgggcaggagatggacccgccaaatccagaggaggtgaaaacgcctgaagaagagatgaggtctcactatgttgcccagactgggattctctggcttttaatgaacaattgcttcttaaatctttccccacggaaaccttgagtgactgaaatatcaaatggcaagagaccgtttagttcctatcatctgtggcatgtgaagggcaatcacagtgttaaaagaagacatgctgaaatgttgcaggctgctcctatgttggaaaattcttcattgaagttctcccaataaagctttacagccttctgcaaag

SEQ ID NO: 12419 - protein, 138 aa, Homo sapiens
MSWRGRSTYRPRPRRYVEPPEMIGPMRPEQFSDEVEPATPEEGEPATQRQDPAAAQEGEDEGASAGQGPKPEADSQEQGHPQTGCECEDGPDGQEMDPPNPEEVKTPEEEMRSHYVAQTGILWLLMNNCFLNLSPRKP

SEQ ID NO: 12420 - DNA, 402 bp, Homo sapiens
aaacttattttttatttgcacacccacacgtattccccagcccgagcagttcagtgatgaagtggaaccagcaacacctgaagaaggggaaccagcaactcaacgtcaggatcctgcagctgctcaggagggacaggatgagggagcatctgcaggtcaagggccgaagcctgaagctcatagccaggaacagggtcacccacagactgggtgtgagtgtgaagatggtcctgatgggcaggagatggacccgccaaatccagaggaggtgaaaacgcctgaagaaggtgaaaagcaatcacagtgttaaaagaagacacgttgaaatgatgcaggctgctcctatgttggaaatttgttcattaaaattctcccaataaagctttacagccttctgcaaag

SEQ ID NO: 12421 - protein, 71 aa, Homo sapiens
MKWNQQHLKKGNQQLNVRILQLLRRDRMREHLQVKGRSLKLIARNRVTHRLGVSVKMVLMGRRWTRQIQRR

SEQ ID NO: 12422 - DNA, 418 bp, Homo sapiens
ggcgtcttctgcccggccccttcgcccacgtgaagaacgccagggagctgtgaggcagtgctgtgtggttcctgccgtccggactctttttcctctactgagattcatctgtgtgaaatatgagttggcgaggaagatcgacctattattggcctagaccaaggcgctatgtacagcctcctgaaatgattgggcctatgcggcccgagcagttcagtgatgaagtggaaccagcaacacctgaagaaggggaaccagcaactcaacgtcaggatcctgcagctgctcaggagggagaggatgagggagcatctgcaggtcaagggccgaagcctgaagctgatagccaggaacagggtcacccacagactgggtgtgagtgtgaagatggtcctgatgggcaggagatggacccgcc

SEQ ID NO: 12423 - protein, 98 aa, Homo sapiens
MSWRGRSTYYWPRPRRYVQPPEMIGPMRPEQFSDEVEPATPEEGEPATQRQDPAAAQEGEDEGASAGQGPKPEADSQEQGHPQTGCECEDGPDGQEMD

SEQ ID NO: 12424 - DNA, 813 bp, Homo sapiens
ggcgtcttctgcccggccccttcgcccacgtgaagaacgccagggagctgtgaggcagtgctgtgtggttcctgccgtccggactctttttcctctactgagattcatctgtgtgaaatatgagttggcgaggaagatcgacctattattggcctagaccaaggcgctatgtacagcctcctgaaatgattgggcctatgcggcccgagcagttcagtgatgaagtggaaccagcaacacctgaagaaggggaaccagcaactcaacgtcaggatcctgcagctgctcaggagggagaggatgagggagcatctgcaggtcaagggccgaagcctgaagctgatagccaggaacagggtcacccacagactgggtgtgagtgtgaagatggtcctgatgggcaggagatggacccgccaaatccagaggaggtgaaaacgcctgaagaaggtgaagggcaatcacagtgttaaaagaagacatgctgaaatgttgcaggctgctcctatgttggaaaattcttcattgaagttctcccaataaagctttacagccttctgcaaagaagtcttgtgaatcttttgtcaattttatttctagctatttgatgctgtgaaatgtttcattctttgaaattttgttttctatctccttgagctgtgtgtagaggcataattctcatgtattgattttctatccagcaaccttgttaaatatgcttatgaattttaaaagtttacttctaggttttttcaattttcaacctacagaatcataccatttttgaataagaacaattttgtttctgccttt

SEQ ID NO: 12425 - protein, 117 aa, Homo sapiens
MSWRGRSTYYWPRPRRYVQPPEMIGPMRPEQFSDEVEPATPEEGEPATQRQDPAAAQEGEDEGASAGQGPKPEADSQEQGHPQTGCECEDGPDGQEMDPPNPEEVKTPEEGEGQSQC

SEQ ID NO: 12426 - DNA, 553 bp, Homo sapiens
ggcgtcttctgcccggccccttcgcccacgtgaagaacgccagggagctgtgaggcagtgctgtgtggttcctgccgtccggactctttttcctctactgagattcatctgtgtgaaatatgagttggcgaggaagatcgacctattattggcctagaccaaggcgctatgtacagcctcctgaaatgattgggcctatgcggcccgagcagttcagtgatgaagtggaaccagcaacacctgaagaaggggaaccagcaactcaacgtcaggatcctgcagctgctcaggagggagaggatgagggagcatctgcaggtcaagggccgaagcctgaagctgatagccaggaacagggtcacccacagactgggtgtgagtgtgaagatggtcctgatgggcaggagatggacccgccaaatccagaggaggtgaaaacgcctgaagaaggtgaagggcaatcacagtgttaaaagaagacatgctgaaatgttgcaggctgctcctatgttgaaaactgaaatcatctattgtgattaccacagggtttttt

SEQ ID NO: 12427 - protein, 117 aa, Homo sapiens; identical to SEQ ID NO: 12425

SEQ ID NO: 12428 - DNA, 3137 bp, Homo sapiens
ggcgtcttctgcccggccccttcgcccacgtgaagaacgccagggagctgtgaggcagtgctgtgtggttcctgccgtccggactctttttcctctactgagattcatctgtgtgaaatatgagttggcgaggaagatcgacctattattggcctagaccaaggcgctatgtacagcctcctgaaatgattgggcctatgcggcccgagcagttcagtgatgaagtggaaccagcaacacctgaagaaggggaaccagcaactcaacgtcaggatcctgcagctgctcaggagggagaggatgagggagcatctgcaggtcaagggccgaagcctgaagctgatagccaggaacagggtcacccacagactgggtgtgagtgtgaagatggtcctgatgggcaggagatggacccgccaaatccagaggaggtgaaaacgcctgaagaagagatgaggtctcactatgttgcccagactgggattctctggcttttaatgaacaattgcttcttaaatctttccccacggaaaccttgagtgactgaaatatcaaatggcaagagaccgtttagttcctatcatctgtggcatgtgaagggcaatcacagtgttaaaagaagacatgctgaaatgttgcaggctgctcctatgttggaaaattcttcattgaagttctcccaataaagctttacagccttctgcaaagaagtcttgtgaatcttttgtcaattttatttctagctatttgatgctgtgaaatgtttcattctttgaaattttgttttctatctccttgagctgtgtgtagaggcataattctcatgtattgattttctatccagcaaccttgttaaatatgcttatgaattttaaaagtttacttctaggttttttcaattttcaacctacagaatcataccatttttgaataagaacaattttgtttctgccttttttgtttgttttttcttttgtatttttcgtagaggtgggattttggcctgtgtcctaggctttttttgaactcctgagcgcaagtaatccactctccttggcctttcaaagtgttgggattacaggcatgggccaccgtgctggtcctgtttttgccattttaaacccttttatttccttttctgattttatggcattgagcagatctaccggatacaattgtgatagtggaaatttttgtgttattcctgatgagaaatggaaaaatttcaacatttcacgacaatatttagtgtactttttttgtagatggactttttcagagtaagtcaagccattctgttttagtttgttgagagtgttcattttgaatatatgttgaatttcatcaaacactgacctgagtcatcttaaaacatgtgaattgagatttctttgctactaagaaagtgagcgggcactctgcttcatgtttacttttgtcatgttgcatgaaaaacattttgcttcatgtttgattctgtatgttgaaaactgaaatcatctattgtgattaccacagggttttttcccccagtaatctgtttatgtagtcaattacgttgataaatctgtactttttaaattttaacaattgagacaggtctcactctgtcacccatgctgactgcagtagtgtgatcacagcttactgcaacctcaacctcctgggctcaggcgatcctcccacctcaccctcctcagtagctaggactataggtacatgccaccatgccaagctaatttttctgttttagagatggtattttttcatgttgcccaggctggttttatactcctaatctcaagccatccactagcctcagcctcccaaagtgctgggattacaggaatgagtcacggtgcctggaaattttgtacatttaaaccaacaatttggtcatgggtaatctatgtcctaataatttatttaaggatttttatgtatatcctcatgagtgacattacctgtacttttatttcatatgctcatttgttggacgttgttatcaaggttcctctagcttcataaaacgggttggtatgtaaaacctctttttccattcactggaactcaagtctcctcaaggctgtgagtaatgcagggctaggctttcccataatgagcttttctagaatgcttctctcagatttggaccctacttaaacagcagtgaccaaacgggcagctccaggtacctatcccctcaaactttgtgagggtcgcgttctctgaagatgcctcttcaatttgaaagctatctgttcctgtttctctgctgatattaactctctgtgcacagaaagttaaacgtcactggttattaatttccctagattttgatctgtgctgtgtggctgagaatgggctgactgaccctagatctgtgtataattatgacaatggctctatttatttttaaaataagaggaattattataaaattcctatttactggatgtgtactatctatgaattacttctttgtgctaggttgtgtacatgtatgacctctttagatcctcacaagataaggcagaattttcatgaaattgatgactgactccagtaagaagcagatttggggggatttcaatttctaagctcaaagcccttgcacttttctcaaagtaaagcttttgaaagtgttaaatgtacacgaactgatggtgtatatgatgattttagttgtaatctgatgttttctttaaaaatttacatatacaaaagtgtttgactcaaaaggctttgttcttcccttaaaggaagcatctaccaaaatgtggcacacaaaccttgcatggtgtctctagggcctcctaccccgcatttcccctgctttttctcttgttctgactgaaaaacaaagtgctttgactgtgctgtgacccagccagctgcatgtttacccagcatgcttgaacccaagctggagccttgaacataaaggtgtttaagttgttgctcaaaatatggaaagaatctagctctggccttgaaccaaatcccttaaactctcctataaaactccataacctgaccccctcagtgcggatatacctaggcatgacattcttgttgcctgttgcgaggatgctttagcctactctaagttctcccaataaatgctttggactgat

SEQ ID NO: 12429 - protein, 139 aa, Homo sapiens; identical to SEQ ID NO: 2136

SEQ ID NO: 12430 - DNA, 662 bp, Homo sapiens
gcccacgtggagaacgccagggagctgtgagagtgtgcagtcgcgttcctgctgtccggacacttttttcctctactgagactcatctggtagatccgcaggccagtcctcccaggggctgaagttgtgaaatatgggttttctaagaagattaatctatcggcgtagaccaatgatctatgtagaatcttctgaggagtccagtgatgagcaacctgacgaagtggaatcaccaactcaaagtcaggattctacacctgctgaagagagagaggatgagggagcatctgcagctcaagggcaggagcctgaagctgatagccaggaactggttcagccaaagactgggtgtgagcttggagatggtcctgataccaagagggtgtgcctgcgaaatgaagagcagatgaaactgcccgcagaagggccagagcctgaagcggatagccaggaacaggttcacccgaagactgggtgtgagcgcggagatggtcctgatgtccaggagttgggcctgccaaatccagaggaggtgaaaacacctgaggaagatgaagggcaatcacagccttaaaagaagacacgctgaaatggttcaggctgctcctgtgttggaaatttgaccattaaaattctcccaataaagctttacagccttctgc

SEQ ID NO: 12431 - protein, 146 aa, Homo sapiens; identical to SEQ ID NO: 2138

SEQ ID NO: 12432 - DNA, 486 bp, Homo sapiens
tgacactgctgaggtctaaacaaggaggcagaagtagtcttcagttcacgatcttctagttgcagcgatgagtgcacgagtgagatcaagatccagaggaagaggagatggtcaggaggctcccgatgtggttgcattcgtggctcccggtgaatctcagcaagaggaaccaccaactgacaatcaggatattgaacctggacaagagagagaaggaacacctccgatcgaagaacgtaaagtagaaggtgattgccaggaaatggatctggaaaagactcggagtgagcgtggagatggctctgatgtaaaagagaagactccacctaatcctaagcatgctaagactaaagaagcaggagatgggcagccataagttaaaaagaagacaagctgaagctacacacatggctgatgtcacattgaaaatgtgactgaaaatttgaaaattctctcaataaagtttgagttttctctgaagaagtc

SEQ ID NO: 12433 - protein, 102 aa, Homo sapiens; identical to SEQ ID NO: 2140

SEQ ID NO: 12434 - DNA, 497 bp, Homo sapiens
gccacttctcttcccttcattcttcgccaggctctctgctgactcaagttcttcagttcacgatcttctagttgcagcgatgagtgcacgagtgagatcaagatccagaggaagaggagatggtcaggaggctcccgatgtggttgcattcgtggctcccggtgaatctcagcaagaggaaccaccaactgacaatcaggatattgaacctggacaagagagagaaggaacacctccgatcgaagaacgtaaagtagaaggtgattgccaggaaatggatctggaaaagactcggagtgagcgtggagatggctctgatgtaaaagagaagactccacctaatcctaagcatgctaagactaaagaagcaggagatgggcagccataagttaaaaagaagacaagctgaagctacacacatggctgatgtcacattgaaaatgtgactgaaaatttgaaaattctctcaataaagtttgagttttctctgaagaagt

SEQ ID NO: 12435 - protein, 102 aa, Homo sapiens; identical to SEQ ID NO: 2140

SEQ ID NO: 12436 - DNA, 1754 bp, Homo sapiens
gccacttctcttcccttcattcttcgccaggctctctgctgactcaagttcttcagttcacgatcttctagttgcagcgatgagtgcacgagtgagatcaagatccagaggaagaggagatggtcaggaggctcccgatgtggttgcattcgtggctcccggtgaatctcagcaagaggaaccaccaactgacaatcaggatattgaacctggacaagagagagaaggaacacctccgatcgaagaacgtaaagtagaaggtgattgccaggaaatggatctggaaaagactcggagtgagcgtggagatggctctgatgtaaaagagaagactccacctaatcctaagcatgctaagactaaagaagcaggagatgggcagccataagttaaaaagaagacaagctgaagctacacacatggctgatgtcacattgaaaatgtgactgaaaatttgaaaattctctcaataaagtttgagttttctctgaagaagtcatgcgtgtcttttgtaaaatttattcctaggaaattgacactattgtaaatggtatctttaaaaaatccttgtgttctgtttagagctggtatatatttttgtatactgattttgtgttgggcaacattgctaaacttgcctattctgttggtttatccctacgtccttttggattttctccatacacaatcataccacatgtaaataatgataattctgttttttccttttgaggctttgtactttcatttctggtccttatgacactggccagacccctccagtacaatgttgattagaagtgatgatgatgtgaattcttgtcatattcctgatgtcaagagggaaactttcaacatttcactatgataggttttaaaaatatatgtagattccttctataggttgagtatacctaatatgaagtcctccaaaatctgaaactgtttgagtgcctccgtgatgctcaaaggaagtgctcatttcagatttcagattttcagattatggatgtttaaccagtaagtatgatgcaagtattccaaaatctgaaacagcatttcagggatggtatactcaacctgtattagattaaggacttttcaaaaaattcttagttttctaagagtacttaccatgctcaccatgaatatatgttgaattttatcaaacacttggtctgcatctattgaggtgtatgatatttctccattaagctgttaatatagcattcctagaataagcccaatttaatttgtgatatattgtccttttatgtattactggttcgttttcctaatgttttgtttaggatttttgcacttttgttcacgagcttgacctataaatttttaatactcactccattcaggccttggtatcaagggtattctggcttcataatatgagttagaatgtatattcttcttttatttttccatatagttcagctaacattggaattctttcttaaatgtttgatagaatttgccagtgaggatatctggacctggagttctctctgtagggaagtttaaaattgaatcaatatctttagtcacattaggactatttcagttttctatttcttcactttgggttttatttttctaggattttgtccatattatctaaatttttgttatacaaaatagtccataatatcctctctttatcctcttaatgcctgttttcattcatagaactgatcatttgtgtcttctctcttgtattcttgatcaatgtcagggtcttt

SEQ ID NO: 12437 - protein, 102 aa, Homo sapiens; identical to SEQ ID NO: 2140

SEQ ID NO: 12438 - DNA, 1494 bp, Homo sapiens
aagtgtaagtgagaacaggtgtgagtgagtgggccggcgggcttctggtgggtcgggcactgtggtccctggcctcagagaaggaagggcctcgaggtcatcatccttctcctagcaggcagctatgcggcggggcagggacaggggaggaaggagggccatgaaggggaggagggtcagccaagatgctgtgagttttggagcgggacactatctgagtcctggaggcatatgaaactgtccataaaggacggatgctggggtcctcagtgggggccagggaaagggtgggacagcccgcgcttgacagcgcctgcctcagtgctcgtgttcactgggggtcttcccatcagccccttcacccacgaggtgaactgccgcggagctgtgagggtgccgtttgcattccaattgtcgggactctttcacctgagactgagactcagtgggtgggtccaccgatcgttcctccatgggagtttaagtgtgaagaggagctggtgggcttcaggagggtcgggcagcacagtccgtggcctcggaggaggaagggcctcacaggtggtggcgccgccatgaccttgtggttgtggcagggctggggcgagggaggaagttgggccacggaggggagagggatcagatggagcaaaacttggggggtactttttgaggtatctttgagtcccagaggcacctgaaactgccgaaagaggacaggtttcggagttctcagtggggacctggggaggaggggacctggggtggctgtatattaaaaaatctcttcataatggagtttagttatgaaattaagtctctttaggaaagaccccatgttttgatctaggacttgaagatcacttctctgccgagctggctgtggaagaaacaaagcagtttgcagatagatttatttgatgtgattggaaaccaggcgtagttattattaactcaggacctattatggaaatctcacaaaattaaaaaaaattacaatcagcagatggccatggaaagagtcaagtataattactcctttttattgcagtcttcagttcacgatcttctagttgcagcgatgagtgcacgagtgagatcaagatccagaggaagaggagatggtcaggaggctcccgatgtggttgcattcgtggctcccggtgaatctcagcaagaggaaccaccaactgacaatcaggatattgaacctggacaagagagagaaggaacacctccgatcgaaggtgagaagggcatggaggagcattttgtgtttcatgtatgattttatactagtaacaggaataaataaaccatcccctaaaaattggctggaaacctgtaaagtaatccttggtaagggaatagtgtagttttcagctgctgtagtccttgtgataaattttctcttcagcattttacttatcttatatcttaagagttctttggcatacttggaaaatacaatccttgccaagactctatattagc

SEQ ID NO: 12439 - protein, 93 aa, Homo sapiens
MAMERVKYNYSFLLQSSVHDLLVAAMSARVRSRSRGRGDGQEAPDVVAFVAPGESQQEEPPTDNQDIEPGQEREGTPPIEGEKGMEEHFVFHV

SEQ ID NO: 12440 - DNA, 458 bp, Homo sapiens
ctgcatatgtatgtttttaagagtctggaaatagtcttatgactttcctatcatgcttattaataaataatacagcccagagaagatgaaaatgggttccagaattattggtccttgcagcccggtgaatctcagcaagaggaaccaccaactgacaatcaggatattgaacctggacaagagagagaaggaacacctccgatcgaagaacgtaaagtagaaggtgattgccaggaaatggatctggaaaagactcggagtgagcgtggagatggctctgatgtaaaagagaagactccacctaatcctaagcatgctaagactaaagaagcaggagatgggcagccataagttaaaaagaagacaagctgaagctacacacatggctgatgtcacattgaaaatgtgactgaaaatttgaaaattctctcaataaagtttgagttttctctgaagaa

SEQ ID NO: 12441 - protein, 44 aa, Homo sapiens
MKMGSRIIGPCSPVNLSKRNHQLTIRILNLDKREKEHLRSKNVK

SEQ ID NO: 12442 - DNA, 2516 bp, Homo sapiens
aaacttgcttgttcacgagaatcacgtggggagcgtgttaaaattacagattccttggctccacccgcaggcctactgaatcagaatctcgaagggaggtactccggaacctgtatctctaactagggccccagaggctgcttatgatcaggtcctgcgcttcccgaaaaggatgaagctccagctgcagttctggggaggcctggaccccagctccgggggggccgggctaccaaggccgctgggcctggagaggcgcgtccctggcccatcttatcagcgctctgcagggtctgggcctgctgctcgcgtcctcctgggctcccaaggccacgggtgggttaatggcttgacagccggcctcctggcccagcagacgctgagcagcccgatggcacaatccacctcttctctccaaggccagctggagggacgaggcacgacaaggccatccctacagctggcacttcccctacagctgagagggggcctaaactacaggacacactcccaagacccttaagccctggcagcatcccgggggaggggggcagcaggtggaagtggaaagaagcctgtggagctgccagcagggagagggagtcggacatgaggctgagaggcctctgggaacccctgtgccaaggggctgctggcactgggcagcagcaccccagagcccacgaggagtgtgcccagagcaagtggctcagacctgggtcatggctcgagggtgtcgggctgtagctgctggtcccagagagtgcagcccagggcaggcatcaggacaggagtaggaggagaaagagtgttctaggaagagtctagtcccctaatcctggtggtggctggctgtagcctagtgcacgctgtctggcttgtgtggctgtgctgcctgagtatacataccctagcaacattctccttgctcagcactggacatcagctctccacctggccccttcctctagggaggggatggggaggcctcctagggttagcagcaggagttgggcctcaggaatcaggagcccttgaaaggaggatgcgtggttcccataaaactgagggttgccctgggccctacccttcctgagtcagctcttgcttcaattccttgaagcaccccagcatcctttcaataaatgcctgccctttgtggcctgcaaccagaggaactgcaactagcacactcactgaaggaatcctgctgctgctgctgctgctaaaaacaaccgaggtcatggatgagggggtggaggatactctcatcccacctccagactgacaacaaaaagacctaaagatctctgtgtacctgggactgtctaccattgaagattagccatggtaacttgttgacttagtgatcaacttcctgcagaagcccataggtccacctggactctgcccaggccagcgtgttctgaaaatggagggctctgtcaccattcactcaacaaatgtttattctgcactgaccgagggccagatgtaccaagagctgtggacacagcactccaacttactccagggctactgaaatcagggatggcttccccaaaaggcacactaaggaaagtctatgtcactagcagagaagaggcaccaaagacaaaaaatcaaaaaagaaaaaataccagaaacagtttgacatttgattttttttaagtagtcctcgtgggaaaaatcagaactttgttgtacttccttacattcatttcctgattacatgatgcttttgttttgaatcacgtgtggagggtgtcaccaaaatctttagatgctttgtccttatgtggatctggacccagatcctagcaaatgttaccatctctgcctcacaaagatctgacagaatgcaggcagttggggctatccttaggagagacagctctccttcgcagtagatgcacctgggtgataaatccaactctgaccacaaggtggcaaaagagtaaatgacaattcctcatatatgttttgtatgtttatataaaactattggtttatataaaatgctctctaaaaatattaagaaaaacgtgtgctccttcacacatttttgggttgatgtctgatattttgcatcacaaatgtcaattggctacaaataatgtaatttgtgacaaatgttaatattcaaaaataaaactgttatgtcactatttcacatgaatccggtgaaacctaaataccttagtgacttgagagccaccatcatctgttttaaaaatgtataactgagctcttctttgatacttggaagttgtacattttcccttttctcagctcttaattccattctgtttttccaacagaattttgtctcaataattgtctgttttttcacttgaaatgtttttgattatcctatcgtatttctctgcagcaaaaatgtgtatatatttttcaatttaaatgctctttaaatgttcctctgattataaggctctaagtgttgtttaaaaatttgctcttgtttgaattatcatgacaattagtattagaataaa

SEQ ID NO: 12443 - protein, 116 aa, Homo sapiens
MKLQLQFWGGLDPSSGGAGLPRPLGLERRVPGPSYQRSAGSGPAARVLLGSQGHGWVNGLTAGLLAQQTLSSPMAQSTSSLQGQLEGRGTTRPSLQLALPLQLRGGLNYRTHSQDP

SEQ ID NO: 12444 - DNA, 1194 bp, Homo sapiens
agacctggggtgtcccccgcccggcctgagggagcgcggtggctgtggcagctggacccaaaagggactttcactgaaggaggcggcggcggaagcaggcgacgcccccgggaatcctcccgccgaagccccctagtggaggctgcttctgcagccaggccccgtttcctttaattcagtattttccaaacttgcttgttcacgagaatcacgtggggagcgtgttaaaattacagattccttggctccacccgcaggcctactgaatcagaatctcgaagggaggtactccggaacctgtatctctaactagggccccagaggctgcttatgatcaggcaagtttgggaaacacagctctaattcattgaggctggcgggaaggggggcggggaccgcgcagtctctttaaggcgcttccagctctcggctccaatcgctgctctgacccccttcatcgtctcctcccctctcctcgtccttcccctcgtctatgcaggcttccctcggccactgcggggctgggggccgagcgggtgccaagtccagaaatgtttctgaggctgtgaaatgtcccctctgaggggggtcctagggagcgcaggcagaagccgtgacaggccatcatttcggcggccgagcctgcctctagcctcgtccctgtctcccttcccacgccaggtcctgcgcttcccgaaaaggatgaagctccagctgcagttctggggaggcctggaccccagctccgggggggccgggctaccaaggccgctgggcctggagaggcgcgtccctggcccatcttatcagcgctctgcagggtctgggcctgctgctcgcgtcctcctgggctcccaaggccacgggtgggttaatggcttgacagccggcctcctggcccagcagacgctgagcagcccgatggcacaatccacctcttctctccaaggccagctggagggacgaggcacgacaaggccatccctacagctggcacttcccctacagctgagagggggcctaaactacaggacacactcccaagacccttaagccctggcagcatcccgggggaggggggcagcaggtggaagtggaaagaagcctgtggagctgccagcagggagagggagtcggacatgaggctgagaggcctctgggaacccctgtgccaaggggctgctggcactgggc

SEQ ID NO: 12445 - protein, 160 aa, Homo sapiens [sequence omitted]

SEQ ID NO: 12446 - DNA, 1934 bp, Homo sapiens
atgaagggggtcagagcagcgattggagccgagagctggaagcgccttaaagagactgcgcgctttaaggtgggagagaactggaggcaggaactgcgggttatctaccagtgcttcgtgtggtgtggaaccccagagaccaggaaaagcaaggcaaagtcctgcatctgccatgtgtgtggcacccatctgaacagactccactcttgcctttcctgtgtcttctttggctgcttcacggagaaacacattcacgagcacgcagagacgaaacaacacaacttagcagtagacctgtattacggaggtatatactgctttatgtgtaaggactatgtatatgacaaagacattgagcaaattgccaaagaagagcaaggagaagctttgaaattacaagcctccacctcaacagaggtttctcaccagcagtgttcagtgccaggccttggtgagaaattcccaacctgggaaacaaccaaaccagaattagaactgctggggcacaacccgaggagaagaagaatcacctccagctttacgatcggtttaagaggactcatcaatcttggcaacacgtgctttatgaactgcattgtccaggccctcacccacacgccgatactgagagatttctttctctctgacaggcaccgatgtgagatgccgagtcccgagttgtgtctggtctgtgagatgtcgtcgctgtttcgggagttgtattctggaaacccgtctcctcatgtgccctataagttactgcacctggtgtggatacatgcccgccatttagcagggtacaggcaacaggatgcccacgagttcctcattgcagcgttagatgtcctgcacaggcactgcaaaggtgatgatgtcgggaaggcggccaacaatcccaaccactgtaactgcatcatagaccaaatcttcacaggtggcctgcagtctgatgtcacctgtcaagcctgccatggcgtctccaccacgatagacccatgctgggacattagtttggacttgcctggctcttgcacctccttctggcccatgagcccagggagggagagcagtgtgaacggggaaagccacataccaggaatcaccaccctcacggactgcttgcggaggtttacgaggccagagcacttaggaagcagtgccaaaatcaaatgtggtagttgccaaagctaccaggaatctaccaaacagctcacaatgaataaattacctgtcgttgcctgttttcatttcaaacggtttgaacattcagcgaaacagaggcgcaagatcactacatacatttcctttcctctggagctggatatgacgccgtttatggcctcaagtaaagagagcagaatgaatggacaattgcagctgccaaccaatagtggaaacaacgaaaataagtattccttgtttgctgtggttaatcaccaaggaaccttggagagtggccactataccagcttcatccggcaccacaaggaccagtggttcaagtgtgatgatgccgtcatcactaaggccagtattaaggacgtactggacagtgaagggtatttactgttctatcacaaacaggtgctagaacatgagtcagaaaaagtgaaagaaatgaacacacaagcctactgaagtgacacacagacctacctgcaatggaagatgacgacaccaatactacaactggcatcgagatctaaaggacctacttgaccatggcccatgggcctgacagagtaagaattgaacagtacccagtgtccaaaaggtcctgattggaagagaaatagaaggggagggagaagaggctctagtctaagcagttgatgaaagggaaattaaatggtagaaacactctgggtgaggaaggcaggagcaggaaaatgctgacactggtacatatcctatattcctccaaaagattgtgt

SEQ ID NO: 12447 - protein, 545 aa, Homo sapiens
MKGVRAAIGAESWKRLKETARFKVGENWRQELRVIYQCFVWCGTPETRKSKAKSCICHVCGTHLNRLHSCLSCVFFGCFTEKHIHEHAETKQHNLAVDLYYGGIYCFMCKDYVYDKDIEQIAKEEQGEALKLQASTSTEVSHQQCSVPGLGEKFPTWETTKPELELLGHNPRRRRITSSFTIGLRGLINLGNTCFMNCIVQALTHTPILRDFFLSDRHRCEMPSPELCLVCEMSSLFRELYSGNPSPHVPYKLLHLVWIHARHLAGYRQQDAHEFLIAALDVLHRHCKGDDVGKAANNPNHCNCIIDQIFTGGLQSDVTCQACHGVSTTIDPCWDISLDLPGSCTSFWPMSPGRESSVNGESHIPGITTLTDCLRRFTRPEHLGSSAKIKCGSCQSYQESTKQLTMNKLPVVACFHFKRFEHSAKQRRKITTYISFPLELDMTPFMASSKESRMNGQLQLPTNSGNNENKYSLFAVVNHQGTLESGHYTSFIRHHKDQWFKCDDAVITKASIKDVLDSEGYLLFYHKQVLEHESEKVKEMNTQAY

SEQ ID NO: 12448 - DNA, 1136 bp, Homo sapiens
aattacctgtcgttgcctgttttcatttcaaacggtttgaacattcagcgaaacagaggcgcaagatcactacatacatttcctttcctctggagctggatatgacgccgtttatggcctcaagtaaagagagcagaatgaatggacaattgcagctgccaaccaatagtggaaacaacgaaaataagtattccttgtttgctgtggttaatcaccaaggaaccttggagagtggccactataccagcttcatccggcaccacaaggaccagtggttcaagtgtgatgatgccgtcatcactaaggccagtattaaggacgtactggacagtgaagggtatttactgttctatcacaaacaggtgctagaacatgagtcagaaaaagtgaaagaaatgaacacacaagcctactgaagtgacacacagacctacctgcaatggaagatgacgacaccaatactacaactggcatcgagatctaaaggacctacttgaccatggcccatgggcctgacagagtaagaattgaacagtacccagtgtccaaaaggtcctgattggaagagaaatagaaggggagggagaagaggctctagtctaagcagttgatgaaagggaaaaaaagtttctaaaaaatgtagcccattacatatatgggtatgaaagcagaaaagtggaggaggcagggatatcattgacaaacacctttgccagtttctttgtattcgtgattttttgtgctattaaatgcagtattaaaacaagaaaagcccacctgggctagtgaaaggagaggaaataagggggcttgtaaaaggggagccgtcgctccaaaagtagagaagacaagaaatgctgtaagataagcaaccaacgcagacaggcctcagctaagagtatagtgtgtgtgtgttaaaaaaaaaaaaaaaaaaaagaaaaaaaaaagctgtatgatatacttgagcaaatcaatgaacctctttgcgattgttttatcatctgtaaaatgcagataattcctaccttaaagggttattgttaaagataaaatgatataaaaatgtgtcaaagtataaagtaaaaggcttggaactttgtagggactcagtaaacgtttgttggatccaaacctga

SEQ ID NO: 12449 - protein, 104 aa, Homo sapiens
MTPFMASSKESRMNGQLQLPTNSGNNENKYSLFAVVNHQGTLESGHYTSFIRHHKDQWFKCDDAVITKASIKDVLDSEGYLLFYHKQVLEHESEKVKEMNTQAY

SEQ ID NO: 12450 - DNA, 1201 bp, Homo sapiens
atgacctattcccccaatgaaaataaaaaaatttctgggtatgctcaaaactttaaaaatggcagttgtgttctagacctctccaagtgtcttttcattcagggaaaactgttgtttgccgagcccaaggatgcgggctttccatttagccaggatatcaatagccatttggccagcctctcaatggctagaaacacgagccccactccagaccccactgttagagaggctttgtgtgccccggataacttaaatgcgagtattgaaagtcagggccagattaagatgtacatcaatgaagtgtgtcgggagactgtgtcacgttgctgcaactcatttctgcagcaggccggattaaatttgttaataagcatgacagttattaataacatgcttgccaagtccgcttcagacttgaagtttcctttgatatcagagggaagtggatgtgctaaggttcaggttttgaaaccgctgatgggtttgtctgaaaagccagtcttggcgggggagttagtcggtgcccagatgctcttctcattcatgtccctctttatcagaaatggaaacagagagattctcctggaaacccctgccccataaacggccctctcgaacacaatgggacggaatccacccacaacgcgcttggtttgcagatgtcaaagaatctgcagagggtgctactgaagatccagccttagccaatcaccacctcattgggtgaaagttccagggctcaatccaggaccacactcttattggccaggcaggggctcccacagagctttgagtaacttcttggttgtgcagtctgcaggcaatgttggcattgtaaattcctcccttgcagcctccttcatgtggtgaggggatcacttcagctgcctgctgtggacaaagaacatcaaattacagcatcacgagtgctattgttgcctgtggtggtctccctgtccaagcgggaccgctttgcagagaccagaggcatatcgcggcttgagctgaaaatgcatttgttgcagcttaggttgaattatttttcgtttgctctttcttctacacgcgcctgatggatagtgaacctattcatcaaaaaagtgcactgctcttctgtctattgtaccgacttaacctcttccacccaagtccgcatctgtgtgtatcatcaataaagttgtgtgctttgattggcagaaaa

SEQ ID NO: 12451 - protein, 200 aa, Homo sapiens [sequence omitted]

SEQ ID NO: 12452 - DNA, 2548 bp, Homo sapiens
gctagtcgcctccgtctgggtaccagccccctattactctgcaggcgtgtgaagaaagaaggaaactagctcggaccgtgcaggtttgtaggtctgttggcctgtaggtttcggcacaagtttcagcgagagaaggagaaaactgccttggttggaaccttgcaggtcagtgtgaaggtgggattagcccaggaccatgggtgggggtggcggaggaggggggctgggatatgagagggccaggtccgagtcgccctctcctggccccttctttctccacacccactcccatttcagtgcagggaaaggggtgtggcggcctttgctggggaaatggcggacgacaagtggggcggaggaggcctgcgtccggaaagtcagtagagtatgagaaatattttaaactcaagtgtctaaaattcacaaaaacagaaattgggacctgtgtcctcagttcatccactacactttcatttctccattgccgcctacctgtctttgcatttgtccttctgccagactctatcctctatcaccgtggagggaccactgacaacagaagacaagggaaaacgaaggaatttatctgactttggtagaggttaatgagagaaactgcccttaatctttgggggtggaggtctggtgtaggagactacctgagaggtactcacactgtcaccctcctagctatcatagcagagacccatctcctgcccttccctgtggacccaggaagagaaatgggggctcctgaggtcgatagaggaagacagaaaagaaaagaacaaagaaattgtatcctgttaatctgcctttatcaccaactcgaaatccaccctgtctgtgaggcacaaagccaaacatagtcccgagccctaatactctgtttcacccacagattcatcacaagagagctacaagagcctggaagaagctgaagactgctaccctccatccttactcaccctggacctgagagacctcttcaatcaggtggagcaaggccctctcctgtcctgccccaaggctggcacagacttgagcatgggccgggctcgggaagtgggttggatggcggcaggactgatgattggggctggtgcctgctactgcgtttacaaactgaccataggaagagatgacagtgagaagctggaggaggagggggaagaggagtgggacgatgaccaggagctggatgaggaggagcctgatatttggtttgattttgaaactatggctcggccctggactgaggatggggattggactgaacctggggccccaggtggcactgaggacaggccctcagggggaggcaaggccaaccgagcacacccaataaaacagcggccattcccctatgaacataaaaatacttggagtgctcaaaattgtaaaaatggcagttgtgttctggacctctccaagtgtcttttcattcagggaaaactgttgtttgccgagcccaaggatgcgggctttccatttagccaggatatcaatagccatttggccagcctctcaatggctagaaacacgagccccactccagaccccactgttagagaggctttgtgtgccccggataacttaaatgcgagtattgaaagtcagggccagattaagatgtacatcaatgaagtgtgtcgggagactgtgtcacgttgctgcaactcatttctgcagcaggccggattaaatttgttaataagcatgacagttattaataacatgcttgccaagtccgcttcagacttgaagtttcctttgatatcagagggaagtggatgtgctaaggttcaggttttgaaaccgctgatgggtttgtctgaaaagccagtcttggcgggggagttagtcggtgcccagatgctcttctcattcatgtccctctttatcagaaatggaaacagagagattctcctggaaacccctgccccataaacggccctctcgaacacaatgggacggaatccacccacaacgcgcttggtttgcagatgtcaaagaatctgcagagggtgctactgaagatccagccttagccaatcaccacctcattgggtgaaagttccagggctcaatccaggaccacactcttattggccaggcaggggctcccacagagctttgagtaacttcttggttgtgcagtctgcaggcaatgttggcattgtaaattcctcccttgcagcctccttcatgtggtgaggggatcacttcagctgcctgctgtggacaaagaacatcaaattacagcatcacgagtgctattgttgcctgtggtggtctccctgtccaagcgggaccgctttgcagagaccagaggcatatcgcggcttgagctgaaaatgcatttgttgcagcttaggttgaattatttttcgtttgctctttcttctacacgcgcctgatggatagtgaacctattcatcaaaaaagtgcactgctcttctgtctattgtaccgacttaacctcttccacccaagtccgcatctgtgtgtatcatcaataaagttgtgtgctttgattggcagaaaa

SEQ ID NO: 12453 - protein, 300 aa, Homo sapiens; identical to SEQ ID NO: 2148

SEQ ID NO: 12454 - DNA, 1632 bp, Homo sapiens
cctagagcacaagtcctgctagtcgcctccgtctgggtaccagccccctattactctgcaggcgtgtgaagaaagaaggaaactagctcggaccgtgcaggtttgtaggtctgttggcctgtaggtttcggcacaagtttcagcgagagaaggagaaaactgccttggttggaaccttgcagattcatcacaagagagctacaagagcctggaagaagctgaagactgctaccctccatccttactcaccctggacctgagagacctcttcaatcaggtggagcaaggccctctcctgtcctgccccaaggctggcacagacttgagcatgggccgggctcgggaagtgggttggatggcggcaggactgatgattggggctggtgcctgctactgcgtttacaaactgaccataggaagagatgacagtaaaacagcggccattcccctatgaacataaaaatacttggagtgctcaaaattgtaaaaatggcagttgtgttctggacctctccaagtgtcttttcattcagggaaaactgttgtttgccgagcccaaggatgcgggctttccatttagccaggatatcaatagccatttggccagcctctcaatggctagaaacacgagccccactccagaccccactgttagagaggctttgtgtgccccggataacttaaatgcgagtattgaaagtcagggccagattaagatgtacatcaatgaagtgtgtcgggagactgtgtcacgttgctgcaactcatttctgcagcaggccggattaaatttgttaataagcatgacagttattaataacatgcttgccaagtccgcttcagacttgaagtttcctttgatatcagagggaagtggatgtgctaaggttcaggttttgaaaccgctgatgggtttgtctgaaaagccagtcttggcgggggagttagtcggtgcccagatgctcttctcattcatgtccctctttatcagaaatggaaacagagagattctcctggaaacccctgccccataaacggccctctcgaacacaatgggacggaatccacccacaacgcgcttggtttgcagatgtcaaagaatctgcagagggtgctactgaagatccagccttagccaatcaccacctcattgggtgaaagttccagggctcaatccaggaccacactcttattggccaggcaggggctcccacagagctttgagtaacttcttggttgtgcagtctgcaggcaatgttggcattgtaaattcctcccttgcagcctccttcatgtggtgaggggatcacttcagctgcctgctgtggacaaagaacatcaaattacagcatcacgagtgctattgttgcctgtggtggtctccctgtccaagcgggaccgctttgcagagaccagaggcatatcgcggcttgagctgaaaatgcatttgttgcagcttaggttgaattatttttcgtttgctctttcttctacacgcgcctgatggatagtgaacctattcatcaaaaaagtgcactgctcttctgtctattgtaccgacttaacctcttccacccaagtccgcatctgtgtgtatcatcaataaagttgtgtgctttgattggcagaaaa

SEQ ID NO: 12455 - protein, 203 aa, Homo sapiens
MTVKQRPFPYEHKNTWSAQNCKNGSCVLDLSKCLFIQGKLLFAEPKDAGFPFSQDINSHLASLSMARNTSPTPDPTVREALCAPDNLNASIESQGQIKMYINEVCRETVSRCCNSFLQQAGLNLLISMTVINNMLAKSASDLKFPLISEGSGCAKVQVLKPLMGLSEKPVLAGELVGAQMLFSFMSLFIRNGNREILLETPAP

SEQ ID NO: 12456 - DNA, 1006 bp, Homo sapiens
cctagagcacaagtcctgctagtcgcctccgtctgggtaccagccccctattactctgcaggcgtgtgaagaaagaaggaaactagctcggaccgtgcaggtttgtaggtctgttggcctgtaggtttcggcacaagtttcagcgagagaaggagaaaactgccttggttggaaccttgcagtgcagggaaaggggtgtggcggcctttgctggggaaatggcggacgacaagtggggcggaggaggcctgcgtccggaaagtcagtagaattcatcacaagagagctacaagagcctggaagaagctgaagactgctaccctccatccttactcaccctggacctgagagacctcttcaatcagaaatggaaacagagagattctcctggaaacccctgccccataaacggccctctcgaacacaatgggacggaatccacccacaacgcgcttggtttgcagatgtcaaagaatctgcagagggtgctactgaagatccagccttagccaatcaccacctcattgggtgaaagttccagggctcaatccaggaccacactcttattggccaggcaggggctcccacagagctttgagtaacttcttggttgtgcagtctgcaggcaatgttggcattgtaaattcctcccttgcagcctccttcatgtggtgaggggatcacttcagctgcctgctgtggacaaagaacatcaaattacagcatcacgagtgctattgttgcctgtggtggtctccctgtccaagcgggaccgctttgcagagaccagaggcatatcgcggcttgagctgaaaatgcatttgttgcagcttaggttgaattatttttcgtttgctctttcttctacacgcgcctgatggatagtgaacctattcatcaaaaaagtgcactgctcttctgtctattgtaccgacttaacctcttccacccaagtccgcatctgtgtgtatcatcaataaagttgtgtgctttgattggcagaaaa

SEQ ID NO: 12457 - protein, 54 aa, Homo sapiens
METERFSWKPLPHKRPSRTQWDGIHPQRAWFADVKESAEGATEDPALANHHLIG

SEQ ID NO: 12458 - DNA, 1931 bp, Homo sapiens
gtgaccaagagccgcctagagcacaagtcctgctagtcgcctccgtctgggtaccagccccctattactctgcaggcgtgtgaagaaagaaggaaactagctcggaccgtgcaggtttgtaggtctgttggcctgtaggtttcggcacaagtttcagcgagagaaggagaaaactgccttggttggaaccttgcagtgcagggaaaggggtgtggcggcctttgctggggaaatggcggacgacaagtggggcggaggaggcctgcgtccggaaagtcagtagaattcatcacaagagagctacaagagcctggaagaagctgaagactgctaccctccatccttactcaccctggacctgagagacctcttcaatcaggtggagcaaggccctctcctgtcctgccccaaggctggcacagacttgagcatgggccgggctcgggaagtgggttggatggcggcaggactgatgattggggctggtgcctgctactgcgtttacaaactgaccataggaagagatgacagtgagaagctggaggaggagggggaagaggagtgggacgatgaccaggagctggatgaggaggagcctgatatttggtttgattttgaaactatggctcggccctggactgaggatggggattggactgaacctggggccccaggtggcactgaggacaggccctcagggggaggcaaggccaaccgagcacacccaataaaacagcggccattcccctatgaacataaaaatacttggagtgctcaaaattgtaaaaatggcagttgtgttctggacctctccaagtgtcttttcattcagggaaaactgttgtttgccgagcccaaggatgcgggctttccatttagccaggatatcaatagccatttggccagcctctcaatggctagaaacacgagccccactccagaccccactgttagagaggctttgtgtgccccggataacttaaatgcgagtattgaaagtcagggccagattaagatgtacatcaatgaagtgtgtcgggagactgtgtcacgttgctgcaactcatttctgcagcaggccggattaaatttgttaataagcatgacagttattaataacatgcttgccaagtccgcttcagacttgaagtttcctttgatatcagagggaagtggatgtgctaaggttcaggttttgaaaccgctgatgggtttgtctgaaaagccagtcttggcgggggagttagtcggtgcccagatgctcttctcattcatgtccctctttatcagaaatggaaacagagagattctcctggaaacccctgccccataaacggccctctcgaacacaatgggacggaatccacccacaacgcgcttggtttgcagatgtcaaagaatctgcagagggtgctactgaagatccagccttagccaatcaccacctcattgggtgaaagttccagggctcaatccaggaccacactcttattggccaggcaggggctcccacagagctttgagtaacttcttggttgtgcagtctgcaggcaatgttggcattgtaaattcctcccttgcagcctccttcatgtggtgaggggatcacttcagctgcctgctgtggacaaagaacatcaaattacagcatcacgagtgctattgttgcctgtggtggtctccctgtccaagcgggaccgctttgcagagaccagaggcatatcgcggcttgagctgaaaatgcatttgttgcagcttaggttgaattatttttcgtttgctctttcttctacacgcgcctgatggatagtgaacctattcatcaaaaaagtgcactgctcttctgtctattgtaccgacttaacctcttccacccaagtccgcatctgtgtgtatcatcaataaagttgtgtgctttgattggcagaaaa

SEQ ID NO: 12459 - protein, 300 aa, Homo sapiens; identical to SEQ ID NO: 2148

SEQ ID NO: 12460 - DNA, 932 bp, Homo sapiens
gtgaccaagagccgcctagagcacaagtcctgctagtcgcctccgtctgggtaccagccccctattactctgcaggcgtgtgaagaaagaaggaaactagctcggaccgtgcaggtttgtaggtctgttggcctgtaggtttcggcacaagtttcagcgagagaaggagaaaactgccttggttggaaccttgcagattcatcacaagagagctacaagagcctggaagaagctgaagactgctaccctccatccttactcaccctggacctgagagacctcttcaatcagaaatggaaacagagagattctcctggaaacccctgccccataaacggccctctcgaacacaatgggacggaatccacccacaacgcgcttggtttgcagatgtcaaagaatctgcagagggtgctactgaagatccagccttagccaatcaccacctcattgggtgaaagttccagggctcaatccaggaccacactcttattggccaggcaggggctcccacagagctttgagtaacttcttggttgtgcagtctgcaggcaatgttggcattgtaaattcctcccttgcagcctccttcatgtggtgaggggatcacttcagctgcctgctgtggacaaagaacatcaaattacagcatcacgagtgctattgttgcctgtggtggtctccctgtccaagcgggaccgctttgcagagaccagaggcatatcgcggcttgagctgaaaatgcatttgttgcagcttaggttgaattatttttcgtttgctctttcttctacacgcgcctgatggatagtgaacctattcatcaaaaaagtgcactgctcttctgtctattgtaccgacttaacctcttccacccaagtccgcatctgtgtgtatcatcaataaagttgtgtgctttgattggcagaaaa

SEQ ID NO: 12461 - protein, 54 aa, Homo sapiens; identical to SEQ ID NO: 12457

SEQ ID NO: 12462 - DNA, 1763 bp, Homo sapiens
acgtgaccaagagccgcctagagcacaagtcctgctagtcgcctccgtctgggtaccagccccctattactctgcaggcgtgtgaagaaagaaggaaactagctcggaccgtgcagattcatcacaagagagctacaagagcctggaagaagctgaagactgctaccctccatccttactcaccctggacctgagagacctcttcaatcaggtggagcaaggccctctcctgtcctgccccaaggctggcacagacttgagcatgggccgggctcgggaagtgggttggatggcggcaggactgatgattggggctggtgcctgctactgcgtttacaaactgaccataggaagagatgacagtgagaagctggaggaggagggggaagaggagtgggacgatgaccaggagctggatgaggaggagcctgatatttggtttgattttgaaactatggctcggccctggactgaggatggggattggactgaacctggggccccaggtggcactgaggacaggccctcagggggaggcaaggccaaccgagcacacccaataaaacagcggccattcccctatgaacataaaaatacttggagtgctcaaaattgtaaaaatggcagttgtgttctggacctctccaagtgtcttttcattcagggaaaactgttgtttgccgagcccaaggatgcgggctttccatttagccaggatatcaatagccatttggccagcctctcaatggctagaaacacgagccccactccagaccccactgttagagaggctttgtgtgccccggataacttaaatgcgagtattgaaagtcagggccagattaagatgtacatcaatgaagtgtgtcgggagactgtgtcacgttgctgcaactcatttctgcagcaggccggattaaatttgttaataagcatgacagttattaataacatgcttgccaagtccgcttcagacttgaagtttcctttgatatcagagggaagtggatgtgctaaggttcaggttttgaaaccgctgatgggtttgtctgaaaagccagtcttggcgggggagttagtcggtgcccagatgctcttctcattcatgtccctctttatcagaaatggaaacagagagattctcctggaaacccctgccccataaacggccctctcgaacacaatgggacggaatccacccacaacgcgcttggtttgcagatgtcaaagaatctgcagagggtgctactgaagatccagccttagccaatcaccacctcattgggtgaaagttccagggctcaatccaggaccacactcttattggccaggcaggggctcccacagagctttgagtaacttcttggttgtgcagtctgcaggcaatgttggcattgtaaattcctcccttgcagcctccttcatgtggtgaggggatcacttcagctgcctgctgtggacaaagaacatcaaattacagcatcacgagtgctattgttgcctgtggtggtctccctgtccaagcgggaccgctttgcagagaccagaggcatatcgcggcttgagctgaaaatgcatttgttgcagcttaggttgaattatttttcgtttgctctttcttctacacgcgcctgatggatagtgaacctattcatcaaaaaagtgcactgctcttctgtctattgtaccgacttaacctcttccacccaagtccgcatctgtgtgtatcatcaataaagttgtgtgctttgattggcagaaaa

SEQ ID NO: 12463 - protein, 300 aa, Homo sapiens; identical to SEQ ID NO: 2148

SEQ ID NO: 12464 - DNA, 1846 bp, Homo sapiens
cacgtgaccaagagccgcctagagcacaagtcctgctagtcgcctccgtctgggtaccagccccctattactctgcaggcgtgtgaagaaagaaggaaactagctcggaccgtgcaggtttgtaggtctgttggcctgtaggtttcggcacaagtttcagcgagagaaggagaaaactgccttggttggaaccttgcagattcatcacaagagagctacaagagcctggaagaagctgaagactgctaccctccatccttactcaccctggacctgagagacctcttcaatcaggtggagcaaggccctctcctgtcctgccccaaggctggcacagacttgagcatgggccgggctcgggaagtgggttggatggcggcaggactgatgattggggctggtgcctgctactgcgtttacaaactgaccataggaagagatgacagtgagaagctggaggaggagggggaagaggagtgggacgatgaccaggagctggatgaggaggagcctgatatttggtttgattttgaaactatggctcggccctggactgaggatggggattggactgaacctggggccccaggtggcactgaggacaggccctcagggggaggcaaggccaaccgagcacacccaataaaacagcggccattcccctatgaacataaaaatacttggagtgctcaaaattgtaaaaatggcagttgtgttctggacctctccaagtgtcttttcattcagggaaaactgttgtttgccgagcccaaggatgcgggctttccatttagccaggatatcaatagccatttggccagcctctcaatggctagaaacacgagccccactccagaccccactgttagagaggctttgtgtgccccggataacttaaatgcgagtattgaaagtcagggccagattaagatgtacatcaatgaagtgtgtcgggagactgtgtcacgttgctgcaactcatttctgcagcaggccggattaaatttgttaataagcatgacagttattaataacatgcttgccaagtccgcttcagacttgaagtttcctttgatatcagagggaagtggatgtgctaaggttcaggttttgaaaccgctgatgggtttgtctgaaaagccagtcttggcgggggagttagtcggtgcccagatgctcttctcattcatgtccctctttatcagaaatggaaacagagagattctcctggaaacccctgccccataaacggccctctcgaacacaatgggacggaatccacccacaacgcgcttggtttgcagatgtcaaagaatctgcagagggtgctactgaagatccagccttagccaatcaccacctcattgggtgaaagttccagggctcaatccaggaccacactcttattggccaggcaggggctcccacagagctttgagtaacttcttggttgtgcagtctgcaggcaatgttggcattgtaaattcctcccttgcagcctccttcatgtggtgaggggatcacttcagctgcctgctgtggacaaagaacatcaaattacagcatcacgagtgctattgttgcctgtggtggtctccctgtccaagcgggaccgctttgcagagaccagaggcatatcgcggcttgagctgaaaatgcatttgttgcagcttaggttgaattatttttcgtttgctctttcttctacacgcgcctgatggatagtgaacctattcatcaaaaaagtgcactgctcttctgtctattgtaccgacttaacctcttccacccaagtccgcatctgtgtgtatcatcaataaagttgtgtgctttgattggcagaaaa

SEQ ID NO: 12465 - protein, 300 aa, Homo sapiens; identical to SEQ ID NO: 2148

SEQ ID NO: 12466 - DNA, 568 bp, Homo sapiens
cgtgaccaagagccgcctagagcacaagtcctgctagtcgcctccgtctgggtaccagccccctattactctgcaggcgtgtgaagaaagaaggaaactagctcggaccgtgcaggtcggtgcgagggtgggcgctgcttgagaggaggtatgggtggaagagggccaagaacgccacagatccgagttcaggccgatcacagctgggtccctttctcgcctactttctaaatactgctacccacccccaccccaccccgtgctcattttagtagagagaagtggcgggtttcgggtgggggtgaggggagtgaatggcgtttccagagactccgagaaaagaaaggttctagtgtcccgggtgctggtccgtccaccaagcactccgtcccctcggtcccttgtctgtttgcaggtttgtaggtctgttggcctgtaggtttcggcacaagtttcagcgagagaaggagaaaactgccttggttggaaccttgcagattcatcacaagagagctacaagagcctggaagaagctgaagactgctaccctccatccttactcaccctg

SEQ ID NO: 12467 - protein, 70 aa, Homo sapiens
CPGCWSVHQALRPLGPLSVCRFVGLLACRFRHKFQREKEKTALVGTLQIHHKRATRAWKKLKTATLHPYS

SEQ ID NO: 12468 - DNA, 715 bp, Homo sapiens
agcagacctgcaggatgacagatcgaaaacatggagactcaccgtttcgcagcatcgaaatgggctgcaagcgggacatatgtcttggaaagcgggcggcgagtgggagagacgacggaggcgcctcagtacccgcgacggtctcggccctacgccctcaagcaccccgactttatggaatcttccaggtactgacctgcagggattcgggacaatttccttctcctcttcctttttccctccgccgcaggccggcccgccctcagggcagtggggagctggtactcagacgggaacaacgaccaggacaagaaggacttctgcacacgtcagctcttggtcacgtgagggctacgtcatccaccaactcgggtccccaatttcccctcccaccagcagtgcggcagaagagggcccgcccccctcctttccctcccccacaccaggccttattactctttcttcttcgataatctcatcaccttgtagttgtgtttcccttccaccgattaccagaaagggacggcatcttcccctggggctatgggccacttgtacttttatgaaaaattgcctcttccttccctaggctcctgggacagcagcctctccctccacctcccctcccccgagctatgaaagtctaccatttcctctgaaatctagtcccagatctgaaaggaacaagcgatcagaaaagaaaatctggaatgag

SEQ ID NO: 12469 - protein, 152 aa, Homo sapiens
MTDRKHGDSPFRSIEMGCKRDICLGKRAASGRDDGGASVPATVSALRPQAPRLYGIFQVLTCRDSGQFPSPLPFSLRRRPARPQGSGELVLRREQRPGQEGLLHTSALGHVRATSSTNSGPQFPLPPAVRQKRARPPPFPPPHQALLLFLLR

SEQ ID NO: 12470 - DNA, 3703 bp, Homo sapiens
agatctgggactagatttcagaggaaatggtagactttcatagctcgggggaggggaggtggagggagaggctgctgtcccaggagcctagggaaggaagaggcaatttttcataaaagtacaagtggcccatagccccaggggaagatgccgtccctttctggtaatcggtggaagggaaacacaactacaaggtgatgagattatcgaagaagaaagagtaataaggcctggtgtgggggagggaaaggaggggggcgggccctcttctgccgcactgctggtgggaggggaaattggggacccgagttggtggatgacgtagccctcacgtgaccaagagctgacgtgtgcagaagtccttcttgtcctggtcgttgttcccgtctgagtaccagctccccactgccctgagggcgggccggcctgcggcggagggaaaaaggaagaggagaaggaaattgtcccgaatccctgcagtctttctgtaggttgcggcacaacgccaggcaaaagaagaggaaggaatttaatcctaatcggtggaggtcgatttgagggtctgctgtagcaggtggctccgcttgaagcgagggaggaagtttcctccgatcagtagagattggaaagattgttgggagtggcacaccactagggaaaagaagaaggggcgaactgcttgtcttgaggaggtcaacccccagaatcagctcttgtggccttgaagtggctgaagacgatcaccctccacaggcttgagcccagtcccacagccttcctcccccagcctgagtgactactctattccttggtccctgctattgtcggggacgattgcatgggctacgccaggaaagtaggctgggtgaccgcaggcctggtgattggggctggcgcctgctattgcatttatagactgactaggggaagaaaacagaacaaggaaaaaatggctgagggtggatctggggatgtggatgatgctggggactgttctggggccaggtataatgactggtctgatgatgatgatgacagcaatgagagcaagagtatagtatggtacccaccttgggctcggattgggactgaagctggaaccagagctagggccagggcaagggccagggctacccgggcacgtcgggctgtccagaaacgggcttcccccaattcagatgataccgttttgtcccctcaagagctacaaaaggttctttgcttggttgagatgtctgaaaagccttatattcttgaagcagctttaattgctctgggtaacaatgctgcttatgcatttaacagagatattattcgtgatctgggtggtctcccaattgtcgcaaagattctcaatactcgggatcccatagttaaggaaaaggctttaattgtcctgaataacttgagtgtgaatgctgaaaatcagcgcaggcttaaagtatacatgaatcaagtgtgtgatgacacaatcacttctcgcttgaactcatctgtgcagcttgctggactgagattgcttacaaatatgactgttactaatgagtatcagcacatgcttgctaattccatttctgacttttttcgtttattttcagcgggaaatgaagaaaccaaacttcaggttctgaaactccttttgaatttggctgaaaatccagccatgactagggaactgctcagggcccaagtaccatcttcactgggctccctctttaataagaaggagaacaaagaagttattcttaaacttctggtcatatttgagaacataaatgataatttcaaatgggaagaaaatgaacctactcagaatcaattcggtgaaggttcactttttttctttttaaaagaatttcaagtgtgtgctgataaggttctgggaatagaaagtcaccatgattttttggtgaaagtaaaagttggaaaattcatggccaaacttgctgaacatatgttcccaaagagccaggaataacaccttgattttgtaatttagaagcaacacacattgtaaactattcattttctccaccttgtttatatggtaaaggaatcctttcagctgccagttttgaataatgaatatcatattgtatcatcaatgctgatatttaactgagttggtctttaggtttaagatggataaatgaatatcactacttgttctgaaaacatgtttgttgctttttatctcgctgcctagattgaaatattttgctatttcttctgcataagtgacagtgaaccaattcatcatgagtaagctcccttctgtcattttcattgatttaatttgtgtatcatcaataaaattgtatgttaatgctggaaagaaaaaaagaagaaagaaagaaaccatccctgtccttcagtttataatctagttggagagataagaaacgtacaaaccaaaagataacagaatatctgaagcatgtactcattgtcagatgttccctctgagagcacagaggaggcaaaagcttctgtgggatgtgctagtcggctaaagcttcacagaggaggtggcaattgaaaatgagtcctgaatggggtagggtggttagggaattccatgagacaagacaaggggggcatggtgtgagaaaggcatggaagtaggaaccctcttcctatgacaggagatcattctgcttagagtggagagtgtggagagtgggagtagataattttggaaagctgggtgaagccagttgtggagaattgtttgaatattatcccattgaatacccagagccactaaatctttttttactagaaaataattggggtccatatgaaagtctctattactgagtagtgtcaatgagggtgtggcaaaatggagcctttcacatcctagtggtggccatttggtaatacagatataagccttaaactatgtaaacccttgtcctaaggaagtaattgaataattgcccaaagattgtatgtatgaggctgttcatcccagcactgtctaagctagtaaaaattggaaacaatttaagtatctagcacattggattggttataaagcaaggaatgttcacacagtaggatattataagtatgctgatggaaatctatattgccaggaaaagctattcattatgcgttgtgaagtcagaaagtaaaaaagggtagatagaagtattcgaagtatagttccattttttgagactaataaaacatatgtttaaaaggacactaaaaactggagttatagatatccagatagaaacagtagttatctttgggtagaagaataatgagtgatctttacttttttactttttattcatctttgtgtttttatttatctaaaatgggtattgatttttaggacggttttgaaaaagaaaagtgttgggaatgaagcaagtgattgattggaaaacatactgaatggaagaaatatttagattaaaaatgaggtaggttgaagtttcttctctgaaatgatagataaatggtgaagataaggcttattgtgaggattcagtgaggtaatatatgcaaagtacttacaatgttctggcacatagtaattaattaagaaaatcgagcacccttaattacctagaatgcagggttgttagttttttggttgacttttgttttgctggggcattctgccatgttttagtgtcatttaataaataatagtaacaataaaggttaacatttattaagtgac

SEQ ID NO: 12471 - protein, 379 aa, Homo sapiens; identical to SEQ ID NO: 2152

SEQ ID NO: 12472 - DNA, 3740 bp, Homo sapiens
agatctgggactagatttcagaggaaatggtagactttcatagctcgggggaggggaggtggagggagaggctgctgtcccaggagcctagggaaggaagaggcaatttttcataaaagtacaagtggcccatagccccaggggaagatgccgtccctttctggtaatcggtggaagggaaacacaactacaaggtgatgagattatcgaagaagaaagagtaataaggcctggtgtgggggagggaaaggaggggggcgggccctcttctgccgcactgctggtgggaggggaaattggggacccgagttggtggatgacgtagccctcacgtgaccaagagctgacgtgtgcagaagtccttcttgtcctggtcgttgttcccgtctgagtaccagctccccactgccctgagggcgggccggcctgcggcggagggaaaaaggaagaggagaaggaaattgtcccgaatccctgcagtctttctgtaggttgcggcacaacgccaggcaaaagaagaggaaggaatttaatcctaatcggtggaggtcgatttgaggcacttactctccatgttttcgatctgtcatcctgcaggtctgctgtagcaggtggctccgcttgaagcgagggaggaagtttcctccgatcagtagagattggaaagattgttgggagtggcacaccactagggaaaagaagaaggggcgaactgcttgtcttgaggaggtcaacccccagaatcagctcttgtggccttgaagtggctgaagacgatcaccctccacaggcttgagcccagtcccacagccttcctcccccagcctgagtgactactctattccttggtccctgctattgtcggggacgattgcatgggctacgccaggaaagtaggctgggtgaccgcaggcctggtgattggggctggcgcctgctattgcatttatagactgactaggggaagaaaacagaacaaggaaaaaatggctgagggtggatctggggatgtggatgatgctggggactgttctggggccaggtataatgactggtctgatgatgatgatgacagcaatgagagcaagagtatagtatggtacccaccttgggctcggattgggactgaagctggaaccagagctagggccagggcaagggccagggctacccgggcacgtcgggctgtccagaaacgggcttcccccaattcagatgataccgttttgtcccctcaagagctacaaaaggttctttgcttggttgagatgtctgaaaagccttatattcttgaagcagctttaattgctctgggtaacaatgctgcttatgcatttaacagagatattattcgtgatctgggtggtctcccaattgtcgcaaagattctcaatactcgggatcccatagttaaggaaaaggctttaattgtcctgaataacttgagtgtgaatgctgaaaatcagcgcaggcttaaagtatacatgaatcaagtgtgtgatgacacaatcacttctcgcttgaactcatctgtgcagcttgctggactgagattgcttacaaatatgactgttactaatgagtatcagcacatgcttgctaattccatttctgacttttttcgtttattttcagcgggaaatgaagaaaccaaacttcaggttctgaaactccttttgaatttggctgaaaatccagccatgactagggaactgctcagggcccaagtaccatcttcactgggctccctctttaataagaaggagaacaaagaagttattcttaaacttctggtcatatttgagaacataaatgataatttcaaatgggaagaaaatgaacctactcagaatcaattcggtgaaggttcactttttttctttttaaaagaatttcaagtgtgtgctgataaggttctgggaatagaaagtcaccatgattttttggtgaaagtaaaagttggaaaattcatggccaaacttgctgaacatatgttcccaaagagccaggaataacaccttgattttgtaatttagaagcaacacacattgtaaactattcattttctccaccttgtttatatggtaaaggaatcctttcagctgccagttttgaataatgaatatcatattgtatcatcaatgctgatatttaactgagttggtctttaggtttaagatggataaatgaatatcactacttgttctgaaaacatgtttgttgctttttatctcgctgcctagattgaaatattttgctatttcttctgcataagtgacagtgaaccaattcatcatgagtaagctcccttctgtcattttcattgatttaatttgtgtatcatcaataaaattgtatgttaatgctggaaagaaaaaaagaagaaagaaagaaaccatccctgtccttcagtttataatctagttggagagataagaaacgtacaaaccaaaagataacagaatatctgaagcatgtactcattgtcagatgttccctctgagagcacagaggaggcaaaagcttctgtgggatgtgctagtcggctaaagcttcacagaggaggtggcaattgaaaatgagtcctgaatggggtagggtggttagggaattccatgagacaagacaaggggggcatggtgtgagaaaggcatggaagtaggaaccctcttcctatgacaggagatcattctgcttagagtggagagtgtggagagtgggagtagataattttggaaagctgggtgaagccagttgtggagaattgtttgaatattatcccattgaatacccagagccactaaatctttttttactagaaaataattggggtccatatgaaagtctctattactgagtagtgtcaatgagggtgtggcaaaatggagcctttcacatcctagtggtggccatttggtaatacagatataagccttaaactatgtaaacccttgtcctaaggaagtaattgaataattgcccaaagattgtatgtatgaggctgttcatcccagcactgtctaagctagtaaaaattggaaacaatttaagtatctagcacattggattggttataaagcaaggaatgttcacacagtaggatattataagtatgctgatggaaatctatattgccaggaaaagctattcattatgcgttgtgaagtcagaaagtaaaaaagggtagatagaagtattcgaagtatagttccattttttgagactaataaaacatatgtttaaaaggacactaaaaactggagttatagatatccagatagaaacagtagttatctttgggtagaagaataatgagtgatctttacttttttactttttattcatctttgtgtttttatttatctaaaatgggtattgatttttaggacggttttgaaaaagaaaagtgttgggaatgaagcaagtgattgattggaaaacatactgaatggaagaaatatttagattaaaaatgaggtaggttgaagtttcttctctgaaatgatagataaatggtgaagataaggcttattgtgaggattcagtgaggtaatatatgcaaagtacttacaatgttctggcacatagtaattaattaagaaaatcgagcacccttaattacctagaatgcagggttgttagttttttggttgacttttgttttgctggggcattctgccatgttttagtgtcatttaataaataatagtaacaataaaggttaacatttattaagtgac

SEQ ID NO: 12473 - protein, 379 aa, Homo sapiens; identical to SEQ ID NO: 2152

SEQ ID NO: 12474 - DNA, 3642 bp, Homo sapiens
agatctgggactagatttcagaggaaatggtagactttcatagctcgggggaggggaggtggagggagaggctgctgtcccaggagcctagggaaggaagaggcaatttttcataaaagtacaagtggcccatagccccaggggaagatgccgtccctttctggtaatcggtggaagggaaacacaactacaaggtgatgagattatcgaagaagaaagagtaataaggcctggtgtgggggagggaaaggaggggggcgggccctcttctgccgcactgctggtgggaggggaaattggggacccgagttggtggatgacgtagccctcacgtgaccaagagctgacgtgtgcagaagtccttcttgtcctggtcgttgttcccgtctgagtaccagctccccactgccctgagggcgggccggcctgcggcggagggaaaaaggaagaggagaaggaaattgtcccgaatccctgcagtctttctgtaggttgcggcacaacgccaggcaaaagaagaggaaggaatttaatcctaatcggtggaggtcgatttgaggattggaaagattgttgggagtggcacaccactagggaaaagaagaaggggcgaactgcttgtcttgaggaggtcaacccccagaatcagctcttgtggccttgaagtggctgaagacgatcaccctccacaggcttgagcccagtcccacagccttcctcccccagcctgagtgactactctattccttggtccctgctattgtcggggacgattgcatgggctacgccaggaaagtaggctgggtgaccgcaggcctggtgattggggctggcgcctgctattgcatttatagactgactaggggaagaaaacagaacaaggaaaaaatggctgagggtggatctggggatgtggatgatgctggggactgttctggggccaggtataatgactggtctgatgatgatgatgacagcaatgagagcaagagtatagtatggtacccaccttgggctcggattgggactgaagctggaaccagagctagggccagggcaagggccagggctacccgggcacgtcgggctgtccagaaacgggcttcccccaattcagatgataccgttttgtcccctcaagagctacaaaaggttctttgcttggttgagatgtctgaaaagccttatattcttgaagcagctttaattgctctgggtaacaatgctgcttatgcatttaacagagatattattcgtgatctgggtggtctcccaattgtcgcaaagattctcaatactcgggatcccatagttaaggaaaaggctttaattgtcctgaataacttgagtgtgaatgctgaaaatcagcgcaggcttaaagtatacatgaatcaagtgtgtgatgacacaatcacttctcgcttgaactcatctgtgcagcttgctggactgagattgcttacaaatatgactgttactaatgagtatcagcacatgcttgctaattccatttctgacttttttcgtttattttcagcgggaaatgaagaaaccaaacttcaggttctgaaactccttttgaatttggctgaaaatccagccatgactagggaactgctcagggcccaagtaccatcttcactgggctccctctttaataagaaggagaacaaagaagttattcttaaacttctggtcatatttgagaacataaatgataatttcaaatgggaagaaaatgaacctactcagaatcaattcggtgaaggttcactttttttctttttaaaagaatttcaagtgtgtgctgataaggttctgggaatagaaagtcaccatgattttttggtgaaagtaaaagttggaaaattcatggccaaacttgctgaacatatgttcccaaagagccaggaataacaccttgattttgtaatttagaagcaacacacattgtaaactattcattttctccaccttgtttatatggtaaaggaatcctttcagctgccagttttgaataatgaatatcatattgtatcatcaatgctgatatttaactgagttggtctttaggtttaagatggataaatgaatatcactacttgttctgaaaacatgtttgttgctttttatctcgctgcctagattgaaatattttgctatttcttctgcataagtgacagtgaaccaattcatcatgagtaagctcccttctgtcattttcattgatttaatttgtgtatcatcaataaaattgtatgttaatgctggaaagaaaaaaagaagaaagaaagaaaccatccctgtccttcagtttataatctagttggagagataagaaacgtacaaaccaaaagataacagaatatctgaagcatgtactcattgtcagatgttccctctgagagcacagaggaggcaaaagcttctgtgggatgtgctagtcggctaaagcttcacagaggaggtggcaattgaaaatgagtcctgaatggggtagggtggttagggaattccatgagacaagacaaggggggcatggtgtgagaaaggcatggaagtaggaaccctcttcctatgacaggagatcattctgcttagagtggagagtgtggagagtgggagtagataattttggaaagctgggtgaagccagttgtggagaattgtttgaatattatcccattgaatacccagagccactaaatctttttttactagaaaataattggggtccatatgaaagtctctattactgagtagtgtcaatgagggtgtggcaaaatggagcctttcacatcctagtggtggccatttggtaatacagatataagccttaaactatgtaaacccttgtcctaaggaagtaattgaataattgcccaaagattgtatgtatgaggctgttcatcccagcactgtctaagctagtaaaaattggaaacaatttaagtatctagcacattggattggttataaagcaaggaatgttcacacagtaggatattataagtatgctgatggaaatctatattgccaggaaaagctattcattatgcgttgtgaagtcagaaagtaaaaaagggtagatagaagtattcgaagtatagttccattttttgagactaataaaacatatgtttaaaaggacactaaaaactggagttatagatatccagatagaaacagtagttatctttgggtagaagaataatgagtgatctttacttttttactttttattcatctttgtgtttttatttatctaaaatgggtattgatttttaggacggttttgaaaaagaaaagtgttgggaatgaagcaagtgattgattggaaaacatactgaatggaagaaatatttagattaaaaatgaggtaggttgaagtttcttctctgaaatgatagataaatggtgaagataaggcttattgtgaggattcagtgaggtaatatatgcaaagtacttacaatgttctggcacatagtaattaattaagaaaatcgagcacccttaattacctagaatgcagggttgttagttttttggttgacttttgttttgctggggcattctgccatgttttagtgtcatttaataaataatagtaacaataaaggttaacatttattaagtgac

SEQ ID NO: 12475 - protein, 379 aa, Homo sapiens; identical to SEQ ID NO: 2152

SEQ ID NO: 12476 - DNA, 3527 bp, Homo sapiens
acgtgaccaagagctgacgtgtgcagaagtccttcttgtcctggtcgttgttcccgtctgagtaccagctccccactgccctgagggcgggccggcctgcggcggagggaaaaaggaagaggagaaggaaattgtcccgaatccctgcaggtcagtacctggaagattccataaagtcggggtgcttgagggcgtagggccgagaccgtcgcgggtactgaggcgcctccgtcgtctctcccactcgccgcccgctttccaagacatatgtcccgcttgcagcccatttcgatgctgcgaaacgtctttctgtaggttgcggcacaacgccaggcaaaagaagaggaaggaatttaatcctaatcggtggaggtcgatttgagggtctgctgtagcaggtggctccgcttgaagcgagggaggaagtttcctccgatcagtagagattggaaagattgttgggagtggcacaccactagggaaaagaagaaggggcgaactgcttgtcttgaggaggtcaacccccagaatcagctcttgtggccttgaagtggctgaagacgatcaccctccacaggcttgagcccagtcccacagccttcctcccccagcctgagtgactactctattccttggtccctgctattgtcggggacgattgcatgggctacgccaggaaagtaggctgggtgaccgcaggcctggtgattggggctggcgcctgctattgcatttatagactgactaggggaagaaaacagaacaaggaaaaaatggctgagggtggatctggggatgtggatgatgctggggactgttctggggccaggtataatgactggtctgatgatgatgatgacagcaatgagagcaagagtatagtatggtacccaccttgggctcggattgggactgaagctggaaccagagctagggccagggcaagggccagggctacccgggcacgtcgggctgtccagaaacgggcttcccccaattcagatgataccgttttgtcccctcaagagctacaaaaggttctttgcttggttgagatgtctgaaaagccttatattcttgaagcagctttaattgctctgggtaacaatgctgcttatgcatttaacagagatattattcgtgatctgggtggtctcccaattgtcgcaaagattctcaatactcgggatcccatagttaaggaaaaggctttaattgtcctgaataacttgagtgtgaatgctgaaaatcagcgcaggcttaaagtatacatgaatcaagtgtgtgatgacacaatcacttctcgcttgaactcatctgtgcagcttgctggactgagattgcttacaaatatgactgttactaatgagtatcagcacatgcttgctaattccatttctgacttttttcgtttattttcagcgggaaatgaagaaaccaaacttcaggttctgaaactccttttgaatttggctgaaaatccagccatgactagggaactgctcagggcccaagtaccatcttcactgggctccctctttaataagaaggagaacaaagaagttattcttaaacttctggtcatatttgagaacataaatgataatttcaaatgggaagaaaatgaacctactcagaatcaattcggtgaaggttcactttttttctttttaaaagaatttcaagtgtgtgctgataaggttctgggaatagaaagtcaccatgattttttggtgaaagtaaaagttggaaaattcatggccaaacttgctgaacatatgttcccaaagagccaggaataacaccttgattttgtaatttagaagcaacacacattgtaaactattcattttctccaccttgtttatatggtaaaggaatcctttcagctgccagttttgaataatgaatatcatattgtatcatcaatgctgatatttaactgagttggtctttaggtttaagatggataaatgaatatcactacttgttctgaaaacatgtttgttgctttttatctcgctgcctagattgaaatattttgctatttcttctgcataagtgacagtgaaccaattcatcatgagtaagctcccttctgtcattttcattgatttaatttgtgtatcatcaataaaattgtatgttaatgctggaaagaaaaaaagaagaaagaaagaaaccatccctgtccttcagtttataatctagttggagagataagaaacgtacaaaccaaaagataacagaatatctgaagcatgtactcattgtcagatgttccctctgagagcacagaggaggcaaaagcttctgtgggatgtgctagtcggctaaagcttcacagaggaggtggcaattgaaaatgagtcctgaatggggtagggtggttagggaattccatgagacaagacaaggggggcatggtgtgagaaaggcatggaagtaggaaccctcttcctatgacaggagatcattctgcttagagtggagagtgtggagagtgggagtagataattttggaaagctgggtgaagccagttgtggagaattgtttgaatattatcccattgaatacccagagccactaaatctttttttactagaaaataattggggtccatatgaaagtctctattactgagtagtgtcaatgagggtgtggcaaaatggagcctttcacatcctagtggtggccatttggtaatacagatataagccttaaactatgtaaacccttgtcctaaggaagtaattgaataattgcccaaagattgtatgtatgaggctgttcatcccagcactgtctaagctagtaaaaattggaaacaatttaagtatctagcacattggattggttataaagcaaggaatgttcacacagtaggatattataagtatgctgatggaaatctatattgccaggaaaagctattcattatgcgttgtgaagtcagaaagtaaaaaagggtagatagaagtattcgaagtatagttccattttttgagactaataaaacatatgtttaaaaggacactaaaaactggagttatagatatccagatagaaacagtagttatctttgggtagaagaataatgagtgatctttacttttttactttttattcatctttgtgtttttatttatctaaaatgggtattgatttttaggacggttttgaaaaagaaaagtgttgggaatgaagcaagtgattgattggaaaacatactgaatggaagaaatatttagattaaaaatgaggtaggttgaagtttcttctctgaaatgatagataaatggtgaagataaggcttattgtgaggattcagtgaggtaatatatgcaaagtacttacaatgttctggcacatagtaattaattaagaaaatcgagcacccttaattacctagaatgcagggttgttagttttttggttgacttttgttttgctggggcattctgccatgttttagtgtcatttaataaataatagtaacaataaaggttaacatttattaagtgac

SEQ ID NO: 12477 - protein, 379 aa, Homo sapiens; identical to SEQ ID NO: 2152

SEQ ID NO: 12478 - DNA, 3073 bp, Homo sapiens
gtgcagaagtccttcttgtcctggtcgttgttcccgtctgagtaccagctccccactgccctgagggcgggccggcctgcggcggagggaaaaaggaagaggagaaggaaattgtcccgaatccctgcagtgggtccaagcctctcccgggtggccacctgagtgactactctattccttggtccctgctattgtcggggacgattgcatgggctacgccaggaaagtaggctgggtgaccgcaggcctggtgattggggctggcgcctgctattgcatttatagactgactaggggaagaaaacagaacaaggaaaaaatggctgagggtggatctggggatgtggatgatgctggggactgttctggggccaggtataatgactggtctgatgatgatgatgacagcaatgagagcaagagtatagtatggtacccaccttgggctcggattgggactgaagctggaaccagagctagggccagggcaagggccagggctacccgggcacgtcgggctgtccagaaacgggcttcccccaattcagatgataccgttttgtcccctcaagagctacaaaaggttctttgcttggttgagatgtctgaaaagccttatattcttgaagcagctttaattgctctgggtaacaatgctgcttatgcatttaacagagatattattcgtgatctgggtggtctcccaattgtcgcaaagattctcaatactcgggatcccatagttaaggaaaaggctttaattgtcctgaataacttgagtgtgaatgctgaaaatcagcgcaggcttaaagtatacatgaatcaagtgtgtgatgacacaatcacttctcgcttgaactcatctgtgcagcttgctggactgagattgcttacaaatatgactgttactaatgagtatcagcacatgcttgctaattccatttctgacttttttcgtttattttcagcgggaaatgaagaaaccaaacttcaggttctgaaactccttttgaatttggctgaaaatccagccatgactagggaactgctcagggcccaagtaccatcttcactgggctccctctttaataagaaggagaacaaagaagttattcttaaacttctggtcatatttgagaacataaatgataatttcaaatgggaagaaaatgaacctactcagaatcaattcggtgaaggttcactttttttctttttaaaagaatttcaagtgtgtgctgataaggttctgggaatagaaagtcaccatgattttttggtgaaagtaaaagttggaaaattcatggccaaacttgctgaacatatgttcccaaagagccaggaataacaccttgattttgtaatttagaagcaacacacattgtaaactattcattttctccaccttgtttatatggtaaaggaatcctttcagctgccagttttgaataatgaatatcatattgtatcatcaatgctgatatttaactgagttggtctttaggtttaagatggataaatgaatatcactacttgttctgaaaacatgtttgttgctttttatctcgctgcctagattgaaatattttgctatttcttctgcataagtgacagtgaaccaattcatcatgagtaagctcccttctgtcattttcattgatttaatttgtgtatcatcaataaaattgtatgttaatgctggaaagaaaaaaagaagaaagaaagaaaccatccctgtccttcagtttataatctagttggagagataagaaacgtacaaaccaaaagataacagaatatctgaagcatgtactcattgtcagatgttccctctgagagcacagaggaggcaaaagcttctgtgggatgtgctagtcggctaaagcttcacagaggaggtggcaattgaaaatgagtcctgaatggggtagggtggttagggaattccatgagacaagacaaggggggcatggtgtgagaaaggcatggaagtaggaaccctcttcctatgacaggagatcattctgcttagagtggagagtgtggagagtgggagtagataattttggaaagctgggtgaagccagttgtggagaattgtttgaatattatcccattgaatacccagagccactaaatctttttttactagaaaataattggggtccatatgaaagtctctattactgagtagtgtcaatgagggtgtggcaaaatggagcctttcacatcctagtggtggccatttggtaatacagatataagccttaaactatgtaaacccttgtcctaaggaagtaattgaataattgcccaaagattgtatgtatgaggctgttcatcccagcactgtctaagctagtaaaaattggaaacaatttaagtatctagcacattggattggttataaagcaaggaatgttcacacagtaggatattataagtatgctgatggaaatctatattgccaggaaaagctattcattatgcgttgtgaagtcagaaagtaaaaaagggtagatagaagtattcgaagtatagttccattttttgagactaataaaacatatgtttaaaaggacactaaaaactggagttatagatatccagatagaaacagtagttatctttgggtagaagaataatgagtgatctttacttttttactttttattcatctttgtgtttttatttatctaaaatgggtattgatttttaggacggttttgaaaaagaaaagtgttgggaatgaagcaagtgattgattggaaaacatactgaatggaagaaatatttagattaaaaatgaggtaggttgaagtttcttctctgaaatgatagataaatggtgaagataaggcttattgtgaggattcagtgaggtaatatatgcaaagtacttacaatgttctggcacatagtaattaattaagaaaatcgagcacccttaattacctagaatgcagggttgttagttttttggttgacttttgttttgctggggcattctgccatgttttagtgtcatttaataaataatagtaacaataaaggttaacatttattaagtgac

SEQ ID NO: 12479 - protein, 379 aa, Homo sapiens; identical to SEQ ID NO: 2152

SEQ ID NO: 12480 - DNA, 2224 bp, Homo sapiens
ggtcgttgttcccgtctgagtaccagctccccactgccctgagggcgggccggcctgcggcggagggaaaaaggaagaggagaaggaaattgtcccgaatccctgcagtttattttcagcgggaaatgaagaaaccaaacttcaggttctgaaactccttttgaatttggctgaaaatccagccatgactagggaactgctcagggcccaagtaccatcttcactgggctccctctttaataagaaggagaacaaagaagttattcttaaacttctggtcatatttgagaacataaatgataatttcaaatgggaagaaaatgaacctactcagaatcaattcggtgaaggttcactttttttctttttaaaagaatttcaagtgtgtgctgataaggttctgggaatagaaagtcaccatgattttttggtgaaagtaaaagttggaaaattcatggccaaacttgctgaacatatgttcccaaagagccaggaataacaccttgattttgtaatttagaagcaacacacattgtaaactattcattttctccaccttgtttatatggtaaaggaatcctttcagctgccagttttgaataatgaatatcatattgtatcatcaatgctgatatttaactgagttggtctttaggtttaagatggataaatgaatatcactacttgttctgaaaacatgtttgttgctttttatctcgctgcctagattgaaatattttgctatttcttctgcataagtgacagtgaaccaattcatcatgagtaagctcccttctgtcattttcattgatttaatttgtgtatcatcaataaaattgtatgttaatgctggaaagaaaaaaagaagaaagaaagaaaccatccctgtccttcagtttataatctagttggagagataagaaacgtacaaaccaaaagataacagaatatctgaagcatgtactcattgtcagatgttccctctgagagcacagaggaggcaaaagcttctgtgggatgtgctagtcggctaaagcttcacagaggaggtggcaattgaaaatgagtcctgaatggggtagggtggttagggaattccatgagacaagacaaggggggcatggtgtgagaaaggcatggaagtaggaaccctcttcctatgacaggagatcattctgcttagagtggagagtgtggagagtgggagtagataattttggaaagctgggtgaagccagttgtggagaattgtttgaatattatcccattgaatacccagagccactaaatctttttttactagaaaataattggggtccatatgaaagtctctattactgagtagtgtcaatgagggtgtggcaaaatggagcctttcacatcctagtggtggccatttggtaatacagatataagccttaaactatgtaaacccttgtcctaaggaagtaattgaataattgcccaaagattgtatgtatgaggctgttcatcccagcactgtctaagctagtaaaaattggaaacaatttaagtatctagcacattggattggttataaagcaaggaatgttcacacagtaggatattataagtatgctgatggaaatctatattgccaggaaaagctattcattatgcgttgtgaagtcagaaagtaaaaaagggtagatagaagtattcgaagtatagttccattttttgagactaataaaacatatgtttaaaaggacactaaaaactggagttatagatatccagatagaaacagtagttatctttgggtagaagaataatgagtgatctttacttttttactttttattcatctttgtgtttttatttatctaaaatgggtattgatttttaggacggttttgaaaaagaaaagtgttgggaatgaagcaagtgattgattggaaaacatactgaatggaagaaatatttagattaaaaatgaggtaggttgaagtttcttctctgaaatgatagataaatggtgaagataaggcttattgtgaggattcagtgaggtaatatatgcaaagtacttacaatgttctggcacatagtaattaattaagaaaatcgagcacccttaattacctagaatgcagggttgttagttttttggttgacttttgttttgctggggcattctgccatgttttagtgtcatttaataaataatagtaacaataaaggttaacatttattaagtgac

SEQ ID NO: 12481 - protein, 104 aa, Homo sapiens [sequence omitted]

SEQ ID NO: 12482 - DNA, 4126 bp, Homo sapiens
tgttcccgtctgagtaccagctccccactgccctgagggcgggccggcctgcggcggagggaaaaaggaagaggagaaggaaattgtcccgaatccctgcaggtcagtacctggaagattccataaagtcggggtgcttgagggcgtagggccgagaccgtcgcgggtactgaggcgcctccgtcgtctctcccactcgccgcccgctttccaagacatatgtcccgcttgcagcccatttcgatgctgcgaaacggtgagctgcggggtgtttggggaagagctcagagactgggaaatgggaatctgctgggagcctagggccgcaatccggaaagggagctgtggcctgggtgttggcccctagtccaccaggacagtgccggaggggaatggctggatatgggggcgggggtggtgagatgcaacgcgatatgtcagcagaaccccaagagaggtaataggggtgggaaacctctgacaaccaggcctccgaattagaaaagagttttgtgttctggggactagtccgtccaccaagcgctcagtggcggcagtttcccgtctttctgcctgtggctgtgtcttactgaccatggctctgtgtctagtgggtccaagcctctcccgggtggccagtctttctgtaggttgcggcacaacgccaggcaaaagaagaggaaggaatttaatcctaatcggtggaggtcgatttgagggtaagaccatctggggaccctaggagggacgggggtggcggcgggggtggggagaaggcagagaaggtaataatctaggtacatgtctgagtccgaatgtgtttcttgcactccccggactgtggcgaaatggcgtgctttgtgtgtctgtggttggggggaagtgggggaaatgacagcagggaaacctatcggatagtttgttcgtaatcctcctctctcaacagcacttactctccatgttttcgatctgtcatcctgcaggtctgctgtagcaggtggctccgcttgaagcgagggaggaagtttcctccgatcagtagagattggaaagattgttgggagtggcacaccactagggaaaagaagaaggggcgaactgcttgtcttgaggaggtcaacccccagaatcagctcttgtggccttgaagtggctgaagacgatcaccctccacaggcttgagcccagtcccacagccttcctcccccagcctgagtgactactctattccttggtccctgctattgtcggggacgattgcatgggctacgccaggaaagtaggctgggtgaccgcaggcctggtgattggggctggcgcctgctattgcatttatagactgactaggggaagaaaacagaacaaggaaaaaatggctgagggtggatctggggatgtggatgatgctggggactgttctggggccaggtataatgactggtctgatgatgatgatgacagcaatgagagcaagagtatagtatggtacccaccttgggctcggattgggactgaagctggaaccagagctagggccagggcaagggccagggctacccgggcacgtcgggctgtccagaaacgggcttcccccaattcagatgataccgttttgtcccctcaagagctacaaaaggttctttgcttggttgagatgtctgaaaagccttatattcttgaagcagctttaattgctctgggtaacaatgctgcttatgcatttaacagagatattattcgtgatctgggtggtctcccaattgtcgcaaagattctcaatactcgggatcccatagttaaggaaaaggctttaattgtcctgaataacttgagtgtgaatgctgaaaatcagcgcaggcttaaagtatacatgaatcaagtgtgtgatgacacaatcacttctcgcttgaactcatctgtgcagcttgctggactgagattgcttacaaatatgactgttactaatgagtatcagcacatgcttgctaattccatttctgacttttttcgtttattttcagcgggaaatgaagaaaccaaacttcaggttctgaaactccttttgaatttggctgaaaatccagccatgactagggaactgctcagggcccaagtaccatcttcactgggctccctctttaataagaaggagaacaaagaagttattcttaaacttctggtcatatttgagaacataaatgataatttcaaatgggaagaaaatgaacctactcagaatcaattcggtgaaggttcactttttttctttttaaaagaatttcaagtgtgtgctgataaggttctgggaatagaaagtcaccatgattttttggtgaaagtaaaagttggaaaattcatggccaaacttgctgaacatatgttcccaaagagccaggaataacaccttgattttgtaatttagaagcaacacacattgtaaactattcattttctccaccttgtttatatggtaaaggaatcctttcagctgccagttttgaataatgaatatcatattgtatcatcaatgctgatatttaactgagttggtctttaggtttaagatggataaatgaatatcactacttgttctgaaaacatgtttgttgctttttatctcgctgcctagattgaaatattttgctatttcttctgcataagtgacagtgaaccaattcatcatgagtaagctcccttctgtcattttcattgatttaatttgtgtatcatcaataaaattgtatgttaatgctggaaagaaaaaaagaagaaagaaagaaaccatccctgtccttcagtttataatctagttggagagataagaaacgtacaaaccaaaagataacagaatatctgaagcatgtactcattgtcagatgttccctctgagagcacagaggaggcaaaagcttctgtgggatgtgctagtcggctaaagcttcacagaggaggtggcaattgaaaatgagtcctgaatggggtagggtggttagggaattccatgagacaagacaaggggggcatggtgtgagaaaggcatggaagtaggaaccctcttcctatgacaggagatcattctgcttagagtggagagtgtggagagtgggagtagataattttggaaagctgggtgaagccagttgtggagaattgtttgaatattatcccattgaatacccagagccactaaatctttttttactagaaaataattggggtccatatgaaagtctctattactgagtagtgtcaatgagggtgtggcaaaatggagcctttcacatcctagtggtggccatttggtaatacagatataagccttaaactatgtaaacccttgtcctaaggaagtaattgaataattgcccaaagattgtatgtatgaggctgttcatcccagcactgtctaagctagtaaaaattggaaacaatttaagtatctagcacattggattggttataaagcaaggaatgttcacacagtaggatattataagtatgctgatggaaatctatattgccaggaaaagctattcattatgcgttgtgaagtcagaaagtaaaaaagggtagatagaagtattcgaagtatagttccattttttgagactaataaaacatatgtttaaaaggacactaaaaactggagttatagatatccagatagaaacagtagttatctttgggtagaagaataatgagtgatctttacttttttactttttattcatctttgtgtttttatttatctaaaatgggtattgatttttaggacggttttgaaaaagaaaagtgttgggaatgaagcaagtgattgattggaaaacatactgaatggaagaaatatttagattaaaaatgaggtaggttgaagtttcttctctgaaatgatagataaatggtgaagataaggcttattgtgaggattcagtgaggtaatatatgcaaagtacttacaatgttctggcacatagtaattaattaagaaaatcgagcacccttaattacctagaatgcagggttgttagttttttggttgacttttgttttgctggggcattctgccatgttttagtgtcatttaataaataatagtaacaataaaggttaacatttattaagtgac

SEQ ID NO: 12483 - protein, 379 aa, Homo sapiens; identical to SEQ ID NO: 2152

SEQ ID NO: 12484 - DNA, 3353 bp, Homo sapiens
atcagtagaggtcggtgtgggcgtgggggctgcctggaatgggggaggggttagaaatcgccggcactttggacaggctcttccaatcctgctttattttccttacctccctcccatttcaggctagggagggggcagacctgtgcatgtctgggatagcataaagaggttaaaaacaaacctgataaccggaatggtgaatcaggaaagcaacgaatcaacagtcaacccatcaagtgctccattctcactggctctggtctctctgcagattggaaagattgttgggagtggcacaccactagggaaaagaagaaggggcgaactgcttgtcttgaggaggtcaacccccagaatcagctcttgtggccttgaagtggctgaagacgatcaccctccacaggcttgagcccagtcccacagccttcctcccccagcctgagtgactactctattccttggtccctgctattgtcggggacgattgcatgggctacgccaggaaagtaggctgggtgaccgcaggcctggtgattggggctggcgcctgctattgcatttatagactgactaggggaagaaaacagaacaaggaaaaaatggctgagggtggatctggggatgtggatgatgctggggactgttctggggccaggtataatgactggtctgatgatgatgatgacagcaatgagagcaagagtatagtatggtacccaccttgggctcggattgggactgaagctggaaccagagctagggccagggcaagggccagggctacccgggcacgtcgggctgtccagaaacgggcttcccccaattcagatgataccgttttgtcccctcaagagctacaaaaggttctttgcttggttgagatgtctgaaaagccttatattcttgaagcagctttaattgctctgggtaacaatgctgcttatgcatttaacagagatattattcgtgatctgggtggtctcccaattgtcgcaaagattctcaatactcgggatcccatagttaaggaaaaggctttaattgtcctgaataacttgagtgtgaatgctgaaaatcagcgcaggcttaaagtatacatgaatcaagtgtgtgatgacacaatcacttctcgcttgaactcatctgtgcagcttgctggactgagattgcttacaaatatgactgttactaatgagtatcagcacatgcttgctaattccatttctgacttttttcgtttattttcagcgggaaatgaagaaaccaaacttcaggttctgaaactccttttgaatttggctgaaaatccagccatgactagggaactgctcagggcccaagtaccatcttcactgggctccctctttaataagaaggagaacaaagaagttattcttaaacttctggtcatatttgagaacataaatgataatttcaaatgggaagaaaatgaacctactcagaatcaattcggtgaaggttcactttttttctttttaaaagaatttcaagtgtgtgctgataaggttctgggaatagaaagtcaccatgattttttggtgaaagtaaaagttggaaaattcatggccaaacttgctgaacatatgttcccaaagagccaggaataacaccttgattttgtaatttagaagcaacacacattgtaaactattcattttctccaccttgtttatatggtaaaggaatcctttcagctgccagttttgaataatgaatatcatattgtatcatcaatgctgatatttaactgagttggtctttaggtttaagatggataaatgaatatcactacttgttctgaaaacatgtttgttgctttttatctcgctgcctagattgaaatattttgctatttcttctgcataagtgacagtgaaccaattcatcatgagtaagctcccttctgtcattttcattgatttaatttgtgtatcatcaataaaattgtatgttaatgctggaaagaaaaaaagaagaaagaaagaaaccatccctgtccttcagtttataatctagttggagagataagaaacgtacaaaccaaaagataacagaatatctgaagcatgtactcattgtcagatgttccctctgagagcacagaggaggcaaaagcttctgtgggatgtgctagtcggctaaagcttcacagaggaggtggcaattgaaaatgagtcctgaatggggtagggtggttagggaattccatgagacaagacaaggggggcatggtgtgagaaaggcatggaagtaggaaccctcttcctatgacaggagatcattctgcttagagtggagagtgtggagagtgggagtagataattttggaaagctgggtgaagccagttgtggagaattgtttgaatattatcccattgaatacccagagccactaaatctttttttactagaaaataattggggtccatatgaaagtctctattactgagtagtgtcaatgagggtgtggcaaaatggagcctttcacatcctagtggtggccatttggtaatacagatataagccttaaactatgtaaacccttgtcctaaggaagtaattgaataattgcccaaagattgtatgtatgaggctgttcatcccagcactgtctaagctagtaaaaattggaaacaatttaagtatctagcacattggattggttataaagcaaggaatgttcacacagtaggatattataagtatgctgatggaaatctatattgccaggaaaagctattcattatgcgttgtgaagtcagaaagtaaaaaagggtagatagaagtattcgaagtatagttccattttttgagactaataaaacatatgtttaaaaggacactaaaaactggagttatagatatccagatagaaacagtagttatctttgggtagaagaataatgagtgatctttacttttttactttttattcatctttgtgtttttatttatctaaaatgggtattgatttttaggacggttttgaaaaagaaaagtgttgggaatgaagcaagtgattgattggaaaacatactgaatggaagaaatatttagattaaaaatgaggtaggttgaagtttcttctctgaaatgatagataaatggtgaagataaggcttattgtgaggattcagtgaggtaatatatgcaaagtacttacaatgttctggcacatagtaattaattaagaaaatcgagcacccttaattacctagaatgcagggttgttagttttttggttgacttttgttttgctggggcattctgccatgttttagtgtcatttaataaataatagtaacaataaaggttaacatttattaagtgac

SEQ ID NO: 12485 - protein, 71 aa, Homo sapiens
MVNQESNESTVNPSSAPFSLALVSLQIGKIVGSGTPLGKRRRGELLVLRRSTPRISSCGLEVAEDDHPPQA

SEQ ID NO: 12486 - DNA, 1175 bp, Homo sapiens
gcatttatagactgactaggggaagaaaacagaacaaggaaaaaatggctgagggtggatctggggatgtggatgatgctggggactgttctggggccaggtataatgactggtctgatgatgatgatgacagcaatgagagcaagagtatagtatggtacccaccttgggctcggattgggactgaagctggaaccagagctagggccagggcaagggccagggctacccgggcacgtcgggctgtccagaaacgggcttcccccaattcagatgataccgttttgtcccctcaagagctacaaaaggttctttgcttggttgagatgtctgaaaagccttatattcttgaagcagctttaattgctctgggtaacaatgctgcttatgcatttaacagagatattattcgtgatctgggtggtctcccaattgtcgcaaagattctcaatactcgggatcccatagttaaggaaaaggctttaattgtcctgaataacttgagtgtgaatgctgaaaatcagcgcaggcttaaagtatacatgaatcaagtgtgtgatgacacaatcacttctcgcttgaactcatctgtgcagcttgctggactgagattgcttacaaatatgactgttactaatgagtatcagcacatgcttgctaattccatttctgacttttttcgtttattttcagcgggaaatgaagaaaccaaacttcaggttctgaaactccttttgaatttggctgaaaatccagccatgactagggaactgctcagggcccaagtaccatcttcactgggctccctctttaataagaaggagaacaaagaagttattcttaaacttctggtcatatttgagaacataaatgataatttcaaatgggaaaaatatttagattaaaaatgaggtaggttgaagtttcttctctgaaatgatagataaatggtgaagataaggcttattgtgaggattcagtgaggtaatatatgcaaagtacttacaatgttctggcacatagtaattaattaagaaaatcgagcacccttaattacctagaatgcagggttgttagttttttggttgacttttgttttgctggggcattctgccatgttttagtgtcatttaataaataatagtaacaataaaggttaacatttattaagtgac

SEQ ID NO: 12487 - protein, 286 aa, Homo sapiens
MAEGGSGDVDDAGDCSGARYNDWSDDDDDSNESKSIVWYPPWARIGTEAGTRARARARARATRARRAVQKRASPNSDDTVLSPQELQKVLCLVEMSEKPYILEAALIALGNNAAYAFNRDIIRDLGGLPIVAKILNTRDPIVKEKALIVLNNLSVNAENQRRLKVYMNQVCDDTITSRLNSSVQLAGLRLLTNMTVTNEYQHMLANSISDFFRLFSAGNEETKLQVLKLLLNLAENPAMTRELLRAQVPSSLGSLFNKKENKEVILKLLVIFENINDNFKWEKYLD

SEQ ID NO: 12488 - DNA, 551 bp, Homo sapiens
agagcttcctttggcttatattaatattttcaaccatgttttctttttgcttgcttatgcctgatatctcctcactcactgatctgtttcaacatttctttgttgctatgctgtaggtgtgtttcttgtaaagaacatatagttggatttttaattcactatcatggtctgtgcccttttacctttagtgcaacagttaatacccttgattttattctcttcattttgttttatgttcctattatttttactattaattttattttgtcgagcccccatttcctttctctaatttattttttttagtttattcaaacttctattcttacacattcattatattgtgaatttggaaaatttactatgcttttctacacacttcattccatgaatgctagcactcaaaatcaaacaatttatacaaagtccaagtagcattcaatacatagtggttaaatttgtgatctcagaatgacagtggctgagttagaagctatttatttaaaagctgtattttcttgggtgagttttaaatcactgtctatataaat

SEQ ID NO: 12489 - protein, 42 aa, Homo sapiens
MVCALLPLVQQLIPLILFSSFCFMFLLFLLLILFCRAPISFL

SEQ ID NO: 12490 - DNA, 2754 bp, Homo sapiens
gcaggaggaggattgaggtgggaggggtggggtgagaagagttgaaggaattgagaggtagaatcatttgacattctgatgtgcaaacacgaaaaggcagttactgagacccttgtcctggatgctgatccatccaccaggctttcattgtctaacgtcgacagtctatatttctgctcttcagtctgtccttaggatgaagctctaactgaactgaagtaaggagaaacagccttgaatctttggagggtctgtcttccttttgggctctgtgcaactgcagctacagtggaaaaaagcaaactgctcttgatcccaggccctgcctaagcctcagcagaacttgtaagcctaaactgaagagcctcacccggacgagcaggcatcccttaaccttaagcaatccagttccacgccctggatcagtgaataaccccagctgcaccatgagccgcgttcgggatgctggctgtgtagcggcggggatagtgataggggctggtgcctggtactgtgtctacaaatacaccagggggagagaccagaccaagaagagaatggccaagcccaaaaaccgggctgtggctgggactggagccagggctagagctgggctaagagccggattcacaatcgaccttgggtcaggattcagtcccccaaccccagtccgtgctgaagcagaggacagggcccaggatgaagcctctgctctggacacagttggagctgaggcagtggccccagctgcatccagcgctgaggctcagagtggggcaggcagtcaggcccaagaggcagatggagccggggttgggcctaaggccgaatcagtagttggggctgcaatggcttctgcaatagcaccacctcccggggtgacagaggcccttggggctgcagaagcccctgcaatggcaggggctcccaaagtggcagaagctcccagagaagcggagacttccagggcagcggtgcctcctgggacagtggtgcctaccgaagcggcagcacccactgaggtgaccgagggtcctggggtagcagcacctaccaaggtagctgaagctcccggggtggcatcgcctaccgaggcagctgaggctcctgtgcccgcaacgcctactggggctgcagcacctactggggctgcagagtctcctggaacttctggttcccctagaacagcggtggttcctggaacatcagctgccaagaaagcaacccctggggctcacactggggctataccgaaagccacatcagcgactggagcggtacccaaaggtggaggcaagggtgtaaccaggtcccggaatgggggcaagggcaagggcaagaaaagcaaagttgaagtagacgaactggggatgggcttccgtcctggagatggggctgcagcagctgctgcagcctctgctaatggcggacaggctttcctggcagaggtccctgattctgaggaaggggagtccgggtggactgacacagagtcagattcagactctgagcccgagacccagcgcagagggaggggaagaagacccgttgccatgcagaagcgcccctttccttatgaaattgatgagattctgggtgtccgcgatctcaggaaggtccttgccttgcttcagaaatctgatgatcctttcatccaacaggtagctttgctcactctgagcaacaatgccaattattcatgcaatcaagagacaatccgcaaattgggaggcctcccaattattgcaaacatgatcaacaaaactgatccacacattaaggaaaaagccttaatggccatgaataacctgagtgagaattatgaaaatcagggccggcttcaggtgtacatgaataaagtgatggatgatatcatggcctctaacctgaactcagcagttcaagtagttggactaaaatttctaacaaacatgactattactaatgactaccagcacctgcttgtcaattccattgcaaactttttccgtttgctatctcagggaggtggaaaaatcaaggttgagattttgaaaatcctttcgaattttgctgaaaatccagatatgttgaagaaacttctcagtacccaagtgccagcatcatttagttccctctataattcttacgtggaatcagaaatccttattaatgcccttactctatttgagattatctatgacaatctcagagcagaagtgtttaactatagagaattcaataaaggttcccttttttacttatgcactacatctggagtgtgtgttaagaaaattagagccttagcaaatcaccatgacctcttagtgaaagtgaaagttataaaactagtgaacaaattctgattggttatgtaccgtcaaaagacttgaagaaatttcatgattttgcagtgtggaagcgttgaaaattgaaagttactgcttttccacttgctcatatagtaaagggatcctttcagctgccagtgttgaataatgtatcatccagagtgatgttatctgtgacagtcaccagctttaagctgaaccattttatgaataccaaataaatagacctcttgtactgaaaacatatttgtgactttaatcgtgctgcttggatagaaatatttttactggttcttctgaattgacagtaaacctgtccattatgaatggcctactgttctattatttgttttgacttgaatttatccaccaaagacttcatttgtgtatcatcaataaagttgtatgtttcaactgacaaaaa

SEQ ID NO: 12491 - protein, 632 aa, Homo sapiens; identical to SEQ ID NO: 2158

SEQ ID NO: 12492 - DNA, 3252 bp, Homo sapiens
ggtgggtgtgagggtgggcacagtctgggacccctgaatagggtaatctagggatgcgggagtcggaggccgcgggtgcctcggtctcccccactcctggccggctttccagacctgaggtgctcaaacgcggctcattttggtgggcggtggggaaagggggagggggaaacgaaaagacttttgatagactttacgaagaatccgcttacttcctttccagccagtgttttttggttttgtttataatattcaggcccgcaccccacattccgtcctgttttgagaggaggagggaagagaaataaacgtggcagcgcatagaaggccagcagggaggttgggaaagggtaaccaggaggcgggggtggggcatgcaatttggtaacaatctgggcggcacactcccaccctgactttccccaccaccgccccggcaccctcccatcccccagccgaccctctgtgatttgggagtgctgggaaatgggtgtaccagctgctgttggagaggtggcgggtttggcgctgtctgggcttcacgggaggtgggggggaaggggcggaccctgagagaatctggtattaaaccgccttgttaactcgcagactgctttccagacacctccggcccacacagccgttcaccccccgtcttttcagtcctggaaaaggaattcggtctgtccttaggatgaagctctaactgaactgaagtaaggagaaacagccttgaatctttggagggtctgtcttccttttgggctctgtgcaactgcagctacagtggaaaaaagcaaactgctcttgatcccaggccctgcctaagcctcagcagaacttgtaagcctaaactgaagagcctcacccggacgagcaggcatcccttaaccttaagcaatccagttccacgccctggatcagtgaataaccccagctgcaccatgagccgcgttcgggatgctggctgtgtagcggcggggatagtgataggggctggtgcctggtactgtgtctacaaatacaccagggggagagaccagaccaagaagagaatggccaagcccaaaaaccgggctgtggctgggactggagccagggctagagctgggctaagagccggattcacaatcgaccttgggtcaggattcagtcccccaaccccagtccgtgctgaagcagaggacagggcccaggatgaagcctctgctctggacacagttggagctgaggcagtggccccagctgcatccagcgctgaggctcagagtggggcaggcagtcaggcccaagaggcagatggagccggggttgggcctaaggccgaatcagtagttggggctgcaatggcttctgcaatagcaccacctcccggggtgacagaggcccttggggctgcagaagcccctgcaatggcaggggctcccaaagtggcagaagctcccagagaagcggagacttccagggcagcggtgcctcctgggacagtggtgcctaccgaagcggcagcacccactgaggtgaccgagggtcctggggtagcagcacctaccaaggtagctgaagctcccggggtggcatcgcctaccgaggcagctgaggctcctgtgcccgcaacgcctactggggctgcagcacctactggggctgcagagtctcctggaacttctggttcccctagaacagcggtggttcctggaacatcagctgccaagaaagcaacccctggggctcacactggggctataccgaaagccacatcagcgactggagcggtacccaaaggtggaggcaagggtgtaaccaggtcccggaatgggggcaagggcaagggcaagaaaagcaaagttgaagtagacgaactggggatgggcttccgtcctggagatggggctgcagcagctgctgcagcctctgctaatggcggacaggctttcctggcagaggtccctgattctgaggaaggggagtccgggtggactgacacagagtcagattcagactctgagcccgagacccagcgcagagggaggggaagaagacccgttgccatgcagaagcgcccctttccttatgaaattgatgagattctgggtgtccgcgatctcaggaaggtccttgccttgcttcagaaatctgatgatcctttcatccaacaggtagctttgctcactctgagcaacaatgccaattattcatgcaatcaagagacaatccgcaaattgggaggcctcccaattattgcaaacatgatcaacaaaactgatccacacattaaggaaaaagccttaatggccatgaataacctgagtgagaattatgaaaatcagggccggcttcaggtgtacatgaataaagtgatggatgatatcatggcctctaacctgaactcagcagttcaagtagttggactaaaatttctaacaaacatgactattactaatgactaccagcacctgcttgtcaattccattgcaaactttttccgtttgctatctcagggaggtggaaaaatcaaggttgagattttgaaaatcctttcgaattttgctgaaaatccagatatgttgaagaaacttctcagtacccaagtgccagcatcatttagttccctctataattcttacgtggaatcagaaatccttattaatgcccttactctatttgagattatctatgacaatctcagagcagaagtgtttaactatagagaattcaataaaggttcccttttttacttatgcactacatctggagtgtgtgttaagaaaattagagccttagcaaatcaccatgacctcttagtgaaagtgaaagttataaaactagtgaacaaattctgattggttatgtaccgtcaaaagacttgaagaaatttcatgattttgcagtgtggaagcgttgaaaattgaaagttactgcttttccacttgctcatatagtaaagggatcctttcagctgccagtgttgaataatgtatcatccagagtgatgttatctgtgacagtcaccagctttaagctgaaccattttatgaataccaaataaatagacctcttgtactgaaaacatatttgtgactttaatcgtgctgcttggatagaaatatttttactggttcttctgaattgacagtaaacctgtccattatgaatggcctactgttctattatttgttttgacttgaatttatccaccaaagacttcatttgtgtatcatcaataaagttgtatgtttcaactgacaaaaa

SEQ ID NO: 12493 - protein, 632 aa, Homo sapiens; identical to SEQ ID NO: 2158

SEQ ID NO: 12494 - DNA, 2700 bp, Homo sapiens
cgaggaggaggaggagaaaattcccccagattcgggcaggcccgcaccccacattccgtcctgttttgagaggaggagggaagagaaataaacgtggcagcgcatagaaggccagcagggagactgctttccagacacctccggcccacacagccgttcaccccccgtcttttcagtcctggaaaaggaattcgggtctgtcttccttttgggctctgtgcaactgcagctacagtggaaaaaagcaaactgctcttgatcccaggccctgcctaagcctcagcagaacttgtaagcctaaactgaagagcctcacccggacgagcaggcatcccttaaccttaagcaatccagttccacgccctggatcagtgaataaccccagctgcaccatgagccgcgttcgggatgctggctgtgtagcggcggggatagtgataggggctggtgcctggtactgtgtctacaaatacaccagggggagagaccagaccaagaagagaatggccaagcccaaaaaccgggctgtggctgggactggagccagggctagagctgggctaagagccggattcacaatcgaccttgggtcaggattcagtcccccaaccccagtccgtgctgaagcagaggacagggcccaggatgaagcctctgctctggacacagttggagctgaggcagtggccccagctgcatccagcgctgaggctcagagtggggcaggcagtcaggcccaagaggcagatggagccggggttgggcctaaggccgaatcagtagttggggctgcaatggcttctgcaatagcaccacctcccggggtgacagaggcccttggggctgcagaagcccctgcaatggcaggggctcccaaagtggcagaagctcccagagaagcggagacttccagggcagcggtgcctcctgggacagtggtgcctaccgaagcggcagcacccactgaggtgaccgagggtcctggggtagcagcacctaccaaggtagctgaagctcccggggtggcatcgcctaccgaggcagctgaggctcctgtgcccgcaacgcctactggggctgcagcacctactggggctgcagagtctcctggaacttctggttcccctagaacagcggtggttcctggaacatcagctgccaagaaagcaacccctggggctcacactggggctataccgaaagccacatcagcgactggagcggtacccaaaggtggaggcaagggtgtaaccaggtcccggaatgggggcaagggcaagggcaagaaaagcaaagttgaagtagacgaactggggatgggcttccgtcctggagatggggctgcagcagctgctgcagcctctgctaatggcggacaggctttcctggcagaggtccctgattctgaggaaggggagtccgggtggactgacacagagtcagattcagactctgagcccgagacccagcgcagagggaggggaagaagacccgttgccatgcagaagcgcccctttccttatgaaattgatgagattctgggtgtccgcgatctcaggaaggtccttgccttgcttcagaaatctgatgatcctttcatccaacaggtagctttgctcactctgagcaacaatgccaattattcatgcaatcaagagacaatccgcaaattgggaggcctcccaattattgcaaacatgatcaacaaaactgatccacacattaaggaaaaagccttaatggccatgaataacctgagtgagaattatgaaaatcagggccggcttcaggtgtacatgaataaagtgatggatgatatcatggcctctaacctgaactcagcagttcaagtagttggactaaaatttctaacaaacatgactattactaatgactaccagcacctgcttgtcaattccattgcaaactttttccgtttgctatctcagggaggtggaaaaatcaaggttgagattttgaaaatcctttcgaattttgctgaaaatccagatatgttgaagaaacttctcagtacccaagtgccagcatcatttagttccctctataattcttacgtggaatcagaaatccttattaatgcccttactctatttgagattatctatgacaatctcagagcagaagtgtttaactatagagaattcaataaaggttcccttttttacttatgcactacatctggagtgtgtgttaagaaaattagagccttagcaaatcaccatgacctcttagtgaaagtgaaagttataaaactagtgaacaaattctgattggttatgtaccgtcaaaagacttgaagaaatttcatgattttgcagtgtggaagcgttgaaaattgaaagttactgcttttccacttgctcatatagtaaagggatcctttcagctgccagtgttgaataatgtatcatccagagtgatgttatctgtgacagtcaccagctttaagctgaaccattttatgaataccaaataaatagacctcttgtactgaaaacatatttgtgactttaatcgtgctgcttggatagaaatatttttactggttcttctgaattgacagtaaacctgtccattatgaatggcctactgttctattatttgttttgacttgaatttatccaccaaagacttcatttgtgtatcatcaataaagttgtatgtttcaactgacaaaaa

SEQ ID NO: 12495 - protein, 632 aa, Homo sapiens; identical to SEQ ID NO: 2158

SEQ ID NO: 12496 - DNA, 2919 bp, Homo sapiens
ctattgcgcagctcgctgccgtgcgtttaacccaggcgaggaggaggaggagaaaattcccccagattcgggcaggtgggtgtgagggtgggcacagtctgggacccctgaatagggtaatctagggatgcgggagtcggaggccgcgggtgcctcggtctcccccactcctggccggctttccagacctgaggcccgcaccccacattccgtcctgttttgagaggaggagggaagagaaataaacgtggcagcgcatagaaggccagcagggagactgctttccagacacctccggcccacacagccgttcaccccccgtcttttcagtcctggaaaaggaattcggtctgtccttaggatgaagctctaactgaactgaagtaaggagaaacagccttgaatctttggagggtctgtcttccttttgggctctgtgcaactgcagctacagtggaaaaaagcaaactgctcttgatcccaggccctgcctaagcctcagcagaacttgtaagcctaaactgaagagcctcacccggacgagcaggcatcccttaaccttaagcaatccagttccacgccctggatcagtgaataaccccagctgcaccatgagccgcgttcgggatgctggctgtgtagcggcggggatagtgataggggctggtgcctggtactgtgtctacaaatacaccagggggagagaccagaccaagaagagaatggccaagcccaaaaaccgggctgtggctgggactggagccagggctagagctgggctaagagccggattcacaatcgaccttgggtcaggattcagtcccccaaccccagtccgtgctgaagcagaggacagggcccaggatgaagcctctgctctggacacagttggagctgaggcagtggccccagctgcatccagcgctgaggctcagagtggggcaggcagtcaggcccaagaggcagatggagccggggttgggcctaaggccgaatcagtagttggggctgcaatggcttctgcaatagcaccacctcccggggtgacagaggcccttggggctgcagaagcccctgcaatggcaggggctcccaaagtggcagaagctcccagagaagcggagacttccagggcagcggtgcctcctgggacagtggtgcctaccgaagcggcagcacccactgaggtgaccgagggtcctggggtagcagcacctaccaaggtagctgaagctcccggggtggcatcgcctaccgaggcagctgaggctcctgtgcccgcaacgcctactggggctgcagcacctactggggctgcagagtctcctggaacttctggttcccctagaacagcggtggttcctggaacatcagctgccaagaaagcaacccctggggctcacactggggctataccgaaagccacatcagcgactggagcggtacccaaaggtggaggcaagggtgtaaccaggtcccggaatgggggcaagggcaagggcaagaaaagcaaagttgaagtagacgaactggggatgggcttccgtcctggagatggggctgcagcagctgctgcagcctctgctaatggcggacaggctttcctggcagaggtccctgattctgaggaaggggagtccgggtggactgacacagagtcagattcagactctgagcccgagacccagcgcagagggaggggaagaagacccgttgccatgcagaagcgcccctttccttatgaaattgatgagattctgggtgtccgcgatctcaggaaggtccttgccttgcttcagaaatctgatgatcctttcatccaacaggtagctttgctcactctgagcaacaatgccaattattcatgcaatcaagagacaatccgcaaattgggaggcctcccaattattgcaaacatgatcaacaaaactgatccacacattaaggaaaaagccttaatggccatgaataacctgagtgagaattatgaaaatcagggccggcttcaggtgtacatgaataaagtgatggatgatatcatggcctctaacctgaactcagcagttcaagtagttggactaaaatttctaacaaacatgactattactaatgactaccagcacctgcttgtcaattccattgcaaactttttccgtttgctatctcagggaggtggaaaaatcaaggttgagattttgaaaatcctttcgaattttgctgaaaatccagatatgttgaagaaacttctcagtacccaagtgccagcatcatttagttccctctataattcttacgtggaatcagaaatccttattaatgcccttactctatttgagattatctatgacaatctcagagcagaagtgtttaactatagagaattcaataaaggttcccttttttacttatgcactacatctggagtgtgtgttaagaaaattagagccttagcaaatcaccatgacctcttagtgaaagtgaaagttataaaactagtgaacaaattctgattggttatgtaccgtcaaaagacttgaagaaatttcatgattttgcagtgtggaagcgttgaaaattgaaagttactgcttttccacttgctcatatagtaaagggatcctttcagctgccagtgttgaataatgtatcatccagagtgatgttatctgtgacagtcaccagctttaagctgaaccattttatgaataccaaataaatagacctcttgtactgaaaacatatttgtgactttaatcgtgctgcttggatagaaatatttttactggttcttctgaattgacagtaaacctgtccattatgaatggcctactgttctattatttgttttgacttgaatttatccaccaaagacttcatttgtgtatcatcaataaagttgtatgtttcaactgacaaaaa

SEQ ID NO: 12497 - protein, 31 aa, Homo sapiens
MRESEAAGASVSPTPGRLSRPEARTPHSVLF

SEQ ID NO: 12498 - DNA, 2670 bp, Homo sapiens
tcctctgggtaccaactctattgcgcagctcgctgccgtgcgtttaacccaggcgaggaggaggaggagaaaattcccccagattcgggcagactgctttccagacacctccggcccacacagccgttcaccccccgtcttttcagtcctggaaaaggaattcgggtctgtcttccttttgggctctgtgcaactgcagctacagtggaaaaaagcaaactgctcttgatcccaggccctgcctaagcctcagcagaacttgtaagcctaaactgaagagcctcacccggacgagcaggcatcccttaaccttaagcaatccagttccacgccctggatcagtgaataaccccagctgcaccatgagccgcgttcgggatgctggctgtgtagcggcggggatagtgataggggctggtgcctggtactgtgtctacaaatacaccagggggagagaccagaccaagaagagaatggccaagcccaaaaaccgggctgtggctgggactggagccagggctagagctgggctaagagccggattcacaatcgaccttgggtcaggattcagtcccccaaccccagtccgtgctgaagcagaggacagggcccaggatgaagcctctgctctggacacagttggagctgaggcagtggccccagctgcatccagcgctgaggctcagagtggggcaggcagtcaggcccaagaggcagatggagccggggttgggcctaaggccgaatcagtagttggggctgcaatggcttctgcaatagcaccacctcccggggtgacagaggcccttggggctgcagaagcccctgcaatggcaggggctcccaaagtggcagaagctcccagagaagcggagacttccagggcagcggtgcctcctgggacagtggtgcctaccgaagcggcagcacccactgaggtgaccgagggtcctggggtagcagcacctaccaaggtagctgaagctcccggggtggcatcgcctaccgaggcagctgaggctcctgtgcccgcaacgcctactggggctgcagcacctactggggctgcagagtctcctggaacttctggttcccctagaacagcggtggttcctggaacatcagctgccaagaaagcaacccctggggctcacactggggctataccgaaagccacatcagcgactggagcggtacccaaaggtggaggcaagggtgtaaccaggtcccggaatgggggcaagggcaagggcaagaaaagcaaagttgaagtagacgaactggggatgggcttccgtcctggagatggggctgcagcagctgctgcagcctctgctaatggcggacaggctttcctggcagaggtccctgattctgaggaaggggagtccgggtggactgacacagagtcagattcagactctgagcccgagacccagcgcagagggaggggaagaagacccgttgccatgcagaagcgcccctttccttatgaaattgatgagattctgggtgtccgcgatctcaggaaggtccttgccttgcttcagaaatctgatgatcctttcatccaacaggtagctttgctcactctgagcaacaatgccaattattcatgcaatcaagagacaatccgcaaattgggaggcctcccaattattgcaaacatgatcaacaaaactgatccacacattaaggaaaaagccttaatggccatgaataacctgagtgagaattatgaaaatcagggccggcttcaggtgtacatgaataaagtgatggatgatatcatggcctctaacctgaactcagcagttcaagtagttggactaaaatttctaacaaacatgactattactaatgactaccagcacctgcttgtcaattccattgcaaactttttccgtttgctatctcagggaggtggaaaaatcaaggttgagattttgaaaatcctttcgaattttgctgaaaatccagatatgttgaagaaacttctcagtacccaagtgccagcatcatttagttccctctataattcttacgtggaatcagaaatccttattaatgcccttactctatttgagattatctatgacaatctcagagcagaagtgtttaactatagagaattcaataaaggttcccttttttacttatgcactacatctggagtgtgtgttaagaaaattagagccttagcaaatcaccatgacctcttagtgaaagtgaaagttataaaactagtgaacaaattctgattggttatgtaccgtcaaaagacttgaagaaatttcatgattttgcagtgtggaagcgttgaaaattgaaagttactgcttttccacttgctcatatagtaaagggatcctttcagctgccagtgttgaataatgtatcatccagagtgatgttatctgtgacagtcaccagctttaagctgaaccattttatgaataccaaataaatagacctcttgtactgaaaacatatttgtgactttaatcgtgctgcttggatagaaatatttttactggttcttctgaattgacagtaaacctgtccattatgaatggcctactgttctattatttgttttgacttgaatttatccaccaaagacttcatttgtgtatcatcaataaagttgtatgtttcaactgacaaaaa

SEQ ID NO: 12499 - protein, 632 aa, Homo sapiens; identical to SEQ ID NO: 2158

SEQ ID NO: 12500 - DNA, 2764 bp, Homo sapiens
ctcctctgggtaccaactctattgcgcagctcgctgccgcccgcaccccacattccgtcctgttttgagaggaggagggaagagaaataaacgtggcagcgcatagaaggccagcagggagactgctttccagacacctccggcccacacagccgttcaccccccgtcttttcagtcctggaaaaggaattcggtctgtccttaggatgaagctctaactgaactgaagtaaggagaaacagccttgaatctttggagggtctgtcttccttttgggctctgtgcaactgcagctacagtggaaaaaagcaaactgctcttgatcccaggccctgcctaagcctcagcagaacttgtaagcctaaactgaagagcctcacccggacgagcaggcatcccttaaccttaagcaatccagttccacgccctggatcagtgaataaccccagctgcaccatgagccgcgttcgggatgctggctgtgtagcggcggggatagtgataggggctggtgcctggtactgtgtctacaaatacaccagggggagagaccagaccaagaagagaatggccaagcccaaaaaccgggctgtggctgggactggagccagggctagagctgggctaagagccggattcacaatcgaccttgggtcaggattcagtcccccaaccccagtccgtgctgaagcagaggacagggcccaggatgaagcctctgctctggacacagttggagctgaggcagtggccccagctgcatccagcgctgaggctcagagtggggcaggcagtcaggcccaagaggcagatggagccggggttgggcctaaggccgaatcagtagttggggctgcaatggcttctgcaatagcaccacctcccggggtgacagaggcccttggggctgcagaagcccctgcaatggcaggggctcccaaagtggcagaagctcccagagaagcggagacttccagggcagcggtgcctcctgggacagtggtgcctaccgaagcggcagcacccactgaggtgaccgagggtcctggggtagcagcacctaccaaggtagctgaagctcccggggtggcatcgcctaccgaggcagctgaggctcctgtgcccgcaacgcctactggggctgcagcacctactggggctgcagagtctcctggaacttctggttcccctagaacagcggtggttcctggaacatcagctgccaagaaagcaacccctggggctcacactggggctataccgaaagccacatcagcgactggagcggtacccaaaggtggaggcaagggtgtaaccaggtcccggaatgggggcaagggcaagggcaagaaaagcaaagttgaagtagacgaactggggatgggcttccgtcctggagatggggctgcagcagctgctgcagcctctgctaatggcggacaggctttcctggcagaggtccctgattctgaggaaggggagtccgggtggactgacacagagtcagattcagactctgagcccgagacccagcgcagagggaggggaagaagacccgttgccatgcagaagcgcccctttccttatgaaattgatgagattctgggtgtccgcgatctcaggaaggtccttgccttgcttcagaaatctgatgatcctttcatccaacaggtagctttgctcactctgagcaacaatgccaattattcatgcaatcaagagacaatccgcaaattgggaggcctcccaattattgcaaacatgatcaacaaaactgatccacacattaaggaaaaagccttaatggccatgaataacctgagtgagaattatgaaaatcagggccggcttcaggtgtacatgaataaagtgatggatgatatcatggcctctaacctgaactcagcagttcaagtagttggactaaaatttctaacaaacatgactattactaatgactaccagcacctgcttgtcaattccattgcaaactttttccgtttgctatctcagggaggtggaaaaatcaaggttgagattttgaaaatcctttcgaattttgctgaaaatccagatatgttgaagaaacttctcagtacccaagtgccagcatcatttagttccctctataattcttacgtggaatcagaaatccttattaatgcccttactctatttgagattatctatgacaatctcagagcagaagtgtttaactatagagaattcaataaaggttcccttttttacttatgcactacatctggagtgtgtgttaagaaaattagagccttagcaaatcaccatgacctcttagtgaaagtgaaagttataaaactagtgaacaaattctgattggttatgtaccgtcaaaagacttgaagaaatttcatgattttgcagtgtggaagcgttgaaaattgaaagttactgcttttccacttgctcatatagtaaagggatcctttcagctgccagtgttgaataatgtatcatccagagtgatgttatctgtgacagtcaccagctttaagctgaaccattttatgaataccaaataaatagacctcttgtactgaaaacatatttgtgactttaatcgtgctgcttggatagaaatatttttactggttcttctgaattgacagtaaacctgtccattatgaatggcctactgttctattatttgttttgacttgaatttatccaccaaagacttcatttgtgtatcatcaataaagttgtatgtttcaactgacaaaaa

SEQ ID NO: 12501 - protein, 632 aa, Homo sapiens; identical to SEQ ID NO: 2158

SEQ ID NO: 12502 - DNA, 2648 bp, Homo sapiens
ctcctctgggtaccaactctattgcgcagctcgctgccgtgcgtttaacccaggcgaggaggaggaggagaaaattcccccagattcgggcagactgctttccagacacctccggcccacacagccgttcaccccccgtcttttcagtcctggaaaaggaattcggtctgtccttaggatgaagctctaactgaactgaagtaaggagaaacagccttgaatctttggagggtctgtcttccttttgggctctgtgcaactgcagctacagtggaaaaaagcaaactgctcttgatcccaggccctgcctaagcctcagcagaacttgtaagcctaaactgaagagcctcacccggacgagcaggcatcccttaaccttaagcaatccagttccacgccctggtactgtgtctacaaatacaccagggggagagaccagaccaagaagagaatggccaagcccaaaaaccgggctgtggctgggactggagccagggctagagctgggctaagagccggattcacaatcgaccttgggtcaggattcagtcccccaaccccagtccgtgctgaagcagaggacagggcccaggatgaagcctctgctctggacacagttggagctgaggcagtggccccagctgcatccagcgctgaggctcagagtggggcaggcagtcaggcccaagaggcagatggagccggggttgggcctaaggccgaatcagtagttggggctgcaatggcttctgcaatagcaccacctcccggggtgacagaggcccttggggctgcagaagcccctgcaatggcaggggctcccaaagtggcagaagctcccagagaagcggagacttccagggcagcggtgcctcctgggacagtggtgcctaccgaagcggcagcacccactgaggtgaccgagggtcctggggtagcagcacctaccaaggtagctgaagctcccggggtggcatcgcctaccgaggcagctgaggctcctgtgcccgcaacgcctactggggctgcagcacctactggggctgcagagtctcctggaacttctggttcccctagaacagcggtggttcctggaacatcagctgccaagaaagcaacccctggggctcacactggggctataccgaaagccacatcagcgactggagcggtacccaaaggtggaggcaagggtgtaaccaggtcccggaatgggggcaagggcaagggcaagaaaagcaaagttgaagtagacgaactggggatgggcttccgtcctggagatggggctgcagcagctgctgcagcctctgctaatggcggacaggctttcctggcagaggtccctgattctgaggaaggggagtccgggtggactgacacagagtcagattcagactctgagcccgagacccagcgcagagggaggggaagaagacccgttgccatgcagaagcgcccctttccttatgaaattgatgagattctgggtgtccgcgatctcaggaaggtccttgccttgcttcagaaatctgatgatcctttcatccaacaggtagctttgctcactctgagcaacaatgccaattattcatgcaatcaagagacaatccgcaaattgggaggcctcccaattattgcaaacatgatcaacaaaactgatccacacattaaggaaaaagccttaatggccatgaataacctgagtgagaattatgaaaatcagggccggcttcaggtgtacatgaataaagtgatggatgatatcatggcctctaacctgaactcagcagttcaagtagttggactaaaatttctaacaaacatgactattactaatgactaccagcacctgcttgtcaattccattgcaaactttttccgtttgctatctcagggaggtggaaaaatcaaggttgagattttgaaaatcctttcgaattttgctgaaaatccagatatgttgaagaaacttctcagtacccaagtgccagcatcatttagttccctctataattcttacgtggaatcagaaatccttattaatgcccttactctatttgagattatctatgacaatctcagagcagaagtgtttaactatagagaattcaataaaggttcccttttttacttatgcactacatctggagtgtgtgttaagaaaattagagccttagcaaatcaccatgacctcttagtgaaagtgaaagttataaaactagtgaacaaattctgattggttatgtaccgtcaaaagacttgaagaaatttcatgattttgcagtgtggaagcgttgaaaattgaaagttactgcttttccacttgctcatatagtaaagggatcctttcagctgccagtgttgaataatgtatcatccagagtgatgttatctgtgacagtcaccagctttaagctgaaccattttatgaataccaaataaatagacctcttgtactgaaaacatatttgtgactttaatcgtgctgcttggatagaaatatttttactggttcttctgaattgacagtaaacctgtccattatgaatggcctactgttctattatttgttttgacttgaatttatccaccaaagacttcatttgtgtatcatcaataaagttgtatgtttcaactgacaaaaa

SEQ ID NO: 12503 - protein, 595 aa, Homo sapiens
MAKPKNRAVAGTGARARAGLRAGFTIDLGSGFSPPTPVRAEAEDRAQDEASALDTVGAEAVAPAASSAEAQSGAGSQAQEADGAGVGPKAESVVGAAMASAIAPPPGVTEALGAAEAPAMAGAPKVAEAPREAETSRAAVPPGTVVPTEAAAPTEVTEGPGVAAPTKVAEAPGVASPTEAAEAPVPATPTGAAAPTGAAESPGTSGSPRTAVVPGTSAAKKATPGAHTGAIPKATSATGAVPKGGGKGVTRSRNGGKGKGKKSKVEVDELGMGFRPGDGAAAAAAASANGGQAFLAEVPDSEEGESGWTDTESDSDSEPETQRRGRGRRPVAMQKRPFPYEIDEILGVRDLRKVLALLQKSDDPFIQQVALLTLSNNANYSCNQETIRKLGGLPIIANMINKTDPHIKEKALMAMNNLSENYENQGRLQVYMNKVMDDIMASNLNSAVQVVGLKFLTNMTITNDYQHLLVNSIANFFRLLSQGGGKIKVEILKILSNFAENPDMLKKLLSTQVPASFSSLYNSYVESEILINALTLFEIIYDNLRAEVFNYREFNKGSLFYLCTTSGVCVKKIRALANHHDLLVKVKVIKLVNKF

SEQ ID NO: 12504 - DNA, 2907 bp, Homo sapiens
ctcctctgggtaccaactctattgcgcagctcgctgccgtgcgtttaacccaggcgaggaggaggaggagaaaattcccccagattcgggcaggcccgcaccccacattccgtcctgttttgagaggaggagggaagagaaataaacgtggcagcgcatagaaggccagcagggagactgctttccagacacctccggcccacacagccgttcaccccccgtcttttcagtcctggaaaaggaattcgggcagttactgagacccttgtcctggatgctgatccatccaccaggctttcattgtctaacgtcgacagtctatatttctgctcttcagtctgtccttaggatgaagctctaactgaactgaagtaaggagaaacagccttgaatctttggagggtctgtcttccttttgggctctgtgcaactgcagctacagtggaaaaaagcaaactgctcttgatcccaggccctgcctaagcctcagcagaacttgtaagcctaaactgaagagcctcacccggacgagcaggcatcccttaaccttaagcaatccagttccacgccctggatcagtgaataaccccagctgcaccatgagccgcgttcgggatgctggctgtgtagcggcggggatagtgataggggctggtgcctggtactgtgtctacaaatacaccagggggagagaccagaccaagaagagaatggccaagcccaaaaaccgggctgtggctgggactggagccagggctagagctgggctaagagccggattcacaatcgaccttgggtcaggattcagtcccccaaccccagtccgtgctgaagcagaggacagggcccaggatgaagcctctgctctggacacagttggagctgaggcagtggccccagctgcatccagcgctgaggctcagagtggggcaggcagtcaggcccaagaggcagatggagccggggttgggcctaaggccgaatcagtagttggggctgcaatggcttctgcaatagcaccacctcccggggtgacagaggcccttggggctgcagaagcccctgcaatggcaggggctcccaaagtggcagaagctcccagagaagcggagacttccagggcagcggtgcctcctgggacagtggtgcctaccgaagcggcagcacccactgaggtgaccgagggtcctggggtagcagcacctaccaaggtagctgaagctcccggggtggcatcgcctaccgaggcagctgaggctcctgtgcccgcaacgcctactggggctgcagcacctactggggctgcagagtctcctggaacttctggttcccctagaacagcggtggttcctggaacatcagctgccaagaaagcaacccctggggctcacactggggctataccgaaagccacatcagcgactggagcggtacccaaaggtggaggcaagggtgtaaccaggtcccggaatgggggcaagggcaagggcaagaaaagcaaagttgaagtagacgaactggggatgggcttccgtcctggagatggggctgcagcagctgctgcagcctctgctaatggcggacaggctttcctggcagaggtccctgattctgaggaaggggagtccgggtggactgacacagagtcagattcagactctgagcccgagacccagcgcagagggaggggaagaagacccgttgccatgcagaagcgcccctttccttatgaaattgatgagattctgggtgtccgcgatctcaggaaggtccttgccttgcttcagaaatctgatgatcctttcatccaacaggtagctttgctcactctgagcaacaatgccaattattcatgcaatcaagagacaatccgcaaattgggaggcctcccaattattgcaaacatgatcaacaaaactgatccacacattaaggaaaaagccttaatggccatgaataacctgagtgagaattatgaaaatcagggccggcttcaggtgtacatgaataaagtgatggatgatatcatggcctctaacctgaactcagcagttcaagtagttggactaaaatttctaacaaacatgactattactaatgactaccagcacctgcttgtcaattccattgcaaactttttccgtttgctatctcagggaggtggaaaaatcaaggttgagattttgaaaatcctttcgaattttgctgaaaatccagatatgttgaagaaacttctcagtacccaagtgccagcatcatttagttccctctataattcttacgtggaatcagaaatccttattaatgcccttactctatttgagattatctatgacaatctcagagcagaagtgtttaactatagagaattcaataaaggttcccttttttacttatgcactacatctggagtgtgtgttaagaaaattagagccttagcaaatcaccatgacctcttagtgaaagtgaaagttataaaactagtgaacaaattctgattggttatgtaccgtcaaaagacttgaagaaatttcatgattttgcagtgtggaagcgttgaaaattgaaagttactgcttttccacttgctcatatagtaaagggatcctttcagctgccagtgttgaataatgtatcatccagagtgatgttatctgtgacagtcaccagctttaagctgaaccattttatgaataccaaataaatagacctcttgtactgaaaacatatttgtgactttaatcgtgctgcttggatagaaatatttttactggttcttctgaattgacagtaaacctgtccattatgaatggcctactgttctattatttgttttgacttgaatttatccaccaaagacttcatttgtgtatcatcaataaagttgtatgtttcaactgacaaaaa

SEQ ID NO: 12505 - protein, 632 aa, Homo sapiens; identical to SEQ ID NO: 2158

SEQ ID NO: 12506 - DNA, 2780 bp, Homo sapiens
ctcctctgggtaccaactctattgcgcagctcgctgccgtgcgtttaacccaggcgaggaggaggaggagaaaattcccccagattcgggcagactgctttccagacacctccggcccacacagccgttcaccccccgtcttttcagtcctggaaaaggaattcgggctttcattgtctaacgtcgacagtctatatttctgctcttcagtctgtccttaggatgaagctctaactgaactgaagtaaggagaaacagccttgaatctttggagggtctgtcttccttttgggctctgtgcaactgcagctacagtggaaaaaagcaaactgctcttgatcccaggccctgcctaagcctcagcagaacttgtaagcctaaactgaagagcctcacccggacgagcaggcatcccttaaccttaagcaatccagttccacgccctggatcagtgaataaccccagctgcaccatgagccgcgttcgggatgctggctgtgtagcggcggggatagtgataggggctggtgcctggtactgtgtctacaaatacaccagggggagagaccagaccaagaagagaatggccaagcccaaaaaccgggctgtggctgggactggagccagggctagagctgggctaagagccggattcacaatcgaccttgggtcaggattcagtcccccaaccccagtccgtgctgaagcagaggacagggcccaggatgaagcctctgctctggacacagttggagctgaggcagtggccccagctgcatccagcgctgaggctcagagtggggcaggcagtcaggcccaagaggcagatggagccggggttgggcctaaggccgaatcagtagttggggctgcaatggcttctgcaatagcaccacctcccggggtgacagaggcccttggggctgcagaagcccctgcaatggcaggggctcccaaagtggcagaagctcccagagaagcggagacttccagggcagcggtgcctcctgggacagtggtgcctaccgaagcggcagcacccactgaggtgaccgagggtcctggggtagcagcacctaccaaggtagctgaagctcccggggtggcatcgcctaccgaggcagctgaggctcctgtgcccgcaacgcctactggggctgcagcacctactggggctgcagagtctcctggaacttctggttcccctagaacagcggtggttcctggaacatcagctgccaagaaagcaacccctggggctcacactggggctataccgaaagccacatcagcgactggagcggtacccaaaggtggaggcaagggtgtaaccaggtcccggaatgggggcaagggcaagggcaagaaaagcaaagttgaagtagacgaactggggatgggcttccgtcctggagatggggctgcagcagctgctgcagcctctgctaatggcggacaggctttcctggcagaggtccctgattctgaggaaggggagtccgggtggactgacacagagtcagattcagactctgagcccgagacccagcgcagagggaggggaagaagacccgttgccatgcagaagcgcccctttccttatgaaattgatgagattctgggtgtccgcgatctcaggaaggtccttgccttgcttcagaaatctgatgatcctttcatccaacaggtagctttgctcactctgagcaacaatgccaattattcatgcaatcaagagacaatccgcaaattgggaggcctcccaattattgcaaacatgatcaacaaaactgatccacacattaaggaaaaagccttaatggccatgaataacctgagtgagaattatgaaaatcagggccggcttcaggtgtacatgaataaagtgatggatgatatcatggcctctaacctgaactcagcagttcaagtagttggactaaaatttctaacaaacatgactattactaatgactaccagcacctgcttgtcaattccattgcaaactttttccgtttgctatctcagggaggtggaaaaatcaaggttgagattttgaaaatcctttcgaattttgctgaaaatccagatatgttgaagaaacttctcagtacccaagtgccagcatcatttagttccctctataattcttacgtggaatcagaaatccttattaatgcccttactctatttgagattatctatgacaatctcagagcagaagtgtttaactatagagaattcaataaaggttcccttttttacttatgcactacatctggagtgtgtgttaagaaaattagagccttagcaaatcaccatgacctcttagtgaaagtgaaagttataaaactagtgaacaaattctgattggttatgtaccgtcaaaagacttgaagaaatttcatgattttgcagtgtggaagcgttgaaaattgaaagttactgcttttccacttgctcatatagtaaagggatcctttcagctgccagtgttgaataatgtatcatccagagtgatgttatctgtgacagtcaccagctttaagctgaaccattttatgaataccaaataaatagacctcttgtactgaaaacatatttgtgactttaatcgtgctgcttggatagaaatatttttactggttcttctgaattgacagtaaacctgtccattatgaatggcctactgttctattatttgttttgacttgaatttatccaccaaagacttcatttgtgtatcatcaataaagttgtatgtttcaactgacaaaaa

SEQ ID NO: 12507 - protein, 632 aa, Homo sapiens; identical to SEQ ID NO: 2158

SEQ ID NO: 12508 - DNA, 2736 bp, Homo sapiens
ctcctctgggtaccaactctattgcgcagctcgctgccgtgcgtttaacccaggcgaggaggaggaggagaaaattcccccagattcgggcagactgctttccagacacctccggcccacacagccgttcaccccccgtcttttcagtcctggaaaaggaattcggtctgtccttaggatgaagctctaactgaactgaagtaaggagaaacagccttgaatctttggagggtctgtcttccttttgggctctgtgcaactgcagctacagtggaaaaaagcaaactgctcttgatcccaggccctgcctaagcctcagcagaacttgtaagcctaaactgaagagcctcacccggacgagcaggcatcccttaaccttaagcaatccagttccacgccctggatcagtgaataaccccagctgcaccatgagccgcgttcgggatgctggctgtgtagcggcggggatagtgataggggctggtgcctggtactgtgtctacaaatacaccagggggagagaccagaccaagaagagaatggccaagcccaaaaaccgggctgtggctgggactggagccagggctagagctgggctaagagccggattcacaatcgaccttgggtcaggattcagtcccccaaccccagtccgtgctgaagcagaggacagggcccaggatgaagcctctgctctggacacagttggagctgaggcagtggccccagctgcatccagcgctgaggctcagagtggggcaggcagtcaggcccaagaggcagatggagccggggttgggcctaaggccgaatcagtagttggggctgcaatggcttctgcaatagcaccacctcccggggtgacagaggcccttggggctgcagaagcccctgcaatggcaggggctcccaaagtggcagaagctcccagagaagcggagacttccagggcagcggtgcctcctgggacagtggtgcctaccgaagcggcagcacccactgaggtgaccgagggtcctggggtagcagcacctaccaaggtagctgaagctcccggggtggcatcgcctaccgaggcagctgaggctcctgtgcccgcaacgcctactggggctgcagcacctactggggctgcagagtctcctggaacttctggttcccctagaacagcggtggttcctggaacatcagctgccaagaaagcaacccctggggctcacactggggctataccgaaagccacatcagcgactggagcggtacccaaaggtggaggcaagggtgtaaccaggtcccggaatgggggcaagggcaagggcaagaaaagcaaagttgaagtagacgaactggggatgggcttccgtcctggagatggggctgcagcagctgctgcagcctctgctaatggcggacaggctttcctggcagaggtccctgattctgaggaaggggagtccgggtggactgacacagagtcagattcagactctgagcccgagacccagcgcagagggaggggaagaagacccgttgccatgcagaagcgcccctttccttatgaaattgatgagattctgggtgtccgcgatctcaggaaggtccttgccttgcttcagaaatctgatgatcctttcatccaacaggtagctttgctcactctgagcaacaatgccaattattcatgcaatcaagagacaatccgcaaattgggaggcctcccaattattgcaaacatgatcaacaaaactgatccacacattaaggaaaaagccttaatggccatgaataacctgagtgagaattatgaaaatcagggccggcttcaggtgtacatgaataaagtgatggatgatatcatggcctctaacctgaactcagcagttcaagtagttggactaaaatttctaacaaacatgactattactaatgactaccagcacctgcttgtcaattccattgcaaactttttccgtttgctatctcagggaggtggaaaaatcaaggttgagattttgaaaatcctttcgaattttgctgaaaatccagatatgttgaagaaacttctcagtacccaagtgccagcatcatttagttccctctataattcttacgtggaatcagaaatccttattaatgcccttactctatttgagattatctatgacaatctcagagcagaagtgtttaactatagagaattcaataaaggttcccttttttacttatgcactacatctggagtgtgtgttaagaaaattagagccttagcaaatcaccatgacctcttagtgaaagtgaaagttataaaactagtgaacaaattctgattggttatgtaccgtcaaaagacttgaagaaatttcatgattttgcagtgtggaagcgttgaaaattgaaagttactgcttttccacttgctcatatagtaaagggatcctttcagctgccagtgttgaataatgtatcatccagagtgatgttatctgtgacagtcaccagctttaagctgaaccattttatgaataccaaataaatagacctcttgtactgaaaacatatttgtgactttaatcgtgctgcttggatagaaatatttttactggttcttctgaattgacagtaaacctgtccattatgaatggcctactgttctattatttgttttgacttgaatttatccaccaaagacttcatttgtgtatcatcaataaagttgtatgtttcaactgacaaaaa

SEQ ID NO: 12509 - protein, 632 aa, Homo sapiens; identical to SEQ ID NO: 2158

SEQ ID NO: 12510 - DNA, 2863 bp, Homo sapiens
ctcctctgggtaccaactctattgcgcagctcgctgccgtgcgtttaacccaggcgaggaggaggaggagaaaattcccccagattcgggcaggcccgcaccccacattccgtcctgttttgagaggaggagggaagagaaataaacgtggcagcgcatagaaggccagcagggagactgctttccagacacctccggcccacacagccgttcaccccccgtcttttcagtcctggaaaaggaattcgggctttcattgtctaacgtcgacagtctatatttctgctcttcagtctgtccttaggatgaagctctaactgaactgaagtaaggagaaacagccttgaatctttggagggtctgtcttccttttgggctctgtgcaactgcagctacagtggaaaaaagcaaactgctcttgatcccaggccctgcctaagcctcagcagaacttgtaagcctaaactgaagagcctcacccggacgagcaggcatcccttaaccttaagcaatccagttccacgccctggatcagtgaataaccccagctgcaccatgagccgcgttcgggatgctggctgtgtagcggcggggatagtgataggggctggtgcctggtactgtgtctacaaatacaccagggggagagaccagaccaagaagagaatggccaagcccaaaaaccgggctgtggctgggactggagccagggctagagctgggctaagagccggattcacaatcgaccttgggtcaggattcagtcccccaaccccagtccgtgctgaagcagaggacagggcccaggatgaagcctctgctctggacacagttggagctgaggcagtggccccagctgcatccagcgctgaggctcagagtggggcaggcagtcaggcccaagaggcagatggagccggggttgggcctaaggccgaatcagtagttggggctgcaatggcttctgcaatagcaccacctcccggggtgacagaggcccttggggctgcagaagcccctgcaatggcaggggctcccaaagtggcagaagctcccagagaagcggagacttccagggcagcggtgcctcctgggacagtggtgcctaccgaagcggcagcacccactgaggtgaccgagggtcctggggtagcagcacctaccaaggtagctgaagctcccggggtggcatcgcctaccgaggcagctgaggctcctgtgcccgcaacgcctactggggctgcagcacctactggggctgcagagtctcctggaacttctggttcccctagaacagcggtggttcctggaacatcagctgccaagaaagcaacccctggggctcacactggggctataccgaaagccacatcagcgactggagcggtacccaaaggtggaggcaagggtgtaaccaggtcccggaatgggggcaagggcaagggcaagaaaagcaaagttgaagtagacgaactggggatgggcttccgtcctggagatggggctgcagcagctgctgcagcctctgctaatggcggacaggctttcctggcagaggtccctgattctgaggaaggggagtccgggtggactgacacagagtcagattcagactctgagcccgagacccagcgcagagggaggggaagaagacccgttgccatgcagaagcgcccctttccttatgaaattgatgagattctgggtgtccgcgatctcaggaaggtccttgccttgcttcagaaatctgatgatcctttcatccaacaggtagctttgctcactctgagcaacaatgccaattattcatgcaatcaagagacaatccgcaaattgggaggcctcccaattattgcaaacatgatcaacaaaactgatccacacattaaggaaaaagccttaatggccatgaataacctgagtgagaattatgaaaatcagggccggcttcaggtgtacatgaataaagtgatggatgatatcatggcctctaacctgaactcagcagttcaagtagttggactaaaatttctaacaaacatgactattactaatgactaccagcacctgcttgtcaattccattgcaaactttttccgtttgctatctcagggaggtggaaaaatcaaggttgagattttgaaaatcctttcgaattttgctgaaaatccagatatgttgaagaaacttctcagtacccaagtgccagcatcatttagttccctctataattcttacgtggaatcagaaatccttattaatgcccttactctatttgagattatctatgacaatctcagagcagaagtgtttaactatagagaattcaataaaggttcccttttttacttatgcactacatctggagtgtgtgttaagaaaattagagccttagcaaatcaccatgacctcttagtgaaagtgaaagttataaaactagtgaacaaattctgattggttatgtaccgtcaaaagacttgaagaaatttcatgattttgcagtgtggaagcgttgaaaattgaaagttactgcttttccacttgctcatatagtaaagggatcctttcagctgccagtgttgaataatgtatcatccagagtgatgttatctgtgacagtcaccagctttaagctgaaccattttatgaataccaaataaatagacctcttgtactgaaaacatatttgtgactttaatcgtgctgcttggatagaaatatttttactggttcttctgaattgacagtaaacctgtccattatgaatggcctactgttctattatttgttttgacttgaatttatccaccaaagacttcatttgtgtatcatcaataaagttgtatgtttcaactgacaaaaa

SEQ ID NO: 12511 - protein, 632 aa, Homo sapiens; identical to SEQ ID NO: 2158

SEQ ID NO: 12512 - DNA, 3117 bp, Homo sapiens
cttaaagccctgaccgtcgttctccgtcctcctctgggtaccaactctattgcgcagctcgctgccgtgcgtttaacccaggcgaggaggaggaggagaaaattcccccagattcgggcaggcccgcaccccacattccgtcctgttttgagaggaggagggaagagaaataaacgtggcagcgcatagaaggccagcagggaggttgggaaagggtaaccaggaggcgggggtggggcatgcaatttggtaacaatctgggcggcacactcccaccctgactttccccaccaccgccccggcaccctcccatcccccagccgaccctctgtgatttgggagtgctgggaaatgggtgtaccagctgctgttggagaggtggcgggtttggcgctgtctgggcttcacgggaggtgggggggaaggggcggaccctgagagaatctggtattaaaccgccttgttaactcgcagactgctttccagacacctccggcccacacagccgttcaccccccgtcttttcagtcctggaaaaggaattcggtctgtccttaggatgaagctctaactgaactgaagtaaggagaaacagccttgaatctttggagggtctgtcttccttttgggctctgtgcaactgcagctacagtggaaaaaagcaaactgctcttgatcccaggccctgcctaagcctcagcagaacttgtaagcctaaactgaagagcctcacccggacgagcaggcatcccttaaccttaagcaatccagttccacgccctggatcagtgaataaccccagctgcaccatgagccgcgttcgggatgctggctgtgtagcggcggggatagtgataggggctggtgcctggtactgtgtctacaaatacaccagggggagagaccagaccaagaagagaatggccaagcccaaaaaccgggctgtggctgggactggagccagggctagagctgggctaagagccggattcacaatcgaccttgggtcaggattcagtcccccaaccccagtccgtgctgaagcagaggacagggcccaggatgaagcctctgctctggacacagttggagctgaggcagtggccccagctgcatccagcgctgaggctcagagtggggcaggcagtcaggcccaagaggcagatggagccggggttgggcctaaggccgaatcagtagttggggctgcaatggcttctgcaatagcaccacctcccggggtgacagaggcccttggggctgcagaagcccctgcaatggcaggggctcccaaagtggcagaagctcccagagaagcggagacttccagggcagcggtgcctcctgggacagtggtgcctaccgaagcggcagcacccactgaggtgaccgagggtcctggggtagcagcacctaccaaggtagctgaagctcccggggtggcatcgcctaccgaggcagctgaggctcctgtgcccgcaacgcctactggggctgcagcacctactggggctgcagagtctcctggaacttctggttcccctagaacagcggtggttcctggaacatcagctgccaagaaagcaacccctggggctcacactggggctataccgaaagccacatcagcgactggagcggtacccaaaggtggaggcaagggtgtaaccaggtcccggaatgggggcaagggcaagggcaagaaaagcaaagttgaagtagacgaactggggatgggcttccgtcctggagatggggctgcagcagctgctgcagcctctgctaatggcggacaggctttcctggcagaggtccctgattctgaggaaggggagtccgggtggactgacacagagtcagattcagactctgagcccgagacccagcgcagagggaggggaagaagacccgttgccatgcagaagcgcccctttccttatgaaattgatgagattctgggtgtccgcgatctcaggaaggtccttgccttgcttcagaaatctgatgatcctttcatccaacaggtagctttgctcactctgagcaacaatgccaattattcatgcaatcaagagacaatccgcaaattgggaggcctcccaattattgcaaacatgatcaacaaaactgatccacacattaaggaaaaagccttaatggccatgaataacctgagtgagaattatgaaaatcagggccggcttcaggtgtacatgaataaagtgatggatgatatcatggcctctaacctgaactcagcagttcaagtagttggactaaaatttctaacaaacatgactattactaatgactaccagcacctgcttgtcaattccattgcaaactttttccgtttgctatctcagggaggtggaaaaatcaaggttgagattttgaaaatcctttcgaattttgctgaaaatccagatatgttgaagaaacttctcagtacccaagtgccagcatcatttagttccctctataattcttacgtggaatcagaaatccttattaatgcccttactctatttgagattatctatgacaatctcagagcagaagtgtttaactatagagaattcaataaaggttcccttttttacttatgcactacatctggagtgtgtgttaagaaaattagagccttagcaaatcaccatgacctcttagtgaaagtgaaagttataaaactagtgaacaaattctgattggttatgtaccgtcaaaagacttgaagaaatttcatgattttgcagtgtggaagcgttgaaaattgaaagttactgcttttccacttgctcatatagtaaagggatcctttcagctgccagtgttgaataatgtatcatccagagtgatgttatctgtgacagtcaccagctttaagctgaaccattttatgaataccaaataaatagacctcttgtactgaaaacatatttgtgactttaatcgtgctgcttggatagaaatatttttactggttcttctgaattgacagtaaacctgtccattatgaatggcctactgttctattatttgttttgacttgaatttatccaccaaagacttcatttgtgtatcatcaataaagttgtatgtttcaactgacaaaaa

SEQ ID NO: 12513 - protein, 632 aa, Homo sapiens; identical to SEQ ID NO: 2158

SEQ ID NO: 12514 - DNA, 2860 bp, Homo sapiens
gtgggcaaaggtacttaaagccctgaccgtcgttctccgtcctcctctgggtaccaactctattgcgcagctcgctgccgtgcgtttaacccaggcgaggaggaggaggagaaaattcccccagattcgggcaggcccgcaccccacattccgtcctgttttgagaggaggagggaagagaaataaacgtggcagcgcatagaaggccagcagggagactgctttccagacacctccggcccacacagccgttcaccccccgtcttttcagtcctggaaaaggaattcggtctgtccttaggatgaagctctaactgaactgaagtaaggagaaacagccttgaatctttggagggtctgtcttccttttgggctctgtgcaactgcagctacagtggaaaaaagcaaactgctcttgatcccaggccctgcctaagcctcagcagaacttgtaagcctaaactgaagagcctcacccggacgagcaggcatcccttaaccttaagcaatccagttccacgccctggatcagtgaataaccccagctgcaccatgagccgcgttcgggatgctggctgtgtagcggcggggatagtgataggggctggtgcctggtactgtgtctacaaatacaccagggggagagaccagaccaagaagagaatggccaagcccaaaaaccgggctgtggctgggactggagccagggctagagctgggctaagagccggattcacaatcgaccttgggtcaggattcagtcccccaaccccagtccgtgctgaagcagaggacagggcccaggatgaagcctctgctctggacacagttggagctgaggcagtggccccagctgcatccagcgctgaggctcagagtggggcaggcagtcaggcccaagaggcagatggagccggggttgggcctaaggccgaatcagtagttggggctgcaatggcttctgcaatagcaccacctcccggggtgacagaggcccttggggctgcagaagcccctgcaatggcaggggctcccaaagtggcagaagctcccagagaagcggagacttccagggcagcggtgcctcctgggacagtggtgcctaccgaagcggcagcacccactgaggtgaccgagggtcctggggtagcagcacctaccaaggtagctgaagctcccggggtggcatcgcctaccgaggcagctgaggctcctgtgcccgcaacgcctactggggctgcagcacctactggggctgcagagtctcctggaacttctggttcccctagaacagcggtggttcctggaacatcagctgccaagaaagcaacccctggggctcacactggggctataccgaaagccacatcagcgactggagcggtacccaaaggtggaggcaagggtgtaaccaggtcccggaatgggggcaagggcaagggcaagaaaagcaaagttgaagtagacgaactggggatgggcttccgtcctggagatggggctgcagcagctgctgcagcctctgctaatggcggacaggctttcctggcagaggtccctgattctgaggaaggggagtccgggtggactgacacagagtcagattcagactctgagcccgagacccagcgcagagggaggggaagaagacccgttgccatgcagaagcgcccctttccttatgaaattgatgagattctgggtgtccgcgatctcaggaaggtccttgccttgcttcagaaatctgatgatcctttcatccaacaggtagctttgctcactctgagcaacaatgccaattattcatgcaatcaagagacaatccgcaaattgggaggcctcccaattattgcaaacatgatcaacaaaactgatccacacattaaggaaaaagccttaatggccatgaataacctgagtgagaattatgaaaatcagggccggcttcaggtgtacatgaataaagtgatggatgatatcatggcctctaacctgaactcagcagttcaagtagttggactaaaatttctaacaaacatgactattactaatgactaccagcacctgcttgtcaattccattgcaaactttttccgtttgctatctcagggaggtggaaaaatcaaggttgagattttgaaaatcctttcgaattttgctgaaaatccagatatgttgaagaaacttctcagtacccaagtgccagcatcatttagttccctctataattcttacgtggaatcagaaatccttattaatgcccttactctatttgagattatctatgacaatctcagagcagaagtgtttaactatagagaattcaataaaggttcccttttttacttatgcactacatctggagtgtgtgttaagaaaattagagccttagcaaatcaccatgacctcttagtgaaagtgaaagttataaaactagtgaacaaattctgattggttatgtaccgtcaaaagacttgaagaaatttcatgattttgcagtgtggaagcgttgaaaattgaaagttactgcttttccacttgctcatatagtaaagggatcctttcagctgccagtgttgaataatgtatcatccagagtgatgttatctgtgacagtcaccagctttaagctgaaccattttatgaataccaaataaatagacctcttgtactgaaaacatatttgtgactttaatcgtgctgcttggatagaaatatttttactggttcttctgaattgacagtaaacctgtccattatgaatggcctactgttctattatttgttttgacttgaatttatccaccaaagacttcatttgtgtatcatcaataaagttgtatgtttcaactgacaaaaa

SEQ ID NO: 12515 - protein, 632 aa, Homo sapiens; identical to SEQ ID NO: 2158

SEQ ID NO: 12516 - DNA, 2704 bp, Homo sapiens
ggcgatgcagccctcacgtgaccaggagctgacgtgggcaaaggcccgcaccccacattccgtcctgttttgagaggaggagggaagagaaataaacgtggcagcgcatagaaggccagcagggagactgctttccagacacctccggcccacacagccgttcaccccccgtcttttcagtcctggaaaaggaattcgggtctgtcttccttttgggctctgtgcaactgcagctacagtggaaaaaagcaaactgctcttgatcccaggccctgcctaagcctcagcagaacttgtaagcctaaactgaagagcctcacccggacgagcaggcatcccttaaccttaagcaatccagttccacgccctggatcagtgaataaccccagctgcaccatgagccgcgttcgggatgctggctgtgtagcggcggggatagtgataggggctggtgcctggtactgtgtctacaaatacaccagggggagagaccagaccaagaagagaatggccaagcccaaaaaccgggctgtggctgggactggagccagggctagagctgggctaagagccggattcacaatcgaccttgggtcaggattcagtcccccaaccccagtccgtgctgaagcagaggacagggcccaggatgaagcctctgctctggacacagttggagctgaggcagtggccccagctgcatccagcgctgaggctcagagtggggcaggcagtcaggcccaagaggcagatggagccggggttgggcctaaggccgaatcagtagttggggctgcaatggcttctgcaatagcaccacctcccggggtgacagaggcccttggggctgcagaagcccctgcaatggcaggggctcccaaagtggcagaagctcccagagaagcggagacttccagggcagcggtgcctcctgggacagtggtgcctaccgaagcggcagcacccactgaggtgaccgagggtcctggggtagcagcacctaccaaggtagctgaagctcccggggtggcatcgcctaccgaggcagctgaggctcctgtgcccgcaacgcctactggggctgcagcacctactggggctgcagagtctcctggaacttctggttcccctagaacagcggtggttcctggaacatcagctgccaagaaagcaacccctggggctcacactggggctataccgaaagccacatcagcgactggagcggtacccaaaggtggaggcaagggtgtaaccaggtcccggaatgggggcaagggcaagggcaagaaaagcaaagttgaagtagacgaactggggatgggcttccgtcctggagatggggctgcagcagctgctgcagcctctgctaatggcggacaggctttcctggcagaggtccctgattctgaggaaggggagtccgggtggactgacacagagtcagattcagactctgagcccgagacccagcgcagagggaggggaagaagacccgttgccatgcagaagcgcccctttccttatgaaattgatgagattctgggtgtccgcgatctcaggaaggtccttgccttgcttcagaaatctgatgatcctttcatccaacaggtagctttgctcactctgagcaacaatgccaattattcatgcaatcaagagacaatccgcaaattgggaggcctcccaattattgcaaacatgatcaacaaaactgatccacacattaaggaaaaagccttaatggccatgaataacctgagtgagaattatgaaaatcagggccggcttcaggtgtacatgaataaagtgatggatgatatcatggcctctaacctgaactcagcagttcaagtagttggactaaaatttctaacaaacatgactattactaatgactaccagcacctgcttgtcaattccattgcaaactttttccgtttgctatctcagggaggtggaaaaatcaaggttgagattttgaaaatcctttcgaattttgctgaaaatccagatatgttgaagaaacttctcagtacccaagtgccagcatcatttagttccctctataattcttacgtggaatcagaaatccttattaatgcccttactctatttgagattatctatgacaatctcagagcagaagtgtttaactatagagaattcaataaaggttcccttttttacttatgcactacatctggagtgtgtgttaagaaaattagagccttagcaaatcaccatgacctcttagtgaaagtgaaagttataaaactagtgaacaaattctgattggttatgtaccgtcaaaagacttgaagaaatttcatgattttgcagtgtggaagcgttgaaaattgaaagttactgcttttccacttgctcatatagtaaagggatcctttcagctgccagtgttgaataatgtatcatccagagtgatgttatctgtgacagtcaccagctttaagctgaaccattttatgaataccaaataaatagacctcttgtactgaaaacatatttgtgactttaatcgtgctgcttggatagaaatatttttactggttcttctgaattgacagtaaacctgtccattatgaatggcctactgttctattatttgttttgacttgaatttatccaccaaagacttcatttgtgtatcatcaataaagttgtatgtttcaactgacaaaaa

SEQ ID NO: 12517 - protein, 632 aa, Homo sapiens; identical to SEQ ID NO: 2158

SEQ ID NO: 12518 - DNA, 2769 bp, Homo sapiens
ggcgatgcagccctcacgtgaccaggagctgacgtgggcaaaggcccgcaccccacattccgtcctgttttgagaggaggagggaagagaaataaacgtggcagcgcatagaaggccagcagggagactgctttccagacacctccggcccacacagccgttcaccccccgtcttttcagtcctggaaaaggaattcggtctgtccttaggatgaagctctaactgaactgaagtaaggagaaacagccttgaatctttggagggtctgtcttccttttgggctctgtgcaactgcagctacagtggaaaaaagcaaactgctcttgatcccaggccctgcctaagcctcagcagaacttgtaagcctaaactgaagagcctcacccggacgagcaggcatcccttaaccttaagcaatccagttccacgccctggatcagtgaataaccccagctgcaccatgagccgcgttcgggatgctggctgtgtagcggcggggatagtgataggggctggtgcctggtactgtgtctacaaatacaccagggggagagaccagaccaagaagagaatggccaagcccaaaaaccgggctgtggctgggactggagccagggctagagctgggctaagagccggattcacaatcgaccttgggtcaggattcagtcccccaaccccagtccgtgctgaagcagaggacagggcccaggatgaagcctctgctctggacacagttggagctgaggcagtggccccagctgcatccagcgctgaggctcagagtggggcaggcagtcaggcccaagaggcagatggagccggggttgggcctaaggccgaatcagtagttggggctgcaatggcttctgcaatagcaccacctcccggggtgacagaggcccttggggctgcagaagcccctgcaatggcaggggctcccaaagtggcagaagctcccagagaagcggagacttccagggcagcggtgcctcctgggacagtggtgcctaccgaagcggcagcacccactgaggtgaccgagggtcctggggtagcagcacctaccaaggtagctgaagctcccggggtggcatcgcctaccgaggcagctgaggctcctgtgcccgcaacgcctactggggctgcagcacctactggggctgcagagtctcctggaacttctggttcccctagaacagcggtggttcctggaacatcagctgccaagaaagcaacccctggggctcacactggggctataccgaaagccacatcagcgactggagcggtacccaaaggtggaggcaagggtgtaaccaggtcccggaatgggggcaagggcaagggcaagaaaagcaaagttgaagtagacgaactggggatgggcttccgtcctggagatggggctgcagcagctgctgcagcctctgctaatggcggacaggctttcctggcagaggtccctgattctgaggaaggggagtccgggtggactgacacagagtcagattcagactctgagcccgagacccagcgcagagggaggggaagaagacccgttgccatgcagaagcgcccctttccttatgaaattgatgagattctgggtgtccgcgatctcaggaaggtccttgccttgcttcagaaatctgatgatcctttcatccaacaggtagctttgctcactctgagcaacaatgccaattattcatgcaatcaagagacaatccgcaaattgggaggcctcccaattattgcaaacatgatcaacaaaactgatccacacattaaggaaaaagccttaatggccatgaataacctgagtgagaattatgaaaatcagggccggcttcaggtgtacatgaataaagtgatggatgatatcatggcctctaacctgaactcagcagttcaagtagttggactaaaatttctaacaaacatgactattactaatgactaccagcacctgcttgtcaattccattgcaaactttttccgtttgctatctcagggaggtggaaaaatcaaggttgagattttgaaaatcctttcgaattttgctgaaaatccagatatgttgaagaaacttctcagtacccaagtgccagcatcatttagttccctctataattcttacgtggaatcagaaatccttattaatgcccttactctatttgagattatctatgacaatctcagagcagaagtgtttaactatagagaattcaataaaggttcccttttttacttatgcactacatctggagtgtgtgttaagaaaattagagccttagcaaatcaccatgacctcttagtgaaagtgaaagttataaaactagtgaacaaattctgattggttatgtaccgtcaaaagacttgaagaaatttcatgattttgcagtgtggaagcgttgaaaattgaaagttactgcttttccacttgctcatatagtaaagggatcctttcagctgccagtgttgaataatgtatcatccagagtgatgttatctgtgacagtcaccagctttaagctgaaccattttatgaataccaaataaatagacctcttgtactgaaaacatatttgtgactttaatcgtgctgcttggatagaaatatttttactggttcttctgaattgacagtaaacctgtccattatgaatggcctactgttctattatttgttttgacttgaatttatccaccaaagacttcatttgtgtatcatcaataaagttgtatgtttcaactgacaaaaa

SEQ ID NO: 12519 - protein, 632 aa, Homo sapiens; identical to SEQ ID NO: 2158

SEQ ID NO: 12520 - DNA, 304 bp, Homo sapiens
cagggcttagtctaaatattaccctctcagagagtgctttgctgaccatctaacctaaagtagcccaaagttacttctagctcttactctgtttcatattctgcatagtactttttgttttttattttgaagtttttgtttcactttatccctaccccagaagctatacaatgacatacagcaagggtcctgagccctttccacttgtgaagagataatgattccagcttccaagagatgttgtagtgatttagaggtacccataaaacctcagcatcaaatccaataaaaaatgctgagcgct

SEQ ID NO: 12521 - DNA, 1606 bp, Homo sapiens
ggactattgattcatggcttatttggaatttgacaggaggagtcaatggaggtgtccactgtacagatgtaacaaatgcaagtaggactatgcttttcaacattcattctttggaatgggataaacaactctgcgaattttttggaattccaatggaaattcttccaaatgtccggagttcttctgagatctatggcctaatgaaagctggggccttggaaggtgtgccaatatctgggtgtttaggggaccagtctgctgcattggtgggacaaatgtgcttccagattggacaagccaaaaatacgtatggaacaggatgtttcttactgtgtaatacaggccataagtgtgtattttctgatcatggccttctcaccacagtggcttacaaacttggcagagacaaaccagtatattatgctttggaaggttctgtagctatagctggtgctgttattcgctggctaagagacaatcttggaattataaagacctcagaagaaattgaaaaacttgctaaagaagtaggtacttcttatggctgctacttcgtcccagcattttcggggttatatgcaccttattgggagcccagcacaagagggataatctgtggactcactcagttcaccaataaatgccatattgcttttgctgcattagaagctgtttgtttccaaactcgagagattttggatgccatgaatcgagactgtggaattccactcagtcatttgcaggtagatggaggaatgaccagcaacaaaattcttatgcagctacaagcagacattctgtatataccagtagtgaagccctcaatgcccgaaaccactgcactgggtgctgctatggaggcaggggctgcagaaggagtcggcgtatggagtctcgaacccgaggatttgtctgccgtcacgatggagcggtttgaacctcagattaatgctgaggaaagtgaaattcgttattctacatggaagaaagctgtgatgaagtcaatgggttgggttacaactcaatctccagaaagtggtattccataaaacctaccaaatcatggattcccaagatgtgagctttttacataatgaaagaacccagcaattctgtctcttaatgcaatgacactattcatagactttgattttatttataagccacttgctgcatgaccctccaagtagacctgtggcttaaaataaagaaaatgcagcaaaaagaatgctatagaaatatttggtgtttttttttttttaaacatccacagttaaggttgggccagctacctttggggctgaccccctccattgccataacatcctgctccattccctctaagatgtaggaagaattcggatccttaccattggaatcttccatcgaacatactcaaacactattggaccaggatttgagtctctgcatgacatatacttgattaaaaggttattactaacctgttaaaaatcagcagctctttgcttttaacagacaccctaaaagtcttcttttctacatagttgaagacagcaacatcttcactgaatgtttgaatagaaacctctactaaattattaaaatagacatttagtgttctcac

SEQ ID NO: 12522 - protein, 319 aa, Homo sapiens
MLFNIHSLEWDKQLCEFFGIPMEILPNVRSSSEIYGLMKAGALEGVPISGCLGDQSAALVGQMCFQIGQAKNTYGTGCFLLCNTGHKCVFSDHGLLTTVAYKLGRDKPVYYALEGSVAIAGAVIRWLRDNLGIIKTSEEIEKLAKEVGTSYGCYFVPAFSGLYAPYWEPSTRGIICGLTQFTNKCHIAFAALEAVCFQTREILDAMNRDCGIPLSHLQVDGGMTSNKILMQLQADILYIPVVKPSMPETTALGAAMEAGAAEGVGVWSLEPEDLSAVTMERFEPQINAEESEIRYSTWKKAVMKSMGWVTTQSPESGIP

SEQ ID NO: 12523 - DNA, 2148 bp, Homo sapiens
agctggtttcgtggcagcctcaaagaaggcagttttggggccattggtgggggcggtggaccagggcaccagttcgacgagctttttggttttcaattcaaaaacagctgaactacttagtcatcatcaagtagaaataaaacaagagtccccaagagaaggatgggtggaacaggaccctaaggaaattctacattctgtctatgagtgtatagagaaaacatgtgagaaacttggacagctcaatattgatatttccaacataaaagctattggtgtcagcaaccagagggaaaccactgtagtctgggacaagataactggagagcctctctacaatgctgtggttccaagacaggccttccacttagcacttacttcagtgcagtgaaacttcgttggctccttgacaatgtgagaaaagttcaaaaggccgttgaagaaaaatgagctctttttgggactattgattcatggcttatttggaatttgacaggaggagtcaatggaggtgtccactgtacagatgtaacaaatgcaagtaggactatgcttttcaacattcattctttggaatgggataaacaactctgcgaattttttggaattccaatggaaattcttccaaatgtccggagttcttctgagatctatggcctaatgaaagctggggccttggaaggtgtgccaatatctgggtgtttaggggaccagtctgctgcattggtgggacaaatgtgcttccagattggacaagccaaaaatacgtatggaacaggatgtttcttactgtgtaatacaggccataagtgtgtattttctgatcatggccttctcaccacagtggcttacaaacttggcagagacaaaccagtatattatgctttggaaggttctgtagctatagctggtgctgttattcgctggctaagagacaatcttggaattataaagacctcagaagaaattgaaaaacttgctaaagaagtaggtacttcttatggctgctacttcgtcccagcattttcggggttatatgcaccttattgggagcccagcacaagagggataatctgtggactcactcagttcaccaataaatgccatattgcttttgctgcattagaagctgtttgtttccaaactcgagagattttggatgccatgaatcgagactgtggaattccactcagtcatttgcaggtagatggaggaatgaccagcaacaaaattcttatgcagctacaagcagacattctgtatataccagtagtgaagccctcaatgcccgaaaccactgcactgggtgctgctatggaggcaggggctgcagaaggagtcggcgtatggagtctcgaacccgaggatttgtctgccgtcacgatggagcggtttgaacctcagattaatgctgaggaaagtgaaattcgttattctacatggaagaaagctgtgatgaagtcaatgggttgggttacaactcaatctccagaaagtggtgaccctagtatcttctgtagtctgcccttgggcttttttatagtgagtagcatggtaatgttaatcggagcaaggtacatctcaggtattccataaaacctaccaaatcatggattcccaagatgtgagctttttacataatgaaagaacccagcaattctgtctcttaatgcaatgacactattcatagactttgattttatttataagccacttgctgcatgaccctccaagtagacctgtggcttaaaataaagaaaatgcagcaaaaagaatgctatagaaatatttggtgtttttttttttttaaacatccacagttaaggttgggccagctacctttggggctgaccccctccattgccataacatcctgctccattccctctaagatgtaggaagaattcggatccttaccattggaatcttccatcgaacatactcaaacactattggaccaggatttgagtctctgcatgacatatacttgattaaaaggttattactaacctgttaaaaatcagcagctctttgcttttaacagacaccctaaaagtcttcttttctacatagttgaagacagcaacatcttcactgaatgtttgaatagaaacctctactaaattattaaaatagacatttagtgtt

SEQ ID NO: 12524 - protein, 348 aa, Homo sapiens [sequence omitted]

SEQ ID NO: 12525 - DNA, 2066 bp, Homo sapiens
cgcaatcgccggccgacctgaagctggtttcgtggcagcctcaaagaaggcagttttggggccattggtgggggcggtggaccagggcaccagttcgacgagctttttggttttcaattcaaaaacagctgaactacttagtcatcatcaagtagaaataaaacaagagtccccaagagaaggatggctattggtgtcagcaaccagagggaaaccactgtagtctgggacaagataactggagagcctctctacaatgctgtggttccaagacaggccttccacttagcacttacttcagtgcagtgaaacttcgttggctccttgacaatgtgagaaaagttcaaaaggccgttgaagaaaaatgagctctttttgggactattgattcatggcttatttggaatttgacaggaggagtcaatggaggtgtccactgtacagatgtaacaaatgcaagtaggactatgcttttcaacattcattctttggaatgggataaacaactctgcgaattttttggaattccaatggaaattcttccaaatgtccggagttcttctgagatctatggcctaatgaaagctggggccttggaaggtgtgccaatatctgggtgtttaggggaccagtctgctgcattggtgggacaaatgtgcttccagattggacaagccaaaaatacgtatggaacaggatgtttcttactgtgtaatacaggccataagtgtgtattttctgatcatggccttctcaccacagtggcttacaaacttggcagagacaaaccagtatattatgctttggaaggttctgtagctatagctggtgctgttattcgctggctaagagacaatcttggaattataaagacctcagaagaaattgaaaaacttgctaaagaagtaggtacttcttatggctgctacttcgtcccagcattttcggggttatatgcaccttattgggagcccagcacaagagggataatctgtggactcactcagttcaccaataaatgccatattgcttttgctgcattagaagctgtttgtttccaaactcgagagattttggatgccatgaatcgagactgtggaattccactcagtcatttgcaggtagatggaggaatgaccagcaacaaaattcttatgcagctacaagcagacattctgtatataccagtagtgaagccctcaatgcccgaaaccactgcactgggtgctgctatggaggcaggggctgcagaaggagtcggcgtatggagtctcgaacccgaggatttgtctgccgtcacgatggagcggtttgaacctcagattaatgctgaggaaagtgaaattcgttattctacatggaagaaagctgtgatgaagtcaatgggttgggttacaactcaatctccagaaagtggtgaccctagtatcttctgtagtctgcccttgggcttttttatagtgagtagcatggtaatgttaatcggagcaaggtacatctcaggtattccataaaacctaccaaatcatggattcccaagatgtgagctttttacataatgaaagaacccagcaattctgtctcttaatgcaatgacactattcatagactttgattttatttataagccacttgctgcatgaccctccaagtagacctgtggcttaaaataaagaaaatgcagcaaaaagaatgctatagaaatatttggtgtttttttttttttaaacatccacagttaaggttgggccagctacctttggggctgaccccctccattgccataacatcctgctccattccctctaagatgtaggaagaattcggatccttaccattggaatcttccatcgaacatactcaaacactattggaccaggatttgagtctctgcatgacatatacttgattaaaaggttattactaacctgttaaaaatcagcagctctttgcttttaacagacaccctaaaagtcttcttttctacatagttgaagacagcaacatcttcactgaatgtttgaatagaaacctctactaaattattaaaatagacatttagtgtt

SEQ ID NO: 12526 - protein, 41 aa, Homo sapiens
MAIGVSNQRETTVVWDKITGEPLYNAVVPRQAFHLALTSVQ

SEQ ID NO: 12527 - DNA, 2146 bp, Homo sapiens
gttcagcggacgcgcgcggcctcgatctctggactcgtcacctgcccctccccctcccgccgccgtcacccaggaaaccggccgcaatcgccggccgacctgaagctggtttcgtggcagcctcaaagaaggcagttttggggccattggtgggggcggtggaccagggcaccagttcgacgagctttttgctattggtgtcagcaaccagagggaaaccactgtagtctgggacaagataactggagagcctctctacaatgctgtggtgtggcttgatctaagaacccagtctaccgttgagagtcttagtaaaagaattccaggaaataataactttgtcaagtccaagacaggccttccacttagcacttacttcagtgcagtgaaacttcgttggctccttgacaatgtgagaaaagttcaaaaggccgttgaagaaaaatgagctctttttgggactattgattcatggcttatttggaatttgacaggaggagtcaatggaggtgtccactgtacagatgtaacaaatgcaagtaggactatgcttttcaacattcattctttggaatgggataaacaactctgcgaattttttggaattccaatggaaattcttccaaatgtccggagttcttctgagatctatggcctaatgaaagctggggccttggaaggtgtgccaatatctgggtgtttaggggaccagtctgctgcattggtgggacaaatgtgcttccagattggacaagccaaaaatacgtatggaacaggatgtttcttactgtgtaatacaggccataagtgtgtattttctgatcatggccttctcaccacagtggcttacaaacttggcagagacaaaccagtatattatgctttggaaggttctgtagctatagctggtgctgttattcgctggctaagagacaatcttggaattataaagacctcagaagaaattgaaaaacttgctaaagaagtaggtacttcttatggctgctacttcgtcccagcattttcggggttatatgcaccttattgggagcccagcacaagagggataatctgtggactcactcagttcaccaataaatgccatattgcttttgctgcattagaagctgtttgtttccaaactcgagagattttggatgccatgaatcgagactgtggaattccactcagtcatttgcaggtagatggaggaatgaccagcaacaaaattcttatgcagctacaagcagacattctgtatataccagtagtgaagccctcaatgcccgaaaccactgcactgggtgctgctatggaggcaggggctgcagaaggagtcggcgtatggagtctcgaacccgaggatttgtctgccgtcacgatggagcggtttgaacctcagattaatgctgaggaaagtgaaattcgttattctacatggaagaaagctgtgatgaagtcaatgggttgggttacaactcaatctccagaaagtggtgaccctagtatcttctgtagtctgcccttgggcttttttatagtgagtagcatggtaatgttaatcggagcaaggtacatctcaggtattccataaaacctaccaaatcatggattcccaagatgtgagctttttacataatgaaagaacccagcaattctgtctcttaatgcaatgacactattcatagactttgattttatttataagccacttgctgcatgaccctccaagtagacctgtggcttaaaataaagaaaatgcagcaaaaagaatgctatagaaatatttggtgtttttttttttttaaacatccacagttaaggttgggccagctacctttggggctgaccccctccattgccataacatcctgctccattccctctaagatgtaggaagaattcggatccttaccattggaatcttccatcgaacatactcaaacactattggaccaggatttgagtctctgcatgacatatacttgattaaaaggttattactaacctgttaaaaatcagcagctctttgcttttaacagacaccctaaaagtcttcttttctacatagttgaagacagcaacatcttcactgaatgtttgaatagaaacctctactaaattattaaaatagacatttagtgtt

SEQ ID NO: 12528 - protein, 348 aa, Homo sapiens [sequence omitted]

SEQ ID NO: 12529 - DNA, 1240 bp, Homo sapiens
ggactattgattcatggcttatttggaatttgacaggaggagtcaatggaggtgtccactgtacagatgtaacaaatgcaagtaggactatgcttttcaacattcattctttggaatgggataaacaactctgcgaattttttggaattccaatggaaattcttccaaatgtccggagttcttctgagatctatggcctaatgaaagctggggccttggaaggtgtgccaatatctgggtgtttaggggaccagtctgctgcattggtgggacaaatgtgcttccagattggacaagccaaaaatacgtatggaacaggatgtttcttactgtgtaatacaggccataagtgtgtattttctgatcatggccttctcaccacagtggcttacaaacttggcagagacaaaccagtatattatgctttggaaggttctgtagctatagctggtgctgttattcgctggctaagagacaatcttggaattataaagacctcagaagaaattgaaaaacttgctaaagaagtaggtacttcttatggctgctacttcgtcccagcattttcggggttatatgcaccttattgggagcccagcacaagagggataatctgtggactcactcagttcaccaataaatgccatattgcttttgctgcattagaagctgtttgtttccaaactcgagagattttggatgccatgaatcgagactgtggaattccactcagtcatttgcaggtagatggaggaatgaccagcaacaaaattcttatgcagctacaagcagacattctgtatataccagtagtgaagccctcaatgcccgaaaccactgcactgggtgctgctatggaggcaggggctgcagaaggagtcggcgtatggagtctcgaacccgaggatttgtctgccgtcacgatggagcggtttgaacctcagattaatgctgaggaaagtgaaattcgttattctacatggaagaaagctgtgatgaagtcaatgggttgggttacaactcaatctccagaaagtggtattccataaaacctaccaaatcatggattcccaagatgtgagctttttacataatgaaagaacccagcaattctgtctcttaatgcaatgacactattcatagactttgattttatttataagccacttgctgcatgaccctccaagtagacctgtggcttaaaataaagaaaatgcagcaaaaagaatgctatagaaat

SEQ ID NO: 12530 - protein, 319 aa, Homo sapiens; identical to SEQ ID NO: 12522

SEQ ID NO: 12531 - DNA, 1967 bp, Homo sapiens
tccaggtttgttctggaaaacactaggtctgagagacagcaacaacaaaagtatactctaccattaaagaaataatgccgtatatgtagtagcacttttcaaagaaggaagaaaggtgggagtcatttccagggtaattttgacaagaggaactgtcattatgaacatggtgggtatgaacttctgccttcacgctgccaggagaatgatggaagcatggagatgagggatgtccacaaggaccgccaactaagacacactccttatagaatccaatgcaacaggaagctagtgaaatgacatagtgaagatcaaatccatattaccatttggagaaatagaaaacctccagagagaaaaatgaggcggaacacacaagatgaaaacatgaggaaatggttcaaggtcacaatatgtatatttgtcagtcattttactgcgccctactctgtgaagaataagttgaagccaggccaaatggagatgctaaagctgaccatgaacaaacggtacaatgtctcccagcaagctcttgatctccagaatctccgctttgacccagacttgatgggccgtgacattgatataatcctgaatcgaagaaactgcatggctgccaccctgaagatcactgaaagaaatttccctgagctgttgtctttgaacttgtgcaacaacaaactgtaccagctggatggcctttctgacattacagagaaggctcccaaagtcaagaccctgaatctctccaaaaataagctggagtcggcgtgggagttgggcaaggtgaaagggctgaagctcgaagagctatggctagaagggaacccgttgtgcagcaccttctcggaccagtctgcctatgtaagtgccatccgggattgtttccccaagttgttacgcctggacggccgagagttatccgcaccagtgattgttgacattgacagctctgagacaatgaaaccctgcaaggaaaactttactggatctgagaccctaaagcatttagtcctgcaattcctgcagcagagcaacttgtgcaagtacttcaaggatagcaggaatataaaaattctcaaagacccctacctgcagaggaagctgctaaagcacacaaaatgtccacgaaacgtggactccctcagtgcattgcctgaaactcagcatgacttcacctccatcctggtggacatgtggtaccagaccgtgaacacctgcttcctccctcgggcaggcccagagagccagaggtgggtaggaggttaaggaggatcctgagcacctgagcgcttccttttcaggaaaggatgctctgcttttctgtcaacggagtgttcaaggaaggtggtggtgtttgttgtctctgaagtggaaggatggtctcagggttctgatcttgccttcatgtggaccttcatcactacctctggccgcaattccagtctgtgcatcatgaatgataagctgtttctgagggatgccagcccccaagagactcagagtgccttctccatcccagtgtccacactctcctccagctctgagccctccctctcctaggagcacaggaaatggtgcaggctttctctgcccagtctgggatgaaactagagtggtctcagaagtgccttcaggacaataagtggaactacattagagctggtcaggtcttcactatgctccagactgagggcaagatcccagtggaggccttcaagcaaatcccctaaaaggagccctttgatgtcatctttgtcttccttctcatcctctttgtttcctcttttcaccagcctaagaccactctaaggactggggttggaggcctggctgaccaagaagccaaagttaacttgcaggccacaggacatagccacctgaagagccagttgttctgtgtatttgccccactcatgatcaccgtttattttcataataaacagtgacgttacatgttgtatgtt

SEQ ID NO: 12532 - protein, 302 aa, Homo sapiens
MRRNTQDENMRKWFKVTICIFVSHFTAPYSVKNKLKPGQMEMLKLTMNKRYNVSQQALDLQNLRFDPDLMGRDIDIILNRRNCMAATLKITERNFPELLSLNLCNNKLYQLDGLSDITEKAPKVKTLNLSKNKLESAWELGKVKGLKLEELWLEGNPLCSTFSDQSAYVSAIRDCFPKLLRLDGRELSAPVIVDIDSSETMKPCKENFTGSETLKHLVLQFLQQSNLCKYFKDSRNIKILKDPYLQRKLLKHTKCPRNVDSLSALPETQHDFTSILVDMWYQTVNTCFLPRAGPESQRWVGG

SEQ ID NO: 12533 - DNA, 2037 bp, Homo sapiens
tccaggtttgttctggaaaacactaggtctgagagacagcaacaacaaaagtatactctaccattaaagaaataatgccgtatatgtagtagcacttttcaaagaaggaagaaaggtgggagtcatttccagggtaattttgacaagaggaactgtcattatgaacatggtgggtatgaacttctgccttcacgctgccaggagaatgatggaagcatggagatgagggatgtccacaaggaccgccaactaagacacactccttatagaatccaatgcaacaggaagctagtgaaatgacatagtgaagatcaaatccatattaccatttggagaaatagaaaacctccagagagaaaaatgaggcggaacacacaagatgaaaacatgaggaaatggttcaaggtcacaattccttatgggataaagtatgacaaggcatggctaatgaattcaatccagagcaattgcagtgtccccttcactccggttgatttccactacatccgaaatcgggcatgcttctttgtccaggttgctagtgctgcctctgcattgaaggatgtcagttataagatttatgatgatgagaaccaaaagatatgtatatttgtcagtcattttactgcgccctactctgtgaagaataagttgaagccaggccaaatggagatgctaaagctgaccatgaacaaacggtacaatgtctcccagcaagctcttgatctccagaatctccgctttgacccagacttgatgggccgtgacattgatataatcctgaatcgaagaaactgcatggctgccaccctgaagatcactgaaagaaatttccctgagctgttgtctttgaacttgtgcaacaacaaactgtaccagctggatggcctttctgacattacagagaaggctcccaaagtcaagaccctgaatctctccaaaaataagctggagtcggcgtgggagttgggcaaggtgaaagggctgaagctcgaagagctatggctagaagggaacccgttgtgcagcaccttctcggaccagtctgcctatgtaagtgccatccgggattgtttccccaagttgttacgcctggacggccgagagttatccgcaccagtgattgttgacattgacagctctgagacaatgaaaccctgcaaggaaaactttactggatctgagaccctaaagcatttagtcctgcaattcctgcagcagagcaacttgtgcaagtacttcaaggatagcaggaatataaaaattctcaaagacccctacctgcagaggaagctgctaaagcacacaaaatgtccacgaaacgtggactccctcagtgcattgcctgaaactcagcatgacttcacctccatcctggtggacatgtggtaccagaccgtgaacacctgcttcctccctcgggcaggcccagagagccagagtggaaggatggtctcagggttctgatcttgccttcatgtggaccttcatcactacctctggccgcaattccagtctgtgcatcatgaatgataagctgtttctgagggatgccagcccccaagagactcagagtgccttctccatcccagtgtccacactctcctccagctctgagccctccctctcctaggagcacaggaaatggtgcaggctttctctgcccagtctgggatgaaactagagtggtctcagaagtgccttcaggacaataagtggaactacattagagctggtcaggtcttcactatgctccagactgagggcaagatcccagtggaggccttcaagcaaatcccctaaaaggagccctttgatgtcatctttgtcttccttctcatcctctttgtttcctcttttcaccagcctaagaccactctaaggactggggttggaggcctggctgaccaagaagccaaagttaacttgcaggccacaggacatagccacctgaagagccagttgttctgtgtatttgccccactcatgatcaccgtttattttcataataaacagtgacgttacatgttgtatgtt

SEQ ID NO: 12534 - protein, 368 aa, Homo sapiens
MRRNTQDENMRKWFKVTIPYGIKYDKAWLMNSIQSNCSVPFTPVDFHYIRNRACFFVQVASAASALKDVSYKIYDDENQKICIFVSHFTAPYSVKNKLKPGQMEMLKLTMNKRYNVSQQALDLQNLRFDPDLMGRDIDIILNRRNCMAATLKITERNFPELLSLNLCNNKLYQLDGLSDITEKAPKVKTLNLSKNKLESAWELGKVKGLKLEELWLEGNPLCSTFSDQSAYVSAIRDCFPKLLRLDGRELSAPVIVDIDSSETMKPCKENFTGSETLKHLVLQFLQQSNLCKYFKDSRNIKILKDPYLQRKLLKHTKCPRNVDSLSALPETQHDFTSILVDMWYQTVNTCFLPRAGPESQSGRMVSGF

SEQ ID NO: 12535 - DNA, 1848 bp, Homo sapiens
tccaggtttgttctggaaaacactaggtctgagagacagcaacaacaaaagtatactctaccattaaagaaataatgccgtatatgtagtagcacttttcaaagaaggaagaaaggtgggagtcatttccagggtaattttgacaagaggaactgtcattatgaacatggtgggtatgaacttctgccttcacgctgccaggagaatgatggaagcatggagatgagggatgtccacaaggaccgccaactaagacacactccttatagaatccaatgcaacaggaagctagtgaaatgacatagtgaagatcaaatccatattaccatttggagaaatagaaaacctccagagagaaaaatgaggcggaacacacaagatgaaaacatgaggaaatggttcaaggtcacaatatgtatatttgtcagtcattttactgcgccctactctgtgaagaataagttgaagccaggccaaatggagatgctaaagctgaccatgaacaaacggtacaatgtctcccagcaagctcttgatctccagaatctccgctttgacccagacttgatgggccgtgacattgatataatcctgaatcgaagaaactgcatggctgccaccctgaagatcactgaaagaaatttccctgagctgttgtctttgaacttgtgcaacaacaaactgtaccagctggatggcctttctgacattacagagaaggctcccaaagtcaagaccctgaatctctccaaaaataagctggagtcggcgtgggagttgggcaaggtgaaagggctgaagctcgaagagctatggctagaagggaacccgttgtgcagcaccttctcggaccagtctgcctatgtaagtgccatccgggattgtttccccaagttgttacgcctggacggccgagagttatccgcaccagtgattgttgacattgacagctctgagacaatgaaaccctgcaaggaaaactttactggatctgagaccctaaagcatttagtcctgcaattcctgcagcagagcaacttgtgcaagtacttcaaggatagcaggaatataaaaattctcaaagacccctacctgcagaggaagctgctaaagcacacaaaatgtccacgaaacgtggactccctcagtgcattgcctgaaactcagcatgacttcacctccatcctggtggacatgtggtaccagaccgtgaacacctgcttcctccctcgggcaggcccagagagccagagtggaaggatggtctcagggttctgatcttgccttcatgtggaccttcatcactacctctggccgcaattccagtctgtgcatcatgaatgataagctgtttctgagggatgccagcccccaagagactcagagtgccttctccatcccagtgtccacactctcctccagctctgagccctccctctcctaggagcacaggaaatggtgcaggctttctctgcccagtctgggatgaaactagagtggtctcagaagtgccttcaggacaataagtggaactacattagagctggtcaggtcttcactatgctccagactgagggcaagatcccagtggaggccttcaagcaaatcccctaaaaggagccctttgatgtcatctttgtcttccttctcatcctctttgtttcctcttttcaccagcctaagaccactctaaggactggggttggaggcctggctgaccaagaagccaaagttaacttgcaggccacaggacatagccacctgaagagccagttgttctgtgtatttgccccactcatgatcaccgtttattttcataataaacagtgacgttacatgttgtatgtt

SEQ ID NO: 12536 - protein, 305 aa, Homo sapiens
MRRNTQDENMRKWFKVTICIFVSHFTAPYSVKNKLKPGQMEMLKLTMNKRYNVSQQALDLQNLRFDPDLMGRDIDIILNRRNCMAATLKITERNFPELLSLNLCNNKLYQLDGLSDITEKAPKVKTLNLSKNKLESAWELGKVKGLKLEELWLEGNPLCSTFSDQSAYVSAIRDCFPKLLRLDGRELSAPVIVDIDSSETMKPCKENFTGSETLKHLVLQFLQQSNLCKYFKDSRNIKILKDPYLQRKLLKHTKCPRNVDSLSALPETQHDFTSILVDMWYQTVNTCFLPRAGPESQSGRMVSGF

SEQ ID NO: 12537 - DNA, 1973 bp, Homo sapiens
tccaggtttgttctggaaaacactaggtctgagagacagcaacaacaaaagtatactctaccattaaagaaataatgccgtatatgtagtagcacttttcaaagaaggaagaaaggtgggagtcatttccagggtaattttgacaagaggaactgtcattatgaacatggtgggtatgaacttctgccttcacgctgccaggagaatgatggaagcatggagatgagggatgtccacaaggaccgccaactaagacacactccttatagaatccaatgcaacaggaagctagtgaaatgacatagtgaagatcaaatccatattaccatttggagaaatagaaaacctccagagagaaaaatgaggcggaacacacaagatgaaaacatgaggaaatggttcaaggtcacaattccttatgggataaagtatgacaaggcatggctaatgaattcaatccagagcaattgcagtgtccccttcactccggttgatttccactacatccgaaatcgggcatgcttctttgtccaggttgctagtgctgcctctgcattgaaggatgtcagttataagatttatgatgatgagaaccaaaagatatgtatatttgtcagtcattttactgcgccctactctgtgaagaataagttgaagccaggccaaatggagatgctaaagctgaccatgaacaaacggtacaatgtctcccagcaagctcttgatctccagaatctccgctttgacccagacttgatgggccgtgacattgatataatcctgaatcgaagaaactgcatggctgccaccctgaagatcactgaaagaaatttccctgagagaaggctcccaaagtcaagaccctgaatctctccaaaaataagctggagtcggcgtgggagttgggcaaggtgaaagggctgaagctcgaagagctatggctagaagggaacccgttgtgcagcaccttctcggaccagtctgcctatgtaagtgccatccgggattgtttccccaagttgttacgcctggacggccgagagttatccgcaccagtgattgttgacattgacagctctgagacaatgaaaccctgcaaggaaaactttactggatctgagaccctaaagcatttagtcctgcaattcctgcagcagagcaacttgtgcaagtacttcaaggatagcaggaatataaaaattctcaaagacccctacctgcagaggaagctgctaaagcacacaaaatgtccacgaaacgtggactccctcagtgcattgcctgaaactcagcatgacttcacctccatcctggtggacatgtggtaccagaccgtgaacacctgcttcctccctcgggcaggcccagagagccagagtggaaggatggtctcagggttctgatcttgccttcatgtggaccttcatcactacctctggccgcaattccagtctgtgcatcatgaatgataagctgtttctgagggatgccagcccccaagagactcagagtgccttctccatcccagtgtccacactctcctccagctctgagccctccctctcctaggagcacaggaaatggtgcaggctttctctgcccagtctgggatgaaactagagtggtctcagaagtgccttcaggacaataagtggaactacattagagctggtcaggtcttcactatgctccagactgagggcaagatcccagtggaggccttcaagcaaatcccctaaaaggagccctttgatgtcatctttgtcttccttctcatcctctttgtttcctcttttcaccagcctaagaccactctaaggactggggttggaggcctggctgaccaagaagccaaagttaacttgcaggccacaggacatagccacctgaagagccagttgttctgtgtatttgccccactcatgatcaccgtttattttcataataaacagtgacgttacatgttgtatgtt

SEQ ID NO: 12538 - protein, 168 aa, Homo sapiens
MRRNTQDENMRKWFKVTIPYGIKYDKAWLMNSIQSNCSVPFTPVDFHYIRNRACFFVQVASAASALKDVSYKIYDDENQKICIFVSHFTAPYSVKNKLKPGQMEMLKLTMNKRYNVSQQALDLQNLRFDPDLMGRDIDIILNRRNCMAATLKITERNFPERRLPKSRP

SEQ ID NO: 12539 - DNA, 3535 bp, Homo sapiens
gtccctgccctagaaacattgaatcatgttctccaggggagagcctgggaatctatatttttaactgacaccccagttgatttttatcaaagaagtctgggaaacattgtactttaagttattgtattgtcattctggtattgatttatggtaagaggagatacatatttccatttcctagtttttcttgatgtctgtcatccagggtatccttttcttggtatcaaagaatatgaaaaaccaattataatcagaaagtgacttagtatgcatgaaattagagcatagaaaaggatagttttgagggaacatttcattcatattttgacataacctgctgagttttcctgggcccgcaatagccagtagtgtgcagcctcattttcttcagagtcagcatctttctttccccttgcaagcagtctcctgtttctatgaatagtctttgctcagacaaggccaatatacttggtaataattaatttagcttctttgaaatgattaggtcactttttggtttaaaagattaccatggttgtccccaaaatctttgcatgtaccaatttatttcctcctccctagggtcagaatgattttatatttggcttatgaaatgtattaatttgcttcttctggtcaaagataaagtggaaggatgatgagatttttaaaaaattaatgtatcccttgcttctaattctacctacaaagtggaatagtgtgctagttactatatagttcccagtgtatagcttttgactcttttgaagtggtaactagtagttttgttttagaattttgctttcagcttttatcctgagagtggggctcactgaacctctctcctttctaaaatctgtggaaattacttttggtaactaaggcactgcagtgatctcagcatttagtatgagaacctatgtttgccatatttgtagtattgcttttacatctttagatatgttccggtcccacatgcaaggaagtgaacatcaaattaaagaatccattgttatcaatctagtgaagaattcaaggaagacacaagactcttaccaaaatgagtgtgcagattacatcaatgtgcagaaagccagaggactagaggccaagacttgtttcagaaagatggaagagagttctttggaaacccgtagatacagagaagtggtcgattccagacccagacatagaatgtttgaacaaagactcccatttgagactttccggacatacgcagcaccatacaatatttcacaagcaatggaaaagcagttacctcattcaaagaagacatatgactctttccaagatgaacttgaagattacatcaaagtacagaaagccagaggactagatccaaagacttgtttcagaaagatgagagagaactctgtggatactcatgggtacagagaaatggttgattctggacccagatcaagaatgtgtgagcaaagattttcacatgaggcttcccagacctaccaacgaccataccatatttcaccagtggaaagccagttacctcagtggctaccaacccattcaaagaggacatatgattctttccaagatgaacttgaagattacataaaagtgcagaaagccagaggactagagccaaaaacttgtttcagaaagataggagatagctctgtagaaacacacaggaacagagaaatggttgatgtcagacccagacatagaatgttggagcaaaagctcccatgtgagactttccagacctattcaggaccatatagtatttcacaagtagtggaaaaccagttacctcattgcttaccagctcatgatagcaaacagagactagattctattagctactgtcaactcaccagagactgtttcccagaaaaaccagtacccttgagccttaatcagcaagaaaataactctggctcatacagtgtagaatctgaagtttacaagcacctctcttcagaaaacaatactgctgaccatcaagcaggtcataaacagaaacatcagaagagaaaacgacacctagaagaaggcaaagaaaggccagagaaagagcagtccaagcataaaaggaaaaagagttatgaagatacagatttagacaaagacaagagcatcagacaaaggaaaagagaggaggatagagtcaaggtcagttcaggaaagcttaagcatcgaaaaaagaaaaaaagccatgatgtaccctccgagaaagaagaacgtaagcacaggaaagagaaaaagaaatctgttgaagaaaggacagaagaggaaatgctttgggatgagtctattcttggattttgaatgtttagttttgtttacccaaggttgaattgaaaaaaaaaaacagtcaatatggatttagaaaaaggaacacctgatgaagaaaaggagaggtagatacagtcagtgtcacttcaggacacttaggttttttttgtataaaaatttaaattgaattaaaagaaggaaaaaaaaagcccaaacttaacctctgagaaaagaacataagaactcaaggagaacataagagaaaaggaaacctgttacagaaaagacaagaatctgtgttttggaatgagtctattcttgggtattgaacttttagttttgtttgcccaaggattaattgaggaaatcagctaagaaaatggactttagacaaaagcaagaggatcagatgaagaaaaggagaggtagatacagtcagtgtcacttcaggaaagctatttaaaaaaacttgaaatttaattgaaagaagaaacaacaacaaaaaagcctaaacctagcctctgaacaacactaacatgagaacacaagaacttaagagaaaaagaaacctactcaagaaaagacagaagagacagtgatttgggatgagtctactctaggattttcaactttttagttttgttccttcaaagttgaaggaaaaaaagtttggttttataaaattcatgttattgtaatttttctaggtggatggctactttaatctctaaaaaagccaagtgaagtaaaagtattcagtatgccttttcctcaagttactttccttcattttcttaaaaaagaaaaaaaattattaaatgtttctcacatatctcacatataatgtaatttccctaaatgaagttgtctctacttctgctcatcaaattgctgtgatagtgaattatttattcatgggagataatttattttaaaggacagaattaccaagcgttacaaaatcagttctttccttggttttgtgttagtgttggtggtattttattgttgtttttctgtgtttatgtgtctcagctttctccaaggaatatgtatgaaataacttaaactgattttttctttgttaaatctaatttgcagtgtatttttgcattttctagttctgaaagtggaaaatgaaacagtctataataaacttagatgatatatagttttaaaacggtctcaaaaagtactgatataaggtcagtctatattctggaaatgtttatattaaagtgttttaatttctaca

SEQ ID NO: 12540 - protein, 467 aa, Homo sapiens; identical to SEQ ID NO: 2166

SEQ ID NO: 12541 - DNA, 6686 bp, Homo sapiens
atccctccaagtttagctaagacattatctcttccagtagcctttttcagacccccgtattatgctgagtgcccctgcttctttgtgctcgcatacctcttaaacatacctctcttacttttaccaagtgagactgaaattttttgttcatgtatctttctcacactggatttgtgaacaacttggctgtttcattcatcttgtatccctggcatctaacctgatgcttggtgccacataggtattcagtatttgttaaaccaattatttggattcaacacattgtgctgatttctgtctctgccatacttgatattattttcatcccctggaatgcccttacctgctttcttacaaattcaaatcttttctgtcctcaaagatccatcacaacttctcttactgttctagttctttgtgttctccctttctctgatttctcataggctttactgttcattgacaattgatacaattatagcccctcaagggaattagcttctctgagacaaaggattatattttattctgcagtatccttcttagtgctttatatggtaatgagggcataattttttctcaattcatatttgcaaattgtttattgagagtcagtgttgtatagagggataaacatagatttggagatacagtcacttgccaagttgcaccgcagattcctctggtataaaatgaaaataatgtgactctacaggattgaataataattaactgaagtagtatatatagtacccatcacagaataggtttgtaacaaatgttaggtttgtaaaaatgttttgtcctgtcataattttaaaataggtaaattggacattttctgtttttctttataacataaatccgatattcacatgcagtttttttccaacttttattttaagttcatgggtgcatgtgcagatgtgaaggttcgttatataagtaaatgtgtgccatggtggttttgctgcacagatcatcccatcacctaggtattaagcccagcgttcattagcaattcttcctgacagctgcagttttgattatgtgcagctctcaattggcttttccccgtttaagatgttagaccagtggttctcagccttgactaattagaatcatgtgaggagcttttagaactcccattgctcaggccaaccctccaatcaattaaattaccatctctgggacttacacatttgtgttttgttttctcttttttgactccctaagtgatttttatatggagccaagattgaaaacagtgttagacacacactttcccaatttatgctttgaaaacaaagaccttagttcagagacttatgagatagggttatgattaggggaagagtaggccccacaagtttcagggtagtgaagattctgaagggtacaagcgataaaggagcctgagtttctgggtgaactcagaaacaaggaatcctagaagggctgagagcagaacagaacctcggaatagtctctgaaataaaagagtggagagtataagaaacagaatggaggcaggccccaggaggattcaatcaggaattctgaccttggggccataaataggtttcatatcttcacagaaagggtttacacaacttttgtatatcattttctgagatgtctgaatcctagaaaaagataaagaacatcagtatgtgaaaaagccaagggctaaggtaatggtaatcagactacagttctagaaatgcctctggatctttaatacatgactggcagctcttctaaacctctatgttacctctattagaatattatttctgatgtagtttgtggagaaacaaagcaggaatggaggagaacactgtatacagtatactttataagcactaaataaatatgtaaaaactctgaaatataatctgagtttatagtcataatgaagattattagctcaataatctagggtagaggtgtccaatctttcggcttccatgggccacgttggaagaagaattaccttgggccacacataaaatacactaacactaacaataactgatgagttaaaaaaaatcacataaaaatctcataatgttttaagaacatttgtgaatttgtgttgagtcacattcaaagacaccttgggccacatgtggcctgtgggctgcaagttggacaagcttgatctagggcaagtgctcaacagtggctgcacagttaaatcgtgtgtaaagctttcaaaaagtaagggtgcctaattccactcctagagattctgatttaattggtctgacatggagttgtaacatcaatatttttgaatttttccatatgattctaatgtgtaaccagcattgagaaccactaatccagaggaaaccaggactcctgcttatcttgcacaacttgggtaccctcaaaatatatggtattggcaaagttaatctgagcctaagttccagcacctgtaaaagatggtacgaatttcctaaaagaggttgttgtgaatatgtactctcctgggtttagtccttagctttgcaagaagtccaaaatcttcaagatgatcagcctcaaatcagggactcactaaccgcaaacaaacttgaaagtggctgataactaactggaaagatattactttaatatgtttctcacaaagcctgtgataatcatttgccatatttgtgatcatagaaatttcttgtccctgccctagaaacattgaatcatgttctccaggggagagcctgggaatctatatttttaactgacaccccagttgatttttatcaaagaagtctgggaaacattgtactttaagttattgtattgtcattctggtattgatttatggtaagaggagatacatatttccatttcctagtttttcttgatgtctgtcatccagggtatccttttcttggtatcaaagaatatgaaaaaccaattataatcagaaagtgacttagtatgcatgaaattagagcatagaaaaggatagttttgagggaacatttcattcatattttgacataacctgctgagttttcctgggcccgcaatagccagtagtgtgcagcctcattttcttcagagtcagcatctttctttccccttgcaagcagtctcctgtttctatgaatagtctttgctcagacaaggccaatatacttggtaataattaatttagcttctttgaaatgattaggtcactttttggtttaaaagattaccatggttgtccccaaaatctttgcatgtaccaatttatttcctcctccctagggtcagaatgattttatatttggcttatgaaatgtattaatttgcttcttctggtcaaagataaagtggaaggatgatgagatttttaaaaaattaatgtatcccttgcttctaattctacctacaaagtggaatagtgtgctagttactatatagttcccagtgtatagcttttgactcttttgaagtggtaactagtagttttgttttagaattttgctttcagcttttatcctgagagtggggctcactgaacctctctcctttctaaaatctgtggaaattacttttggtaactaaggcactgcagtgatctcaggtaagagagtaaaaaatttgcctttatttgtttttaatgttttgggacgtttcaggttttggttgggtggaaacagagttggggcaaacaaaaagaggctggttaagagattcagaggcaaaggttggttggccatgctaaatttcaggtgcctgttgcacctccatgtagcaacagtaagtagacagatagcagattcttagggaagaagttaagctagagaagcagtgtggtgtggtgtaaagaattctgggcattcaattaagaggtgtgggctctgagaggctaacactactactaacttgctctgtgactttgaccaagtcatttgacctctctgggccccatctttattggaaaatgtcaagtagatggtctctaataaatttttggtccagttctaacattatgtgattctaaatgtatttatactgaccttcttaacttgaactctttgttttttcagcatttagtatgagaacctatgtttgccatatttgtagtattgcttttacatctttagatatgttccggtcccacatgcaaggaagtgaacatcaaattaaagaatccattgttatcaatctagtgaagaattcaaggaagacacaagactcttaccaaaatgagtgtgcagattacatcaatgtgcagaaagccagaggactagaggccaagacttgtttcagaaagatggaagagagttctttggaaacccgtagatacagagaagtggtcgattccagacccagacatagaatgtttgaacaaagactcccatttgagactttccggacatacgcagcaccatacaatatttcacaagcaatggaaaagcagttacctcattcaaagaagacatatgactctttccaagatgaacttgaagattacatcaaagtacagaaagccagaggactagatccaaagacttgtttcagaaagatgagagagaactctgtggatactcatgggtacagagaaatggttgattctggacccagatcaagaatgtgtgagcaaagattttcacatgaggcttcccagacctaccaacgaccataccatatttcaccagtggaaagccagttacctcagtggctaccaacccattcaaagaggacatatgattctttccaagatgaacttgaagattacataaaagtgcagaaagccagaggactagagccaaaaacttgtttcagaaagataggagatagctctgtagaaacacacaggaacagagaaatggttgatgtcagacccagacatagaatgttggagcaaaagctcccatgtgagactttccagacctattcaggaccatatagtatttcacaagtagtggaaaaccagttacctcattgcttaccagctcatgatagcaaacagagactagattctattagctactgtcaactcaccagagactgtttcccagaaaaaccagtacccttgagccttaatcagcaagaaaataactctggctcatacagtgtagaatctgaagtttacaagcacctctcttcagaaaacaatactgctgaccatcaagcaggtcataaacagaaacatcagaagagaaaacgacacctagaagaaggcaaagaaaggccagagaaagagcagtccaagcataaaaggaaaaagagttatgaagatacagatttagacaaagacaagagcatcagacaaaggaaaagagaggaggatagagtcaaggtcagttcaggaaagcttaagcatcgaaaaaagaaaaaaagccatgatgtaccctccgagaaagaagaacgtaagcacaggaaagagaaaaagaaatctgttgaagaaaggacagaagaggaaatgctttgggatgagtctattcttggattttgaatgtttagttttgtttacccaaggttgaattgaaaaaaaaaaacagtcaatatggatttagaaaaaggaacacctgatgaagaaaaggagaggtagatacagtcagtgtcacttcaggacacttaggttttttttgtataaaaatttaaattgaattaaaagaaggaaaaaaaaagcccaaacttaacctctgagaaaagaacataagaactcaaggagaacataagagaaaaggaaacctgttacagaaaagacaagaatctgtgttttggaatgagtctattcttgggtattgaacttttagttttgtttgcccaaggattaattgaggaaatcagctaagaaaatggactttagacaaaagcaagaggatcagatgaagaaaaggagaggtagatacagtcagtgtcacttcaggaaagctatttaaaaaaacttgaaatttaattgaaagaagaaacaacaacaaaaaagcctaaacctagcctctgaacaacactaacatgagaacacaagaacttaagagaaaaagaaacctactcaagaaaagacagaagagacagtgatttgggatgagtctactctaggattttcaactttttagttttgttccttcaaagttgaaggaaaaaaagtttggttttataaaattcatgttattgtaatttttctaggtggatggctactttaatctctaaaaaagccaagtgaagtaaaagtattcagtatgccttttcctcaagttactttccttcattttcttaaaaaagaaaaaaaattattaaatgtttctcacatatctcacatataatgtaatttccctaaatgaagttgtctctacttctgctcatcaaattgctgtgatagtgaattatttattcatgggagataatttattttaaaggacagaattaccaagcgttacaaaatcagttctttccttggttttgtgttagtgttggtggtattttattgttgtttttctgtgtttatgtgtctcagctttctccaaggaatatgtatgaaataacttaaactgattttttctttgttaaatctaatttgcagtgtatttttgcattttctagttctgaaagtggaaaatgaaacagtctataataaacttagatgatatatagttttaaaacggtctcaaaaagtactgatataaggtcagtctatattctggaaatgtttatattaaagtgttttaatttctaca

SEQ ID NO: 12542 - protein, 467 aa, Homo sapiens; identical to SEQ ID NO: 2166

SEQ ID NO: 12543 - DNA, 3450 bp, Homo sapiens
gtccgcgcgcctcgctgcgatggcggcggcgccgagcacagtcaccccgctggcggcggagtcttcccctcaggaagctaccgtctctgccgcctcctcctcctcctacaccgcctgcgcggcagcggcggcggcggcggcggcggcggcagtaattgttcctgcctcctccgccacctccgcccctgcctgcccgcctgccggtggctgtggcgacggcggcggcggcggctttggcggctccactatggcggcggcggggagggggggcagtagttttaaagtagacacccgcccttgcctcagagaagatggagtcttgctctgtcaccaggctggagtgcagtggcgcaatctcggctcactgcagcctccacctcccgggttcaagcgattcccctgcctcagcctcccaaatagctgggactacagacgccatttggaatgaacaggaaaaggctgaactttttacagataagttttgtcaagtatgtggagtgatgctacagtttgaatcacaaagaatttcacattatgagggtgaaaaacatgctcaaaatgttagtttttattttcaaatgcatggggaacaaaatgaagtgcctggtaagaaaatgaagatgcatgttgagaattttcaggtgcataggtatgaaggagtggacaaaaacaaattttgtgatctctgcaacatgatgtttagctctccacttattgctcagtctcactatgtgggaaaggtccatgctaaaaaactgaagcaattaatggaggaacatgatcaggcatctccatcaggatttcaaccagagatggcatttagtatgagaacctatgtttgccatatttgtagtattgcttttacatctttagatatgttccggtcccacatgcaaggaagtgaacatcaaattaaagaatccattgttatcaatctagtgaagaattcaaggaagacacaagactcttaccaaaatgagtgtgcagattacatcaatgtgcagaaagccagaggactagaggccaagacttgtttcagaaagatggaagagagttctttggaaacccgtagatacagagaagtggtcgattccagacccagacatagaatgtttgaacaaagactcccatttgagactttccggacatacgcagcaccatacaatatttcacaagcaatggaaaagcagttacctcattcaaagaagacatatgactctttccaagatgaacttgaagattacatcaaagtacagaaagccagaggactagatccaaagacttgtttcagaaagatgagagagaactctgtggatactcatgggtacagagaaatggttgattctggacccagatcaagaatgtgtgagcaaagattttcacatgaggcttcccagacctaccaacgaccataccatatttcaccagtggaaagccagttacctcagtggctaccaacccattcaaagaggacatatgattctttccaagatgaacttgaagattacataaaagtgcagaaagccagaggactagagccaaaaacttgtttcagaaagataggagatagctctgtagaaacacacaggaacagagaaatggttgatgtcagacccagacatagaatgttggagcaaaagctcccatgtgagactttccagacctattcaggaccatatagtatttcacaagtagtggaaaaccagttacctcattgcttaccagctcatgatagcaaacagagactagattctattagctactgtcaactcaccagagactgtttcccagaaaaaccagtacccttgagccttaatcagcaagaaaataactctggctcatacagtgtagaatctgaagtttacaagcacctctcttcagaaaacaatactgctgaccatcaagcaggtcataaacagaaacatcagaagagaaaacgacacctagaagaaggcaaagaaaggccagagaaagagcagtccaagcataaaaggaaaaagagttatgaagatacagatttagacaaagacaagagcatcagacaaaggaaaagagaggaggatagagtcaaggtcagttcaggaaagcttaagcatcgaaaaaagaaaaaaagccatgatgtaccctccgagaaagaagaacgtaagcacaggaaagagaaaaagaaatctgttgaagaaaggacagaagaggaaatgctttgggatgagtctattcttggattttgaatgtttagttttgtttacccaaggttgaattgaaaaaaaaaaacagtcaatatggatttagaaaaaggaacacctgatgaagaaaaggagaggtagatacagtcagtgtcacttcaggacacttaggttttttttgtataaaaatttaaattgaattaaaagaaggaaaaaaaaagcccaaacttaacctctgagaaaagaacataagaactcaaggagaacataagagaaaaggaaacctgttacagaaaagacaagaatctgtgttttggaatgagtctattcttgggtattgaacttttagttttgtttgcccaaggattaattgaggaaatcagctaagaaaatggactttagacaaaagcaagaggatcagatgaagaaaaggagaggtagatacagtcagtgtcacttcaggaaagctatttaaaaaaacttgaaatttaattgaaagaagaaacaacaacaaaaaagcctaaacctagcctctgaacaacactaacatgagaacacaagaacttaagagaaaaagaaacctactcaagaaaagacagaagagacagtgatttgggatgagtctactctaggattttcaactttttagttttgttccttcaaagttgaaggaaaaaaagtttggttttataaaattcatgttattgtaatttttctaggtggatggctactttaatctctaaaaaagccaagtgaagtaaaagtattcagtatgccttttcctcaagttactttccttcattttcttaaaaaagaaaaaaaattattaaatgtttctcacatatctcacatataatgtaatttccctaaatgaagttgtctctacttctgctcatcaaattgctgtgatagtgaattatttattcatgggagataatttattttaaaggacagaattaccaagcgttacaaaatcagttctttccttggttttgtgttagtgttggtggtattttattgttgtttttctgtgtttatgtgtctcagctttctccaaggaatatgtatgaaataacttaaactgattttttctttgttaaatctaatttgcagtgtatttttgcattttctagttctgaaagtggaaaatgaaacagtctataataaacttagatgatatatagttttaaaacggtctcaaaaagtactgatataaggtcagtctatattctggaaatgtttatattaaagtgttttaatttctaca

SEQ ID NO: 12544 - protein, 638 aa, Homo sapiens; identical to SEQ ID NO: 2164

SEQ ID NO: 12545 - DNA, 4114 bp, Homo sapiens
agcgagaacgaggctcgagctgaagcgttaaaaagaggaacaaagggggtggggctaacggaaggcggggctaaaggagcttaacggaatcgagacgcaagtgcaattgtccgcgcgcctcgctgcgatggcggcggcgccgagcacagtcaccccgctggcggcggagtcttcccctcaggaagctaccgtctctgccgcctcctcctcctcctacaccgcctgcgcggcagcggcggcggcggcggcggcggcggcagtaattgttcctgcctcctccgccacctccgcccctgcctgcccgcctgccggtggctgtggcgacggcggcggcggcggctttggcggctccactatggcggcggcggggagggggggcagtagttttaaagtagacacccgcccttgcctcagagaagacgccatttggaatgaacaggaaaaggctgaactttttacagataagttttgtcaagtatgtggagtgatgctacagtttgaatcacaaagaatttcacattatgagggtgaaaaacatgctcaaaatgttagtttttattttcaaatgcatggggaacaaaatgaagtgcctggtaagaaaatgaagatgcatgttgagaattttcaggtgcataggtatgaaggagtggacaaaaacaaattttgtgatctctgcaacatgatgtttagctctccacttattgctcagtctcactatgtgggaaaggtccatgctaaaaaactgaagcaattaatggaggaacatgatcaggcatctccatcaggatttcaaccagagatggcaggagtgcctcttactacttctgcagagtcaacattcctgaagccccttcctgtcaagcctcctacaggcaccttctcactactagtgtattttattcccctttcatattctctcttccacccacttcttttcctccactcactattatttttcagttctttctttacccagcctttctccttcatgtgaaaatgttcattcttctctcctccttgaagctctattctttgtcatatgtaactctttatgctctggttcttctctatttctgtttcttttttgttttctctatgggctctttttttattcattacctaaatgtaggtattcccatggtttcatccttgaccttactctacaaacacgatttctatttccctgatttcatttctcatctgtatgcttatgacctttctgtcaagtattagattcacatatccaaatggcagctactgcttcacctggatgcctcatagccatttcaaatccacctagtcattcaaagtagaaacccacagctcagatcttattagcacaggaatggctaccataacgatatggaactaaaaattttgctttcagcttttatcctgagagtggggctcactgaacctctctcctttctaaaatctgtggaaattacttttggtaactaaggcactgcagtgatctcagcatttagtatgagaacctatgtttgccatatttgtagtattgcttttacatctttagatatgttccggtcccacatgcaaggaagtgaacatcaaattaaagaatccattgttatcaatctagtgaagaattcaaggaagacacaagactcttaccaaaatgagtgtgcagattacatcaatgtgcagaaagccagaggactagaggccaagacttgtttcagaaagatggaagagagttctttggaaacccgtagatacagagaagtggtcgattccagacccagacatagaatgtttgaacaaagactcccatttgagactttccggacatacgcagcaccatacaatatttcacaagcaatggaaaagcagttacctcattcaaagaagacatatgactctttccaagatgaacttgaagattacatcaaagtacagaaagccagaggactagatccaaagacttgtttcagaaagatgagagagaactctgtggatactcatgggtacagagaaatggttgattctggacccagatcaagaatgtgtgagcaaagattttcacatgaggcttcccagacctaccaacgaccataccatatttcaccagtggaaagccagttacctcagtggctaccaacccattcaaagaggacatatgattctttccaagatgaacttgaagattacataaaagtgcagaaagccagaggactagagccaaaaacttgtttcagaaagataggagatagctctgtagaaacacacaggaacagagaaatggttgatgtcagacccagacatagaatgttggagcaaaagctcccatgtgagactttccagacctattcaggaccatatagtatttcacaagtagtggaaaaccagttacctcattgcttaccagctcatgatagcaaacagagactagattctattagctactgtcaactcaccagagactgtttcccagaaaaaccagtacccttgagccttaatcagcaagaaaataactctggctcatacagtgtagaatctgaagtttacaagcacctctcttcagaaaacaatactgctgaccatcaagcaggtcataaacagaaacatcagaagagaaaacgacacctagaagaaggcaaagaaaggccagagaaagagcagtccaagcataaaaggaaaaagagttatgaagatacagatttagacaaagacaagagcatcagacaaaggaaaagagaggaggatagagtcaaggtcagttcaggaaagcttaagcatcgaaaaaagaaaaaaagccatgatgtaccctccgagaaagaagaacgtaagcacaggaaagagaaaaagaaatctgttgaagaaaggacagaagaggaaatgctttgggatgagtctattcttggattttgaatgtttagttttgtttacccaaggttgaattgaaaaaaaaaaacagtcaatatggatttagaaaaaggaacacctgatgaagaaaaggagaggtagatacagtcagtgtcacttcaggacacttaggttttttttgtataaaaatttaaattgaattaaaagaaggaaaaaaaaagcccaaacttaacctctgagaaaagaacataagaactcaaggagaacataagagaaaaggaaacctgttacagaaaagacaagaatctgtgttttggaatgagtctattcttgggtattgaacttttagttttgtttgcccaaggattaattgaggaaatcagctaagaaaatggactttagacaaaagcaagaggatcagatgaagaaaaggagaggtagatacagtcagtgtcacttcaggaaagctatttaaaaaaacttgaaatttaattgaaagaagaaacaacaacaaaaaagcctaaacctagcctctgaacaacactaacatgagaacacaagaacttaagagaaaaagaaacctactcaagaaaagacagaagagacagtgatttgggatgagtctactctaggattttcaactttttagttttgttccttcaaagttgaaggaaaaaaagtttggttttataaaattcatgttattgtaatttttctaggtggatggctactttaatctctaaaaaagccaagtgaagtaaaagtattcagtatgccttttcctcaagttactttccttcattttcttaaaaaagaaaaaaaattattaaatgtttctcacatatctcacatataatgtaatttccctaaatgaagttgtctctacttctgctcatcaaattgctgtgatagtgaattatttattcatgggagataatttattttaaaggacagaattaccaagcgttacaaaatcagttctttccttggttttgtgttagtgttggtggtattttattgttgtttttctgtgtttatgtgtctcagctttctccaaggaatatgtatgaaataacttaaactgattttttctttgttaaatctaatttgcagtgtatttttgcattttctagttctgaaagtggaaaatgaaacagtctataataaacttagatgatatatagttttaaaacggtctcaaaaagtactgatataaggtcagtctatattctggaaatgtttatattaaagtgttttaatttctaca

SEQ ID NO: 12546 - protein, 467 aa, Homo sapiens; identical to SEQ ID NO: 2166

SEQ ID NO: 12547 - DNA, 459 bp, Homo sapiens
cctaagtgtcctgaagtgacactgactgtatctacctctccttttcttcatcaggtgttcctttttctaaatccatattgactgtttttttttttcaattcaaccttgggtaaacaaaactaaacattcaaaatccaagaatagactcatcccaaagcatttcctcttctgtcctttcttcaacagatttctttttctctttcctgtgcttacgttcttctttctcggagggtacatcatggctttttttcttttttcgatgcttaagctttcctgaactgaccttgactctatcctcctctcttttcctttgtctgatgctcttgtctttgtctaaatctgtatcttcataactctttttccttttatgcttggactgctctttctctggcctttctttgccttttttatgtaatcttcaagttcatcttggaaagaatcatatgtcctctttgaatg

SEQ ID NO: 12548 - protein, 45 aa, Homo sapiens
CSCLCLNLYLHNSFSFYAWTALSLAFLCLFYVIFKFILERIICPL

SEQ ID NO: 12549 - DNA, 1132 bp, Homo sapiens
ccagcccccgcgcccgcccgccagcccgcccagcggtcgggtccgggcgcccgcgcagaatcagctgtctgagctgcccaggcggcgggggagcagcgagcgggcttcagcgagccgcaggaggcacaggcctgtcctgggtccccgcaggtctgcgcgtctgttgttcccagcgctctgagaggcctgaaaaggaagagcaacctgtccagaatccccgcaggaaaggaaaaggaggggaaatctcgacatggaaaaactcttcaatgaaaatgaaggaatgccttcgaatcaaggaaagatagacaatgaagaacagccaccgcacgagggaaagccagaagtagcttgtattctggaagacaagaagttagaaaacgagggaaacacagaaaacacgggcaagagagttgaggaaccgttaaaggataaagaaaagccagagagtgcgggaaaggcaaaaggagaaggaaagtcagagaggaagggaaagtcagagatgcagggaggatcaaagacagagggaaagccagagagagggggaagggcagagggtgaaggagagccagacagtgaaagagagccagagagtgagggagagccagaaagtgaaacaagggctgcaggaaagcgcccagctgaggatgatatacccaggaaagccaaaagaaaaaccaacaaggggctggctcagtacctcaagcaatataaggaagccatacatgatatgaatttcagcaatgaggacatgataagagaatttgacaacatggctagggtggaggataaaaggagaaaaagcaaacagaaattgggggcgtttttgtggatgcaaagaaatttacaggaccccttctatcctaggggtccaagggaattcaggggtggctgcagggccccacgaagggacactgaagacattccttatgtgtagtgtccctggcaggcatttgtcaggccatatgttttaaccttatggtaatactttgctttagtcgttcctcctgctaccagtagcgttttgacccacctgccagtgtttgcttgctctatgtttcagtagcagattttcacacatgtgcattgcagagacgtcatgattcgtggaaaaataaagcagcttataatatca

SEQ ID NO: 12550 - protein, 227 aa, Homo sapiens; identical to SEQ ID NO: 2168

SEQ ID NO: 12551 - DNA, 1667 bp, Homo sapiens
agcggtcgggtccgggcgcccgcgcagaatcagctgtctgagctgcccaggcggcgggggagcagcgagcgggcttcagcgagccgcaggaggcacaggcctgtcctgggtccccgcaggtcagtgtgaaggcgtgcgctgccggcggaccctgggacaggggtggagggggctggcagtaggattggggagggggcggagaagggatccggtagattggggaggagggggatgcggagtcgcgggggcgggggcagtggagggagaacccccgaagcaagcctggctcgccttctcgacgcccccttgcactgagtcctccatccattttagtgctggaaatggggggtgggggtagcgaccccgcagtgcgacagtgaaacgtagacatattctggaaataaccccttctcacaatctacacccatggaaacacttgatctccgcaaaaatgaggtggcgctggggcaggttgcctccggggaagggggacacagagacaaacgcagtttggaaagcatcctggtttggtgcccgaggcctggaaagaaatggcggctggggtgcgggggaggtaggggaggaaaacggtgggtaagcagggcctggactcaggaaagggaaccgagtccctgtgagcccgctaagcgcgcagcccctgcccctgtctcctgtctgtccgcaggtctgcgcgtctgttgttcccagcgctctgagaggcctgaaaaggaagagcaacctgtccagaatccccgcaggaaaggaaaaggaggggaaatctcgacatggaaaaactcttcaatgaaaatgaaggaatgccttcgaatcaaggaaagatagacaatgaagaacagccaccgcacgagggaaagccagaagtagcttgtattctggaagacaagaagttagaaaacgagggaaacacagaaaacacgggcaagagagttgaggaaccgttaaaggataaagaaaagccagagagtgcgggaaaggcaaaaggagaaggaaagtcagagaggaagggaaagtcagagatgcagggaggatcaaagacagagggaaagccagagagagggggaagggcagagggtgaaggagagccagacagtgaaagagagccagagagtgagggagagccagaaagtgaaacaagggctgcaggaaagcgcccagctgaggatgatatacccaggaaagccaaaagaaaaaccaacaaggggctggctcagtacctcaagcaatataaggaagccatacatgatatgaatttcagcaatgaggacatgataagagaatttgacaacatggctagggtggaggataaaaggagaaaaagcaaacagaaattgggggcgtttttgtggatgcaaagaaatttacaggaccccttctatcctaggggtccaagggaattcaggggtggctgcagggccccacgaagggacactgaagacattccttatgtgtagtgtccctggcaggcatttgtcaggccatatgttttaaccttatggtaatactttgctttagtcgttcctcctgctaccagtagcgttttgacccacctgccagtgtttgcttgctctatgtttcagtagcagattttcacacatgtgcattgcagagacgtcatgattcgtggaaaaataaagcagcttataatatca

SEQ ID NO: 12552 - protein, 137 aa, Homo sapiens
METLDLRKNEVALGQVASGEGGHRDKRSLESILVWCPRPGKKWRLGCGGGRGGKRWVSRAWTQEREPSPCEPAKRAAPAPVSCLSAGLRVCCSQRSERPEKEEQPVQNPRRKGKGGEISTWKNSSMKMKECLRIKER

SEQ ID NO: 12553 - DNA, 578 bp, Homo sapiens
gcagaatcagctgtctgagctgcccaggcggcgggggagcagcgagcgggcttcagcgagccgcaggaggcacaggcctgtcctgggtccccgcaggtctgcgcgtctgttgttcccagcgctctgagaggcctgaaaaggaagagcaacctgtccagaatccccgcagatgccatgataactgtggcagctgaacagttccaccgctaaagaagactcttgggaccccaaatggtcatgattgcaaatctacagtttgttggagaaaaaaatggatgcaacatagcaacagcattaaggagaaacatcatagtcaaaagctgtctaatagtaagggatctggagtggccagttccccaggtgatgactatgcagctttttcatggaccacaacatgttcattacaaaggatttaaaactcaaatgtattgatgggtctgccgaactgctaaagtgttacctgacaagtttcctgagagtgaactcaacagagaaaagagcatctgcagacaagatattaacccatgagaacagcacaaccactatcatgcaggtattttttcctggcctagcctgca

SEQ ID NO: 12554 - protein, 66 aa, Homo sapiens
MVMIANLQFVGEKNGCNIATALRRNIIVKSCLIVRDLEWPVPQVMTMQLFHGPQHVHYKGFKTQMY

SEQ ID NO: 12555 - DNA, 989 bp, Homo sapiens
agctgtctgagctgcccaggcggcgggggagcagcgagcgggcttcagcgagccgcaggaggcacaggcctgtcctgggtccccgcaggtctgcgcgtctgttgttcccagcgctctgagaggcctgaaaaggaagagcaacctgtccagaatccccgcaggaaaggaaaaggaggggaaatctcgacatggaaaaactcttcaatgaaaatgaaggaatgccttcgaatcaaggaaagatagacaatgaagaacagccaccgcacgagggaaagccagaagtagcttgtattctggaagacaagaagttagaaaacgagggaaacacagaaaacacgggcaagagagttgaggaaccgttaaaggataaagaaaagccagagagtgcgggaaaggcaaaaggagaaggaaagtcagagaggaagggaaagtcagagatgcagggaggatcaaagacagagggaaatgaaacaagggctgcaggaaagcgcccagctgaggatgatatacccaggaaagccaaaagaaaaaccaacaaggggctggctcagtacctcaagcaatataaggaagccatacatgatatgaatttcagcaatgaggacatgataagagaatttgacaacatggctagggtggaggataaaaggagaaaaagcaaacagaaattgggggcgtttttgtggatgcaaagaaatttacaggaccccttctatcctaggggtccaagggaattcaggggtggctgcagggccccacgaagggacactgaagacattccttatgtgtagtgtccctggcaggcatttgtcaggccatatgttttaaccttatggtaatactttgctttagtcgttcctcctgctaccagtagcgttttgacccacctgccagtgtttgcttgctctatgtttcagtagcagattttcacacatgtgcattgcagagacgtcatgattcgtggaaaaataaagcagcttataatatca

SEQ ID NO: 12556 - protein, 200 aa, Homo sapiens
MEKLFNENEGMPSNQGKIDNEEQPPHEGKPEVACILEDKKLENEGNTENTGKRVEEPLKDKEKPESAGKAKGEGKSERKGKSEMQGGSKTEGNETRAAGKRPAEDDIPRKAKRKTNKGLAQYLKQYKEAIHDMNFSNEDMIREFDNMARVEDKRRKSKQKLGAFLWMQRNLQDPFYPRGPREFRGGCRAPRRDTEDIPYV

SEQ ID NO: 12557 - DNA, 582 bp, Homo sapiens
caggaaaggaaaaggaggggaaatctcgacatggaaaaactcttcaatgaaaatgaaggaatgccttcgaatcaaggaaagatagacaatgaagaacagccaccgcacgagggaaagccagaagtagcttgtattctggaagacaagaagttagaaaacgagggaaacacagaaaacacgggcaagagagttgaggaaccgttaaaggataaagaaaagatggctagggtggaggataaaaggagaaaaagcaaacagaaattgggggcgtttttgtggatgcaaagaaatttacaggaccccttctatcctaggggtccaagggaattcaggggtggctgcagggccccacgaagggacactgaagacattccttatgtgtagtgtccctggcaggcatttgtcaggccatatgttttaaccttatggtaatactttgctttagtcgttcctcctgctaccagtagcgttttgacccacctgccagtgtttgcttgctctatgtttcagtagcagattttcacacatgtgcattgcagagacgtcatgattcgtggaaaaataaagcagcttataatatca

SEQ ID NO: 12558 - protein, 117 aa, Homo sapiens
MEKLFNENEGMPSNQGKIDNEEQPPHEGKPEVACILEDKKLENEGNTENTGKRVEEPLKDKEKMARVEDKRRKSKQKLGAFLWMQRNLQDPFYPRGPREFRGGCRAPRRDTEDIPYV

SEQ ID NO: 12559 - DNA, 1805 bp, Homo sapiens
gtgaccaggcgcctacgtgggcaccagcccccgcgcccgcccgcccgcccagcggtccggtccaggcgcccgcgcagaatcagctgtctgagctgcccaggcggcgggggagcagcgagcgggcttcagcgagccgcaggaggcacaggcctgtcctgggtccccgcaggtctgcgcgtctgttgttcccagcgctcttggaggcctgcaaaggaagagcaacctgtccagactccccgcaggacaggaaaaagagaaatctcgacatggaaaaaccctacaataaaaatgaaggaaacctggaaaacgagggaaagccagaagatgaagtagagcctgatgatgaaggaaagtcagacgaggaagaaaagccagacgcggaggggaagacagaatgcgagggaaagcgaaaggctgagggagagccaggtgatgagggacaactggaagataagggaagccaggaaaagcagggcaagtccgaaggtgagggcaagccacaaggcgagggcaagccagcctcccaggcaaagccagagggccagccgcgggccgccgaaaagcgcccggctggagattatgtgccccggaaagcaaaaagaaaaacagacagggggacggacgattcccccaaggactctcaggaggacttacaggaaaggcatctgagcagtgaggagatgatgagagaatgtggagatgtgtcaagggctcaggaggagctaaggaaaaaacagaaaatgggtggttttcattggatgcaaagagatgtacaggatccattcgcccaaggggacaacggggtgtcaggggagtgaggggtggaggtaggggccaaagaggcttacacgatatcccatacctttaatgcctttggccttccattctgacttctctgatgagattattgtcaaccctgctttccctggtagatatttgccaggcccaatgctttaaccttaagctgatatttttgctttagatgtcaatctcgttaccagcagccttttgacccaactacagcgctctatattttagtagaggattttcacccatgtgcatggaaaagatgttcatgacacattgtaaaaaataaataaataaagaacagtttgcagaacctcgtatacggttatcagccaatatttataaaaatgtaaatgtttgtataatgcatttctgcgcaaagaaaaccctgaaagcatgtacactaaaaagcaggcaatggttattcctgaagggtagccaagaataggtctcacctgtattcaaaaatgagtcctaccacctcttgtatgtacctccatgatattcctctgctgctgtgcacatccctatgtcttccctaggtcgagccaggtcagtgggcactgttgctaggtcctctatcatgttcctgggtcttctaacatgagtgctgggtctgcatactcagacccatactaaaatataatactaaatatttgtcatactgaaaaataaataaaagctgaatacaatacatactaagaaattgaactgtttggtgcgcttacaaaggcaataaagacactcagaattcctgttatcagaacataagatgacaggtaaaattcatattatctctgggactaaaagctaaaggaatcaacctggaaattctaacagatctattgctgtaagagtcaatcttgtcatttgtaaaataagggtaatacttgcctcacaggactgcctggtggatcagatgagatactaagtatgtgagctgtgttgtgacctggtccccactaggcactcaggggaggaatggctcctaaactatt

SEQ ID NO: 12560 - protein, 183 aa, Homo sapiens; identical to SEQ ID NO: 2170

SEQ ID NO: 12561 - DNA, 1905 bp, Homo sapiens
gggagagacaacttgaggactgaggagagaggaggcccaggacagaaccccaggaacaccgccactcaaggtggcagctcagcttcctggcaggcaccactaccccccgggctctggagtcaggcagagccggtattgaaagtgggctgtggagttctggggctaagcgctcttggcaaagtcgggtaccctctctgatcagctgtcacacctggcgataatgggcatcagagagagatgccttgcgaggatgctgtgagctgcgtcaggtctgcgcgtctgttgttcccagcgctcttggaggcctgcaaaggaagagcaacctgtccagactccccgcaggacaggaaaaagagaaatctcgacatggaaaaaccctacaataaaaatgaaggaaacctggaaaacgagggaaagccagaagatgaagtagagcctgatgatgaaggaaagtcagacgaggaagaaaagccagacgcggaggggaagacagaatgcgagggaaagcgaaaggctgagggagagccaggtgatgagggacaactggaagataagggaagccaggaaaagcagggcaagtccgaaggtgagggcaagccacaaggcgagggcaagccagcctcccaggcaaagccagagggccagccgcgggccgccgaaaagcgcccggctggagattatgtgccccggaaagcaaaaagaaaaacagacagggggacggacgattcccccaaggactctcaggaggacttacaggaaaggcatctgagcagtgaggagatgatgagagaatgtggagatgtgtcaagggctcaggaggagctaaggaaaaaacagaaaatgggtggttttcattggatgcaaagagatgtacaggatccattcgcccaaggggacaacggggtgtcaggggagtgaggggtggaggtaggggccaaagaggcttacacgatatcccatacctttaatgcctttggccttccattctgacttctctgatgagattattgtcaaccctgctttccctggtagatatttgccaggcccaatgctttaaccttaagctgatatttttgctttagatgtcaatctcgttaccagcagccttttgacccaactacagcgctctatattttagtagaggattttcacccatgtgcatggaaaagatgttcatgacacattgtaaaaaataaataaataaagaacagtttgcagaacctcgtatacggttatcagccaatatttataaaaatgtaaatgtttgtataatgcatttctgcgcaaagaaaaccctgaaagcatgtacactaaaaagcaggcaatggttattcctgaagggtagccaagaataggtctcacctgtattcaaaaatgagtcctaccacctcttgtatgtacctccatgatattcctctgctgctgtgcacatccctatgtcttccctaggtcgagccaggtcagtgggcactgttgctaggtcctctatcatgttcctgggtcttctaacatgagtgctgggtctgcatactcagacccatactaaaatataatactaaatatttgtcatactgaaaaataaataaaagctgaatacaatacatactaagaaattgaactgtttggtgcgcttacaaaggcaataaagacactcagaattcctgttatcagaacataagatgacaggtaaaattcatattatctctgggactaaaagctaaaggaatcaacctggaaattctaacagatctattgctgtaagagtcaatcttgtcatttgtaaaataagggtaatacttgcctcacaggactgcctggtggatcagatgagatactaagtatgtgagctgtgttgtgacctggtccccactaggcactcaggggaggaatggctcctaaactatt

SEQ ID NO: 12562 - protein, 226 aa, Homo sapiens
MPCEDAVSCVRSARLLFPALLEACKGRATCPDSPQDRKKRNLDMEKPYNKNEGNLENEGKPEDEVEPDDEGKSDEEEKPDAEGKTECEGKRKAEGEPGDEGQLEDKGSQEKQGKSEGEGKPQGEGKPASQAKPEGQPRAAEKRPAGDYVPRKAKRKTDRGTDDSPKDSQEDLQERHLSSEEMMRECGDVSRAQEELRKKQKMGGFHWMQRDVQDPFAQGDNGVSGE

SEQ ID NO: 12563 - DNA, 1126 bp, Homo sapiens
gtgaccaggcgcctacgtgggcaccagcccccgcgcccgcccgcccgcccagcggtccggtccaggcgcccgcgcagaatcagctgtctgagctgcccaggcggcgggggagcagcgagcgggcttcagcgagccgcaggaggcacaggcctgtcctgggtccccgcaggtctgcgcgtctgttgttcccagcgctcttggaggcctgcaaaggaagagcaacctgtccagactccccgcaggacaggaaaaagagaaatctcgacatggaaaaaccctacaataaaaatgaaggaaacctggaaaacgagggaaagccagaagatgaagtagagcctgatgatgaaggaaagtcagacgaggaagaaaagccagacgcggaggggaagacagaatgcgagggaaagcgaaaggctgagggagagccaggtgatgagggacaactggaagataagggaagccaggaaaagcagggcaagtccgaaggtgagggcaagccacaaggcgagggcaagccagcctcccaggcaaagccagagggccagccgcgggccgccgaaaagcgcccggctggagattatgtgccccggaaagcaaaaagaaaaacagacagggggacggacgattcccccaaggactctcaggaggacttacaggaaaggcatctgagcagtgaggagatgatgagagaatgtggagatgtgtcaagggctcaggaggagctaaggaaaaaacagaaaatgggtggttttcattggatgcaaagagatgtacaggatccattcgcccaaggggacaacggggtgtcaggggagtgaggggtggaggtaggggccaaagaggcttacacgatatcccatacctttaatgcctttggccttccattctgacttctctgatgagattattgtcaaccctgctttccctggtagatatttgccaggcccaatgctttaaccttaagctgatatttttgctttagatgtcaatctcgttaccagcagccttttgacccaactacagcgctctatattttagtagaggattttcacccatgtgcatggaaaagatgttcatgacacattgtaaaaaataaataaataaagaacagtttgcagaacctcgt

SEQ ID NO: 12564 - protein, 183 aa, Homo sapiens; identical to SEQ ID NO: 2170

SEQ ID NO: 12565 - DNA, 1226 bp, Homo sapiens
gggagagacaacttgaggactgaggagagaggaggcccaggacagaaccccaggaacaccgccactcaaggtggcagctcagcttcctggcaggcaccactaccccccgggctctggagtcaggcagagccggtattgaaagtgggctgtggagttctggggctaagcgctcttggcaaagtcgggtaccctctctgatcagctgtcacacctggcgataatgggcatcagagagagatgccttgcgaggatgctgtgagctgcgtcaggtctgcgcgtctgttgttcccagcgctcttggaggcctgcaaaggaagagcaacctgtccagactccccgcaggacaggaaaaagagaaatctcgacatggaaaaaccctacaataaaaatgaaggaaacctggaaaacgagggaaagccagaagatgaagtagagcctgatgatgaaggaaagtcagacgaggaagaaaagccagacgcggaggggaagacagaatgcgagggaaagcgaaaggctgagggagagccaggtgatgagggacaactggaagataagggaagccaggaaaagcagggcaagtccgaaggtgagggcaagccacaaggcgagggcaagccagcctcccaggcaaagccagagggccagccgcgggccgccgaaaagcgcccggctggagattatgtgccccggaaagcaaaaagaaaaacagacagggggacggacgattcccccaaggactctcaggaggacttacaggaaaggcatctgagcagtgaggagatgatgagagaatgtggagatgtgtcaagggctcaggaggagctaaggaaaaaacagaaaatgggtggttttcattggatgcaaagagatgtacaggatccattcgcccaaggggacaacggggtgtcaggggagtgaggggtggaggtaggggccaaagaggcttacacgatatcccatacctttaatgcctttggccttccattctgacttctctgatgagattattgtcaaccctgctttccctggtagatatttgccaggcccaatgctttaaccttaagctgatatttttgctttagatgtcaatctcgttaccagcagccttttgacccaactacagcgctctatattttagtagaggattttcacccatgtgcatggaaaagatgttcatgacacattgtaaaaaataaataaataaagaacagtttgcagaacctcgt

SEQ ID NO: 12566 - protein, 226 aa, Homo sapiens; identical to SEQ ID NO: 12562

SEQ ID NO: 12567 - DNA, 861 bp, Homo sapiens
caccctttccagatacacacccgtttagtgcgagaaatggagcggttggggagaggatctcccgagggggctggattgagaatgggtaccatttgagatctcctaggaggccggccatcgggcaatgtctgatggagtccagccggtggaggagactgaaaggaaacagcctgcttcctgcaggtccgcgggagggaggtctttaagtgcgtttgtgcagccgatttcaaggctaagagagaaagactgcctctgatccctgaaggaagaaaaaaaaaaaaaaaacaggaaaaaaactcaacatggaaaatgtccccaaggaaaacaaagttgtggagaaggccccagtgcagaatgaagcccccgctttaggaggtggtgaataccaggagcctggaggaaatgttaaaggggtttgggctccacctgccccgggttttggagaggatgtgcccaataggcttgtcgataacattgatatgatagatggagatggagatgatatggaacggttcatggaggagatgagagagctaaggaggaaaattagggaacttcagttgaggtacagtctgcgcattcttataggggaccctcctcaccatgatcatcatgatgagttttgccttatgccttgaatcttgaggttaataatcataaaatccctgctttctaaattcgcatttttcctggtgtacctttaatgtgaaccttttggcattcttctgcaattttctgattggagattgcattttgacctagtctgtaagtttttctgtcagaagaggactttcatcaactttcatggaaagatgtttattgcatactgtaaagttaataaagcaatttaaaagcagtcta

SEQ ID NO: 12568 - protein, 43 aa, Homo sapiens
MSDGVQPVEETERKQPASCRSAGGRSLSAFVQPISRLREKDCL

SEQ ID NO: 12569 - DNA, 862 bp, Homo sapiens
atggtaattggaaatctgagctcacagtgacgtgacccttaggagacccagagccaatgcgtggattagtccctcctcctagttgcagtctggtagttgtcgctggccgtgtgacggctcgctgttgccctgaaggcaggcgagccagctgcccaggaaaggtggaaagtggtagaagctgacccctgagccctggcaggtctttaagtgcgtttgtgcagccgatttcaaggctaagagagaaagactgcctctgatccctgaaggaagaaaaaaaaaaaaaaaacaggaaaaaaactcaacatggaaaatgtccccaaggaaaacaaagttgtggagaaggccccagtgcagaatgaagcccccgctttaggaggtggtgaataccaggagcctggaggaaatgttaaaggggtttgggctccacctgccccgggttttggagaggatgtgcccaataggcttgtcgataacattgatatgatagatggagatggagatgatatggaacggttcatggaggagatgagagagctaaggaggaaaattagggaacttcagttgaggtacagtctgcgcattcttataggggaccctcctcaccatgatcatcatgatgagttttgccttatgccttgaatcttgaggttaataatcataaaatccctgctttctaaattcgcatttttcctggtgtacctttaatgtgaaccttttggcattcttctgcaattttctgattggagattgcattttgacctagtctgtaagtttttctgtcagaagaggactttcatcaactttcatggaaagatgtttattgcatactgtaaagttaataaagcaatttaaaagcagtcta

SEQ ID NO: 12570 - protein, 111 aa, Homo sapiens; identical to SEQ ID NO: 2172

SEQ ID NO: 12571 - DNA, 551 bp, Homo sapiens
agcagacgcagaggcgaggccgccagtcgaggacgaggaggagataacatcaagatgccgaagactgaggaaactgtgctccagaatgatcccagtgtagcagagaatggggcccctgagcctaaaacaccagggcagagccagaaaagcaagagtttctgtttagatgaccagtctcctgacctgatgtcttttctgtcacagatctgatagagacagttaatgaagtttccaagctgagcatttcacatgaaattgtagtaaaccaagatttctatgtggaagagaccattttgcctccaaacagaatcccggagatgaataggcgagcccttgcccacaaggaacttgcatgcttgagtcaaaaggctatttcaagggaaccttaaagattccagatttgctattttatcctcacactttggagtaaaacaatctaaaaatatccttatcctttattaagaatgcctcatctccttgtggtggtgtgtatttcatatttcttatatcccacacatttaaaaccacattcttatttttattcatatttt

SEQ ID NO: 12572 - protein, 51 aa, Homo sapiens
MPKTEETVLQNDPSVAENGAPEPKTPGQSQKSKSFCLDDQSPDLMSFLSQI

SEQ ID NO: 12573 - DNA, 1747 bp, Homo sapiens
agacgcagaggcgaggccgccagtcgaggacgaggaggagataacatcaagatgccgaagactgaggaaactgtgctccagaatgatcccagtgtagcagagaatggggcccctgagcctaaaacaccagggcagagccagaaaagcaagagtttctgtttagatgaccagtctcctgacctgatgtcttttctgtcacagatctgatagagacagttaatgaagtttccaagctgagcatttcacatgaaattgtagtaaaccaagatttctatgtggaagagaccattttgcctccaaacagtgtagaaggcaggtttgcggaggcaatgtacaatgctttttggaaccatctgaaagaacagctattgagtactcctcctgacttcacttgtgcccttgaacttctaaaagatgttaaggagaaccgcctaagaaatgagatagaagaagctctggacacagatctcctcaagcaggaagcagaacatggggccctggatgtccctcatctttctaactacattctcaatttgatggctctgctatgtgcaccggttcgagatgaagcgatacagaaactagagaccataagagatccagtgcagttactgaggggcatcctccgtgttctgggcctaatgaaaatggacatggtgaactataccatccagagctttcgaccctacctgcaggaacattccatccagtatgaacaagctaaattccaggaactccttgataaacagcccagtctcctcgattataccacaaaatggctaaccaaagcagccacagacatcactacactatgtccgagttctcctgactcacctagctcctcctgcagcatggcgtgttcacttccaagcggggcaggtaacaattcagagccccccagtccaacaatggtgctataccaaggctacctgaacctcctcctctgggatcttgaaaacgtagaattcccagagactctgctgatggacagaatccggctccaggaactggcattccagttgcaccagttaactgtcctggcctcagtcttgctagtggccagaagcttctctggtgaagttttattcagatcacctgaatttgtggatagactgaaatgcaccaccaaggccctaactgaggaatttatctccaggcctgaagagactatgctgagtgtgagtgaacaggtgtctcaggaagtccatcaaggccttaaggacatgggcctcactactctgagcagtgaaaacacagcatctcttctaggccaactccagaacatcaccaagaaagagaactgcattcgtagcattgttgatcagtggatccgtttttttctcaaatgctgtttgcttcatggcatgcaggagtctctgctacactttcctggaggcctcattctcattgaaaaggagttggcagaactgggctggaagtttctcaatctgatgcatcataatcagcaggtatttggcccatactatgctgagatcctaaaacacatcatccatccagctcaagcacaagaaacagatgtggagcctaactgatagtgctggaccccagctatggcaacagggactcaggagagagaggtcagcatgtttctgggaggacatcacctgtggttagtcgaacagtcagccctcttcctcgctatagccaggacacagggatgcaggggtcaagcatgtaagcaccaactggcccaatccccttcactaataaacctctgagctgcaag

SEQ ID NO: 12574 - protein, 407 aa, Homo sapiens
MYNAFWNHLKEQLLSTPPDFTCALELLKDVKENRLRNEIEEALDTDLLKQEAEHGALDVPHLSNYILNLMALLCAPVRDEAIQKLETIRDPVQLLRGILRVLGLMKMDMVNYTIQSFRPYLQEHSIQYEQAKFQELLDKQPSLLDYTTKWLTKAATDITTLCPSSPDSPSSSCSMACSLPSGAGNNSEPPSPTMVLYQGYLNLLLWDLENVEFPETLLMDRIRLQELAFQLHQLTVLASVLLVARSFSGEVLFRSPEFVDRLKCTTKALTEEFISRPEETMLSVSEQVSQEVHQGLKDMGLTTLSSENTASLLGQLQNITKKENCIRSIVDQWIRFFLKCCLLHGMQESLLHFPGGLILIEKELAELGWKFLNLMHHNQQVFGPYYAEILKHIIHPAQAQETDVEPN

SEQ ID NO: 12575 - DNA, 2253 bp, Homo sapiens
agacgcagaggcgaggccgccagtcgaggacgaggaggagataacatcaagatgccgaagactgaggaaactgtgctccagaatgatcccagtgtagcagagaatggggcccctgagcctaaaacaccagggcagagccagaaaagcaagagtttctgtttagatgaccagtctcctgacctgatgtcttttctgtcacagatctgatagagacagttaatgaagtttccaagctgagcatttcacatgaaattgtagtaaaccaagatttctatgtggaagagaccattttgcctccaaacagtgtagaaggcaggtttgcggaggcaatgtacaatgctttttggaaccatctgaaagaacagctattgagtactcctcctgacttcacttgtgcccttgaacttctaaaagatgttaaggagaatcccggagatgaataggcgagcccttgcccacaaggaacttgcatgcttgagtcaaaaggctatttcaagggaaccttaaagattccagatttgctattttatcctcacactttggagtaaaacaatctaaaaatatccttatcctttattaagaatgcctcatctccttgtggtggtgtgtatttcatatttcttatatcccacacatttaaaaccacattcttatttttattcatatttttacctcattctacctaaaaaatagtaatgactactactataactgatcccagtgaagccttgaatggtaattgtcctctagacagaaagaaataatactctctaagaaatgtagagactcagttctctgcccccccagaagacataatctgggatgcctttggcctaagagcatagttcattggagaaagtttgaggttctgaacagaacttggctcctttgatttcctttgttgggcagaccttgctatcactgctattaccatggcagaaccgcctaagaaatgagatagaagaagctctggacacagatctcctcaagcaggaagcagaacatggggccctggatgtccctcatctttctaactacattctcaatttgatggctctgctatgtgcaccggttcgagatgaagcgatacagaaactagagaccataagagatccagtgcagttactgaggggcatcctccgtgttctgggcctaatgaaaatggacatggtgaactataccatccagagctttcgaccctacctgcaggaacattccatccagtatgaacaagctaaattccaggaactccttgataaacagcccagtctcctcgattataccacaaaatggctaaccaaagcagccacagacatcactacactatgtccgagttctcctgactcacctagctcctcctgcagcatggcgtgttcacttccaagcggggcagactctgctgatggacagaatccggctccaggaactggcattccagttgcaccagttaactgtcctggcctcagtcttgctagtggccagaagcttctctggtgaagttttattcagatcacctgaatttgtggatagactgaaatgcaccaccaaggccctaactgaggaatttatctccaggcctgaagagactatgctgagtgtgagtgaacaggtgtctcaggaagtccatcaaggccttaaggacatgggcctcactactctgagcagtgaaaacacagcatctcttctaggccaactccagaacatcaccaagaaagagaactgcattcgtagcattgttggagtctctgctacactttcctggaggcctcattctcattgaaaaggagttggcagaactgggctggaagtttctcaatctgatgcatcataatcagcagagtcatttttcacaaaacgaaatctttccagaagatcacgaataagagagatcaaagctaggcagcttgagttgaagtagagctggaagaaggagttttgaggactgtttcaaaaccactggactagatgatctctaaagtggtgacatggacataggataatggttatagacagtccccctcccaacgggaaaaaatgaaagcaagcaaaaagttaccagctccaagccaacttgaaatccaatcagcatttccaagttcgttctgtgagactgtagtgtcaggacaaagcaacaacaaaatgtgctctactctaaagaagtgtgggacatacagaactgaaggaggactaataacaacgaatgcaactaacacgtatttctccctcaataaacgccagatgttgtactacgtt

SEQ ID NO: 12576 - protein, 148 aa, Homo sapiens
MALLCAPVRDEAIQKLETIRDPVQLLRGILRVLGLMKMDMVNYTIQSFRPYLQEHSIQYEQAKFQELLDKQPSLLDYTTKWLTKAATDITTLCPSSPDSPSSSCSMACSLPSGADSADGQNPAPGTGIPVAPVNCPGLSLASGQKLLW

SEQ ID NO: 12577 - DNA, 416 bp, Homo sapiens
aatagaaagtttcttccttgggcaaggggtagggagaaggaatgtttctctaagatagaaagatctacaaaatcacttctttatagaccaagagtatgtctcagagccatcatctttaagccttggaattttaagatgcatattcccttctcgtcgtaggtctcctcgattataccacaaaatggctaaccaaagcagccacagacatcactacactatgtccgagttctcctgactcacctagctcctcctgcagcatggcgtgttcacttccaagcggggcaggtaacaattcagagccccccagtccaacaatggtgctataccaaggctacctgaacctcctcctctgggatcttgaaaacgtagaattcccagagactctgctgatggacagaatccggctccaggaactg

SEQ ID NO: 12578 - protein, 52 aa, Homo sapiens
MACSLPSGAGNNSEPPSPTMVLYQGYLNLLLWDLENVEFPETLLMDRIRLQE

SEQ ID NO: 12579 - DNA, 3191 bp, Homo sapiens
cctgactcacctagctcctcctgcagcatggcgtgttcacttccaagcggggcagactctgctgatggacagaatccggctccaggaactggcattccagttgcaccagttaactgtcctggcctcagtcttgctagtggccagaagcttctctggtgaagttttattcagatcacctgaatttgtggatagactgaaatgcaccaccaaggccctaactgaggaatttatctccaggcctgaagagactatgctgagtgtgagtgaacaggtgtctcaggaagtccatcaaggccttaaggacatgggcctcactactctgagcagtgaaaacacagcatctcttctaggccaactccagaacatcaccaagaaagagaactgcattcgtagcattgttgatcagtggatccgtttttttctcaaatgctgtttgcttcatggcatgcaggagtctctgctacactttcctggaggcctcattctcattgaaaaggagttggcagaactgggctggaagtttctcaatctgatgcatcataatcagcagagtcatttttcacaaaacgaaatctttccagaagatcacgaataagagagatcaaagctaggcagcttgagttgaagtagagctggaagaaggagttttgaggactgtttcaaaaccactggactagatgatctctaaagtggtgacatggacataggataatggttatagacagtccccctcccaacgggaaaaaatgaaagcaagcaaaaagttaccagctccaagccaacttgaaatccaatcaggatcttatccaggacgcttcattgcatttggtcttcatttctccttagtctcctccaggctgacatttcctcaatctttattggtcttccacagccctgacacttttggagataccagtcagcatttccaagttcgttctgtgagactgtagtgtcaggacaaagcaacaacaaaatgtgctctactctaaagaagtgtgggacatacagaactgaagggatgatgcttcctgtctgtcacaaggctgagtgaacacaacatgcctgtaggtccagaacattcttcctacagagaccagatgtccagaaagccctatctgctggattcagggaacgcctctcctcatttctgtcacactatttgcaaaagcctccttctctgagatcttcaaagctgcagttctagccacagtctgcagggagttgcagaatgccatgaccatggtagcacttttcaaggaagaaagaaaggtgggagttctttccgggataattttgacaagaggagctgtcattatgaacatggtgggtatgagcgcccgccttcacactgccaggagaatgatggaagcgtggagatgagggatgtccacaaggaccaacaactaagacagtaagtgaccaggcagcctggtttgcacgtagcagcccccgggactgtgcaaccctttcattctctgtggtcttccttttcttctctcattagagaactgacgaatgctggaagtggaatagtggctgagcaatcctaattgtagccctggcgtcagtgagtggagcatgtataggagactttcttagatttaatggatacccgccttctctcctcttccccacagcactccttatagcatccgatgcgaaagaagaatgaaatggcatagtgaagacgaaatccgtattaccacgtggagaaatagaaaacctccggagagaaaaatgagtcagaacacacaggatggatacacaaggaactggtttaaggtcacaattccttacgggataaagtatgacaaggcatggctaatgaattcaatccagagccattgcagtgaccgcttcactccggttgatttccactacgtccgaaatcgggcatgcttctttgtccaggatgctagcgctgcctccgcattgaaggatgtcagttataagatttatgatgatgagaaccaaaagatatgtatatttgtcaatcattctactgcgccctactctgtgaagaataagttgaagccaggccaaatggagatgctaaagctgaccatgaacaaacggtacaatgtctcccagcaagctcttgatctccagaatctccgctttgacccagacttgatgggccgtgacattgatataatcctgaatcgaagaaactgcatggctgccaccctgaagatcattgaaagaaatttccctgagctgttgtctttgaacttgtgcaacaacaagctgtaccagctggatggcctttctgacattacagagaaggctcccaaagtcaagaccctgaatctctccaaaaataagctggagtcggcgtgggagttgggcaaggtgaaagggctgaagctcgaagagctatggctagaagggaacccgttgtgcagcaccttctcggaccagtccgcctatgtaagtgccatccgggattgtttccccaagttgttacgcctggacggccgagagttatccgcaccagtgattgttgacattgacagctctgagacaatgaaaccctgcaaggaaaactttactggatctgagaccctaaagcatttagtcctgcaattcctgcagcagtattactcgatctatgactctggagatcgacagggtctcctcggtgcttaccacgatgaggcctgcttctccttggctattcccttcgaccccaaggactcagccccgagcagcttgtgcaagtactttgaggatagcaggaatatgaaaacactcaaggacccctacctgaagggggaactgctgaggcgcacaaaacgtgacattgtggactccctcagtgcgttgcccaaaactcagcatgacctcagctccatcctggtggacgtgtggtgccagacggtgccttcaggacaatgagtggaactacactagagctggccaggccttcactatgctccagaccgagggcaagatccccgcagaggccttcaagcaaatctcctaaaaggagccctccgatgtcttctttgtcttcgttcacatcctctttgtttcctcttttcaccagcctaaggcctggctgaccaggaagccaacgttaacttgcaggccacgtgacataaccacccaaagagccagttgctctgtgtattcgccccactcatgatcaccattttattttcataataaagagtgacgttacacgttgt

SEQ ID NO: 12580 - protein, 409 aa, Homo sapiens
MKWHSEDEIRITTWRNRKPPERKMSQNTQDGYTRNWFKVTIPYGIKYDKAWLMNSIQSHCSDRFTPVDFHYVRNRACFFVQDASAASALKDVSYKIYDDENQKICIFVNHSTAPYSVKNKLKPGQMEMLKLTMNKRYNVSQQALDLQNLRFDPDLMGRDIDIILNRRNCMAATLKIIERNFPELLSLNLCNNKLYQLDGLSDITEKAPKVKTLNLSKNKLESAWELGKVKGLKLEELWLEGNPLCSTFSDQSAYVSAIRDCFPKLLRLDGRELSAPVIVDIDSSETMKPCKENFTGSETLKHLVLQFLQQYYSIYDSGDRQGLLGAYHDEACFSLAIPFDPKDSAPSSLCKYFEDSRNMKTLKDPYLKGELLRRTKRDIVDSLSALPKTQHDLSSILVDVWCQTVPSGQ

SEQ ID NO: 12581 - DNA, 2886 bp, Homo sapiens
cctcctcctctgggatcttgaaaacgtagaattcccagagactctgctgatggacagaatccggctccaggaactggcattccagttgcaccagttaactgtcctggcctcagtcttgctagtggccagaagcttctctggtgaagttttattcagatcacctgaatttgtggatagactgaaatgcaccaccaaggccctaactgaggaatttatctccaggcctgaagagactatgctgagtgtgagtgaacaggtgtctcaggaagtccatcaaggccttaaggacatgggcctcactactctgagcagtgaaaacacagcatctcttctaggccaactccagaacatcaccaagaaagagaactgcattcgtagcattgttggagtctctgctacactttcctggaggcctcattctcattgaaaaggagttggcagaactgggctggaagtttctcaatctgatgcatcataatcagcagagtcatttttcacaaaacgaaatctttccagaagatcacgaataagagagatcaaagctaggcagcttgagttgaagtagagctggaagaaggagttttgaggactgtttcaaaaccactggactagatgatctctaaaggatcttatccaggacgcttcattgcatttggtcttcatttctccttagtctcctccaggctgacatttcctcaatctttattggtcttccacagccctgacacttttggagataccagtcagcatttccaagttcgttctgtgagactgtagtgtcaggacaaagcaacaacaaaatgtgctctactctaaagaagtgtgggacatacagaactgaagttgcagaatgccatgaccatggtagcacttttcaaggaagaaagaaaggtgggagttctttccgggataattttgacaagaggagctgtcattatgaacatggtgggtatgagcgcccgccttcacactgccaggagaatgatggaagcgtggagatgagggatgtccacaaggaccaacaactaagacacactccttatagcatccgatgcgaaagaagaatgaaatggcatagtgaagacgaaatccgtattaccacgtggagaaatagaaaacctccggagagaaaaatgagtcagaacacacaggatggatacacaaggaactggtttaaggtcacaattccttacgggataaagtatgacaaggcatggctaatgaattcaatccagagccattgcagtgaccgcttcactccggttgatttccactacgtccgaaatcgggcatgcttctttgtccaggatgctagcgctgcctccgcattgaaggatgtcagttataagatttatgatgatgagaaccaaaagatatgtatatttgtcaatcattctactgcgccctactctgtgaagaataagttgaagccaggccaaatggagatgctaaagctgaccatgaacaaacggtacaatgtctcccagcaagctcttgatctccagaatctccgctttgacccagacttgatgggccgtgacattgatataatcctgaatcgaagaaactgcatggctgccaccctgaagatcattgaaagaaatttccctgagctgttgtctttgaacttgtgcaacaacaagctgtaccagctggatggcctttctgacattacagagaaggctcccaaagtcaagaccctgaatctctccaaaaataagctggagtcggcgtgggagttgggcaaggtgaaagggctgaagctcgaagagctatggctagaagggaacccgttgtgcagcaccttctcggaccagtccgcctatgtaagtgccatccgggattgtttccccaagttgttacgcctggacggccgagagttatccgcaccagtgattgttgacattgacagctctgagacaatgaaaccctgcaaggaaaactttactggatctgagaccctaaagcatttagtcctgcaattcctgcagcagtattactcgatctatgactctggagatcgacagggtctcctcggtgcttaccacgatgaggcctgcttctccttggctattcccttcgaccccaaggactcagccccgagcagcttgtgcaagtactttgaggatagcaggaatatgaaaacactcaaggacccctacctgaagggggaactgctgaggcgcacaaaacgtgacattgtggactccctcagtgcgttgcccaaaactcagcatgacctcagctccatcctggtggacgtgtggtgccagacggaaaggatgctctgcttttctgtcaatggggttttcaaggaagtggaaggacagtctcagggttctgttctcgccttcacccggaccttcattgctacccctggcagcagttccagtctgtgcatcgtgaatgacgagctgtttgtgagggatgccagcccccaagagactcagagtgccttctccatcccagtgtccacactctcctccagctctgagccctccctctcccaggagcagcaggaaatggtgcaggctttctctgcccagtctgggatgaaactggagtggtctcagaagtgccttcaggacaatgagtggaactacactagagctggccaggccttcactatgctccagaccgagggcaagatccccgcagaggccttcaagcaaatctcctaaaaggagccctccgatgtcttctttgtcttcgttcacatcctctttgtttcctcttttcaccagcctaaggcctggctgaccaggaagccaacgttaacttgcaggccacgtgacataaccacccaaagagccagttgctctgtgtattcgccccactcatgatcaccattttattttcataataaagagtgacgttacacgttgt

SEQ ID NO: 12582 - protein, 626 aa, Homo sapiens; identical to SEQ ID NO: 2175

SEQ ID NO: 12583 - DNA, 2400 bp, Homo sapiens
aattgaagtcctctccccactgctttgagaaggaaccgttaagacgctgggccccacccacaagattgcgtcttgtttgtggcaagattctgaggggaagtgtagctcccaggttggttccaagtcttcttccaattaggatcttatccaggacgcttcattgcatttggtcttcatttctccttagtctcctccaggctgacatttcctcaatctttattggtcttccacagccctgacacttttggagataccagtcagcatttccaagttcgttctgtgagactgtagtgtcaggacaaagcaacaacaaaatgtgctctactctaaagaagtgtgggacatacagaactgaagttgcagaatgccatgaccatggtagcacttttcaaggaagaaagaaaggtgggagttctttccgggataattttgacaagaggagctgtcattatgaacatggtgggtatgagcgcccgccttcacactgccaggagaatgatggaagcgtggagatgagggatgtccacaaggaccaacaactaagacacactccttatagcatccgatgcgaaagaagaatgaaatggcatagtgaagacgaaatccgtattaccacgtggagaaatagaaaacctccggagagaaaaatgagtcagaacacacaggatggatacacaaggaactggtttaaggtcacaattccttacgggataaagtatgacaaggcatggctaatgaattcaatccagagccattgcagtgaccgcttcactccggttgatttccactacgtccgaaatcgggcatgcttctttgtccaggatgctagcgctgcctccgcattgaaggatgtcagttataagatttatgatgatgagaaccaaaagatatgtatatttgtcaatcattctactgcgccctactctgtgaagaataagttgaagccaggccaaatggagatgctaaagctgaccatgaacaaacggtacaatgtctcccagcaagctcttgatctccagaatctccgctttgacccagacttgatgggccgtgacattgatataatcctgaatcgaagaaactgcatggctgccaccctgaagatcattgaaagaaatttccctgagctgttgtctttgaacttgtgcaacaacaagctgtaccagctggatggcctttctgacattacagagaaggctcccaaagtcaagaccctgaatctctccaaaaataagctggagtcggcgtgggagttgggcaaggtgaaagggctgaagctcgaagagctatggctagaagggaacccgttgtgcagcaccttctcggaccagtccgcctatgtaagtgccatccgggattgtttccccaagttgttacgcctggacggccgagagttatccgcaccagtgattgttgacattgacagctctgagacaatgaaaccctgcaaggaaaactttactggatctgagaccctaaagcatttagtcctgcaattcctgcagcagtattactcgatctatgactctggagatcgacagggtctcctcggtgcttaccacgatgaggcctgcttctccttggctattcccttcgaccccaaggactcagccccgagcagcttgtgcaagtactttgaggatagcaggaatatgaaaacactcaaggacccctacctgaagggggaactgctgaggcgcacaaaacgtgacattgtggactccctcagtgcgttgcccaaaactcagcatgacctcagctccatcctggtggacgtgtggtgccagacggaaaggatgctctgcttttctgtcaatggggttttcaaggaagtggaaggacagtctcagggttctgttctcgccttcacccggaccttcattgctacccctggcagcagttccagtctgtgcatcgtgaatgacgagctgtttgtgagggatgccagcccccaagagactcagagtgccttctccatcccagtgtccacactctcctccagctctgagccctccctctcccaggagcagcaggaaatggtgcaggctttctctgcccagtctgggatgaaactggagtggtctcagaagtgccttcaggacaatgagtggaactacactagagctggccaggccttcactatgctccagaccgagggcaagatccccgcagaggccttcaagcaaatctcctaaaaggagccctccgatgtcttctttgtcttcgttcacatcctctttgtttcctcttttcaccagcctaaggcctggctgaccaggaagccaacgttaacttgcaggccacgtgacataaccacccaaagagccagttgctctgtgtattcgccccactcatgatcaccattttattttcataataaagagtgacgttacacgttgt

SEQ ID NO: 12584 - protein, 626 aa, Homo sapiens; identical to SEQ ID NO: 2175

SEQ ID NO: 12585 - DNA, 545 bp, Homo sapiens
acccacaagattgcgtcttgtttgtggcaagattctgaggggaagtgtagctcccaggttggttccaagtcttcttccaattaggatcttatccaggacgcttcattgcatttggtcttcatttctccttagtctcctccaggctgacatttcctcaatctttattggtcttccacagccctgacacttttggagataccagtcagcatttccaagttcgttctgtgagactgtagtgtcaggacaaagcaacaacaaaatgtgctctactctaaagaagtgtgggacatacagaactgaagttgcagaatgccatgaccatggtagcacttttcaaggaagaaagaaaggtgggagttctttccgggataattttgacaagaggagctgtcattatgaacatggtgggtatgagcgcccgccttcacactgccaggagaatgatggaagcgtggagatgagggatgtccacaaggaccaacaactaagacagtaagtgaccaggcagcctggtttgcacgtagcagcccccgggactgtgcaac

SEQ ID NO: 12586 - protein, 78 aa, Homo sapiens
MCSTLKKCGTYRTEVAECHDHGSTFQGRKKGGSSFRDNFDKRSCHYEHGGYERPPSHCQENDGSVEMRDVHKDQQLRQ

SEQ ID NO: 12587 - DNA, 2034 bp, Homo sapiens
atgctgcagcctgaggcagggggtggcctaacagtctcccaaaggtggttgacggtgaatgctgaggatctctgtgaggttgttggtccaacacttggggtcaccttaaggactctaatgtcttacagaggtgattatggaatagaggtgattgagagtactattgatggattcacctactgggaaactggtgttaggaagattggatatgtaactgacctccataaaagaaaaactctaagaaggaaacagcagactttacgaagtcttgtgggtctcttgcccattgtcctctacgtcctccttcttgttactgaccacagtgttgggtacgtgacatgggctgacccagtcgtggcacaccatttccctgtccacactgatcggttcacttatgggtacttgacgcaagtcaggacagttgaaacctttcctggatgtttttctggagtacaagagcctcacactgtagccaccgccaccctaggccccgagcagtactggcagactactgccaatgttcccttaaggctcaaggtctcgtttactgcctgctcttctggaggggctgaggtgttcccattccgctggcaacagcactctgatgggatgttccggccaaagtacttccgtggggcagcggggaccacctgcagaagatccccaactgctaggcagcgtctgccagtgaaagagctatggtggtggctgctggcaaatgcctcatctgggaagctgaggctgcgctgcaagcggatgtggccaggcagggacgctgggataggccagcagacagcgggacactcagatcagactgaccctatcccatggccaagattgccctgctgcgtccaggtccagcagccagcaaacactaaagccacagagaggagtgtggatgtggtacagtggctcttacagggtatactagagaagaatgaggatgtgaagaaaactggggttcacattgagcctggggtggaaatcctggctgttcagggtggtggaaagtgtagggctgattgccattcctatgatgccttccttgaatcctccggtaaagccacccctcctaaagccactagcatggatccccaaaatgtccaccacagaacgaaaagattgagtgctccgaatcctgtcagagaggtgcttccggctccacaccctgactcaggcggaagttttattggacttcggctcagatctgaagccttccggcaactttcatatcctgacgcgctggaaggaagtctggtacgagtggaaccagccgcatttccaagttcgttctgtgagactgtagtgtcaggacaaagcaacaacaaaatgtgctctactctaaagaagtgtgggacatacagaactgaagttgcagaatgccatgaccatggtagcacttttcaaggaagaaagaaaggtgggagttctttccgggataattttgacaagaggagctgtcattatgaacatggtgggtatgagcgcccgccttcacactgccaggagaatgatggaagcgtggagatgagggatgtccacaaggaccaacaactaagacacactccttatagcatccgatgcgaaagaagaatgaaatggcatagtgaagacgaaatccgtattaccacgtggagaaatagaaaacctccggagagaaaaatgagtcagaacacacaggatggatacacaaggaactggtttaaggtcacaattccttacgggataaagtatgacaaggcatggctaatgaattcaatccagagccattgcagtgaccgcttcactccggttgatttccactacgtccgaaatcgggcatgcttctttgtccaggatgctagcgctgcctccgcattgaaggatgtcagttataagatttatgatgatgagaaccaaaagatatgtatatttgtcaatcattctactgcgccctactctgtgaagaataagttgaagccaggccaaatggagatgctaaagcccaagaagaaaggtgaactccggagagagaaattgcttcctcgagattaa

SEQ ID NO: 12588 - protein, 677 aa, Homo sapiens
MLQPEAGGGLTVSQRWLTVNAEDLCEVVGPTLGVTLRTLMSYRGDYGIEVIESTIDGFTYWETGVRKIGYVTDLHKRKTLRRKQQTLRSLVGLLPIVLYVLLLVTDHSVGYVTWADPVVAHHFPVHTDRFTYGYLTQVRTVETFPGCFSGVQEPHTVATATLGPEQYWQTTANVPLRLKVSFTACSSGGAEVFPFRWQQHSDGMFRPKYFRGAAGTTCRRSPTARQRLPVKELWWWLLANASSGKLRLRCKRMWPGRDAGIGQQTAGHSDQTDPIPWPRLPCCVQVQQPANTKATERSVDVVQWLLQGILEKNEDVKKTGVHIEPGVEILAVQGGGKCRADCHSYDAFLESSGKATPPKATSMDPQNVHHRTKRLSAPNPVREVLPAPHPDSGGSFIGLRLRSEAFRQLSYPDALEGSLVRVEPAAFPSSFCETVVSGQSNNKMCSTLKKCGTYRTEVAECHDHGSTFQGRKKGGSSFRDNFDKRSCHYEHGGYERPPSHCQENDGSVEMRDVHKDQQLRHTPYSIRCERRMKWHSEDEIRITTWRNRKPPERKMSQNTQDGYTRNWFKVTIPYGIKYDKAWLMNSIQSHCSDRFTPVDFHYVRNRACFFVQDASAASALKDVSYKIYDDENQKICIFVNHSTAPYSVKNKLKPGQMEMLKPKKKGELRREKLLPRD

SEQ ID NO: 12589 - DNA, 501 bp, Homo sapiens
ccgcaccagtgattgttgacattgacagctctgagacaatgaaaccctgcaaggaaaactttactggatctgagaccctaaagcatttagtcctgcaattcctgcagcagtattactcgatctatgactctggagatcgacagggtctcctcggtgcttaccacgatgaggcctgcttctccttggctattcccttcgaccccaaggactcagccccgagcagcttgtgcaagtactttgaggatagcaggaatatgaaaacactcaagatccccgcagaggccttcaagcaaatctcctaaaaggagccctccgatgtcttctttgtcttcgttcacatcctctttgtttcctcttttcaccagcctaaggcctggctgaccaggaagccaacgttaacttgcaggccacgtgacataaccacccaaagagccagttgctctgtgtattcgccccactcatgatcaccattttattttcataataaagagtgacgttaca

SEQ ID NO: 12590 - protein, 87 aa, Homo sapiens
MKPCKENFTGSETLKHLVLQFLQQYYSIYDSGDRQGLLGAYHDEACFSLAIPFDPKDSAPSSLCKYFEDSRNMKTLKIPAEAFKQIS

SEQ ID NO: 12591 - DNA, 2015 bp, Homo sapiens
atgctgcagcctgaggcagggggtggcctaacagtctcccaaaggtggttgacggtgaatgctgaggatctctgtgaggttgttggtccaacacttggggtcaccttaaggactctaatgtcttacagaggtgattatggaatagaggtgattgagagtactattgatggattcacctactgggaaactggtgttaggaagattggatatgtaactgacctccataaaagaaaaactctaagaaggaaacagcagactttacgaagtcttgtgggtctcttgcccattgtcctctacgtcctccttcttgttactgaccacagtgttgggtacgtgacatgggctgacccagtcgtggcacaccatttccctgtccacactgatcggttcacttatgggtacttgacgcaagtcaggacagttgaaacctttcctggatgtttttctggagtacaagagcctcacactgtagccaccgccaccctaggccccgagcagtactggcagactactgccaatgttcccttaaggctcaaggtctcgtttactgcctgctcttctggaggggctgaggtgttcccattccgctggcaacagcactctgatgggatgttccggccaaagtacttccgtggggcagcggggaccacctgcagaagatccccaactgctaggcagcatctgccagtgaaagagctatggtggtggctgctggcaaatgcctcatctgggaagctgaggctgcgctgcaagcgggtgtggccaggcagggacgctgggataggccagcagacagcgggacactcagatcagactgaccctatcccatggccaagattgccctgctgcgtccaggtccagcagccagcaaacactaaagccacagagaggagtgtggatgtggtacagtggctcttacagggtatactagagaagaatgaggatgtgaagaaaactggggttcacattgagcctggggtggaaatcctggctgttcagggtggtggaaagtgtagggctgattgccattcctatgatgccttccttgaatcctccggtaaagccacccctcctaaagccactagcatggatccccaaaatgtccaccacagaacgaaaagattgagtgctccgaatcctgtcagagaggtgcttccggctccacaccctgactcaggcggaagttttattggacttcggctcagatctgaagccttccggcaactttcatatcctgacgcgctggaaggaagtctgcatttccaagttcgttctgtgagactgtagtgtcaggacaaagcaacaacaaaatgtgctctactctaaagaagtgtgggacatacagaactgaagttgcagaatgccatgaccatggtagcacttttcaaggaagaaagaaaggtgggagttctttccgggataattttgacaagaggagctgtcattatgaacatggtgggtatgagcgcccgccttcacactgccaggagaatgatggaagcgtggagatgagggatgtccacaaggaccaacaactaagacacactccttatagcatccgatgcgaaagaagaatgaaatggcatagtgaagacgaaatccgtattaccacgtggagaaatagaaaacctccggagagaaaaatgagtcagaacacacaggatggatacacaaggaactggtttaaggtcacaattccttacgggataaagtatgacaaggcatggctaatgaattcaatccagagccattgcagtgaccgcttcactccggttgatttccactacgtccgaaatcgggcatgcttctttgtccaggatgctagcgctgcctccgcattgaaggatgtcagttataagatttatgatgatgagaaccaaaagatatgtatatttgtcaatcattctactgcgccctactctgtgaagaataagttgaagccaggccaaatggagatgctaaagcccaagaagaaaggtgaactccggagagagaaattgcttcctcgagattaa

SEQ ID NO: 12592 - protein, 428 aa, Homo sapiens
MLQPEAGGGLTVSQRWLTVNAEDLCEVVGPTLGVTLRTLMSYRGDYGIEVIESTIDGFTYWETGVRKIGYVTDLHKRKTLRRKQQTLRSLVGLLPIVLYVLLLVTDHSVGYVTWADPVVAHHFPVHTDRFTYGYLTQVRTVETFPGCFSGVQEPHTVATATLGPEQYWQTTANVPLRLKVSFTACSSGGAEVFPFRWQQHSDGMFRPKYFRGAAGTTCRRSPTARQHLPVKELWWWLLANASSGKLRLRCKRVWPGRDAGIGQQTAGHSDQTDPIPWPRLPCCVQVQQPANTKATERSVDVVQWLLQGILEKNEDVKKTGVHIEPGVEILAVQGGGKCRADCHSYDAFLESSGKATPPKATSMDPQNVHHRTKRLSAPNPVREVLPAPHPDSGGSFIGLRLRSEAFRQLSYPDALEGSLHFQVRSVRL

SEQ ID NO: 12593 - DNA, 2175 bp, Homo sapiens
actagaagtttactgagaattgggctttaaggccatttccaagttcgttctgtgagactgtagtgtcaggacaaagcaacaacaaaatgtgctctactctaaagaagtgtgggacatacagaactgaagttgcagaatgccatgaccatggtagcacttttcaaggaagaaagaaaggtgggagttctttccgggataattttgacaagaggagctgtcattatgaacatggtgggtatgagcgcccgccttcacactgccaggagaatgatggaagcgtggagatgagggatgtccacaaggaccaacaactaagacacactccttatagcatccgatgcgaaagaagaatgaaatggcatagtgaagacgaaatccgtattaccacgtggagaaatagaaaacctccggagagaaaaatgagtcagaacacacaggatggatacacaaggaactggtttaaggtcacaattccttacgggataaagtatgacaaggcatggctaatgaattcaatccagagccattgcagtgaccgcttcactccggttgatttccactacgtccgaaatcgggcatgcttctttgtccaggatgctagcgctgcctccgcattgaaggatgtcagttataagatttatgatgatgagaaccaaaagatatgtatatttgtcaatcattctactgcgccctactctgtgaagaataagttgaagccaggccaaatggagatgctaaagctgaccatgaacaaacggtacaatgtctcccagcaagctcttgatctccagaatctccgctttgacccagacttgatgggccgtgacattgatataatcctgaatcgaagaaactgcatggctgccaccctgaagatcattgaaagaaatttccctgagctgttgtctttgaacttgtgcaacaacaagctgtaccagctggatggcctttctgacattacagagaaggctcccaaagtcaagaccctgaatctctccaaaaataagctggagtcggcgtgggagttgggcaaggtgaaagggctgaagctcgaagagctatggctagaagggaacccgttgtgcagcaccttctcggaccagtccgcctatgtaagtgccatccgggattgtttccccaagttgttacgcctggacggccgagagttatccgcaccagtgattgttgacattgacagctctgagacaatgaaaccctgcaaggaaaactttactggatctgagaccctaaagcatttagtcctgcaattcctgcagcagtattactcgatctatgactctggagatcgacagggtctcctcggtgcttaccacgatgaggcctgcttctccttggctattcccttcgaccccaaggactcagccccgagcagcttgtgcaagtactttgaggatagcaggaatatgaaaacactcaaggacccctacctgaagggggaactgctgaggcgcacaaaacgtgacattgtggactccctcagtgcgttgcccaaaactcagcatgacctcagctccatcctggtggacgtgtggtgccagacggaaaggatgctctgcttttctgtcaatggggttttcaaggaagtggaaggacagtctcagggttctgttctcgccttcacccggaccttcattgctacccctggcagcagttccagtctgtgcatcgtgaatgacgagctgtttgtgagggatgccagcccccaagagactcagagtgccttctccatcccagtgtccacactctcctccagctctgagccctccctctcccaggagcagcaggaaatggtgcaggctttctctgcccagtctgggatgaaactggagtggtctcagaagtgccttcaggacaatgagtggaactacactagagctggccaggccttcactatgctccagaccgagggcaagatccccgcggaggccttcaagcaaatctcctaaaaggagccctccgatgtcttctttgtcttcgttcacatcctctttgtttcctcttttcaccagcctaaggcctggctgaccaggaagccaacgttaacttgcaggccacgtgacataaccacccaaagagccagttgctctgtgtattcgccccactcatgatcaccattttattttcataataaagagtgacgttacacgttgtaca

SEQ ID NO: 12594 - protein, 626 aa, Homo sapiens; identical to SEQ ID NO: 2175

SEQ ID NO: 12595 - DNA, 2252 bp, Homo sapiens
aggtgcttccggctccacaccctgactcaggcggaagttttattggacttcggctcagatctgaagccttccggcaactttcatatcctgacgcgctggaaggaagtctgcatttccaagttcgttctgtgagactgtagtgtcaggacaaagcaacaacaaaatgtgctctactctaaagaagtgtgggacatacagaactgaagttgcagaatgccatgaccatggtagcacttttcaaggaagaaagaaaggtgggagttctttccgggataattttgacaagaggagctgtcattatgaacatggtgggtatgagcgcccgccttcacactgccaggagaatgatggaagcgtggagatgagggatgtccacaaggaccaacaactaagacacactccttatagcatccgatgcgaaagaagaatgaaatggcatagtgaagacgaaatccgtattaccacgtggagaaatagaaaacctccggagagaaaaatgagtcagaacacacaggatggatacacaaggaactggtttaaggtcacaattccttacgggataaagtatgacaaggcatggctaatgaattcaatccagagccattgcagtgaccgcttcactccggttgatttccactacgtccgaaatcgggcatgcttctttgtccaggatgctagcgctgcctccgcattgaaggatgtcagttataagatttatgatgatgagaaccaaaagatatgtatatttgtcaatcattctactgcgccctactctgtgaagaataagttgaagccaggccaaatggagatgctaaagctgaccatgaacaaacggtacaatgtctcccagcaagctcttgatctccagaatctccgctttgacccagacttgatgggccgtgacattgatataatcctgaatcgaagaaactgcatggctgccaccctgaagatcattgaaagaaatttccctgagctgttgtctttgaacttgtgcaacaacaagctgtaccagctggatggcctttctgacattacagagaaggctcccaaagtcaagaccctgaatctctccaaaaataagctggagtcggcgtgggagttgggcaaggtgaaagggctgaagctcgaagagctatggctagaagggaacccgttgtgcagcaccttctcggaccagtccgcctatgtaagtgccatccgggattgtttccccaagttgttacgcctggacggccgagagttatccgcaccagtgattgttgacattgacagctctgagacaatgaaaccctgcaaggaaaactttactggatctgagaccctaaagcatttagtcctgcaattcctgcagcagtattactcgatctatgactctggagatcgacagggtctcctcggtgcttaccacgatgaggcctgcttctccttggctattcccttcgaccccaaggactcagccccgagcagcttgtgcaagtactttgaggatagcaggaatatgaaaacactcaaggacccctacctgaagggggaactgctgaggcgcacaaaacgtgacattgtggactccctcagtgcgttgcccaaaactcagcatgacctcagctccatcctggtggacgtgtggtgccagacggaaaggatgctctgcttttctgtcaatggggttttcaaggaagtggaaggacagtctcagggttctgttctcgccttcacccggaccttcattgctacccctggcagcagttccagtctgtgcatcgtgaatgacgagctgtttgtgagggatgccagcccccaagagactcagagtgccttctccatcccagtgtccacactctcctccagctctgagccctccctctcccaggagcagcaggaaatggtgcaggctttctctgcccagtctgggatgaaactggagtggtctcagaagtgccttcaggacaatgagtggaactacactagagctggccaggccttcactatgctccagaccgagggcaagatccccgcggaggccttcaagcaaatctcctaaaaggagccctccgatgtcttctttgtcttcgttcacatcctctttgtttcctcttttcaccagcctaaggcctggctgaccaggaagccaacgttaacttgcaggccacgtgacataaccacccaaagagccagttgctctgtgtattcgccccactcatgatcaccattttattttcataataaagagtgacgttacacgttgtaca

SEQ ID NO: 12596 - protein, 626 aa, Homo sapiens; identical to SEQ ID NO: 2175

SEQ ID NO: 12597 - DNA, 2403 bp, Homo sapiens
aattgaagtcctctccccactgctttgagaaggaaccgttaagacgctgggccccacccacaagattgcgtcttgtttgtggcaagattctgaggggaagtgtagctcccaggttggttccaagtcttcttccaattaggatcttatccaggacgcttcattgcatttggtcttcatttctccttagtctcctccaggctgacatttcctcaatctttattggtcttccacagccctgacacttttggagataccagtcagcatttccaagttcgttctgtgagactgtagtgtcaggacaaagcaacaacaaaatgtgctctactctaaagaagtgtgggacatacagaactgaagttgcagaatgccatgaccatggtagcacttttcaaggaagaaagaaaggtgggagttctttccgggataattttgacaagaggagctgtcattatgaacatggtgggtatgagcgcccgccttcacactgccaggagaatgatggaagcgtggagatgagggatgtccacaaggaccaacaactaagacacactccttatagcatccgatgcgaaagaagaatgaaatggcatagtgaagacgaaatccgtattaccacgtggagaaatagaaaacctccggagagaaaaatgagtcagaacacacaggatggatacacaaggaactggtttaaggtcacaattccttacgggataaagtatgacaaggcatggctaatgaattcaatccagagccattgcagtgaccgcttcactccggttgatttccactacgtccgaaatcgggcatgcttctttgtccaggatgctagcgctgcctccgcattgaaggatgtcagttataagatttatgatgatgagaaccaaaagatatgtatatttgtcaatcattctactgcgccctactctgtgaagaataagttgaagccaggccaaatggagatgctaaagctgaccatgaacaaacggtacaatgtctcccagcaagctcttgatctccagaatctccgctttgacccagacttgatgggccgtgacattgatataatcctgaatcgaagaaactgcatggctgccaccctgaagatcattgaaagaaatttccctgagctgttgtctttgaacttgtgcaacaacaagctgtaccagctggatggcctttctgacattacagagaaggctcccaaagtcaagaccctgaatctctccaaaaataagctggagtcggcgtgggagttgggcaaggtgaaagggctgaagctcgaagagctatggctagaagggaacccgttgtgcagcaccttctcggaccagtccgcctatgtaagtgccatccgggattgtttccccaagttgttacgcctggacggccgagagttatccgcaccagtgattgttgacattgacagctctgagacaatgaaaccctgcaaggaaaactttactggatctgagaccctaaagcatttagtcctgcaattcctgcagcagtattactcgatctatgactctggagatcgacagggtctcctcggtgcttaccacgatgaggcctgcttctccttggctattcccttcgaccccaaggactcagccccgagcagcttgtgcaagtactttgaggatagcaggaatatgaaaacactcaaggacccctacctgaagggggaactgctgaggcgcacaaaacgtgacattgtggactccctcagtgcgttgcccaaaactcagcatgacctcagctccatcctggtggacgtgtggtgccagacggaaaggatgctctgcttttctgtcaatggggttttcaaggaagtggaaggacagtctcagggttctgttctcgccttcacccggaccttcattgctacccctggcagcagttccagtctgtgcatcgtgaatgacgagctgtttgtgagggatgccagcccccaagagactcagagtgccttctccatcccagtgtccacactctcctccagctctgagccctccctctcccaggagcagcaggaaatggtgcaggctttctctgcccagtctgggatgaaactggagtggtctcagaagtgccttcaggacaatgagtggaactacactagagctggccaggccttcactatgctccagaccgagggcaagatccccgcggaggccttcaagcaaatctcctaaaaggagccctccgatgtcttctttgtcttcgttcacatcctctttgtttcctcttttcaccagcctaaggcctggctgaccaggaagccaacgttaacttgcaggccacgtgacataaccacccaaagagccagttgctctgtgtattcgccccactcatgatcaccattttattttcataataaagagtgacgttacacgttgtaca

SEQ ID NO: 12598 - protein, 626 aa, Homo sapiens; identical to SEQ ID NO: 2175

SEQ ID NO: 12599 - DNA, 3223 bp, Homo sapiens
aagtttcttccttgggcaaggggtagggagaaggaatgtttctctaagatagaaagatctacaaaatcacttctttatagaccaagagtatgtctcagagccatcatctttaagccttggaattttaagatgcatattcccttctcgtcgtaggtctcctcgattataccacaaaatggctaaccaaagcagccacagacatcactacactatgtccgagttctcctgactcacctagctcctcctgcagcatggcgtgttcacttccaagcggggcaggtaacaattcagagccccccagtccaacaatggtgctataccaaggctacctgaacctcctcctctgggatcttgaaaacgtagaattcccagagactctgctgatggacagaatccggctccaggaactggcattccagttgcaccagttaactgtcctggcctcagtcttgctagtggccagaagcttctctggtgaagttttattcagatcacctgaatttgtggatagactgaaatgcaccaccaaggccctaactgaggaatttatctccaggcctgaagagactatgctgagtgtgagtgaacaggtgtctcaggaagtccatcaaggccttaaggacatgggcctcactactctgagcagtgaaaacacagcatctcttctaggccaactccagaacatcaccaagaaagagaactgcattcgtagcattgttggagtctctgctacactttcctggaggcctcattctcattgaaaaggagttggcagaactgggctggaagtttctcaatctgatgcatcataatcagcagagtcatttttcacaaaacgaaatctttccagaagatcacgaataagagagatcaaagctaggcagcttgagttgaagtagagctggaagaaggagttttgaggactgtttcaaaaccactggactagatgatctctaaaggatcttatccaggacgcttcattgcatttggtcttcatttctccttagtctcctccaggctgacatttcctcaatctttattggtcttccacagccctgacacttttggagataccagtcagcatttccaagttcgttctgtgagactgtagtgtcaggacaaagcaacaacaaaatgtgctctactctaaagaagtgtgggacatacagaactgaagttgcagaatgccatgaccatggtagcacttttcaaggaagaaagaaaggtgggagttctttccgggataattttgacaagaggagctgtcattatgaacatggtgggtatgagcgcccgccttcacactgccaggagaatgatggaagcgtggagatgagggatgtccacaaggaccaacaactaagacacactccttatagcatccgatgcgaaagaagaatgaaatggcatagtgaagacgaaatccgtattaccacgtggagaaatagaaaacctccggagagaaaaatgagtcagaacacacaggatggatacacaaggaactggtttaaggtcacaattccttacgggataaagtatgacaaggcatggctaatgaattcaatccagagccattgcagtgaccgcttcactccggttgatttccactacgtccgaaatcgggcatgcttctttgtccaggatgctagcgctgcctccgcattgaaggatgtcagttataagatttatgatgatgagaaccaaaagatatgtatatttgtcaatcattctactgcgccctactctgtgaagaataagttgaagccaggccaaatggagatgctaaagctgaccatgaacaaacggtacaatgtctcccagcaagctcttgatctccagaatctccgctttgacccagacttgatgggccgtgacattgatataatcctgaatcgaagaaactgcatggctgccaccctgaagatcattgaaagaaatttccctgagctgttgtctttgaacttgtgcaacaacaagctgtaccagctggatggcctttctgacattacagagaaggctcccaaagtcaagaccctgaatctctccaaaaataagctggagtcggcgtgggagttgggcaaggtgaaagggctgaagctcgaagagctatggctagaagggaacccgttgtgcagcaccttctcggaccagtccgcctatgtaagtgccatccgggattgtttccccaagttgttacgcctggacggccgagagttatccgcaccagtgattgttgacattgacagctctgagacaatgaaaccctgcaaggaaaactttactggatctgagaccctaaagcatttagtcctgcaattcctgcagcagtattactcgatctatgactctggagatcgacagggtctcctcggtgcttaccacgatgaggcctgcttctccttggctattcccttcgaccccaaggactcagccccgagcagcttgtgcaagtactttgaggatagcaggaatatgaaaacactcaaggacccctacctgaagggggaactgctgaggcgcacaaaacgtgacattgtggactccctcagtgcgttgcccaaaactcagcatgacctcagctccatcctggtggacgtgtggtgccagacggaaaggatgctctgcttttctgtcaatggggttttcaaggaagtggaaggacagtctcagggttctgttctcgccttcacccggaccttcattgctacccctggcagcagttccagtctgtgcatcgtgaatgacgagctgtttgtgagggatgccagcccccaagagactcagagtgccttctccatcccagtgtccacactctcctccagctctgagccctccctctcccaggagcagcaggaaatggtgcaggctttctctgcccagtctgggatgaaactggagtggtctcagaagtgccttcaggacaatgagtggaactacactagagctggccaggccttcactatgctccagaccgagggcaagatccccgcggaggccttcaagcaaatctcctaaaaggagccctccgatgtcttctttgtcttcgttcacatcctctttgtttcctcttttcaccagcctaaggcctggctgaccaggaagccaacgttaacttgcaggccacgtgacataaccacccaaagagccagttgctctgtgtattcgccccactcatgatcaccattttattttcataataaagagtgacgttacacgttgtaca

SEQ ID NO: 12600 - protein, 626 aa, Homo sapiens; identical to SEQ ID NO: 2175

SEQ ID NO: 12601 - DNA, 3714 bp, Homo sapiens
agacgcagaggcgaggccgccagtcgaggacgaggaggagataacatcaagatgccgaagactgaggaaactgtgctccagaatgatcccagtgtagcagagaatggggcccctgagcctaaaacaccagggcagagccagaaaagcaagagtttctgtttagatgaccagtctcctgacctgatgtcttttctgtcacagatctgatagagacagttaatgaagtttccaagctgagcatttcacatgaaattgtagtaaaccaagatttctatgtggaagagaccattttgcctccaaacagtgtagaaggcaggtttgcggaggcaatgtacaatgctttttggaaccatctgaaagaacagctattgagtactcctcctgacttcacttgtgcccttgaacttctaaaagatgttaaggagaccttgctatcactgctattaccatggcagaaccgcctaagaaatgagatagaagaagctctggacacagatctcctcaagcaggaagcagaacatggggccctggatgtccctcatctttctaactacattctcaatttgatggctctgctatgtgcaccggttcgagatgaagcgatacagaaactagagaccataagagatccagtgcagttactgaggggcatcctccgtgttctgggcctaatgaaaatggacatggtgaactataccatccagagctttcgaccctacctgcaggaacattccatccagtatgaacaagctaaattccaggaactccttgataaacagcccagtctcctcgattataccacaaaatggctaaccaaagcagccacagacatcactacactatgtccgagttctcctgactcacctagctcctcctgcagcatggcgtgttcacttccaagcggggcaggtaacaattcagagccccccagtccaacaatggtgctataccaaggctacctgaacctcctcctctgggatcttgaaaacgtagaattcccagagactctgctgatggacagaatccggctccaggaactggcattccagttgcaccagttaactgtcctggcctcagtcttgctagtggccagaagcttctctggtgaagttttattcagatcacctgaatttgtggatagactgaaatgcaccaccaaggccctaactgaggaatttatctccaggcctgaagagactatgctgagtgtgagtgaacaggtgtctcaggaagtccatcaaggccttaaggacatgggcctcactactctgagcagtgaaaacacagcatctcttctaggccaactccagaacatcaccaagaaagagaactgcattcgtagcattgttggagtctctgctacactttcctggaggcctcattctcattgaaaaggagttggcagaactgggctggaagtttctcaatctgatgcatcataatcagcagagtcatttttcacaaaacgaaatctttccagaagatcacgaataagagagatcaaagctaggcagcttgagttgaagtagagctggaagaaggagttttgaggactgtttcaaaaccactcagcatttccaagttcgttctgtgagactgtagtgtcaggacaaagcaacaacaaaatgtgctctactctaaagaagtgtgggacatacagaactgaagttgcagaatgccatgaccatggtagcacttttcaaggaagaaagaaaggtgggagttctttccgggataattttgacaagaggagctgtcattatgaacatggtgggtatgagcgcccgccttcacactgccaggagaatgatggaagcgtggagatgagggatgtccacaaggaccaacaactaagacacactccttatagcatccgatgcgaaagaagaatgaaatggcatagtgaagacgaaatccgtattaccacgtggagaaatagaaaacctccggagagaaaaatgagtcagaacacacaggatggatacacaaggaactggtttaaggtcacaattccttacgggataaagtatgacaaggcatggctaatgaattcaatccagagccattgcagtgaccgcttcactccggttgatttccactacgtccgaaatcgggcatgcttctttgtccaggatgctagcgctgcctccgcattgaaggatgtcagttataagatttatgatgatgagaaccaaaagatatgtatatttgtcaatcattctactgcgccctactctgtgaagaataagttgaagccaggccaaatggagatgctaaagctgaccatgaacaaacggtacaatgtctcccagcaagctcttgatctccagaatctccgctttgacccagacttgatgggccgtgacattgatataatcctgaatcgaagaaactgcatggctgccaccctgaagatcattgaaagaaatttccctgagctgttgtctttgaacttgtgcaacaacaagctgtaccagctggatggcctttctgacattacagagaaggctcccaaagtcaagaccctgaatctctccaaaaataagctggagtcggcgtgggagttgggcaaggtgaaagggctgaagctcgaagagctatggctagaagggaacccgttgtgcagcaccttctcggaccagtccgcctatgtaagtgccatccgggattgtttccccaagttgttacgcctggacggccgagagttatccgcaccagtgattgttgacattgacagctctgagacaatgaaaccctgcaaggaaaactttactggatctgagaccctaaagcatttagtcctgcaattcctgcagcagtattactcgatctatgactctggagatcgacagggtctcctcggtgcttaccacgatgaggcctgcttctccttggctattcccttcgaccccaaggactcagccccgagcagcttgtgcaagtactttgaggatagcaggaatatgaaaacactcaaggacccctacctgaagggggaactgctgaggcgcacaaaacgtgacattgtggactccctcagtgcgttgcccaaaactcagcatgacctcagctccatcctggtggacgtgtggtgccagacggaaaggatgctctgcttttctgtcaatggggttttcaaggaagtggaaggacagtctcagggttctgttctcgccttcacccggaccttcattgctacccctggcagcagttccagtctgtgcatcgtgaatgacgagctgtttgtgagggatgccagcccccaagagactcagagtgccttctccatcccagtgtccacactctcctccagctctgagccctccctctcccaggagcagcaggaaatggtgcaggctttctctgcccagtctgggatgaaactggagtggtctcagaagtgccttcaggacaatgagtggaactacactagagctggccaggccttcactatgctccagaccgagggcaagatccccgcggaggccttcaagcaaatctcctaaaaggagccctccgatgtcttctttgtcttcgttcacatcctctttgtttcctcttttcaccagcctaaggcctggctgaccaggaagccaacgttaacttgcaggccacgtgacataaccacccaaagagccagttgctctgtgtattcgccccactcatgatcaccattttattttcataataaagagtgacgttacacgttgtaca

SEQ ID NO: 12602 - protein, 626 aa, Homo sapiens; identical to SEQ ID NO: 2175

SEQ ID NO: 12603 - DNA, 3961 bp, Homo sapiens
agacgcagaggcgaggccgccagtcgaggacgaggaggagataacatcaagatgccgaagactgaggaaactgtgctccagaatgatcccagtgtagcagagaatggggcccctgagcctaaaacaccagggcagagccagaaaagcaagagtttctgtttagatgaccagtctcctgacctgatgtcttttctgtcacagatctgatagagacagttaatgaagtttccaagctgagcatttcacatgaaattgtagtaaaccaagatttctatgtggaagagaccattttgcctccaaacagtgtagaaggcaggtttgcggaggcaatgtacaatgctttttggaaccatctgaaagaacagctattgagtactcctcctgacttcacttgtgcccttgaacttctaaaagatgttaaggagaccttgctatcactgctattaccatggcagaaccgcctaagaaatgagatagaagaagctctggacacagatctcctcaagcaggaagcagaacatggggccctggatgtccctcatctttctaactacattctcaatttgatggctctgctatgtgcaccggttcgagatgaagcgatacagaaactagagaccataagagatccagtgcagttactgaggggcatcctccgtgttctgggcctaatgaaaatggacatggtgaactataccatccagagctttcgaccctacctgcaggaacattccatccagtatgaacaagctaaattccaggaactccttgataaacagcccagtctcctcgattataccacaaaatggctaaccaaagcagccacagacatcactacactatgtccgagttctcctgactcacctagctcctcctgcagcatggcgtgttcacttccaagcggggcaggtaacaattcagagccccccagtccaacaatggtgctataccaaggctacctgaacctcctcctctgggatcttgaaaacgtagaattcccagagactctgctgatggacagaatccggctccaggaactggcattccagttgcaccagttaactgtcctggcctcagtcttgctagtggccagaagcttctctggtgaagttttattcagatcacctgaatttgtggatagactgaaatgcaccaccaaggccctaactgaggaatttatctccaggcctgaagagactatgctgagtgtgagtgaacaggtgtctcaggaagtccatcaaggccttaaggacatgggcctcactactctgagcagtgaaaacacagcatctcttctaggccaactccagaacatcaccaagaaagagaactgcattcgtagcattgttggagtctctgctacactttcctggaggcctcattctcattgaaaaggagttggcagaactgggctggaagtttctcaatctgatgcatcataatcagcagagtcatttttcacaaaacgaaatctttccagaagatcacgaataagagagatcaaagctaggcagcttgagttgaagtagagctggaagaaggagttttgaggactgtttcaaaaccactggactagatgatctctaaagtggtgacatggacataggataatggttatagacagtccccctcccaacgggaaaaaatgaaagcaagcaaaaagttaccagctccaagccaacttgaaatccaatcaggatcttatccaggacgcttcattgcatttggtcttcatttctccttagtctcctccaggctgacatttcctcaatctttattggtcttccacagccctgacacttttggagataccagtcagcatttccaagttcgttctgtgagactgtagtgtcaggacaaagcaacaacaaaatgtgctctactctaaagaagtgtgggacatacagaactgaagttgcagaatgccatgaccatggtagcacttttcaaggaagaaagaaaggtgggagttctttccgggataattttgacaagaggagctgtcattatgaacatggtgggtatgagcgcccgccttcacactgccaggagaatgatggaagcgtggagatgagggatgtccacaaggaccaacaactaagacacactccttatagcatccgatgcgaaagaagaatgaaatggcatagtgaagacgaaatccgtattaccacgtggagaaatagaaaacctccggagagaaaaatgagtcagaacacacaggatggatacacaaggaactggtttaaggtcacaattccttacgggataaagtatgacaaggcatggctaatgaattcaatccagagccattgcagtgaccgcttcactccggttgatttccactacgtccgaaatcgggcatgcttctttgtccaggatgctagcgctgcctccgcattgaaggatgtcagttataagatttatgatgatgagaaccaaaagatatgtatatttgtcaatcattctactgcgccctactctgtgaagaataagttgaagccaggccaaatggagatgctaaagctgaccatgaacaaacggtacaatgtctcccagcaagctcttgatctccagaatctccgctttgacccagacttgatgggccgtgacattgatataatcctgaatcgaagaaactgcatggctgccaccctgaagatcattgaaagaaatttccctgagctgttgtctttgaacttgtgcaacaacaagctgtaccagctggatggcctttctgacattacagagaaggctcccaaagtcaagaccctgaatctctccaaaaataagctggagtcggcgtgggagttgggcaaggtgaaagggctgaagctcgaagagctatggctagaagggaacccgttgtgcagcaccttctcggaccagtccgcctatgtaagtgccatccgggattgtttccccaagttgttacgcctggacggccgagagttatccgcaccagtgattgttgacattgacagctctgagacaatgaaaccctgcaaggaaaactttactggatctgagaccctaaagcatttagtcctgcaattcctgcagcagtattactcgatctatgactctggagatcgacagggtctcctcggtgcttaccacgatgaggcctgcttctccttggctattcccttcgaccccaaggactcagccccgagcagcttgtgcaagtactttgaggatagcaggaatatgaaaacactcaaggacccctacctgaagggggaactgctgaggcgcacaaaacgtgacattgtggactccctcagtgcgttgcccaaaactcagcatgacctcagctccatcctggtggacgtgtggtgccagacggaaaggatgctctgcttttctgtcaatggggttttcaaggaagtggaaggacagtctcagggttctgttctcgccttcacccggaccttcattgctacccctggcagcagttccagtctgtgcatcgtgaatgacgagctgtttgtgagggatgccagcccccaagagactcagagtgccttctccatcccagtgtccacactctcctccagctctgagccctccctctcccaggagcagcaggaaatggtgcaggctttctctgcccagtctgggatgaaactggagtggtctcagaagtgccttcaggacaatgagtggaactacactagagctggccaggccttcactatgctccagaccgagggcaagatccccgcggaggccttcaagcaaatctcctaaaaggagccctccgatgtcttctttgtcttcgttcacatcctctttgtttcctcttttcaccagcctaaggcctggctgaccaggaagccaacgttaacttgcaggccacgtgacataaccacccaaagagccagttgctctgtgtattcgccccactcatgatcaccattttattttcataataaagagtgacgttacacgttgtaca

SEQ ID NO: 12604 - protein, 626 aa, Homo sapiens; identical to SEQ ID NO: 2175

SEQ ID NO: 12605 - DNA, 3181 bp, Homo sapiens
tcacctagctcctcctgcagcatggcgtgttcacttccaagcggggcagactctgctgatggacagaatccggctccaggaactggcattccagttgcaccagttaactgtcctggcctcagtcttgctagtggccagaagcttctctggtgaagttttattcagatcacctgaatttgtggatagactgaaatgcaccaccaaggccctaactgaggaatttatctccaggcctgaagagactatgctgagtgtgagtgaacaggtgtctcaggaagtccatcaaggccttaaggacatgggcctcactactctgagcagtgaaaacacagcatctcttctaggccaactccagaacatcaccaagaaagagaactgcattcgtagcattgttgatcagtggatccgtttttttctcaaatgctgtttgcttcatggcatgcaggagtctctgctacactttcctggaggcctcattctcattgaaaaggagttggcagaactgggctggaagtttctcaatctgatgcatcataatcagcagagtcatttttcacaaaacgaaatctttccagaagatcacgaataagagagatcaaagctaggcagcttgagttgaagtagagctggaagaaggagttttgaggactgtttcaaaaccactggactagatgatctctaaagtggtgacatggacataggataatggttatagacagtccccctcccaacgggaaaaaatgaaagcaagcaaaaagttaccagctccaagccaacttgaaatccaatcaggatcttatccaggacgcttcattgcatttggtcttcatttctccttagtctcctccaggctgacatttcctcaatctttattggtcttccacagccctgacacttttggagataccagtcagcatttccaagttcgttctgtgagactgtagtgtcaggacaaagcaacaacaaaatgtgctctactctaaagaagtgtgggacatacagaactgaagggatgatgcttcctgtctgtcacaaggctgagtgaacacaacatgcctgtaggtccagaacattcttcctacagagaccagatgtccagaaagccctatctgctggattcagggaacgcctctcctcatttctgtcagcactatttgcaaaagcctccttctctgagatcttcaaagctgcagttctagccacagtctgcagggagttgcagaatgccatgaccatggtagcacttttcaaggaagaaagaaaggtgggagttctttccgggataattttgacaagaggagctgtcattatgaacatggtgggtatgagcgcccgccttcacactgccaggagaatgatggaagcgtggagatgagggatgtccacaaggaccaacaactaagacagtaagtgaccaggcagcctggtttgcacgtagcagcccccgggactgtgcaaccctttcattctctgtggtcttccttttcttctctcattagagaactgacgaatgctggaagtggaatagtggctgagcagtcctaattgtagccctggcgtcagtgagtggagcatgtataggagactttcttagatttaatggatacccgccttctctcctcttccccacagcactccttatagcatccgatgcgaaagaagaatgaaatggcatagtgaagacgaaatccgtattaccacgtggagaaatagaaaacctccggagagaaaaatgagtcagaacacacaggatggatacacaaggaactggtttaaggtcacaattccttacgggataaagtatgacaaggcatggctaatgaattcaatccagagccattgcagtgaccgcttcactccggttgatttccactacgtccgaaatcgggcatgcttctttgtccaggatgctagcgctgcctccgcattgaaggatgtcagttataagatttatgatgatgagaaccaaaagatatgtatatttgtcaatcattctactgcgccctactctgtgaagaataagttgaagccaggccaaatggagatgctaaagctgaccatgaacaaacggtacaatgtctcccagcaagctcttgatctccagaatctccgctttgacccagacttgatgggccgtgacattgatataatcctgaatcgaagaaactgcatggctgccaccctgaagatcattgaaagaaatttccctgagctgttgtctttgaacttgtgcaacaacaagctgtaccagctggatggcctttctgacattacagagaaggctcccaaagtcaagaccctgaatctctccaaaaataagctggagtcggcgtgggagttgggcaaggtgaaagggctgaagctcgaagagctatggctagaagggaacccgttgtgcagcaccttctcggaccagtccgcctatgtaagtgccatccgggattgtttccccaagttgttacgcctggacggccgagagttatccgcaccagtgattgttgacattgacagctctgagacaatgaaaccctgcaaggaaaactttactggatctgagaccctaaagcatttagtcctgcaattcctgcagcagtattactcgatctatgactctggagatcgacagggtctcctcggtgcttaccacgatgaggcctgcttctccttggctattcccttcgaccccaaggactcagccccgagcagcttgtgcaagtactttgaggatagcaggaatatgaaaacactcaaggacccctacctgaagggggaactgctgaggcgcacaaaacgtgacattgtggactccctcagtgcgttgcccaaaactcagcatgacctcagctccatcctggtggacgtgtggtgccagacggtgccttcaggacaatgagtggaactacactagagctggccaggccttcactatgctccagaccgagggcaagatccccgcggaggccttcaagcaaatctcctaaaaggagccctccgatgtcttctttgtcttcgttcacatcctctttgtttcctcttttcaccagcctaaggcctggctgaccaggaagccaacgttaacttgcaggccacgtgacataaccacccaaagagccagttgctctgtgtattcgccccactcatgatcaccattttattttcataataaagagtgacgttacac

SEQ ID NO: 12606 - protein, 409 aa, Homo sapiens; identical to SEQ ID NO: 12580

SEQ ID NO: 12607 - DNA, 487 bp, Homo sapiens
gcttgtctccctgggcatgttcatcttatcgatcatccagctccatctccttggtctccactgctgacttcctctttccttctccaggacggccgagagttatccgcaccagtgattgttgacattgacagctctgagacaatgaaaccctgcaaggaaaactttactggatctgagaccctaaagcatttagtcctgcaattcctgcagcagtattactcgatctatgactctggagatcgacagggtctcctcggtgcttaccacgatgaggcctgcttctccttggctattcccttcgaccccaaggactcagccccgagcagcttgtgcaagtactttgaggatagcaggaatatgaaaacactcaaggacccctacctgaagggggaactgctgaggcgcacaaaacgtgacattgtggactccctcagtgcgttgcccaaaactcagcatgacctcagctccatcctggtggacgtgtggt

SEQ ID NO: 12608 - protein, 114 aa, Homo sapiens
MKPCKENFTGSETLKHLVLQFLQQYYSIYDSGDRQGLLGAYHDEACFSLAIPFDPKDSAPSSLCKYFEDSRNMKTLKDPYLKGELLRRTKRDIVDSLSALPKTQHDLSSILVDV

SEQ ID NO: 12609 - DNA, 545 bp, Homo sapiens; identical to SEQ ID NO: 12585

SEQ ID NO: 12610 - protein, 78 aa, Homo sapiens; identical to SEQ ID NO: 12586

SEQ ID NO: 12611 - DNA, 2253 bp, Homo sapiens; identical to SEQ ID NO: 12575

SEQ ID NO: 12612 - protein, 148 aa, Homo sapiens; identical to SEQ ID NO: 12576

SEQ ID NO: 12613 - DNA, 1777 bp, Homo sapiens
agacgcagaggcgaggccgccagtcgaggacgaggaggagataacatcaagatgccgaagactgaggaaactgtgctccagaatgatcccagtgtagcagagaatggggcccctgagcctaaaacaccagggcagagccagaaaagcaagagtttctgtttagatgaccagtctcctgacctgatgtcttttctgtcacagatctgatagagacagttaatgaagtttccaagctgagcatttcacatgaaattgtagtaaaccaagatttctatgtggaagagaccattttgcctccaaacagtgtagaaggcaggtttgcggaggcaatgtacaatgctttttggaaccatctgaaagaacagctattgagtactcctcctgacttcacttgtgcccttgaacttctaaaagatgttaaggagaccttgctatcactgctattaccatggcagaaccgcctaagaaatgagatagaagaagctctggacacagatctcctcaagcaggaagcagaacatggggccctggatgtccctcatctttctaactacattctcaatttgatggctctgctatgtgcaccggttcgagatgaagcgatacagaaactagagaccataagagatccagtgcagttactgaggggcatcctccgtgttctgggcctaatgaaaatggacatggtgaactataccatccagagctttcgaccctacctgcaggaacattccatccagtatgaacaagctaaattccaggaactccttgataaacagcccagtctcctcgattataccacaaaatggctaaccaaagcagccacagacatcactacactatgtccgagttctcctgactcacctagctcctcctgcagcatggcgtgttcacttccaagcggggcaggtaacaattcagagccccccagtccaacaatggtgctataccaaggctacctgaacctcctcctctgggatcttgaaaacgtagaattcccagagactctgctgatggacagaatccggctccaggaactggcattccagttgcaccagttaactgtcctggcctcagtcttgctagtggccagaagcttctctggtgaagttttattcagatcacctgaatttgtggatagactgaaatgcaccaccaaggccctaactgaggaatttatctccaggcctgaagagactatgctgagtgtgagtgaacaggtgtctcaggaagtccatcaaggccttaaggacatgggcctcactactctgagcagtgaaaacacagcatctcttctaggccaactccagaacatcaccaagaaagagaactgcattcgtagcattgttgatcagtggatccgtttttttctcaaatgctgtttgcttcatggcatgcaggagtctctgctacactttcctggaggcctcattctcattgaaaaggagttggcagaactgggctggaagtttctcaatctgatgcatcataatcagcaggtatttggcccatactatgctgagatcctaaaacacatcatccatccagctcaagcacaagaaacagatgtggagcctaactgatagtgctggaccccagctatggcaacagggactcaggagagagaggtcagcatgtttctgggaggacatcacctgtggttagtcgaacagtcagccctcttcctcgctatagccaggacacagggatgcaggggtcaagcatgtaagcaccaactggcccaatccccttcactaataaacctctgagctgcaag

SEQ ID NO: 12614 - protein, 417 aa, Homo sapiens
MYNAFWNHLKEQLLSTPPDFTCALELLKDVKETLLSLLLPWQNRLRNEIEEALDTDLLKQEAEHGALDVPHLSNYILNLMALLCAPVRDEAIQKLETIRDPVQLLRGILRVLGLMKMDMVNYTIQSFRPYLQEHSIQYEQAKFQELLDKQPSLLDYTTKWLTKAATDITTLCPSSPDSPSSSCSMACSLPSGAGNNSEPPSPTMVLYQGYLNLLLWDLENVEFPETLLMDRIRLQELAFQLHQLTVLASVLLVARSFSGEVLFRSPEFVDRLKCTTKALTEEFISRPEETMLSVSEQVSQEVHQGLKDMGLTTLSSENTASLLGQLQNITKKENCIRSIVDQWIRFFLKCCLLHGMQESLLHFPGGLILIEKELAELGWKFLNLMHHNQQVFGPYYAEILKHIIHPAQAQETDVEPN

SEQ ID NO: 12615 - DNA, 551 bp, Homo sapiens; identical to SEQ ID NO: 12571

SEQ ID NO: 12616 - protein, 51 aa, Homo sapiens; identical to SEQ ID NO: 12572

SEQ ID NO: 12617 - DNA, 567 bp, Homo sapiens
gagcagtagctaaggagttagaagataacatcaagatgccgaagactgaggaaactgtgctccagaatgatcccagtgtagcagagaatggggcccctgagcctaaaacaccagggcagagccagaaaagcaagagtttctgtttagatgaccagtctcctgacctgatgtcttttctgtcacagatctgatagagacagttaatgaagtttccaagctgagcatttcacatgaaattgtagtaaaccaagatttctatgtggaagagaccattttgcctccaaacagtgtagaaggcaggtttgcggaggcaatgtacaatgctttttggaaccatctgaaagaacagctattgagtactcctcctgacttcacttgtgcccttgaacttctaaaagatgttaaggagaatcccggagatgaataggcgagcccttgcccacaaggaacttgcatgcttgagtcaaaaggctatttcaagggaaccttaaagattccagatttgctattttatcctcacactttggagtaaaacaatctaaaaatatccttatcctttattaagaa

SEQ ID NO: 12618 - protein, 51 aa, Homo sapiens; identical to SEQ ID NO: 12572

SEQ ID NO: 12619 - DNA, 685 bp, Homo sapiens
ggcggggcctgctgggtggcttagcactgcagggctctgcgcgggaacgctaacctggtccggagcgagtctgggtctcagccccgcgaacagcctttcacgagtcttcaagctttcaggctatcttctagtcaagatgagtgataagccagacttgtcggaagtggagaagtttgacaggtcaaaactgaagaaaactaatactgaagaaaaaaatactcttccctcaaaggaaactatccagcaagagaaagagtgtgttcaaacatcataaaatggggatcgcctcccaacagcagatttcgacattacctgagagtcttgattttaggcttgttttttgtaaacccatgtgtttgtagagattttaggcgtcttcggatatcttctcacctatgttccctggctaagaagtcagaggtagccaatgtttccttaaattcatttttaaacttaccattggtgcatatgttccagatggcagatgctgtcaataatctcaccattgatgacctttgtgtatgtagttcttgcatcctatactggataagcctgttttaacctgctatgatgggtgcttccattgcttcataatcttcatgaagttgcatgcttttgcagcttttcacagtttatttgcatttctaatgtagtaataaagtaaccaatataatcattatcttga

SEQ ID NO: 12620 - protein, 45 aa, Homo sapiens; identical to SEQ ID NO: 2183

SEQ ID NO: 12621 - DNA, 3615 bp, Homo sapiens
atgacattgtggactccctcagtgtgttgtccaaaactcagcatgacctcagctccttcctggtggacatgtgttaccagaaggcaagcacctgcttactcccttggacaggccctgagagccagaggtgggtaggaggttaagggggatcctgagcactggagctcttccctttcagaaatggatgctctacttttctgtctacggtgtgttgaaagaagaacacagtgatggtagcagctctcctcaaggagaaaataaaggtggagattcttcccaggggaattttggaaaggagaaccttcatgatgaacatgatggcaacccctctaccttacaacccgatagtaggagtgtgaaatgccatagtgaataccaagatagaattcctccagagagagaagtggagaagaacacacagaatggagacccagggacctggttcaaggtcacaattccttatgggataaagtatgataagagttggatagtgaattcaatccagagccattgcagtgtccccttcactccagtcgctttccactacaacaaaaatcgggcccatttctttattcaggatgctagtgctgcctgtgcattaaagaaagtcaactgcaagattcatgatgaggaaaaccaaaaggtatttgtttttgtcaatctttctactaaaccccagtctatccagaaaatgttgaaaccaaaagagatggcatagctaaagctgaccctgaacaaatgatatgatgtctcccagcaagctcttgatctccagaggctccgctttgacccaggtatggctgacagcagcaattctagggcaagtaggggcagagcagtctgcctggaaaggagacttatatggacggcaactttgggagggttggtgctggtgctggtccagtcaggccccttacagccttctgatgcccttctctcggcttcctggagacttggtgaaacatcatattgatataatcctgaatcaaagaaactacatggctgccactctgaagatcattgaaaggaatttccctgagctattatctttgaacttgtgcgacaacaaactgtaccacctggatggcctgcctgacattatagagaaggctcccaaagtcaagaccctgaatctctccaaaaataagctgaagtcggcttgggagttgggcaaggtgaaagggttgaagctcgaagagctatggctggaagggaactcattgtgcagcaccttctctgaccagtccgcctatgtaagtatcatccgggaatatttccccaagttgttatgcctggatggccaggagttagcatctccaattataattggcattgaagcccctgagataataaaaccttgtaaggaaagctataaaggatctgagaccataaagagtctggtgcttcagttcctgcttcagtattacttgatctatgactctgaagatcgaacgggtctcctcagtgtttaccatgacaaggcctgcttctccctgaccattaccctcaaccctgaggacccagaaccgagcagcttggaaaaatacttcaaggatagcaggaatataaagaatatcaaggacccttgcctgaggattcagctgctgaagcacacaaaacgtgagattgtggactccctcagtgtattgcccagaactcagcatgaccttaactcctatgtggtagacttgtgcatccaaacggtgagcacctgcttcctccctcagtcaggcccagagagctgaagtaggtaggaagtaggtaggtgggtaggaggatcatgaaggctctagttttttcttcttccctttcaggaaaggatgctcgtcttttctgtcaatggagtatttaaggaaggtgagtgtctatagattcttctctccagatcactcattactcccttccccaggctgggcttactccaagaactctctcagcttcccaagttgctcttctccccttcccttgcattcttcctctccgtttgtgttcttcctctcctggcaactttctgttatctttgtgttctttcctttttgttcccttccctttgtgttcttcctctcccccaattttgttcccaaacatcattacttcctgacctacatccatgcctgtctgcacctgcaccactcaggcgttagggacacagcctgtagagtttgatggctctcatcccaggttgttactttgcgaacttgggacattgtcctgttacctaacccctcagtttcctcatttgcaaaatggggttggtaagctcatctcttgggtgactgtgtaaaatgaatcaagcgaactcatgtttgtcaagagacctgacacatgttagggggttctatccctgggtgccgcttgttcctatttttgccctctcagtccctgaaactccctcctgactctcactgaaaagttgtcccagcctggctcccttcagggtgccaaaagattatctccctgactggagaaccctgtatgaatgtgtaaagcatgtgcaactgtaaggaggtatcattgtttgttgtttctaaagtggaaagagagtctccaggttctgttcttgccttcacccgaaccttcatcttgacttctgtcggcaattccaagtaagtgctgtgctgtgggtgggagcacccatcctgtcctggagccaatggtgtggtaatgtggtggtgcagtcctcgggatgttctcagtaccatagaaagccaactggtagatccaaggagaggtctagattatgagaataccagattctctttttggccacaatacttactaattagctgtgtatctttttgtccagttgtaagatttctctgtgaaacagtccttttctgaaaatgggatgtctacttcttttgtaaagtgtaaatgcattggggttaaatctacaaatctaaggaaactggtaggcaatctctccaaaggtggactctgcagcaggggtaaagcctaccagccaaggaatccgaaaggtgggcagagcaggggcttggaaggaatctggttcctcagtggcagtggaagcaggatcattgttgaaagtgtggggttgtccatttttccagttgtctgagagcttgtctttccttcagtctgtatattgtgaatgacaagctgattgtgaggaatgccagcacgaaggagacccagagtgccttctccatcccagtgcctgcaccctcctccagctccttgcctaccctctcccagaagcagcaggaaatggtggagactgtctccacccagtctgggatgaaacttgagcagtctcagaagtgccttcaggacagtgagtagaactacaccaaagctgaccaggttttcactattctccagaccgaaggcaagatctcagtggaggccttcaagcaaatcccctaaaaggagcccttcgatgtcttctttgtcttcattcacatcctctttgtttcctctttttaccagcctaaggccgtgcccaggactggggttggcagcctggctcaccggaaagccaaagttaacttgcaggccgggtaacataaccacttgaagaaccagttgttctgtgtattcgccccactcatgatcaccatttattttcataataaagagtgatgttacatgttg

SEQ ID NO: 12622 - protein, 333 aa, Homo sapiens
MMSPSKLLISRGSALTQVWLTAAILGQVGAEQSAWKGDLYGRQLWEGWCWCWSSQAPYSLLMPFSRLPGDLVKHHIDIILNQRNYMAATLKIIERNFPELLSLNLCDNKLYHLDGLPDIIEKAPKVKTLNLSKNKLKSAWELGKVKGLKLEELWLEGNSLCSTFSDQSAYVSIIREYFPKLLCLDGQELASPIIIGIEAPEIIKPCKESYKGSETIKSLVLQFLLQYYLIYDSEDRTGLLSVYHDKACFSLTITLNPEDPEPSSLEKYFKDSRNIKNIKDPCLRIQLLKHTKREIVDSLSVLPRTQHDLNSYVVDLCIQTVSTCFLPQSGPES

SEQ ID NO: 12623 - DNA, 2899 bp, Homo sapiens
gaacttcgaaagactggaacacttccgcctgtcaggccagaagagatttcctgacaccacagctggaaacccatgtgcatttcagttcaggaaagaatgcgccgttttccctatatccggaattcgtccctgcgcattccaatacctgaagcggccacagggtacaggacagggagccctccgacagaaaagagtcgcggcgctaaacaaagcctgatatcactccgcttccataagccggatccccataaactacgctctagctcctcccactgccgttgtgggtaacgcggacgtggaagaacctcgtctgcggaggaaaaggtgccgagtcaatccccatacacagccgccgccattgcctcgagtccttgtgtctgactgtctgttcctgctgctgtatgacacagcacctcgaggcaaggaaataagaaaactgcctctgatccaagcagagaaggtagatctgtccccaggtctgtggaactgtcagttgtgaagttttgtaaaatggtcacccaacttaaaactaggaaattacgaagaagagaaaattgccctgtatctgttaaggtctgcctgtagatctgctgtagggcttgtcaccattggaagcaaggtcctacttcagtggcagatctggtggccttggagtggctgaagaccaccaccctccacagggctgggcccatgcacagccatccttccctaccttgagtgagcttcctctgcatgttttctatatcactggcagagcctgtagttggaaaggggacagagtgactactggactttgtgtgaaaacaccaaccgggacaaaacttcagtcaaggctgagacgggtgggggtatataacttgtccttacgttaaacttggaacatggttgactctgggacagaagcaagggctagaggaaaggctgaggctggcctgcaagatggaatcagtggtcctgccactgctagagtgaatggtaaaacccaggccgaggcagtggctgaggcagaactgaaaacagaatcagtgacccaggccaaagctggtgatggagcaatgaccaggacacatacagtgacctacagggaggctatggctgtgacaagggaagtgatcaaggtggaagatacaactaagactagagtcatggttgagactaagacaaaacccctggcagaacgcagtatagtgccacaaaccaagtcaaaggccatgcctatgtctagggtcagtactgtaaccaagtctgaagtcaaggttgttgctgtcattgaggcaaatattaggtcctatgccaagtcacatgataaggccaatactgggtccagacctgacagaagggaagagaccagcattgggatgaaatccagtgatgaggatgaagaaaatatatgctcctggttctggactggagaagagcctagtgtagggtcctggttctggcctgaagaagagacctctcttcaagtttataagcccctacctaagatccaggaaaagcccaagcccacacacaaacccacacttactataaaacaaaaggtaatagcatggtcaagggccaggtatattgtcctagttccagttgaaggaggggagcaatccttgcctccagaaggaaactggaccctggttgagaccttgattgaaactcctctggggattcgacctttgaccaagatcccaccttatcatgggccttattaccagaccttagctgagatcaaaaaacagattaggcaaagggaaaagtatgggcctaatccgaaggcctgccactgcaaatcacgtggctttagtttagagcctaaagagtttgataaacttgttgccctccttaagttaactaaggatcctttcattcatgaaatagctacaatgataatgggcatcagtcctgcttatccatttactcaagatataattcatgatgtaggtattactgttatgattgaaaacttggtcaataatcccaatgttaaagaacaccctggagctttaagtatggtggatgacagctctgagtcttccgaagaaccaaaatcaggggagtcatatatacatcaagtttgtaaaggcataatctcttgccccttgaactcccctgtgcagctggctggactgaaattactagggcacttgagtataaaatttgaagatcactatgtgattaccagttatattccagatttcctcaccttgttaaacaagggaagtgtcaaaaccaagttttatgttttaaaagtgttttcgtgtttgtctaaaaatcacgccaatacaagagaattgatcagtgccaaagtactgtcatcattggttgcaccctttaacaagaatgagtcaaaggccaatattcttaatattattgaaatatttgagaatataaattttcagttcaaaacaaaggcaaagctatttaccaaggaaaagttcactaaatctgagcttatttcaatattccaggaagcaaaacagtttggtcagaaactccaagacttagcagagcacagtgatcccgaagtgagagataaagtcatacgattaatactaaaactctgaatacccctctgttctcataaagcctcaaacagttttttggagttgcaatatgaaaccaatgcatattgtaattataaattcaatacttatgttttccatgttgattgagggaggcaattttatggataccaattaatcttgagatcctgaacatgtgctgatttttattgtgctatatagtatataaattgagatatttttggtatttctgcaacgtgacctgataatgaatctattcatcctgagtaagctatacttctgtgctttatattgatatgtgtattcttttgagattttatttacatgttgttaataaagttgcatgctaaaactggtgaaaa

SEQ ID NO: 12624 - protein, 71 aa, Homo sapiens
MCISVQERMRRFPYIRNSSLRIPIPEAATGYRTGSPPTEKSRGAKQSLISLRFHKPDPHKLRSSSSHCRCG

SEQ ID NO: 12625 - DNA, 3058 bp, Homo sapiens
gctggaaacccatgtgcatttcagttcaggaaagaatggtaggcttggtggggggagctcccgcaaaaggggaactaatacagaaacactctggtatttgtctgcctctcttgttccagcgccgttttccctatatccggaattcgtccctgcgcattccaatacctgaagcggccacagggtacaggacagggagccctccgacagaaaagagtcgcggcgctaaacaaagcctgatatcactccgcttccataagccggatccccataaactacgctctagctcctcccactgccgttgtgggtaacgcggacgtggaagaacctcgtctgcggaggaaaaggtagatgttaaatggtaactacgcgcgaggttctgaggagccctgggaacaggaaggagaaaagaataccaaaagtgacaacagtttgccaatcgcagtctttaatctgataaagcggttatctcgtcttgagtcccaggtgccgagtcaatccccatacacagccgccgccattgcctcgagtccttgtgtctgactgtctgttcctgctgctgtatgacacagcacctcgaggcaaggaaataagaaaactgcctctgatccaagcagagaaggtagatctgtccccaggtctgtggaactgtcagttgtgaagttttgtaaaatggtcacccaacttaaaactaggaaattacgaagaagagaaaattgccctgtatctgttaaggtctgcctgtagatctgctgtagggcttgtcaccattggaagcaaggtcctacttcagtggcagatctggtggccttggagtggctgaagaccaccaccctccacagggctgggcccatgcacagccatccttccctaccttgagtgagcttcctctgcatgttttctatatcactggcagagcctgtagttggaaaggggacagagtgactactggactttgtgtgaaaacaccaaccgggacaaaacttcagtcaaggctgagacgggtgggggtatataacttgtccttacgttaaacttggaacatggttgactctgggacagaagcaagggctagaggaaaggctgaggctggcctgcaagatggaatcagtggtcctgccactgctagagtgaatggtaaaacccaggccgaggcagtggctgaggcagaactgaaaacagaatcagtgacccaggccaaagctggtgatggagcaatgaccaggacacatacagtgacctacagggaggctatggctgtgacaagggaagtgatcaaggtggaagatacaactaagactagagtcatggttgagactaagacaaaacccctggcagaacgcagtatagtgccacaaaccaagtcaaaggccatgcctatgtctagggtcagtactgtaaccaagtctgaagtcaaggttgttgctgtcattgaggcaaatattaggtcctatgccaagtcacatgataaggccaatactgggtccagacctgacagaagggaagagaccagcattgggatgaaatccagtgatgaggatgaagaaaatatatgctcctggttctggactggagaagagcctagtgtagggtcctggttctggcctgaagaagagacctctcttcaagtttataagcccctacctaagatccaggaaaagcccaagcccacacacaaacccacacttactataaaacaaaaggtaatagcatggtcaagggccaggtatattgtcctagttccagttgaaggaggggagcaatccttgcctccagaaggaaactggaccctggttgagaccttgattgaaactcctctggggattcgacctttgaccaagatcccaccttatcatgggccttattaccagaccttagctgagatcaaaaaacagattaggcaaagggaaaagtatgggcctaatccgaaggcctgccactgcaaatcacgtggctttagtttagagcctaaagagtttgataaacttgttgccctccttaagttaactaaggatcctttcattcatgaaatagctacaatgataatgggcatcagtcctgcttatccatttactcaagatataattcatgatgtaggtattactgttatgattgaaaacttggtcaataatcccaatgttaaagaacaccctggagctttaagtatggtggatgacagctctgagtcttccgaagaaccaaaatcaggggagtcatatatacatcaagtttgtaaaggcataatctcttgccccttgaactcccctgtgcagctggctggactgaaattactagggcacttgagtataaaatttgaagatcactatgtgattaccagttatattccagatttcctcaccttgttaaacaagggaagtgtcaaaaccaagttttatgttttaaaagtgttttcgtgtttgtctaaaaatcacgccaatacaagagaattgatcagtgccaaagtactgtcatcattggttgcaccctttaacaagaatgagtcaaaggccaatattcttaatattattgaaatatttgagaatataaattttcagttcaaaacaaaggcaaagctatttaccaaggaaaagttcactaaatctgagcttatttcaatattccaggaagcaaaacagtttggtcagaaactccaagacttagcagagcacagtgatcccgaagtgagagataaagtcatacgattaatactaaaactctgaatacccctctgttctcataaagcctcaaacagttttttggagttgcaatatgaaaccaatgcatattgtaattataaattcaatacttatgttttccatgttgattgagggaggcaattttatggataccaattaatcttgagatcctgaacatgtgctgatttttattgtgctatatagtatataaattgagatatttttggtatttctgcaacgtgacctgataatgaatctattcatcctgagtaagctatacttctgtgctttatattgatatgtgtattcttttgagattttatttacatgttgttaataaagttgcatgctaaaactggtgaaaa

SEQ ID NO: 12626 - protein, 558 aa, Homo sapiens; identical to SEQ ID NO: 2187

SEQ ID NO: 12627 - DNA, 2979 bp, Homo sapiens
gctggaaacccatgtgcatttcagttcaggaaagaatggtaggcttggtggggggagctcccgcaaaaggggaactaatacagaaacactctggtatttgtctgcctctcttgttccagcgccgttttccctatatccggaattcgtccctgcgcattccaatacctgaagcggccacagggtacaggacagggagccctccgacagaaaagagtcgcggcgctaaacaaagcctgatatcactccgcttccataagccggatccccataaactacgctctagctcctcccactgccgttgtgggtaacgcggacgtggaagaacctcgtctgcggaggaaaaggtagatgttaaatggtaactacgcgcgaggttctgaggagccctgggaacaggaaggagaaaagaataccaaaagtgacaacagtttgccaatcgcagtctttaatctgataaagcggttatctcgtcttgagtcccaggtgccgagtcaatccccatacacagccgccgccattgcctcgagtccttgtgtctgactgtctgttcctgctgctgtatgacacagcacctcgaggcaaggaaataagaaaactgcctctgatccaagcagagaaggtctgcctgtagatctgctgtagggcttgtcaccattggaagcaaggtaaggaggagaaagttactccagatcagtgcaggtcctacttcagtggcagatctggtggccttggagtggctgaagaccaccaccctccacagggctgggcccatgcacagccatccttccctaccttgagtgagcttcctctgcatgttttctatatcactggcagagcctgtagttggaaaggggacagagtgactactggactttgtgtgaaaacaccaaccgggacaaaacttcagtcaaggctgagacgggtgggggtatataacttgtccttacgttaaacttggaacatggttgactctgggacagaagcaagggctagaggaaaggctgaggctggcctgcaagatggaatcagtggtcctgccactgctagagtgaatggtaaaacccaggccgaggcagtggctgaggcagaactgaaaacagaatcagtgacccaggccaaagctggtgatggagcaatgaccaggacacatacagtgacctacagggaggctatggctgtgacaagggaagtgatcaaggtggaagatacaactaagactagagtcatggttgagactaagacaaaacccctggcagaacgcagtatagtgccacaaaccaagtcaaaggccatgcctatgtctagggtcagtactgtaaccaagtctgaagtcaaggttgttgctgtcattgaggcaaatattaggtcctatgccaagtcacatgataaggccaatactgggtccagacctgacagaagggaagagaccagcattgggatgaaatccagtgatgaggatgaagaaaatatatgctcctggttctggactggagaagagcctagtgtagggtcctggttctggcctgaagaagagacctctcttcaagtttataagcccctacctaagatccaggaaaagcccaagcccacacacaaacccacacttactataaaacaaaaggtaatagcatggtcaagggccaggtatattgtcctagttccagttgaaggaggggagcaatccttgcctccagaaggaaactggaccctggttgagaccttgattgaaactcctctggggattcgacctttgaccaagatcccaccttatcatgggccttattaccagaccttagctgagatcaaaaaacagattaggcaaagggaaaagtatgggcctaatccgaaggcctgccactgcaaatcacgtggctttagtttagagcctaaagagtttgataaacttgttgccctccttaagttaactaaggatcctttcattcatgaaatagctacaatgataatgggcatcagtcctgcttatccatttactcaagatataattcatgatgtaggtattactgttatgattgaaaacttggtcaataatcccaatgttaaagaacaccctggagctttaagtatggtggatgacagctctgagtcttccgaagaaccaaaatcaggggagtcatatatacatcaagtttgtaaaggcataatctcttgccccttgaactcccctgtgcagctggctggactgaaattactagggcacttgagtataaaatttgaagatcactatgtgattaccagttatattccagatttcctcaccttgttaaacaagggaagtgtcaaaaccaagttttatgttttaaaagtgttttcgtgtttgtctaaaaatcacgccaatacaagagaattgatcagtgccaaagtactgtcatcattggttgcaccctttaacaagaatgagtcaaaggccaatattcttaatattattgaaatatttgagaatataaattttcagttcaaaacaaaggcaaagctatttaccaaggaaaagttcactaaatctgagcttatttcaatattccaggaagcaaaacagtttggtcagaaactccaagacttagcagagcacagtgatcccgaagtgagagataaagtcatacgattaatactaaaactctgaatacccctctgttctcataaagcctcaaacagttttttggagttgcaatatgaaaccaatgcatattgtaattataaattcaatacttatgttttccatgttgattgagggaggcaattttatggataccaattaatcttgagatcctgaacatgtgctgatttttattgtgctatatagtatataaattgagatatttttggtatttctgcaacgtgacctgataatgaatctattcatcctgagtaagctatacttctgtgctttatattgatatgtgtattcttttgagattttatttacatgttgttaataaagttgcatgctaaaactggtgaaaa

SEQ ID NO: 12628 - protein, 558 aa, Homo sapiens; identical to SEQ ID NO: 2187

SEQ ID NO: 12629 - DNA, 2945 bp, Homo sapiens
gctggaaacccatgtgcatttcagttcaggaaagaatggtaggcttggtggggggagctcccgcaaaaggggaactaatacagaaacactctggtatttgtctgcctctcttgttccagcgccgttttccctatatccggaattcgtccctgcgcattccaatacctgaagcggccacagggtacaggacagggagccctccgacagaaaagagtcgcggcgctaaacaaagcctgatatcactccgcttccataagccggatccccataaactacgctctagctcctcccactgccgttgtgggtaacgcggacgtggaagaacctcgtctgcggaggaaaaggtagatgttaaatggtaactacgcgcgaggttctgaggagccctgggaacaggaaggagaaaagaataccaaaagtgacaacagtttgccaatcgcagtctttaatctgataaagcggttatctcgtcttgagtcccaggtgccgagtcaatccccatacacagccgccgccattgcctcgagtccttgtgtctgactgtctgttcctgctgctgtatgacacagcacctcgaggcaaggaaataagaaaactgcctctgatccaagcagagaaggtctgcctgtagatctgctgtagggcttgtcaccattggaagcaaggtcctacttcagtggcagatctggtggccttggagtggctgaagaccaccaccctccacagggctgggcccatgcacagccatccttccctaccttgagtgagcttcctctgcatgttttctatatcactggcagagcctgtagttggaaaggggacagagtgactactggactttgtgtgaaaacaccaaccgggacaaaacttcagtcaaggctgagacgggtgggggtatataacttgtccttacgttaaacttggaacatggttgactctgggacagaagcaagggctagaggaaaggctgaggctggcctgcaagatggaatcagtggtcctgccactgctagagtgaatggtaaaacccaggccgaggcagtggctgaggcagaactgaaaacagaatcagtgacccaggccaaagctggtgatggagcaatgaccaggacacatacagtgacctacagggaggctatggctgtgacaagggaagtgatcaaggtggaagatacaactaagactagagtcatggttgagactaagacaaaacccctggcagaacgcagtatagtgccacaaaccaagtcaaaggccatgcctatgtctagggtcagtactgtaaccaagtctgaagtcaaggttgttgctgtcattgaggcaaatattaggtcctatgccaagtcacatgataaggccaatactgggtccagacctgacagaagggaagagaccagcattgggatgaaatccagtgatgaggatgaagaaaatatatgctcctggttctggactggagaagagcctagtgtagggtcctggttctggcctgaagaagagacctctcttcaagtttataagcccctacctaagatccaggaaaagcccaagcccacacacaaacccacacttactataaaacaaaaggtaatagcatggtcaagggccaggtatattgtcctagttccagttgaaggaggggagcaatccttgcctccagaaggaaactggaccctggttgagaccttgattgaaactcctctggggattcgacctttgaccaagatcccaccttatcatgggccttattaccagaccttagctgagatcaaaaaacagattaggcaaagggaaaagtatgggcctaatccgaaggcctgccactgcaaatcacgtggctttagtttagagcctaaagagtttgataaacttgttgccctccttaagttaactaaggatcctttcattcatgaaatagctacaatgataatgggcatcagtcctgcttatccatttactcaagatataattcatgatgtaggtattactgttatgattgaaaacttggtcaataatcccaatgttaaagaacaccctggagctttaagtatggtggatgacagctctgagtcttccgaagaaccaaaatcaggggagtcatatatacatcaagtttgtaaaggcataatctcttgccccttgaactcccctgtgcagctggctggactgaaattactagggcacttgagtataaaatttgaagatcactatgtgattaccagttatattccagatttcctcaccttgttaaacaagggaagtgtcaaaaccaagttttatgttttaaaagtgttttcgtgtttgtctaaaaatcacgccaatacaagagaattgatcagtgccaaagtactgtcatcattggttgcaccctttaacaagaatgagtcaaaggccaatattcttaatattattgaaatatttgagaatataaattttcagttcaaaacaaaggcaaagctatttaccaaggaaaagttcactaaatctgagcttatttcaatattccaggaagcaaaacagtttggtcagaaactccaagacttagcagagcacagtgatcccgaagtgagagataaagtcatacgattaatactaaaactctgaatacccctctgttctcataaagcctcaaacagttttttggagttgcaatatgaaaccaatgcatattgtaattataaattcaatacttatgttttccatgttgattgagggaggcaattttatggataccaattaatcttgagatcctgaacatgtgctgatttttattgtgctatatagtatataaattgagatatttttggtatttctgcaacgtgacctgataatgaatctattcatcctgagtaagctatacttctgtgctttatattgatatgtgtattcttttgagattttatttacatgttgttaataaagttgcatgctaaaactggtgaaaa

SEQ ID NO: 12630 - protein, 558 aa, Homo sapiens; identical to SEQ ID NO: 2187

SEQ ID NO: 12631 - DNA, 2911 bp, Homo sapiens
gctggaaacccatgtgcatttcagttcaggaaagaatggtaggcttggtggggggagctcccgcaaaaggggaactaatacagaaacactctggtatttgtctgcctctcttgttccagcgccgttttccctatatccggaattcgtccctgcgcattccaatacctgaagcggccacagggtacaggacagggagccctccgacagaaaagagtcgcggcgctaaacaaagcctgatatcactccgcttccataagccggatccccataaactacgctctagctcctcccactgccgttgtgggtaacgcggacgtggaagaacctcgtctgcggaggaaaaggtagatgttaaatggtaactacgcgcgaggttctgaggagccctgggaacaggaaggagaaaagaataccaaaagtgacaacagtttgccaatcgcagtctttaatctgataaagcggttatctcgtcttgagtcccaggtgccgagtcaatccccatacacagccgccgccattgcctcgagtccttgtgtctgactgtctgttcctgctgctgtatgacacagcacctcgaggcaaggaaataagaaaactgcctctgatccaagcagagaaggtcagtgagaaggtcctacttcagtggcagatctggtggccttggagtggctgaagaccaccaccctccacagggctgggcccatgcacagccatccttccctaccttgagtgagcttcctctgcatgttttctatatcactggcagagcctgtagttggaaaggggacagagtgactactggactttgtgtgaaaacaccaaccgggacaaaacttcagtcaaggctgagacgggtgggggtatataacttgtccttacgttaaacttggaacatggttgactctgggacagaagcaagggctagaggaaaggctgaggctggcctgcaagatggaatcagtggtcctgccactgctagagtgaatggtaaaacccaggccgaggcagtggctgaggcagaactgaaaacagaatcagtgacccaggccaaagctggtgatggagcaatgaccaggacacatacagtgacctacagggaggctatggctgtgacaagggaagtgatcaaggtggaagatacaactaagactagagtcatggttgagactaagacaaaacccctggcagaacgcagtatagtgccacaaaccaagtcaaaggccatgcctatgtctagggtcagtactgtaaccaagtctgaagtcaaggttgttgctgtcattgaggcaaatattaggtcctatgccaagtcacatgataaggccaatactgggtccagacctgacagaagggaagagaccagcattgggatgaaatccagtgatgaggatgaagaaaatatatgctcctggttctggactggagaagagcctagtgtagggtcctggttctggcctgaagaagagacctctcttcaagtttataagcccctacctaagatccaggaaaagcccaagcccacacacaaacccacacttactataaaacaaaaggtaatagcatggtcaagggccaggtatattgtcctagttccagttgaaggaggggagcaatccttgcctccagaaggaaactggaccctggttgagaccttgattgaaactcctctggggattcgacctttgaccaagatcccaccttatcatgggccttattaccagaccttagctgagatcaaaaaacagattaggcaaagggaaaagtatgggcctaatccgaaggcctgccactgcaaatcacgtggctttagtttagagcctaaagagtttgataaacttgttgccctccttaagttaactaaggatcctttcattcatgaaatagctacaatgataatgggcatcagtcctgcttatccatttactcaagatataattcatgatgtaggtattactgttatgattgaaaacttggtcaataatcccaatgttaaagaacaccctggagctttaagtatggtggatgacagctctgagtcttccgaagaaccaaaatcaggggagtcatatatacatcaagtttgtaaaggcataatctcttgccccttgaactcccctgtgcagctggctggactgaaattactagggcacttgagtataaaatttgaagatcactatgtgattaccagttatattccagatttcctcaccttgttaaacaagggaagtgtcaaaaccaagttttatgttttaaaagtgttttcgtgtttgtctaaaaatcacgccaatacaagagaattgatcagtgccaaagtactgtcatcattggttgcaccctttaacaagaatgagtcaaaggccaatattcttaatattattgaaatatttgagaatataaattttcagttcaaaacaaaggcaaagctatttaccaaggaaaagttcactaaatctgagcttatttcaatattccaggaagcaaaacagtttggtcagaaactccaagacttagcagagcacagtgatcccgaagtgagagataaagtcatacgattaatactaaaactctgaatacccctctgttctcataaagcctcaaacagttttttggagttgcaatatgaaaccaatgcatattgtaattataaattcaatacttatgttttccatgttgattgagggaggcaattttatggataccaattaatcttgagatcctgaacatgtgctgatttttattgtgctatatagtatataaattgagatatttttggtatttctgcaacgtgacctgataatgaatctattcatcctgagtaagctatacttctgtgctttatattgatatgtgtattcttttgagattttatttacatgttgttaataaagttgcatgctaaaactggtgaaaa

SEQ ID NO: 12632 - protein, 558 aa, Homo sapiens; identical to SEQ ID NO: 2187

SEQ ID NO: 12633 - DNA, 1081 bp, Homo sapiens
gctggaaacccatgtgcatttcagttcaggaaagaatggtaggcttggtggggggagctcccgcaaaaggggaactaatacagaaacactctggtatttgtctgcctctcttgttccagcgccgttttccctatatccggaattcgtccctgcgcattccaatacctgaagcggccacagggtacaggacagggagccctccgacagaaaagagtcgcggcgctaaacaaagcctgatatcactccgcttccataagccggatccccataaactacgctctagctcctcccactgccgttgtgggtaacgcggacgtggaagaacctcgtctgcggaggaaaaggtagatgttaaatggtaactacgcgcgaggttctgaggagccctgggaacaggaaggagaaaagaataccaaaagtgacaacagtttgccaatcgcagtctttaatctgataaagcggttatctcgtcttgagtcccaggtgccgagtcaatccccatacacagccgccgccattgcctcgagtccttgtgtctgactgtctgttcctgctgctgtatgacacagcacctcgaggcaaggaaataagaaaactgcctctgatccaagcagagaagaactcctgtagcctgtaataccagctgtgggtactactctcagtgttggagatcatcaaaatacaattggaccagaccctttggaaataattctgtgtctcaaatgccctgtggagcacacacttaatcagttgatggctatggaattttccaacatcagctaaagagaaggcaatgaatgacacttcctgttgcctcatatcctcaccagtatttggcactgatagagtggtgacttccaagcttcatgcagaaccggacaacagaaattgagagggaaatttctatgacagaagagagaaagaagaaaattgctggaataatgaccttgaatagaggaaatgggatatcatctggtaagcaaatagagaagctggctttagataagagcctggacaattcattcatagaatagcagaaaaggcagaatttatgtccatagatgcaagtggtatagtagat

SEQ ID NO: 12634 - protein, 32 aa, Homo sapiens
MNDTSCCLISSPVFGTDRVVTSKLHAEPDNRN

SEQ ID NO: 12635 - DNA, 1259 bp, Homo sapiens
gctggaaacccatgtgcatttcagttcaggaaagaatggtaggcttggtggggggagctcccgcaaaaggggaactaatacagaaacactctggtatttgtctgcctctcttgttccagcgccgttttccctatatccggaattcgtccctgcgcattccaatacctgaagcggccacagggtacaggacagggagccctccgacagaaaagagtcgcggcgctaaacaaagcctgatatcactccgcttccataagccggatccccataaactacgctctagctcctcccactgccgttgtgggtaacgcggacgtggaagaacctcgtctgcggaggaaaaggtagatgttaaatggtaactacgcgcgaggttctgaggagccctgggaacaggaaggagaaaagaataccaaaagtgacaacagtttgccaatcgcagtctttaatctgataaagcggttatctcgtcttgagtcccaggtgccgagtcaatccccatacacagccgccgccattgcctcgagtccttgtgtctgactgtctgttcctgctgctgtatgacacagcacctcgaggcaaggaaataagaaaactgcctctgatccaagcagagaaggtctgcctgtagatctgctgtagggcttgtcaccattggaagcaagaactcctgtagcctgtaataccagctgtgggtactactctcagtgttggagatcatcaaaatacaattggaccagaccctttggaaataattctgtgtctcaaatgccctgtggagcacacacttaatcagttgatggctatggaattttccaacatcagctaaagagaagggatagagtggtgacttccaagcttcatgcagaaccggacaacagaaattgagagggaaatttctatgacagaagagagaaagaagaaaattgctggaataatgaccttgaatagaggaaatgggatatcatctggtaagcaaatagagaagctggctttagataagagcctggacaattcattcatagaatagcagaaaaggcagaatttatgtccatagatgcaagtggtatagtagatatagtgatgggagtttgtaaaagttaccttctaattgctattttttttaatgaaataagaaacaaagtcatcaactcaaagtgagtaatatgtaggaggtgattattgtttgaggagagaggagaatgtgtgatatcttttgttaattatggtaaaatataacacaaaatttgccattttaa

SEQ ID NO: 12636 - protein, 98 aa, Homo sapiens
MCISVQERMVGLVGGAPAKGELIQKHSGICLPLLFQRRFPYIRNSSLRIPIPEAATGYRTGSPPTEKSRGAKQSLISLRFHKPDPHKLRSSSSHCRCG

SEQ ID NO: 12637 - DNA, 1357 bp, Homo sapiens
gctggaaacccatgtgcatttcagttcaggaaagaatggtaggcttggtggggggagctcccgcaaaaggggaactaatacagaaacactctggtatttgtctgcctctcttgttccagcgccgttttccctatatccggaattcgtccctgcgcattccaatacctgaagcggccacagggtacaggacagggagccctccgacagaaaagagtcgcggcgctaaacaaagcctgatatcactccgcttccataagccggatccccataaactacgctctagctcctcccactgccgttgtgggtaacgcggacgtggaagaacctcgtctgcggaggaaaaggtagatgttaaatggtaactacgcgcgaggttctgaggagccctgggaacaggaaggagaaaagaataccaaaagtgacaacagtttgccaatcgcagtctttaatctgataaagcggttatctcgtcttgagtcccaggtgccgagtcaatccccatacacagccgccgccattgcctcgagtccttgtgtctgactgtctgttcctgctgctgtatgacacagcacctcgaggcaaggaaataagaaaactgcctctgatccaagcagagaaggtctgcctgtagatctgctgtagggcttgtcaccattggaagcaaggtcctacttcagtggcagatctggtggccttggagtggctgaagaccaccaccctccacagggctgggcccatgcacagccatccttccctaccttgaaactcctgtagcctgtaataccagctgtgggtactactctcagtgttggagatcatcaaaatacaattggaccagaccctttggaaataattctgtgtctcaaatgccctgtggagcacacacttaatcagttgatggctatggaattttccaacatcagctaaagagaagggatagagtggtgacttccaagcttcatgcagaaccggacaacagaaattgagagggaaatttctatgacagaagagagaaagaagaaaattgctggaataatgaccttgaatagaggaaatgggatatcatctggtaagcaaatagagaagctggctttagataagagcctggacaattcattcatagaatagcagaaaaggcagaatttatgtccatagatgcaagtggtatagtagatatagtgatgggagtttgtaaaagttaccttctaattgctattttttttaatgaaataagaaacaaagtcatcaactcaaagtgagtaatatgtaggaggtgattattgtttgaggagagaggagaatgtgtgatatcttttgttaattatggtaaaatataacacaaaatttgccattttaa

SEQ ID NO: 12638 - protein, 98 aa, Homo sapiens; identical to SEQ ID NO: 12636

SEQ ID NO: 12639 - DNA, 1213 bp, Homo sapiens
gctggaaacccatgtgcatttcagttcaggaaagaatggtaggcttggtggggggagctcccgcaaaaggggaactaatacagaaacactctggtatttgtctgcctctcttgttccagcgccgttttccctatatccggaattcgtccctgcgcattccaatacctgaagcggccacagggtacaggacagggagccctccgacagaaaagagtcgcggcgctaaacaaagcctgatatcactccgcttccataagccggatccccataaactacgctctagctcctcccactgccgttgtgggtaacgcggacgtggaagaacctcgtctgcggaggaaaaggtagatgttaaatggtaactacgcgcgaggttctgaggagccctgggaacaggaaggagaaaagaataccaaaagtgacaacagtttgccaatcgcagtctttaatctgataaagcggttatctcgtcttgagtcccaggtgccgagtcaatccccatacacagccgccgccattgcctcgagtccttgtgtctgactgtctgttcctgctgctgtatgacacagcacctcgaggcaaggaaataagaaaactgcctctgatccaagcagagaagaactcctgtagcctgtaataccagctgtgggtactactctcagtgttggagatcatcaaaatacaattggaccagaccctttggaaataattctgtgtctcaaatgccctgtggagcacacacttaatcagttgatggctatggaattttccaacatcagctaaagagaagggatagagtggtgacttccaagcttcatgcagaaccggacaacagaaattgagagggaaatttctatgacagaagagagaaagaagaaaattgctggaataatgaccttgaatagaggaaatgggatatcatctggtaagcaaatagagaagctggctttagataagagcctggacaattcattcatagaatagcagaaaaggcagaatttatgtccatagatgcaagtggtatagtagatatagtgatgggagtttgtaaaagttaccttctaattgctattttttttaatgaaataagaaacaaagtcatcaactcaaagtgagtaatatgtaggaggtgattattgtttgaggagagaggagaatgtgtgatatcttttgttaattatggtaaaatataacacaaaatttgccattttaa

SEQ ID NO: 12640 - protein, 98 aa, Homo sapiens; identical to SEQ ID NO: 12636

SEQ ID NO: 12641 - DNA, 2156 bp, Homo sapiens
gctggaaacccatgtgcatttcagttcaggaaagaatggtaggcttggtggggggagctcccgcaaaaggggaactaatacagaaacactctggtatttgtctgcctctcttgttccagcgccgttttccctatatccggaattcgtccctgcgcattccaatacctgaagcggccacagggtacaggacagggagccctccgacagaaaagagtcgcggcgctaaacaaagcctgatatcactccgcttccataagccggatccccataaactacgctctagctcctcccactgccgttgtgggtaacgcggacgtggaagaacctcgtctgcggaggaaaaggtagatgttaaatggtaactacgcgcgaggttctgaggagccctgggaacaggaaggagaaaagaataccaaaagtgacaacagtttgccaatcgcagtctttaatctgataaagcggttatctcgtcttgagtcccaggtgccgagtcaatccccatacacagccgccgccattgcctcgagtccttgtgtctgactgtctgttcctgctgctgtatgacacagcacctcgaggcaaggaaataagaaaactgcctctgatccaagcagagaaggtagatctgtccccaggtctgtggaactgtcagttgtgaagttttgtaaaatggtcacccaacttaaaactaggaaattacgaagaagagaaaattgccctgtatctgttaaggtctgcctgtagatctgctgtagggcttgtcaccattggaagcaaggtcctacttcagtggcagatctggtggccttggagtggctgaagaccaccaccctccacagggctgggcccatgcacagccatccttccctaccttgaaactcctgtagcctgtaataccagctgtgggtactactctcagtgttggagatcatcaaaatacaattggaccagaccctttggaaataattctgtgtctcaaatgccctgtggagcacacacttaatcagttgatggctatggaattttccaacatcagctaaagagaagggatagagtggtgacttccaagcttcatgcagaaccggacaacagaaattgagagggaaatttctatgacagaagagagaaagaagaaaattgctggaataatgaccttgaatagaggaaatgggatatcatctggtaagcaaatagagaagctggctttagataagagcctggacaattcattcatagaatagcagaaaaggcagaatttatgtccatagatgcaagtggtatagtagatatagtgatgggagtttgtaaaagttaccttctaattgctattttttttaatgaaataagaaacaaagtcatcaactcaaagtgagtaatatgtaggaggtgattattgtttgaggagagaggagaatgtgtgatatcttttgttaattatggtaaaatataacacaaaatttgccattttaaccattttaagtggacaattaagtgtcattaattacattcacactgttgtacatctgccaccactatcttcttctaaaactttttatcacctcttatagtttaaattgtgcccccacagaagatatgttggagtcctatcccttaatattaatgtgaccttatttggagataggatctttataaaggtattcaaattaacatgagatcattagggtggaatcctaatccaatatgattagtgtccttataaaaaggggaaatttggacacagaggcaagcacacagggagagtgccaagtgaagatgaagaaaaagatcagagtgatacaaagaagtcaaagaacaccaaagattgccaacaaaccaccagaagctaggagaaaggcctgaaacatatccttcccgcatgccttcagagggagcgtgggcctgcagacactttgatctcagacttctaccctatggaactgtgcaaaaataaatgtctgttgtttaagccattcagtttgtgttacagcacaaatgtattctatttagaatacatcattctaaatagaaattttttaataattaagtattttcctctccttggagcacttggtaacttctaattctactttctatctctattaatttgcctattctagatatatcaaatgagtgaaataatacaatagttgtctttt

SEQ ID NO: 12642 - protein, 98 aa, Homo sapiens; identical to SEQ ID NO: 12636

SEQ ID NO: 12643 - DNA, 1259 bp, Homo sapiens
gctggaaacccatgtgcatttcagttcaggaaagaatggtaggcttggtggggggagctcccgcaaaaggggaactaatacagaaacactctggtatttgtctgcctctcttgttccagcgccgttttccctatatccggaattcgtccctgcgcattccaatacctgaagcggccacagggtacaggacagggagccctccgacagaaaagagtcgcggcgctaaacaaagcctgatatcactccgcttccataagccggatccccataaactacgctctagctcctcccactgccgttgtgggtaacgcggacgtggaagaacctcgtctgcggaggaaaaggtagatgttaaatggtaactacgcgcgaggttctgaggagccctgggaacaggaaggagaaaagaataccaaaagtgacaacagtttgccaatcgcagtctttaatctgataaagcggttatctcgtcttgagtcccaggtgccgagtcaatccccatacacagccgccgccattgcctcgagtccttgtgtctgactgtctgttcctgctgctgtatgacacagcacctcgaggcaaggaaataagaaaactgcctctgatccaagcagagaaggtctgcctgtagatctgctgtagggcttgtcaccattggaagcaaggtcctacttcagtggcagatctggtggccttggagtggctgaagaccaccaccctccacagggctgggcccatgcacagccatccttccctaccttgaaactcctgtagcctgtaataccagctgtgggtactactctcagtgttggagatcatcaaaatacaattggaccagaccctttggaaataattctgtgtctcaaatgccctgtggagcacacacttaatcagttgatggctatggaattttccaacatcagctaaagagaagggatagagtggtgacttccaagcttcatgcagaaccggacaacagaaattgagagggaaatttctatgacagaagagagaaagaagaaaattgctggaataatgaccttgaatagaggaaatgggatatcatctggttctggagacagcctgtatttcttggatcttggcttccttccatcttcaaagccaacgatgaccagtgtagactttctatgctgcttcaatctgacatggagtccctgccttccacatctaaagtacccttgcaattacattggccaagataacccagaataatcttaaattaaactcagctgaatagc

SEQ ID NO: 12644 - protein, 90 aa, Homo sapiens
MQNRTTEIEREISMTEERKKKIAGIMTLNRGNGISSGSGDSLYFLDLGFLPSSKPTMTSVDFLCCFNLTWSPCLPHLKYPCNYIGQDNPE

SEQ ID NO: 12645 - DNA, 864 bp, Homo sapiens
gctggaaacccatgtgcatttcagttcaggaaagaatggtaggcttggtggggggagctcccgcaaaaggggaactaatacagaaacactctggtatttgtctgcctctcttgttccagcgccgttttccctatatccggaattcgtccctgcgcattccaatacctgaagcggccacagggtacaggacagggagccctccgacagaaaagagtcgcggcgctaaacaaagcctgatatcactccgcttccataagccggatccccataaactacgctctagctcctcccactgccgttgtgggtaacgcggacgtggaagaacctcgtctgcggaggaaaaggtagatgttaaatggtaactacgcgcgaggttctgaggagccctgggaacaggaaggagaaaagaataccaaaagtgacaacagtttgccaatcgcagtctttaatctgataaagcggttatctcgtcttgagtcccaggtgccgagtcaatccccatacacagccgccgccattgcctcgagtccttgtgtctgactgtctgttcctgctgctgtatgacacagcacctcgaggcaaggaaataagaaaactgcctctgatccaagcagagaagaactcctgtagcctgtaataccagctgtgggtactactctcagtgttggagatcatcaaaatacaattggaccagaccctttggaaataattctgtgtctcaaatgccctgtggagcacacacttaatcagttgatggctatggaattttccaacatcagctaaagagaaggcccagtggtcctccagagcaaagcccggccttccttccagctgtctgggccaggagcttgagggtcttctagc

SEQ ID NO: 12646 - protein, 98 aa, Homo sapiens; identical to SEQ ID NO: 12636

SEQ ID NO: 12647 - DNA, 2523 bp, Homo sapiens
ctcctcccactgccgttgtgggtaacgcggacgtggaagaacctcgtctgcggaggaaaaggtgccgagtcaatccccatacacagccgccgccattgcctcgagtccttgtgtctgactgtctgttcctgctgctgtatgacacagcacctcgaggcaaggaaataagaaaactgcctctgatccaagcagagaaggtctgcctgtagatctgctgtagggcttgtcaccattggaagcaaggtcctacttcagtggcagatctggtggccttggagtggctgaagaccaccaccctccacagggctgggcccatgcacagccatccttccctaccttgagtgagcttcctctgcatgttttctatatcactggcagagcctgtagttggaaaggggacagagtgactactggactttgtgtgaaaacaccaaccgggacaaaacttcagtcaaggctgagacgggtgggggtatataacttgtccttacgttaaacttggaacatggttgactctgggacagaagcaagggctagaggaaaggctgaggctggcctgcaagatggaatcagtggtcctgccactgctagagtgaatggtaaaacccaggccgaggcagtggctgaggcagaactgaaaacagaatcagtgacccaggccaaagctggtgatggagcaatgaccaggacacatacagtgacctacagggaggctatggctgtgacaagggaagtgatcaaggtggaagatacaactaagactagagtcatggttgagactaagacaaaacccctggcagaacgcagtatagtgccacaaaccaagtcaaaggccatgcctatgtctagggtcagtactgtaaccaagtctgaagtcaaggttgttgctgtcattgaggcaaatattaggtcctatgccaagtcacatgataaggccaatactgggtccagacctgacagaagggaagagaccagcattgggatgaaatccagtgatgaggatgaagaaaatatatgctcctggttctggactggagaagagcctagtgtagggtcctggttctggcctgaagaagagacctctcttcaagtttataagcccctacctaagatccaggaaaagcccaagcccacacacaaacccacacttactataaaacaaaaggtaatagcatggtcaagggccaggtatattgtcctagttccagttgaaggaggggagcaatccttgcctccagaaggaaactggaccctggttgagaccttgattgaaactcctctggggattcgacctttgaccaagatcccaccttatcatgggccttattaccagaccttagctgagatcaaaaaacagattaggcaaagggaaaagtatgggcctaatccgaaggcctgccactgcaaatcacgtggctttagtttagagcctaaagagtttgataaacttgttgccctccttaagttaactaaggatcctttcattcatgaaatagctacaatgataatgggcatcagtcctgcttatccatttactcaagatataattcatgatgtaggtattactgttatgattgaaaacttggtcaataatcccaatgttaaagaacaccctggagctttaagtatggtggatgacagctctgagtcttccgaagaaccaaaatcaggggagtcatatatacatcaagtttgtaaaggcataatctcttgccccttgaactcccctgtgcagctggctggactgaaattactagggcacttgagtataaaatttgaagatcactatgtgattaccagttatattccagatttcctcaccttgttaaacaagggaagtgtcaaaaccaagttttatgttttaaaagtgttttcgtgtttgtctaaaaatcacgccaatacaagagaattgatcagtgccaaagtactgtcatcattggttgcaccctttaacaagaatgagtcaaaggccaatattcttaatattattgaaatatttgagaatataaattttcagttcaaaacaaaggcaaagctatttaccaaggaaaagttcactaaatctgagcttatttcaatattccaggaagcaaaacagtttggtcagaaactccaagacttagcagagcacagtgatcccgaagtgagagataaagtcatacgattaatactaaaactctgaatacccctctgttctcataaagcctcaaacagttttttggagttgcaatatgaaaccaatgcatattgtaattataaattcaatacttatgttttccatgttgattgagggaggcaattttatggataccaattaatcttgagatcctgaacatgtgctgatttttattgtgctatatagtatataaattgagatatttttggtatttctgcaacgtgacctgataatgaatctattcatcctgagtaagctatacttctgtgctttatattgatatgtgtattcttttgagattttatttacatgttgttaataaagttgcatgctaaaactggtgaaaa

SEQ ID NO: 12648 - protein, 558 aa, Homo sapiens; identical to SEQ ID NO: 2187

SEQ ID NO: 12649 - DNA, 3711 bp, Homo sapiens
ctcctcccactgccgttgtgggtaacgcggacgtggaagaacctcgtctgcggaggaaaaggtgccgagtcaatccccatacacagccgccgccattgcctcgagtccttgtgtctgactgtctgttcctgctgctgtatgacacagcacctcgaggcaaggaaataagaaaactgcctctgatccaagcagagaagaactcctgtagcctgtaataccagctgtgggtactactctcagtgttggagatcatcaaaatacaattggaccagaccctttggaaataattctgtgtctcaaatgccctgtggagcacacacttaatcagttgatggctatggaattttccaacatcagctaaagagaagggcctactttaaggctggccaattctgcaagaaaggcaaggaggaggagactggctcacagctctggaggacccccttctgtcagctgtggggcttgacaccacttgaacaagaaaaggagggggaaactgcaccacatcagtgaagatccacctccagtggctgctctgctggtggtggagttgctgctgacaaccaccctcaacgggtctgcacccatccaggaaatatctgtcttcctttagcttggttgtacctgttctcactctatctgtattattgaattattgactgagactgtgtttgggaaggaggctgagtgactactggactggatattgactctaactcttattcccaagcttatatccttaatcacctaaagatcagagtgtgaagaaacaaacctgtgacagatctgtggttgaggtttagactacgggaggagtatattacctgactttctttgtaacttgtaccatgactggggcagagattgagcctagtgcccaggccaagcctgaaaagaaggctggggaagaggttatcgctgggcctgagagagagaatgatgtccctctggtggtcagacccaaggttaggacccaggcaactactggggcaaggcccaaaactgagaccaagtctgtgcctgcggcaaggcccaaaactgaggcccaagcaatgtctggggcaaggcccaaaactgaggtccaagtaatgggtggtgcaagacccaaaacggaggctcaaggaatcacaggggccaggcccaaaaccgatgccagggcagtaggtggcgctcgttctaaaactgatgccaaggcaatccctggagcaaggcccaaggatgaggcccaggcatgggcccagagtgaatttgggactgaagcagtgtcacaggcagaaggagtgtcccagactaatgccgttgcttggccactggccactgctgagtctggatcagttactaaatctaagggcctgtctatggatagagaactagtcaatgtggatgctgaaacctttcctggcacccagggtcagaaaggaatccagccctggtttggaccaggggaggagactaatatggggtcttggtgctattccaggcccagggccagagaggaggcctctaatgagtctgggttctggtcagcagatgagacctctacagcgtcttctttctggactggagaagagacaagtgtcagatcatggcccagggaagagtccaataccaggtccaggcacagggctaaacatcagactaatcccaggtccaggcccagatccaagcaagaagcctatgttgattcctggtctggatctgaggatgaggccagcaacccattctccttctgggttggagaaaataccaataacttgttcaggcccagagtcagggaggaggcaaatatcaggtccaagctcaggacaaatagagaagattgttttgaatctgagtctgaagatgagttctataagcagtcctgggttttgcctggagaagaggccaatagtagattcaggcacagagacaaagaagatcctaatactgccttgaaactcagggcccagaaagatgttgacagtgatagggtcaaacaagaacccaggtttgaggaggaagtcattattgggtcctggttctgggcagaaaaagaggccagtttggagggtggagcttcagcaatctgtgaatctgagccaggaactgaggagggggccattggcggatccgcgtactgggctgaggaaaagtccagtttgggggctgtggccagagaagaggccaagccggagtctgaagaagaggccatatttgggtcctggttctgggacagagatgaggcctgctttgacctaaatccctgtcctgtgtacaaggtcagtgataggttcagagatgcagctgaggagcttaatgcatcctccaggccccaaacctgggacgaggtcactgttgaattcaaacctggtctttttcatggggttggcttccgatccacaagcccctttggaattcccgaagaggcttctgaaatgcttgaggcaaagcccaagaacctggaacttagcccagaaggagaagagcaggaatctttgcttcagcctgatcagcctagtcctgagttcacatttcagtatgatccttcctaccggtcagtccgggaaattcgagagcatcttagggccagggagagtgcagagtctgagagttggtcctgcagctgcatacaatgtgagctgaaaattggttctgaagagtttgaagaattccttttattaatggacaaaattcgggatccttttattcatgaaatatctaaaattgcaatgggtatgagaagtgcttctcaatttacccgagatttcattcgagattcaggtgttgtctcacttattgaaaccttgcttaattatccatcctctagagttaggacaagttttttggaaaatatgattcacatggctccaccttatccaaatctaaacatgattgagacattcatatgtcaagtgtgtgaggaaacccttgcacatagtgtggattcccttgagcagctgactggaataaggatgcttagacacctcactatgactattgactatcacacactgattgccaactatatgtccgggtttctctccttattaaccacagccaatgcgagaacgaagtttcacgttctgaaaatgctattgaatttgtctgaaaatcctgctgtggcaaaaaaactattcagtgccaaagctctttcaatatttgtgggtctctttaacatagaagagacaaatgataatattcaaattgttattaaaatgtttcagaatatcagtaacattataaaaagtggaaagatgtccttaattgatgatgatttcagtcttgagccgcttatttctgcatttcgtgaatttgaggagttagctaagcaactacaagcccaaatagacaaccaaaatgatcctgaggtgggacaacaaagttaatatgattaaccacctgccgctgatcagccttatgttcccaaagagccctgagtagtgctttggtgttcacagtctgtttttttgttgtaacttatattttttaatgctgatgttaactttgtcaaactcttgttttgagctggatcattttgtggatgccaaatgaatatcaaaactgaaaacacatttgttgatatttgtcttgctgtccagattgcggtatttttcagtattaagttttcaatgaactgtgtcacctaagtaagctaccctgctattcgttgtttaaatatatggttctctatttgagtctgtgttttcaataaagttctatgttaaaattggc

SEQ ID NO: 12650 - protein, 838 aa, Homo sapiens; identical to SEQ ID NO: 2191

SEQ ID NO: 12651 - DNA, 468 bp, Homo sapiens
actgccgttgtgggtaacgcggacgtggaagaacctcgtctgcggaggaaaaggtagatgttaaatggtaactacgcgcgaggttctgaggagccctgggaacaggaaggagaaaagaataccaaaatgactactggactttgtgtgaaaacaccaaccgggacaaaacttcagtcaaggctgagacggaactcctgtagcctgtaataccagctgtgggtactactctcagtgttggagatcatcaaaatacaattggaccagaccctttggaaataattctgtgtctcaaatgccctgtggagcacacacttaatcagttgatggctatggaattttccaacatcagctaaagagaagggtgagtgtggggtgtgtacgtatttgtgtcaaagcacaaagttgatggtctctccttggatgggaattgtgggatgcgaagtcatctcctagattgttcatgaggtg

SEQ ID NO: 12652 - protein, 49 aa, Homo sapiens [sequence omitted]

SEQ ID NO: 12653 - DNA, 927 bp, Homo sapiens
actgccgttgtgggtaacgcggacgtggaagaacctcgtctgcggaggaaaaggtgccgagtcaatccccatacacagccgccgccattgcctcgagtccttgtgtctgactgtctgttcctgctgctgtatgacacagcacctcgaggcaaggaaataagaaaactgcctctgatccaagcagagaaggtctgcctgtagatctgctgtagggcttgtcaccattggaagcaaggtcctacttcagtggcagatctggtggccttggagtggctgaagaccaccaccctccacagggctgggcccatgcacagccatccttccctaccttgaaactcctgtagcctgtaataccagctgtgggtactactctcagtgttggagatcatcaaaatacaattggaccagaccctttggaaataattctgtgtctcaaatgccctgtggagcacacacttaatcagttgatggctatggaattttccaacatcagctaaagagaagggatagagtggtgacttccaagcttcatgcagaaccggacaacagaaattgagagggaaatttctatgacagaagagagaaagaagaaaattgctggaataatgaccttgaatagaggaaatgggatatcatctggtaagcaaatagagaagctggctttagataagagcctggacaattcattcatagaatagcagaaaaggcagaatttatgtccatagatgcaagtggtatagtagatatagtgatgggagtttgtaaaagttaccttctaattgctattttttttaatgaaataagaaacaaagtcatcaactcaaagtgagtaatatgtaggaggtgattattgtttgaggagagaggagaatgtgtgatatcttttgttaattatggtaaaatataacacaaaatttgccattttaa

SEQ ID NO: 12654 - protein, 55 aa, Homo sapiens [sequence omitted]

SEQ ID NO: 12655 - DNA, 3743 bp, Homo sapiens
gttgtgggtaacgcggacgtggaagaacctcgtctgcggaggaaaaggtgccgagtcaatccccatacacagccgccgccattgcctcgagtccttgtgtctgactgtctgttcctgctgctgtatgacacagcacctcgaggcaaggaaataagaaaactgcctctgatccaagcagagaaggtctgcctgtagatctgctgtagggcttgtcaccattggaagcaagaactcctgtagcctgtaataccagctgtgggtactactctcagtgttggagatcatcaaaatacaattggaccagaccctttggaaataattctgtgtctcaaatgccctgtggagcacacacttaatcagttgatggctatggaattttccaacatcagctaaagagaagggcctactttaaggctggccaattctgcaagaaaggcaaggaggaggagactggctcacagctctggaggacccccttctgtcagctgtggggcttgacaccacttgaacaagaaaaggagggggaaactgcaccacatcagtgaagatccacctccagtggctgctctgctggtggtggagttgctgctgacaaccaccctcaacgggtctgcacccatccaggaaatatctgtcttcctttagcttggttgtacctgttctcactctatctgtattattgaattattgactgagactgtgtttgggaaggaggctgagtgactactggactggatattgactctaactcttattcccaagcttatatccttaatcacctaaagatcagagtgtgaagaaacaaacctgtgacagatctgtggttgaggtttagactacgggaggagtatattacctgactttctttgtaacttgtaccatgactggggcagagattgagcctagtgcccaggccaagcctgaaaagaaggctggggaagaggttatcgctgggcctgagagagagaatgatgtccctctggtggtcagacccaaggttaggacccaggcaactactggggcaaggcccaaaactgagaccaagtctgtgcctgcggcaaggcccaaaactgaggcccaagcaatgtctggggcaaggcccaaaactgaggtccaagtaatgggtggtgcaagacccaaaacggaggctcaaggaatcacaggggccaggcccaaaaccgatgccagggcagtaggtggcgctcgttctaaaactgatgccaaggcaatccctggagcaaggcccaaggatgaggcccaggcatgggcccagagtgaatttgggactgaagcagtgtcacaggcagaaggagtgtcccagactaatgccgttgcttggccactggccactgctgagtctggatcagttactaaatctaagggcctgtctatggatagagaactagtcaatgtggatgctgaaacctttcctggcacccagggtcagaaaggaatccagccctggtttggaccaggggaggagactaatatggggtcttggtgctattccaggcccagggccagagaggaggcctctaatgagtctgggttctggtcagcagatgagacctctacagcgtcttctttctggactggagaagagacaagtgtcagatcatggcccagggaagagtccaataccaggtccaggcacagggctaaacatcagactaatcccaggtccaggcccagatccaagcaagaagcctatgttgattcctggtctggatctgaggatgaggccagcaacccattctccttctgggttggagaaaataccaataacttgttcaggcccagagtcagggaggaggcaaatatcaggtccaagctcaggacaaatagagaagattgttttgaatctgagtctgaagatgagttctataagcagtcctgggttttgcctggagaagaggccaatagtagattcaggcacagagacaaagaagatcctaatactgccttgaaactcagggcccagaaagatgttgacagtgatagggtcaaacaagaacccaggtttgaggaggaagtcattattgggtcctggttctgggcagaaaaagaggccagtttggagggtggagcttcagcaatctgtgaatctgagccaggaactgaggagggggccattggcggatccgcgtactgggctgaggaaaagtccagtttgggggctgtggccagagaagaggccaagccggagtctgaagaagaggccatatttgggtcctggttctgggacagagatgaggcctgctttgacctaaatccctgtcctgtgtacaaggtcagtgataggttcagagatgcagctgaggagcttaatgcatcctccaggccccaaacctgggacgaggtcactgttgaattcaaacctggtctttttcatggggttggcttccgatccacaagcccctttggaattcccgaagaggcttctgaaatgcttgaggcaaagcccaagaacctggaacttagcccagaaggagaagagcaggaatctttgcttcagcctgatcagcctagtcctgagttcacatttcagtatgatccttcctaccggtcagtccgggaaattcgagagcatcttagggccagggagagtgcagagtctgagagttggtcctgcagctgcatacaatgtgagctgaaaattggttctgaagagtttgaagaattccttttattaatggacaaaattcgggatccttttattcatgaaatatctaaaattgcaatgggtatgagaagtgcttctcaatttacccgagatttcattcgagattcaggtgttgtctcacttattgaaaccttgcttaattatccatcctctagagttaggacaagttttttggaaaatatgattcacatggctccaccttatccaaatctaaacatgattgagacattcatatgtcaagtgtgtgaggaaacccttgcacatagtgtggattcccttgagcagctgactggaataaggatgcttagacacctcactatgactattgactatcacacactgattgccaactatatgtccgggtttctctccttattaaccacagccaatgcgagaacgaagtttcacgttctgaaaatgctattgaatttgtctgaaaatcctgctgtggcaaaaaaactattcagtgccaaagctctttcaatatttgtgggtctctttaacatagaagagacaaatgataatattcaaattgttattaaaatgtttcagaatatcagtaacattataaaaagtggaaagatgtccttaattgatgatgatttcagtcttgagccgcttatttctgcatttcgtgaatttgaggagttagctaagcaactacaagcccaaatagacaaccaaaatgatcctgaggtgggacaacaaagttaatatgattaaccacctgccgctgatcagccttatgttcccaaagagccctgagtagtgctttggtgttcacagtctgtttttttgttgtaacttatattttttaatgctgatgttaactttgtcaaactcttgttttgagctggatcattttgtggatgccaaatgaatatcaaaactgaaaacacatttgttgatatttgtcttgctgtccagattgcggtatttttcagtattaagttttcaatgaactgtgtcacctaagtaagctaccctgctattcgttgtttaaatatatggttctctatttgagtctgtgttttcaataaagttctatgttaaaattggc

SEQ ID NO: 12656 - protein, 838 aa, Homo sapiens; identical to SEQ ID NO: 2191

SEQ ID NO: 12657 - DNA, 384 bp, Homo sapiens
gtatacgactagagcgacatactaaaacacacgcaagatctgtcttgaaaaatgctgttgccggggaccctcagatcatgttacctgagcatcctcagatgaaccaagcatgcaatcagagggagaatgtcgcgtatccagtgttcacctctgatacccacatccacccccaagcgatgcgcaccttctcactgaccttctctgcttggatcagaggcagttttcttatttccttgcctcgaggtgctgtgtcatacagcagcaggaacagacagtcagacacaaggactcgaggcaatggcggcggctgtgtatggggattgactcggcacctgggactcaagacgagataaccgctttatcagattaaagactgcgattggc

SEQ ID NO: 12658 - protein, 91 aa, Homo sapiens
MLPEHPQMNQACNQRENVAYPVFTSDTHIHPQAMRTFSLTFSAWIRGSFLISLPRGAVSYSSRNRQSDTRTRGNGGGCVWGLTRHLGLKTR

SEQ ID NO: 12659 - DNA, 3065 bp, Homo sapiens
gtcagactttgagaatagagcagaggggcttggagatttaggagtgggagaaaaaggggagatagaaaatgtttgccaaacaggtacttatatccagaaagaaactgtgccctaggtgctggtctctaccaaaaacagcctcaactgtctcctgtgtcttcatttattggtctctgtttttgtgaatccctgtaggtagatctgtccccaggtctgtggaactgtcagttgtgaagttttgtaaaatggtcacccaacttaaaactaggaaattacgaagaagagaaaattgccctgtatctgttaaggttggtgtaaaggtacagggacaggggggcaacttcgactagagaattccatctcttctgttttgtcattttaccaattattcccatctgccccaccccctgctgctgctgatttagttgggagtcttggtaagttgtgggggtacagaatgctaagctgcctttcccactctccactgcttgtcctgctctcacgcttgaacctagtctaatctgaacgagggacattctagggcaatcactgaagaggaagatggtgggcaataggaaggaggaggaggagtagccctgaaacaaagcagtgggggagaggggataggaggagggaaacactagacaaaatctggaaaggcaagaataagggcaagggaccaaggtctgtcaccaggagatcagtttccacattctcctgtttgtttatttgtccataggtctgcctgtagatctgctgtagggcttgtcaccattggaagcaaggtcctacttcagtggcagatctggtggccttggagtggctgaagaccaccaccctccacagggctgggcccatgcacagccatccttccctaccttgagtgagcttcctctgcatgttttctatatcactggcagagcctgtagttggaaaggggacagagtgactactggactttgtgtgaaaacaccaaccgggacaaaacttcagtcaaggctgagacgggtgggggtatataacttgtccttacgttaaacttggaacatggttgactctgggacagaagcaagggctagaggaaaggctgaggctggcctgcaagatggaatcagtggtcctgccactgctagagtgaatggtaaaacccaggccgaggcagtggctgaggcagaactgaaaacagaatcagtgacccaggccaaagctggtgatggagcaatgaccaggacacatacagtgacctacagggaggctatggctgtgacaagggaagtgatcaaggtggaagatacaactaagactagagtcatggttgagactaagacaaaacccctggcagaacgcagtatagtgccacaaaccaagtcaaaggccatgcctatgtctagggtcagtactgtaaccaagtctgaagtcaaggttgttgctgtcattgaggcaaatattaggtcctatgccaagtcacatgataaggccaatactgggtccagacctgacagaagggaagagaccagcattgggatgaaatccagtgatgaggatgaagaaaatatatgctcctggttctggactggagaagagcctagtgtagggtcctggttctggcctgaagaagagacctctcttcaagtttataagcccctacctaagatccaggaaaagcccaagcccacacacaaacccacacttactataaaacaaaaggtaatagcatggtcaagggccaggtatattgtcctagttccagttgaaggaggggagcaatccttgcctccagaaggaaactggaccctggttgagaccttgattgaaactcctctggggattcgacctttgaccaagatcccaccttatcatgggccttattaccagaccttagctgagatcaaaaaacagattaggcaaagggaaaagtatgggcctaatccgaaggcctgccactgcaaatcacgtggctttagtttagagcctaaagagtttgataaacttgttgccctccttaagttaactaaggatcctttcattcatgaaatagctacaatgataatgggcatcagtcctgcttatccatttactcaagatataattcatgatgtaggtattactgttatgattgaaaacttggtcaataatcccaatgttaaagaacaccctggagctttaagtatggtggatgacagctctgagtcttccgaagaaccaaaatcaggggagtcatatatacatcaagtttgtaaaggcataatctcttgccccttgaactcccctgtgcagctggctggactgaaattactagggcacttgagtataaaatttgaagatcactatgtgattaccagttatattccagatttcctcaccttgttaaacaagggaagtgtcaaaaccaagttttatgttttaaaagtgttttcgtgtttgtctaaaaatcacgccaatacaagagaattgatcagtgccaaagtactgtcatcattggttgcaccctttaacaagaatgagtcaaaggccaatattcttaatattattgaaatatttgagaatataaattttcagttcaaaacaaaggcaaagctatttaccaaggaaaagttcactaaatctgagcttatttcaatattccaggaagcaaaacagtttggtcagaaactccaagacttagcagagcacagtgatcccgaagtgagagataaagtcatacgattaatactaaaactctgaatacccctctgttctcataaagcctcaaacagttttttggagttgcaatatgaaaccaatgcatattgtaattataaattcaatacttatgttttccatgttgattgagggaggcaattttatggataccaattaatcttgagatcctgaacatgtgctgatttttattgtgctatatagtatataaattgagatatttttggtatttctgcaacgtgacctgataatgaatctattcatcctgagtaagctatacttctgtgctttatattgatatgtgtattcttttgagattttatttacatgttgttaataaagttgcatgctaaaactggtgaaaa

SEQ ID NO: 12660 - protein, 558 aa, Homo sapiens; identical to SEQ ID NO: 2187

SEQ ID NO: 12661 - DNA, 5487 bp, Homo sapiens
gtcgtcgccacgttagggtccgcggggtcctcctgaggcagcctggtgccaacccgcaggccccggctggggctcgtcctggccccgcccacctctgggtcggaactatggtggttctgtgagggggggcgtcctgcactttcgcgccgtatccctccgccccccttcccgacaccctcgcggagagcggttcttgccgcatcctgcgcagcccctgcccagtttggtgcagaggcgtggggggcgggactcgtctttgccattcggatcgctgggaaagcggtgggaatccaactgaagagcagccagaggagagctgaagagaggagggggaggccgatgacctgggctctgggcctctgaaggcaagtaggggtctggcgtattctgacaggacacagtgagcatctgtagaggagaggcttgaaataaaggaggagcacgaatattccctggatttctggaggcctgctttaaggctggccagttctgcaagaaaggcaaggaggaggagactggctcacacctctggaggacccccttctgtcagctgtggggcttgacactacttgaacaagaaaaggagggggaaactgcaccacataagtgaagatccacctccagtggctgctctgctggtggtggggttgctgctgacaaccaccctcaacgggtctgcacccatccaggaaatctctgtcttcctcaagcttggttgtgcctgttctacactctatctgtattattgaattactgactgagactgtgtttgggaaggaggctgagtgactactggactggatattgactctaactcttgtttccaagcttatatcctcaatcacctaaagatcagagtgtgaagaaacaaacctgtgacagatctgtggttgaggtttagactgggggaggagtatagtactggactttctttgtaacttgtaccatgactggggcagagattgagtctggtgcccaggtcaagcctgaaaagaagcctggggaagaggttgtaggtggggctgagatagagaatgatgtccctctggtggtcagacccaaggttaggacccaggcccagataatgcctggggcaaggcccaagaataagtccaaggttatgcctggagcaagcaccaaagttgagacaagtgcagtgggtggggcacgccctaagagtaaggccaaggcaatacctgtttcacgatttaaggaagaagcccagatgtgggctcagcccaggtttggtgctgaaagattgtctaagacagagagaaactcccagaccaatatcatagcctctccacttgtcagtactgattctgtcttggttgctaaaacaaagtacctgtctgaggatagagaactggttaatacagacactgagagctttcctagaaggaaggcccattaccaagcaggattccagccttcttttaggtcaaaggaggagaccaatatggggtcctggtgctgtcctaggcctacatccaaacaagaagcctctcctaattctgatttcaaatgggtagacaaatctgtgagttccttgttctggagtggagatgaggtcactgcaaaatttcatcctgggaatagggtaaaagacagtaacagatccatgcacatggccaatcaagaggctaataccatgtctaggtcccaaactaaccaggagctctatattgcatctagttctggttctgaggatgagtctgttaagacaccctggttctgggccagagataaaaccaatacctggtctgggcccagggaagatcccaatagcaggtccaggtttaggtctaagaaagaagtctatgttgaatcaagttctggatctgagcatgaagaccatttggagtcctggtttggggctggaaaggaggccaaattcaggtccaaaatgagagctgggaaggaggccaataacagggccaggcacagggccaagcgagaagcttgcattgatttcatgcctgggtctatagatgtaattaaaaaagagtcctgtttctggcctgaagaaaatgctaataccttttcaaggcccatgatcaagaaagaggccagggccagagcaatgacaaaggaagaggccaaaaccaaggcccgagccagggccaagcaagaagccaggtcagaggaggaagccctcattgggacctggttctgggctacagacgagtccagcatggcagatgaagccagcatagagtccagtctacaagtggaggatgagtccataattgggagttggttctggactgaagaagaggccagtatggggactggggctagcagtaaatccagaccaaggactgatggggagcgtattggtgattccttatttggggctagggaaaagaccagtatgaaaactggggctgaggccacctctgaatctatactagcagctgatgatgaacaggtcattattggttcctggttctgggctggtgaagaggtcaaccaagaggctgaggaagagaccatttttgggtcgtggttctgggtcattgatgcggccagtgtggaatctggtgttggggtcagctgtgagtccaggacaaggtctgaggaagaagaggtcattggtccctggttttggtctggagaacaagttgatatagaggctggaatcggagaagaggccaggccaggagctgaagaagagacaatattcgggtcctggttttgggctgaaaaccagacctatatggattgtagggctgaaactagctgtgacaccatgcaaggggctgaggaggaggagcccattattgggtcctggttttggaccagagtagaagcttgtgtggagggtgatgtcaacagcaagtctagcctggaggacaaggaagaggccatgataccatgttttggagccaaagaagaggtcagtatgaagcatgggactggtgtcagatgcagatttatggcaggggctgaggagaccaataataagtcttgcttctgggcagaaaaagaaccctgtatgtatcctgccggtggaggaagttggaagtctaggccagaggaggaagaggacattgtcaattcgtggttctggtccagaaaatacacaaagccagaggccattatagggtcctggttatgggctacagaagagagtaatatagatgggactggagaaaaggccaagttactgactgaagaggagaccataatcaattcctggttctggaaagaagatgaagccatttcagaggctactgacagagaagagtccaggccagaagctgaggagggggacattattggttcttggttctgggctggagaagaggacagactagagccagctgctgagactagagaagaagacaggctagcagctgagaaagaaggtattgttgggtcctggtttggggccagagaagagaccattagaagagaggctgggtcttgcagcaaatccagtcctaaagctgaagaggaagaagtcattattgggtcctggttctgggaagaagaggccagtccggaggcagtggcaggagtcggctttgagtcaaagcctgggactgaggaggaagaaatcactgttgggtcctggttctggcctgaagaagaagccagtatacaggctggatctcaggcagtagaggaaatggagtcagagactgaagaggaaaccatttttgggtcctggttctgggatggaaaagaagtcagtgaagaagcaggaccatgctgtgtatccaagccagaggatgatgaagagatgattgttgagtcctggttctggtctagagacaaagccattaaggaaactggaactgtggccacctgtgagtccaagccagaaaatgaggaaggggccattgttgggtcttggtttgaggctgaagatgaggtagataacaggactgacaatggaagcaactgtgggtccaggacattagctgatgaagatgaggccatagtggggtcctggttctgggcaggagatgaggcccattttgaatcaaatcctagccccgtgttcagggccatttgcaggtccacgtgttcagttgaacaggagcctgatccttcacgcaggcctcagagttgggaggaggtcactgttcagttcaagcctggtccatggggtagggtcggcttcccatctataagcccctttagatttccgaaagaggcagcatctttattctgtgaaatgtttgggggcaaacccaggaacatggtacttagcccagaaggggaagatcaggaatctttgcttcagcctgatcagcctagtcctgagttcccatttcagtatgatccttcctacaggtcagtccaggaaattcgagagcatcttagggccaaggagagtacagagcctgagagttcatcctgtaactgcatacaatgtgagctgaaaattggttctgaagagtttgaagaactccttttattaatggaaaaaattcgggatccttttattcatgaaatatctaaaatcgcaatgggtatgagaagtgcttctcaatttacccgagatttcattcgagattcaggtgttgtctcacttattgaaaccttgcttaattatccgtcctcccgagttagaacaagttttttggaaaatatgattcgcatggccccaccttatccgaatctaaacataattcagacatacatatgtaaagtgtgtgaggaaacccttgcttatagcgtggattccccggaacagctgtctggaataaggatgattagacatctcactactactactgactatcacacactggttgccaattatatgtctgggtttctctccttattagctacaggcaatgccaaaacaaggtttcatgttttgaaaatgctactgaatttgtctgaaaatcttttcatgacaaaagaactactcagtgctgaagcagtgtcagaatttataggcctctttaacagggaagagacaaatgacaatattcaaattgttcttgcaatatttgagaatattggcaacaatatcaaaaaagaaacagtgttctctgatgatgatttcaatattgagccgcttatttctgcattccacaaagttgagaaatttgctaaggaactgcaaggcaaaacagacaatcaaaatgaccctgaaggggaccaagaaaattagtaatggttaattgctggcctcagattgtccttatgttcctgagttatgatccttgagtaatgctttgattttaatagttggttctgtgttgcaacatatatctttagtgctgacactaactttgtccaactctgtctgtaagctggagcatttttctgatgccagctgaatattagagctgaaaacacatttgttgatatttgtcttgtccacattgtgatgttcagtatttgagcttatagtgaactgagcaatcataaataagccacccttctgattgtcgttctactgtatatatatatatatttgagtgttgtttgtgtttcaataaagtcctatgttaaagttggcag

SEQ ID NO: 12662 - protein, 1395 aa, Homo sapiens; identical to SEQ ID NO: 2189

SEQ ID NO: 12663 - DNA, 5249 bp, Homo sapiens
actttcgcgccgtatccctccgccccccttcccgacaccctcgcggagagcggttcttgccgcatcctgcgcagcccctgcccagtttggtgcagaggcgtggggggcgggactcgtctttgccattcggatcgctgggaaagcggtgggaatccaactgaagagcagccagaggagagctgaagagaggagggggaggccgatgacctgggctctgggcctctgaaggcctgctttaaggctggccagttctgcaagaaaggcaaggaggaggagactggctcacacctctggaggacccccttctgtcagctgtggggcttgacactacttgaacaagaaaaggagggggaaactgcaccacataagtgaagatccacctccagtggctgctctgctggtggtggggttgctgctgacaaccaccctcaacgggtctgcacccatccaggaaatctctgtcttcctcaagcttggttgtgcctgttctacactctatctgtattattgaattactgactgagactgtgtttgggaaggaggctgagtgactactggactggatattgactctaactcttgtttccaagcttatatcctcaatcacctaaagatcagagtgtgaagaaacaaacctgtgacagatctgtggttgaggtttagactgggggaggagtatagtactggactttctttgtaacttgtaccatgactggggcagagattgagtctggtgcccaggtcaagcctgaaaagaagcctggggaagaggttgtaggtggggctgagatagagaatgatgtccctctggtggtcagacccaaggttaggacccaggcccagataatgcctggggcaaggcccaagaataagtccaaggttatgcctggagcaagcaccaaagttgagacaagtgcagtgggtggggcacgccctaagagtaaggccaaggcaatacctgtttcacgatttaaggaagaagcccagatgtgggctcagcccaggtttggtgctgaaagattgtctaagacagagagaaactcccagaccaatatcatagcctctccacttgtcagtactgattctgtcttggttgctaaaacaaagtacctgtctgaggatagagaactggttaatacagacactgagagctttcctagaaggaaggcccattaccaagcaggattccagccttcttttaggtcaaaggaggagaccaatatggggtcctggtgctgtcctaggcctacatccaaacaagaagcctctcctaattctgatttcaaatgggtagacaaatctgtgagttccttgttctggagtggagatgaggtcactgcaaaatttcatcctgggaatagggtaaaagacagtaacagatccatgcacatggccaatcaagaggctaataccatgtctaggtcccaaactaaccaggagctctatattgcatctagttctggttctgaggatgagtctgttaagacaccctggttctgggccagagataaaaccaatacctggtctgggcccagggaagatcccaatagcaggtccaggtttaggtctaagaaagaagtctatgttgaatcaagttctggatctgagcatgaagaccatttggagtcctggtttggggctggaaaggaggccaaattcaggtccaaaatgagagctgggaaggaggccaataacagggccaggcacagggccaagcgagaagcttgcattgatttcatgcctgggtctatagatgtaattaaaaaagagtcctgtttctggcctgaagaaaatgctaataccttttcaaggcccatgatcaagaaagaggccagggccagagcaatgacaaaggaagaggccaaaaccaaggcccgagccagggccaagcaagaagccaggtcagaggaggaagccctcattgggacctggttctgggctacagacgagtccagcatggcagatgaagccagcatagagtccagtctacaagtggaggatgagtccataattgggagttggttctggactgaagaagaggccagtatggggactggggctagcagtaaatccagaccaaggactgatggggagcgtattggtgattccttatttggggctagggaaaagaccagtatgaaaactggggctgaggccacctctgaatctatactagcagctgatgatgaacaggtcattattggttcctggttctgggctggtgaagaggtcaaccaagaggctgaggaagagaccatttttgggtcgtggttctgggtcattgatgcggccagtgtggaatctggtgttggggtcagctgtgagtccaggacaaggtctgaggaagaagaggtcattggtccctggttttggtctggagaacaagttgatatagaggctggaatcggagaagaggccaggccaggagctgaagaagagacaatattcgggtcctggttttgggctgaaaaccagacctatatggattgtagggctgaaactagctgtgacaccatgcaaggggctgaggaggaggagcccattattgggtcctggttttggaccagagtagaagcttgtgtggagggtgatgtcaacagcaagtctagcctggaggacaaggaagaggccatgataccatgttttggagccaaagaagaggtcagtatgaagcatgggactggtgtcagatgcagatttatggcaggggctgaggagaccaataataagtcttgcttctgggcagaaaaagaaccctgtatgtatcctgccggtggaggaagttggaagtctaggccagaggaggaagaggacattgtcaattcgtggttctggtccagaaaatacacaaagccagaggccattatagggtcctggttatgggctacagaagagagtaatatagatgggactggagaaaaggccaagttactgactgaagaggagaccataatcaattcctggttctggaaagaagatgaagccatttcagaggctactgacagagaagagtccaggccagaagctgaggagggggacattattggttcttggttctgggctggagaagaggacagactagagccagctgctgagactagagaagaagacaggctagcagctgagaaagaaggtattgttgggtcctggtttggggccagagaagagaccattagaagagaggctgggtcttgcagcaaatccagtcctaaagctgaagaggaagaagtcattattgggtcctggttctgggaagaagaggccagtccggaggcagtggcaggagtcggctttgagtcaaagcctgggactgaggaggaagaaatcactgttgggtcctggttctggcctgaagaagaagccagtatacaggctggatctcaggcagtagaggaaatggagtcagagactgaagaggaaaccatttttgggtcctggttctgggatggaaaagaagtcagtgaagaagcaggaccatgctgtgtatccaagccagaggatgatgaagagatgattgttgagtcctggttctggtctagagacaaagccattaaggaaactggaactgtggccacctgtgagtccaagccagaaaatgaggaaggggccattgttgggtcttggtttgaggctgaagatgaggtagataacaggactgacaatggaagcaactgtgggtccaggacattagctgatgaagatgaggccatagtggggtcctggttctgggcaggagatgaggcccattttgaatcaaatcctagccccgtgttcagggccatttgcaggtccacgtgttcagttgaacaggagcctgatccttcacgcaggcctcagagttgggaggaggtcactgttcagttcaagcctggtccatggggtagggtcggcttcccatctataagcccctttagatttccgaaagaggcagcatctttattctgtgaaatgtttgggggcaaacccaggaacatggtacttagcccagaaggggaagatcaggaatctttgcttcagcctgatcagcctagtcctgagttcccatttcagtatgatccttcctacaggtcagtccaggaaattcgagagcatcttagggccaaggagagtacagagcctgagagttcatcctgtaactgcatacaatgtgagctgaaaattggttctgaagagtttgaagaactccttttattaatggaaaaaattcgggatccttttattcatgaaatatctaaaatcgcaatgggtatgagaagtgcttctcaatttacccgagatttcattcgagattcaggtgttgtctcacttattgaaaccttgcttaattatccgtcctcccgagttagaacaagttttttggaaaatatgattcgcatggccccaccttatccgaatctaaacataattcagacatacatatgtaaagtgtgtgaggaaacccttgcttatagcgtggattccccggaacagctgtctggaataaggatgattagacatctcactactactactgactatcacacactggttgccaattatatgtctgggtttctctccttattagctacaggcaatgccaaaacaaggtttcatgttttgaaaatgctactgaatttgtctgaaaatcttttcatgacaaaagaactactcagtgctgaagcagtgtcagaatttataggcctctttaacagggaagagacaaatgacaatattcaaattgttcttgcaatatttgagaatattggcaacaatatcaaaaaagaaacagtgttctctgatgatgatttcaatattgagccgcttatttctgcattccacaaagttgagaaatttgctaaggaactgcaaggcaaaacagacaatcaaaatgaccctgaaggggaccaagaaaattagtaatggttaattgctggcctcagattgtccttatgttcctgagttatgatccttgagtaatgctttgattttaatagttggttctgtgttgcaacatatatctttagtgctgacactaactttgtccaactctgtctgtaagctggagcatttttctgatgccagctgaatattagagctgaaaacacatttgttgatatttgtcttgtccacattgtgatgttcagtatttgagcttatagtgaactgagcaatcataaataagccacccttctgattgtcgttctactgtatatatatatatatttgagtgttgtttgtgtttcaataaagtcctatgttaaagttggcag

SEQ ID NO: 12664 - protein, 1395 aa, Homo sapiens; identical to SEQ ID NO: 2189

SEQ ID NO: 12665 - DNA, 5249 bp, Homo sapiens
gacaccctcgcggagagcggttcttgccgcatcctgcgcagcccctgcccagtttggtgcagaggcgtggggggcgggactcgtctttgccattcggatcgctgggaaagcggtgggaatccaactgaagagcagccagaggagagctgaagagaggagggggaggccgatgacctgggctctgggcctctgaaggcaagtaggggtctggcgtattctgacaggacacagtgagcatctgtagaggagaggcttgaaataaaggaggagcacgaatattccctggatttctggaggacccccttctgtcagctgtggggcttgacactacttgaacaagaaaaggagggggaaactgcaccacataagtgaagatccacctccagtggctgctctgctggtggtggggttgctgctgacaaccaccctcaacgggtctgcacccatccaggaaatctctgtcttcctcaagcttggttgtgcctgttctacactctatctgtattattgaattactgactgagactgtgtttgggaaggaggctgagtgactactggactggatattgactctaactcttgtttccaagcttatatcctcaatcacctaaagatcagagtgtgaagaaacaaacctgtgacagatctgtggttgaggtttagactgggggaggagtatagtactggactttctttgtaacttgtaccatgactggggcagagattgagtctggtgcccaggtcaagcctgaaaagaagcctggggaagaggttgtaggtggggctgagatagagaatgatgtccctctggtggtcagacccaaggttaggacccaggcccagataatgcctggggcaaggcccaagaataagtccaaggttatgcctggagcaagcaccaaagttgagacaagtgcagtgggtggggcacgccctaagagtaaggccaaggcaatacctgtttcacgatttaaggaagaagcccagatgtgggctcagcccaggtttggtgctgaaagattgtctaagacagagagaaactcccagaccaatatcatagcctctccacttgtcagtactgattctgtcttggttgctaaaacaaagtacctgtctgaggatagagaactggttaatacagacactgagagctttcctagaaggaaggcccattaccaagcaggattccagccttcttttaggtcaaaggaggagaccaatatggggtcctggtgctgtcctaggcctacatccaaacaagaagcctctcctaattctgatttcaaatgggtagacaaatctgtgagttccttgttctggagtggagatgaggtcactgcaaaatttcatcctgggaatagggtaaaagacagtaacagatccatgcacatggccaatcaagaggctaataccatgtctaggtcccaaactaaccaggagctctatattgcatctagttctggttctgaggatgagtctgttaagacaccctggttctgggccagagataaaaccaatacctggtctgggcccagggaagatcccaatagcaggtccaggtttaggtctaagaaagaagtctatgttgaatcaagttctggatctgagcatgaagaccatttggagtcctggtttggggctggaaaggaggccaaattcaggtccaaaatgagagctgggaaggaggccaataacagggccaggcacagggccaagcgagaagcttgcattgatttcatgcctgggtctatagatgtaattaaaaaagagtcctgtttctggcctgaagaaaatgctaataccttttcaaggcccatgatcaagaaagaggccagggccagagcaatgacaaaggaagaggccaaaaccaaggcccgagccagggccaagcaagaagccaggtcagaggaggaagccctcattgggacctggttctgggctacagacgagtccagcatggcagatgaagccagcatagagtccagtctacaagtggaggatgagtccataattgggagttggttctggactgaagaagaggccagtatggggactggggctagcagtaaatccagaccaaggactgatggggagcgtattggtgattccttatttggggctagggaaaagaccagtatgaaaactggggctgaggccacctctgaatctatactagcagctgatgatgaacaggtcattattggttcctggttctgggctggtgaagaggtcaaccaagaggctgaggaagagaccatttttgggtcgtggttctgggtcattgatgcggccagtgtggaatctggtgttggggtcagctgtgagtccaggacaaggtctgaggaagaagaggtcattggtccctggttttggtctggagaacaagttgatatagaggctggaatcggagaagaggccaggccaggagctgaagaagagacaatattcgggtcctggttttgggctgaaaaccagacctatatggattgtagggctgaaactagctgtgacaccatgcaaggggctgaggaggaggagcccattattgggtcctggttttggaccagagtagaagcttgtgtggagggtgatgtcaacagcaagtctagcctggaggacaaggaagaggccatgataccatgttttggagccaaagaagaggtcagtatgaagcatgggactggtgtcagatgcagatttatggcaggggctgaggagaccaataataagtcttgcttctgggcagaaaaagaaccctgtatgtatcctgccggtggaggaagttggaagtctaggccagaggaggaagaggacattgtcaattcgtggttctggtccagaaaatacacaaagccagaggccattatagggtcctggttatgggctacagaagagagtaatatagatgggactggagaaaaggccaagttactgactgaagaggagaccataatcaattcctggttctggaaagaagatgaagccatttcagaggctactgacagagaagagtccaggccagaagctgaggagggggacattattggttcttggttctgggctggagaagaggacagactagagccagctgctgagactagagaagaagacaggctagcagctgagaaagaaggtattgttgggtcctggtttggggccagagaagagaccattagaagagaggctgggtcttgcagcaaatccagtcctaaagctgaagaggaagaagtcattattgggtcctggttctgggaagaagaggccagtccggaggcagtggcaggagtcggctttgagtcaaagcctgggactgaggaggaagaaatcactgttgggtcctggttctggcctgaagaagaagccagtatacaggctggatctcaggcagtagaggaaatggagtcagagactgaagaggaaaccatttttgggtcctggttctgggatggaaaagaagtcagtgaagaagcaggaccatgctgtgtatccaagccagaggatgatgaagagatgattgttgagtcctggttctggtctagagacaaagccattaaggaaactggaactgtggccacctgtgagtccaagccagaaaatgaggaaggggccattgttgggtcttggtttgaggctgaagatgaggtagataacaggactgacaatggaagcaactgtgggtccaggacattagctgatgaagatgaggccatagtggggtcctggttctgggcaggagatgaggcccattttgaatcaaatcctagccccgtgttcagggccatttgcaggtccacgtgttcagttgaacaggagcctgatccttcacgcaggcctcagagttgggaggaggtcactgttcagttcaagcctggtccatggggtagggtcggcttcccatctataagcccctttagatttccgaaagaggcagcatctttattctgtgaaatgtttgggggcaaacccaggaacatggtacttagcccagaaggggaagatcaggaatctttgcttcagcctgatcagcctagtcctgagttcccatttcagtatgatccttcctacaggtcagtccaggaaattcgagagcatcttagggccaaggagagtacagagcctgagagttcatcctgtaactgcatacaatgtgagctgaaaattggttctgaagagtttgaagaactccttttattaatggaaaaaattcgggatccttttattcatgaaatatctaaaatcgcaatgggtatgagaagtgcttctcaatttacccgagatttcattcgagattcaggtgttgtctcacttattgaaaccttgcttaattatccgtcctcccgagttagaacaagttttttggaaaatatgattcgcatggccccaccttatccgaatctaaacataattcagacatacatatgtaaagtgtgtgaggaaacccttgcttatagcgtggattccccggaacagctgtctggaataaggatgattagacatctcactactactactgactatcacacactggttgccaattatatgtctgggtttctctccttattagctacaggcaatgccaaaacaaggtttcatgttttgaaaatgctactgaatttgtctgaaaatcttttcatgacaaaagaactactcagtgctgaagcagtgtcagaatttataggcctctttaacagggaagagacaaatgacaatattcaaattgttcttgcaatatttgagaatattggcaacaatatcaaaaaagaaacagtgttctctgatgatgatttcaatattgagccgcttatttctgcattccacaaagttgagaaatttgctaaggaactgcaaggcaaaacagacaatcaaaatgaccctgaaggggaccaagaaaattagtaatggttaattgctggcctcagattgtccttatgttcctgagttatgatccttgagtaatgctttgattttaatagttggttctgtgttgcaacatatatctttagtgctgacactaactttgtccaactctgtctgtaagctggagcatttttctgatgccagctgaatattagagctgaaaacacatttgttgatatttgtcttgtccacattgtgatgttcagtatttgagcttatagtgaactgagcaatcataaataagccacccttctgattgtcgttctactgtatatatatatatatttgagtgttgtttgtgtttcaataaagtcctatgttaaagttggcag

SEQ ID NO: 12666 - protein, 1395 aa, Homo sapiens; identical to SEQ ID NO: 2189

SEQ ID NO: 12667 - DNA, 5354 bp, Homo sapiens
gacaccctcgcggagagcggttcttgccgcatcctgcgcagcccctgcccagtttggtgcagaggcgtggggggcgggactcgtctttgccattcggatcgctgggaaagcggtgggaatccaactgaagagcagccagaggagagctgaagagaggagggggaggccgatgacctgggctctgggcctctgaagcctggcaacgaggagacgatccgttcggagccgggcgctagagagaggtctggcgtattctgacaggacacagtgagcatctgtagaggagaggcttgaaataaaggaggagcacgaatattccctggatttctggaggcctgctttaaggctggccagttctgcaagaaaggcaaggaggaggagactggctcacacctctggaggacccccttctgtcagctgtggggcttgacactacttgaacaagaaaaggagggggaaactgcaccacataagtgaagatccacctccagtggctgctctgctggtggtggggttgctgctgacaaccaccctcaacgggtctgcacccatccaggaaatctctgtcttcctcaagcttggttgtgcctgttctacactctatctgtattattgaattactgactgagactgtgtttgggaaggaggctgagtgactactggactggatattgactctaactcttgtttccaagcttatatcctcaatcacctaaagatcagagtgtgaagaaacaaacctgtgacagatctgtggttgaggtttagactgggggaggagtatagtactggactttctttgtaacttgtaccatgactggggcagagattgagtctggtgcccaggtcaagcctgaaaagaagcctggggaagaggttgtaggtggggctgagatagagaatgatgtccctctggtggtcagacccaaggttaggacccaggcccagataatgcctggggcaaggcccaagaataagtccaaggttatgcctggagcaagcaccaaagttgagacaagtgcagtgggtggggcacgccctaagagtaaggccaaggcaatacctgtttcacgatttaaggaagaagcccagatgtgggctcagcccaggtttggtgctgaaagattgtctaagacagagagaaactcccagaccaatatcatagcctctccacttgtcagtactgattctgtcttggttgctaaaacaaagtacctgtctgaggatagagaactggttaatacagacactgagagctttcctagaaggaaggcccattaccaagcaggattccagccttcttttaggtcaaaggaggagaccaatatggggtcctggtgctgtcctaggcctacatccaaacaagaagcctctcctaattctgatttcaaatgggtagacaaatctgtgagttccttgttctggagtggagatgaggtcactgcaaaatttcatcctgggaatagggtaaaagacagtaacagatccatgcacatggccaatcaagaggctaataccatgtctaggtcccaaactaaccaggagctctatattgcatctagttctggttctgaggatgagtctgttaagacaccctggttctgggccagagataaaaccaatacctggtctgggcccagggaagatcccaatagcaggtccaggtttaggtctaagaaagaagtctatgttgaatcaagttctggatctgagcatgaagaccatttggagtcctggtttggggctggaaaggaggccaaattcaggtccaaaatgagagctgggaaggaggccaataacagggccaggcacagggccaagcgagaagcttgcattgatttcatgcctgggtctatagatgtaattaaaaaagagtcctgtttctggcctgaagaaaatgctaataccttttcaaggcccatgatcaagaaagaggccagggccagagcaatgacaaaggaagaggccaaaaccaaggcccgagccagggccaagcaagaagccaggtcagaggaggaagccctcattgggacctggttctgggctacagacgagtccagcatggcagatgaagccagcatagagtccagtctacaagtggaggatgagtccataattgggagttggttctggactgaagaagaggccagtatggggactggggctagcagtaaatccagaccaaggactgatggggagcgtattggtgattccttatttggggctagggaaaagaccagtatgaaaactggggctgaggccacctctgaatctatactagcagctgatgatgaacaggtcattattggttcctggttctgggctggtgaagaggtcaaccaagaggctgaggaagagaccatttttgggtcgtggttctgggtcattgatgcggccagtgtggaatctggtgttggggtcagctgtgagtccaggacaaggtctgaggaagaagaggtcattggtccctggttttggtctggagaacaagttgatatagaggctggaatcggagaagaggccaggccaggagctgaagaagagacaatattcgggtcctggttttgggctgaaaaccagacctatatggattgtagggctgaaactagctgtgacaccatgcaaggggctgaggaggaggagcccattattgggtcctggttttggaccagagtagaagcttgtgtggagggtgatgtcaacagcaagtctagcctggaggacaaggaagaggccatgataccatgttttggagccaaagaagaggtcagtatgaagcatgggactggtgtcagatgcagatttatggcaggggctgaggagaccaataataagtcttgcttctgggcagaaaaagaaccctgtatgtatcctgccggtggaggaagttggaagtctaggccagaggaggaagaggacattgtcaattcgtggttctggtccagaaaatacacaaagccagaggccattatagggtcctggttatgggctacagaagagagtaatatagatgggactggagaaaaggccaagttactgactgaagaggagaccataatcaattcctggttctggaaagaagatgaagccatttcagaggctactgacagagaagagtccaggccagaagctgaggagggggacattattggttcttggttctgggctggagaagaggacagactagagccagctgctgagactagagaagaagacaggctagcagctgagaaagaaggtattgttgggtcctggtttggggccagagaagagaccattagaagagaggctgggtcttgcagcaaatccagtcctaaagctgaagaggaagaagtcattattgggtcctggttctgggaagaagaggccagtccggaggcagtggcaggagtcggctttgagtcaaagcctgggactgaggaggaagaaatcactgttgggtcctggttctggcctgaagaagaagccagtatacaggctggatctcaggcagtagaggaaatggagtcagagactgaagaggaaaccatttttgggtcctggttctgggatggaaaagaagtcagtgaagaagcaggaccatgctgtgtatccaagccagaggatgatgaagagatgattgttgagtcctggttctggtctagagacaaagccattaaggaaactggaactgtggccacctgtgagtccaagccagaaaatgaggaaggggccattgttgggtcttggtttgaggctgaagatgaggtagataacaggactgacaatggaagcaactgtgggtccaggacattagctgatgaagatgaggccatagtggggtcctggttctgggcaggagatgaggcccattttgaatcaaatcctagccccgtgttcagggccatttgcaggtccacgtgttcagttgaacaggagcctgatccttcacgcaggcctcagagttgggaggaggtcactgttcagttcaagcctggtccatggggtagggtcggcttcccatctataagcccctttagatttccgaaagaggcagcatctttattctgtgaaatgtttgggggcaaacccaggaacatggtacttagcccagaaggggaagatcaggaatctttgcttcagcctgatcagcctagtcctgagttcccatttcagtatgatccttcctacaggtcagtccaggaaattcgagagcatcttagggccaaggagagtacagagcctgagagttcatcctgtaactgcatacaatgtgagctgaaaattggttctgaagagtttgaagaactccttttattaatggaaaaaattcgggatccttttattcatgaaatatctaaaatcgcaatgggtatgagaagtgcttctcaatttacccgagatttcattcgagattcaggtgttgtctcacttattgaaaccttgcttaattatccgtcctcccgagttagaacaagttttttggaaaatatgattcgcatggccccaccttatccgaatctaaacataattcagacatacatatgtaaagtgtgtgaggaaacccttgcttatagcgtggattccccggaacagctgtctggaataaggatgattagacatctcactactactactgactatcacacactggttgccaattatatgtctgggtttctctccttattagctacaggcaatgccaaaacaaggtttcatgttttgaaaatgctactgaatttgtctgaaaatcttttcatgacaaaagaactactcagtgctgaagcagtgtcagaatttataggcctctttaacagggaagagacaaatgacaatattcaaattgttcttgcaatatttgagaatattggcaacaatatcaaaaaagaaacagtgttctctgatgatgatttcaatattgagccgcttatttctgcattccacaaagttgagaaatttgctaaggaactgcaaggcaaaacagacaatcaaaatgaccctgaaggggaccaagaaaattagtaatggttaattgctggcctcagattgtccttatgttcctgagttatgatccttgagtaatgctttgattttaatagttggttctgtgttgcaacatatatctttagtgctgacactaactttgtccaactctgtctgtaagctggagcatttttctgatgccagctgaatattagagctgaaaacacatttgttgatatttgtcttgtccacattgtgatgttcagtatttgagcttatagtgaactgagcaatcataaataagccacccttctgattgtcgttctactgtatatatatatatatttgagtgttgtttgtgtttcaataaagtcctatgttaaagttggcag

SEQ ID NO: 12668 - protein, 1395 aa, Homo sapiens; identical to SEQ ID NO: 2189

SEQ ID NO: 12669 - DNA, 4624 bp, Homo sapiens
gacaccctcgcggagagcggttcttgccgcatcctgcgcagcccctgcccagtttggtgcagaggcgtggggggcgggactcgtctttgccattcggatcgctgggaaagcggtgggaatccaactgaagagcagccagaggagagctgaagagaggagggggaggccgatgacctgggcttctggtggtcagacccaaggttaggacccaggcccagataatgcctggggcaaggcccaagaataagtccaaggttatgcctggagcaagcaccaaagttgagacaagtgcagtgggtggggcacgccctaagagtaaggccaaggcaatacctgtttcacgatttaaggaagaagcccagatgtgggctcagcccaggtttggtgctgaaagattgtctaagacagagagaaactcccagaccaatatcatagcctctccacttgtcagtactgattctgtcttggttgctaaaacaaagtacctgtctgaggatagagaactggttaatacagacactgagagctttcctagaaggaaggcccattaccaagcaggattccagccttcttttaggtcaaaggaggagaccaatatggggtcctggtgctgtcctaggcctacatccaaacaagaagcctctcctaattctgatttcaaatgggtagacaaatctgtgagttccttgttctggagtggagatgaggtcactgcaaaatttcatcctgggaatagggtaaaagacagtaacagatccatgcacatggccaatcaagaggctaataccatgtctaggtcccaaactaaccaggagctctatattgcatctagttctggttctgaggatgagtctgttaagacaccctggttctgggccagagataaaaccaatacctggtctgggcccagggaagatcccaatagcaggtccaggtttaggtctaagaaagaagtctatgttgaatcaagttctggatctgagcatgaagaccatttggagtcctggtttggggctggaaaggaggccaaattcaggtccaaaatgagagctgggaaggaggccaataacagggccaggcacagggccaagcgagaagcttgcattgatttcatgcctgggtctatagatgtaattaaaaaagagtcctgtttctggcctgaagaaaatgctaataccttttcaaggcccatgatcaagaaagaggccagggccagagcaatgacaaaggaagaggccaaaaccaaggcccgagccagggccaagcaagaagccaggtcagaggaggaagccctcattgggacctggttctgggctacagacgagtccagcatggcagatgaagccagcatagagtccagtctacaagtggaggatgagtccataattgggagttggttctggactgaagaagaggccagtatggggactggggctagcagtaaatccagaccaaggactgatggggagcgtattggtgattccttatttggggctagggaaaagaccagtatgaaaactggggctgaggccacctctgaatctatactagcagctgatgatgaacaggtcattattggttcctggttctgggctggtgaagaggtcaaccaagaggctgaggaagagaccatttttgggtcgtggttctgggtcattgatgcggccagtgtggaatctggtgttggggtcagctgtgagtccaggacaaggtctgaggaagaagaggtcattggtccctggttttggtctggagaacaagttgatatagaggctggaatcggagaagaggccaggccaggagctgaagaagagacaatattcgggtcctggttttgggctgaaaaccagacctatatggattgtagggctgaaactagctgtgacaccatgcaaggggctgaggaggaggagcccattattgggtcctggttttggaccagagtagaagcttgtgtggagggtgatgtcaacagcaagtctagcctggaggacaaggaagaggccatgataccatgttttggagccaaagaagaggtcagtatgaagcatgggactggtgtcagatgcagatttatggcaggggctgaggagaccaataataagtcttgcttctgggcagaaaaagaaccctgtatgtatcctgccggtggaggaagttggaagtctaggccagaggaggaagaggacattgtcaattcgtggttctggtccagaaaatacacaaagccagaggccattatagggtcctggttatgggctacagaagagagtaatatagatgggactggagaaaaggccaagttactgactgaagaggagaccataatcaattcctggttctggaaagaagatgaagccatttcagaggctactgacagagaagagtccaggccagaagctgaggagggggacattattggttcttggttctgggctggagaagaggacagactagagccagctgctgagactagagaagaagacaggctagcagctgagaaagaaggtattgttgggtcctggtttggggccagagaagagaccattagaagagaggctgggtcttgcagcaaatccagtcctaaagctgaagaggaagaagtcattattgggtcctggttctgggaagaagaggccagtccggaggcagtggcaggagtcggctttgagtcaaagcctgggactgaggaggaagaaatcactgttgggtcctggttctggcctgaagaagaagccagtatacaggctggatctcaggcagtagaggaaatggagtcagagactgaagaggaaaccatttttgggtcctggttctgggatggaaaagaagtcagtgaagaagcaggaccatgctgtgtatccaagccagaggatgatgaagagatgattgttgagtcctggttctggtctagagacaaagccattaaggaaactggaactgtggccacctgtgagtccaagccagaaaatgaggaaggggccattgttgggtcttggtttgaggctgaagatgaggtagataacaggactgacaatggaagcaactgtgggtccaggacattagctgatgaagatgaggccatagtggggtcctggttctgggcaggagatgaggcccattttgaatcaaatcctagccccgtgttcagggccatttgcaggtccacgtgttcagttgaacaggagcctgatccttcacgcaggcctcagagttgggaggaggtcactgttcagttcaagcctggtccatggggtagggtcggcttcccatctataagcccctttagatttccgaaagaggcagcatctttattctgtgaaatgtttgggggcaaacccaggaacatggtacttagcccagaaggggaagatcaggaatctttgcttcagcctgatcagcctagtcctgagttcccatttcagtatgatccttcctacaggtcagtccaggaaattcgagagcatcttagggccaaggagagtacagagcctgagagttcatcctgtaactgcatacaatgtgagctgaaaattggttctgaagagtttgaagaactccttttattaatggaaaaaattcgggatccttttattcatgaaatatctaaaatcgcaatgggtatgagaagtgcttctcaatttacccgagatttcattcgagattcaggtgttgtctcacttattgaaaccttgcttaattatccgtcctcccgagttagaacaagttttttggaaaatatgattcgcatggccccaccttatccgaatctaaacataattcagacatacatatgtaaagtgtgtgaggaaacccttgcttatagcgtggattccccggaacagctgtctggaataaggatgattagacatctcactactactactgactatcacacactggttgccaattatatgtctgggtttctctccttattagctacaggcaatgccaaaacaaggtttcatgttttgaaaatgctactgaatttgtctgaaaatcttttcatgacaaaagaactactcagtgctgaagcagtgtcagaatttataggcctctttaacagggaagagacaaatgacaatattcaaattgttcttgcaatatttgagaatattggcaacaatatcaaaaaagaaacagtgttctctgatgatgatttcaatattgagccgcttatttctgcattccacaaagttgagaaatttgctaaggaactgcaaggcaaaacagacaatcaaaatgaccctgaaggggaccaagaaaattagtaatggttaattgctggcctcagattgtccttatgttcctgagttatgatccttgagtaatgctttgattttaatagttggttctgtgttgcaacatatatctttagtgctgacactaactttgtccaactctgtctgtaagctggagcatttttctgatgccagctgaatattagagctgaaaacacatttgttgatatttgtcttgtccacattgtgatgttcagtatttgagcttatagtgaactgagcaatcataaataagccacccttctgattgtcgttctactgtatatatatatatatttgagtgttgtttgtgtttcaataaagtcctatgttaaagttggcag

SEQ ID NO: 12670 - protein, 1349 aa, Homo sapiens
MPGARPKNKSKVMPGASTKVETSAVGGARPKSKAKAIPVSRFKEEAQMWAQPRFGAERLSKTERNSQTNIIASPLVSTDSVLVAKTKYLSEDRELVNTDTESFPRRKAHYQAGFQPSFRSKEETNMGSWCCPRPTSKQEASPNSDFKWVDKSVSSLFWSGDEVTAKFHPGNRVKDSNRSMHMANQEANTMSRSQTNQELYIASSSGSEDESVKTPWFWARDKTNTWSGPREDPNSRSRFRSKKEVYVESSSGSEHEDHLESWFGAGKEAKFRSKMRAGKEANNRARHRAKREACIDFMPGSIDVIKKESCFWPEENANTFSRPMIKKEARARAMTKEEAKTKARARAKQEARSEEEALIGTWFWATDESSMADEASIESSLQVEDESIIGSWFWTEEEASMGTGASSKSRPRTDGERIGDSLFGAREKTSMKTGAEATSESILAADDEQVIIGSWFWAGEEVNQEAEEETIFGSWFWVIDAASVESGVGVSCESRTRSEEEEVIGPWFWSGEQVDIEAGIGEEARPGAEEETIFGSWFWAENQTYMDCRAETSCDTMQGAEEEEPIIGSWFWTRVEACVEGDVNSKSSLEDKEEAMIPCFGAKEEVSMKHGTGVRCRFMAGAEETNNKSCFWAEKEPCMYPAGGGSWKSRPEEEEDIVNSWFWSRKYTKPEAIIGSWLWATEESNIDGTGEKAKLLTEEETIINSWFWKEDEAISEATDREESRPEAEEGDIIGSWFWAGEEDRLEPAAETREEDRLAAEKEGIVGSWFGAREETIRREAGSCSKSSPKAEEEEVIIGSWFWEEEASPEAVAGVGFESKPGTEEEEITVGSWFWPEEEASIQAGSQAVEEMESETEEETIFGSWFWDGKEVSEEAGPCCVSKPEDDEEMIVESWFWSRDKAIKETGTVATCESKPENEEGAIVGSWFEAEDEVDNRTDNGSNCGSRTLADEDEAIVGSWFWAGDEAHFESNPSPVFRAICRSTCSVEQEPDPSRRPQSWEEVTVQFKPGPWGRVGFPSISPFRFPKEAASLFCEMFGGKPRNMVLSPEGEDQESLLQPDQPSPEFPFQYDPSYRSVQEIREHLRAKESTEPESSSCNCIQCELKIGSEEFEELLLLMEKIRDPFIHEISKIAMGMRSASQFTRDFIRDSGVVSLIETLLNYPSSRVRTSFLENMIRMAPPYPNLNIIQTYICKVCEETLAYSVDSPEQLSGIRMIRHLTTTTDYHTLVANYMSGFLSLLATGNAKTRFHVLKMLLNLSENLFMTKELLSAEAVSEFIGLFNREETNDNIQIVLAIFENIGNNIKKETVFSDDDFNIEPLISAFHKVEKFAKELQGKTDNQNDPEGDQEN

SEQ ID NO: 12671 - DNA, 5148 bp, Homo sapiens
gacaccctcgcggagagcggttcttgccgcatcctgcgcagcccctgcccagtttggtgcagaggcgtggggggcgggactcgtctttgccattcggatcgctgggaaagcggtgggaatccaactgaagagcagccagaggagagctgaagagaggagggggaggccgatgacctgggctctgggcctctgaaggacccccttctgtcagctgtggggcttgacactacttgaacaagaaaaggagggggaaactgcaccacataagtgaagatccacctccagtggctgctctgctggtggtggggttgctgctgacaaccaccctcaacgggtctgcacccatccaggaaatctctgtcttcctcaagcttggttgtgcctgttctacactctatctgtattattgaattactgactgagactgtgtttgggaaggaggctgagtgactactggactggatattgactctaactcttgtttccaagcttatatcctcaatcacctaaagatcagagtgtgaagaaacaaacctgtgacagatctgtggttgaggtttagactgggggaggagtatagtactggactttctttgtaacttgtaccatgactggggcagagattgagtctggtgcccaggtcaagcctgaaaagaagcctggggaagaggttgtaggtggggctgagatagagaatgatgtccctctggtggtcagacccaaggttaggacccaggcccagataatgcctggggcaaggcccaagaataagtccaaggttatgcctggagcaagcaccaaagttgagacaagtgcagtgggtggggcacgccctaagagtaaggccaaggcaatacctgtttcacgatttaaggaagaagcccagatgtgggctcagcccaggtttggtgctgaaagattgtctaagacagagagaaactcccagaccaatatcatagcctctccacttgtcagtactgattctgtcttggttgctaaaacaaagtacctgtctgaggatagagaactggttaatacagacactgagagctttcctagaaggaaggcccattaccaagcaggattccagccttcttttaggtcaaaggaggagaccaatatggggtcctggtgctgtcctaggcctacatccaaacaagaagcctctcctaattctgatttcaaatgggtagacaaatctgtgagttccttgttctggagtggagatgaggtcactgcaaaatttcatcctgggaatagggtaaaagacagtaacagatccatgcacatggccaatcaagaggctaataccatgtctaggtcccaaactaaccaggagctctatattgcatctagttctggttctgaggatgagtctgttaagacaccctggttctgggccagagataaaaccaatacctggtctgggcccagggaagatcccaatagcaggtccaggtttaggtctaagaaagaagtctatgttgaatcaagttctggatctgagcatgaagaccatttggagtcctggtttggggctggaaaggaggccaaattcaggtccaaaatgagagctgggaaggaggccaataacagggccaggcacagggccaagcgagaagcttgcattgatttcatgcctgggtctatagatgtaattaaaaaagagtcctgtttctggcctgaagaaaatgctaataccttttcaaggcccatgatcaagaaagaggccagggccagagcaatgacaaaggaagaggccaaaaccaaggcccgagccagggccaagcaagaagccaggtcagaggaggaagccctcattgggacctggttctgggctacagacgagtccagcatggcagatgaagccagcatagagtccagtctacaagtggaggatgagtccataattgggagttggttctggactgaagaagaggccagtatggggactggggctagcagtaaatccagaccaaggactgatggggagcgtattggtgattccttatttggggctagggaaaagaccagtatgaaaactggggctgaggccacctctgaatctatactagcagctgatgatgaacaggtcattattggttcctggttctgggctggtgaagaggtcaaccaagaggctgaggaagagaccatttttgggtcgtggttctgggtcattgatgcggccagtgtggaatctggtgttggggtcagctgtgagtccaggacaaggtctgaggaagaagaggtcattggtccctggttttggtctggagaacaagttgatatagaggctggaatcggagaagaggccaggccaggagctgaagaagagacaatattcgggtcctggttttgggctgaaaaccagacctatatggattgtagggctgaaactagctgtgacaccatgcaaggggctgaggaggaggagcccattattgggtcctggttttggaccagagtagaagcttgtgtggagggtgatgtcaacagcaagtctagcctggaggacaaggaagaggccatgataccatgttttggagccaaagaagaggtcagtatgaagcatgggactggtgtcagatgcagatttatggcaggggctgaggagaccaataataagtcttgcttctgggcagaaaaagaaccctgtatgtatcctgccggtggaggaagttggaagtctaggccagaggaggaagaggacattgtcaattcgtggttctggtccagaaaatacacaaagccagaggccattatagggtcctggttatgggctacagaagagagtaatatagatgggactggagaaaaggccaagttactgactgaagaggagaccataatcaattcctggttctggaaagaagatgaagccatttcagaggctactgacagagaagagtccaggccagaagctgaggagggggacattattggttcttggttctgggctggagaagaggacagactagagccagctgctgagactagagaagaagacaggctagcagctgagaaagaaggtattgttgggtcctggtttggggccagagaagagaccattagaagagaggctgggtcttgcagcaaatccagtcctaaagctgaagaggaagaagtcattattgggtcctggttctgggaagaagaggccagtccggaggcagtggcaggagtcggctttgagtcaaagcctgggactgaggaggaagaaatcactgttgggtcctggttctggcctgaagaagaagccagtatacaggctggatctcaggcagtagaggaaatggagtcagagactgaagaggaaaccatttttgggtcctggttctgggatggaaaagaagtcagtgaagaagcaggaccatgctgtgtatccaagccagaggatgatgaagagatgattgttgagtcctggttctggtctagagacaaagccattaaggaaactggaactgtggccacctgtgagtccaagccagaaaatgaggaaggggccattgttgggtcttggtttgaggctgaagatgaggtagataacaggactgacaatggaagcaactgtgggtccaggacattagctgatgaagatgaggccatagtggggtcctggttctgggcaggagatgaggcccattttgaatcaaatcctagccccgtgttcagggccatttgcaggtccacgtgttcagttgaacaggagcctgatccttcacgcaggcctcagagttgggaggaggtcactgttcagttcaagcctggtccatggggtagggtcggcttcccatctataagcccctttagatttccgaaagaggcagcatctttattctgtgaaatgtttgggggcaaacccaggaacatggtacttagcccagaaggggaagatcaggaatctttgcttcagcctgatcagcctagtcctgagttcccatttcagtatgatccttcctacaggtcagtccaggaaattcgagagcatcttagggccaaggagagtacagagcctgagagttcatcctgtaactgcatacaatgtgagctgaaaattggttctgaagagtttgaagaactccttttattaatggaaaaaattcgggatccttttattcatgaaatatctaaaatcgcaatgggtatgagaagtgcttctcaatttacccgagatttcattcgagattcaggtgttgtctcacttattgaaaccttgcttaattatccgtcctcccgagttagaacaagttttttggaaaatatgattcgcatggccccaccttatccgaatctaaacataattcagacatacatatgtaaagtgtgtgaggaaacccttgcttatagcgtggattccccggaacagctgtctggaataaggatgattagacatctcactactactactgactatcacacactggttgccaattatatgtctgggtttctctccttattagctacaggcaatgccaaaacaaggtttcatgttttgaaaatgctactgaatttgtctgaaaatcttttcatgacaaaagaactactcagtgctgaagcagtgtcagaatttataggcctctttaacagggaagagacaaatgacaatattcaaattgttcttgcaatatttgagaatattggcaacaatatcaaaaaagaaacagtgttctctgatgatgatttcaatattgagccgcttatttctgcattccacaaagttgagaaatttgctaaggaactgcaaggcaaaacagacaatcaaaatgaccctgaaggggaccaagaaaattagtaatggttaattgctggcctcagattgtccttatgttcctgagttatgatccttgagtaatgctttgattttaatagttggttctgtgttgcaacatatatctttagtgctgacactaactttgtccaactctgtctgtaagctggagcatttttctgatgccagctgaatattagagctgaaaacacatttgttgatatttgtcttgtccacattgtgatgttcagtatttgagcttatagtgaactgagcaatcataaataagccacccttctgattgtcgttctactgtatatatatatatatttgagtgttgtttgtgtttcaataaagtcctatgttaaagttggcag

SEQ ID NO: 12672 - protein, 1395 aa, Homo sapiens; identical to SEQ ID NO: 2189

SEQ ID NO: 12673 - DNA, 5128 bp, Homo sapiens
gtgcgcagtgcccgagatccctggctatggggaggcggtgactggtgcgggccaggccggaccaagggctgaggggctggctccagaggcaccgtcagatcgtctggaggagaaccgcgctgaccgcttcccagccagctttgcaggcgcccgcgcgcagccctcgacggtttcggacccccttctgtcagctgtggggcttgacactacttgaacaagaaaaggagggggaaactgcaccacataagtgaagatccacctccagtggctgctctgctggtggtggggttgctgctgacaaccaccctcaacgggtctgcacccatccaggaaatctctgtcttcctcaagcttggttgtgcctgttctacactctatctgtattattgaattactgactgagactgtgtttgggaaggaggctgagtgactactggactggatattgactctaactcttgtttccaagcttatatcctcaatcacctaaagatcagagtgtgaagaaacaaacctgtgacagatctgtggttgaggtttagactgggggaggagtatagtactggactttctttgtaacttgtaccatgactggggcagagattgagtctggtgcccaggtcaagcctgaaaagaagcctggggaagaggttgtaggtggggctgagatagagaatgatgtccctctggtggtcagacccaaggttaggacccaggcccagataatgcctggggcaaggcccaagaataagtccaaggttatgcctggagcaagcaccaaagttgagacaagtgcagtgggtggggcacgccctaagagtaaggccaaggcaatacctgtttcacgatttaaggaagaagcccagatgtgggctcagcccaggtttggtgctgaaagattgtctaagacagagagaaactcccagaccaatatcatagcctctccacttgtcagtactgattctgtcttggttgctaaaacaaagtacctgtctgaggatagagaactggttaatacagacactgagagctttcctagaaggaaggcccattaccaagcaggattccagccttcttttaggtcaaaggaggagaccaatatggggtcctggtgctgtcctaggcctacatccaaacaagaagcctctcctaattctgatttcaaatgggtagacaaatctgtgagttccttgttctggagtggagatgaggtcactgcaaaatttcatcctgggaatagggtaaaagacagtaacagatccatgcacatggccaatcaagaggctaataccatgtctaggtcccaaactaaccaggagctctatattgcatctagttctggttctgaggatgagtctgttaagacaccctggttctgggccagagataaaaccaatacctggtctgggcccagggaagatcccaatagcaggtccaggtttaggtctaagaaagaagtctatgttgaatcaagttctggatctgagcatgaagaccatttggagtcctggtttggggctggaaaggaggccaaattcaggtccaaaatgagagctgggaaggaggccaataacagggccaggcacagggccaagcgagaagcttgcattgatttcatgcctgggtctatagatgtaattaaaaaagagtcctgtttctggcctgaagaaaatgctaataccttttcaaggcccatgatcaagaaagaggccagggccagagcaatgacaaaggaagaggccaaaaccaaggcccgagccagggccaagcaagaagccaggtcagaggaggaagccctcattgggacctggttctgggctacagacgagtccagcatggcagatgaagccagcatagagtccagtctacaagtggaggatgagtccataattgggagttggttctggactgaagaagaggccagtatggggactggggctagcagtaaatccagaccaaggactgatggggagcgtattggtgattccttatttggggctagggaaaagaccagtatgaaaactggggctgaggccacctctgaatctatactagcagctgatgatgaacaggtcattattggttcctggttctgggctggtgaagaggtcaaccaagaggctgaggaagagaccatttttgggtcgtggttctgggtcattgatgcggccagtgtggaatctggtgttggggtcagctgtgagtccaggacaaggtctgaggaagaagaggtcattggtccctggttttggtctggagaacaagttgatatagaggctggaatcggagaagaggccaggccaggagctgaagaagagacaatattcgggtcctggttttgggctgaaaaccagacctatatggattgtagggctgaaactagctgtgacaccatgcaaggggctgaggaggaggagcccattattgggtcctggttttggaccagagtagaagcttgtgtggagggtgatgtcaacagcaagtctagcctggaggacaaggaagaggccatgataccatgttttggagccaaagaagaggtcagtatgaagcatgggactggtgtcagatgcagatttatggcaggggctgaggagaccaataataagtcttgcttctgggcagaaaaagaaccctgtatgtatcctgccggtggaggaagttggaagtctaggccagaggaggaagaggacattgtcaattcgtggttctggtccagaaaatacacaaagccagaggccattatagggtcctggttatgggctacagaagagagtaatatagatgggactggagaaaaggccaagttactgactgaagaggagaccataatcaattcctggttctggaaagaagatgaagccatttcagaggctactgacagagaagagtccaggccagaagctgaggagggggacattattggttcttggttctgggctggagaagaggacagactagagccagctgctgagactagagaagaagacaggctagcagctgagaaagaaggtattgttgggtcctggtttggggccagagaagagaccattagaagagaggctgggtcttgcagcaaatccagtcctaaagctgaagaggaagaagtcattattgggtcctggttctgggaagaagaggccagtccggaggcagtggcaggagtcggctttgagtcaaagcctgggactgaggaggaagaaatcactgttgggtcctggttctggcctgaagaagaagccagtatacaggctggatctcaggcagtagaggaaatggagtcagagactgaagaggaaaccatttttgggtcctggttctgggatggaaaagaagtcagtgaagaagcaggaccatgctgtgtatccaagccagaggatgatgaagagatgattgttgagtcctggttctggtctagagacaaagccattaaggaaactggaactgtggccacctgtgagtccaagccagaaaatgaggaaggggccattgttgggtcttggtttgaggctgaagatgaggtagataacaggactgacaatggaagcaactgtgggtccaggacattagctgatgaagatgaggccatagtggggtcctggttctgggcaggagatgaggcccattttgaatcaaatcctagccccgtgttcagggccatttgcaggtccacgtgttcagttgaacaggagcctgatccttcacgcaggcctcagagttgggaggaggtcactgttcagttcaagcctggtccatggggtagggtcggcttcccatctataagcccctttagatttccgaaagaggcagcatctttattctgtgaaatgtttgggggcaaacccaggaacatggtacttagcccagaaggggaagatcaggaatctttgcttcagcctgatcagcctagtcctgagttcccatttcagtatgatccttcctacaggtcagtccaggaaattcgagagcatcttagggccaaggagagtacagagcctgagagttcatcctgtaactgcatacaatgtgagctgaaaattggttctgaagagtttgaagaactccttttattaatggaaaaaattcgggatccttttattcatgaaatatctaaaatcgcaatgggtatgagaagtgcttctcaatttacccgagatttcattcgagattcaggtgttgtctcacttattgaaaccttgcttaattatccgtcctcccgagttagaacaagttttttggaaaatatgattcgcatggccccaccttatccgaatctaaacataattcagacatacatatgtaaagtgtgtgaggaaacccttgcttatagcgtggattccccggaacagctgtctggaataaggatgattagacatctcactactactactgactatcacacactggttgccaattatatgtctgggtttctctccttattagctacaggcaatgccaaaacaaggtttcatgttttgaaaatgctactgaatttgtctgaaaatcttttcatgacaaaagaactactcagtgctgaagcagtgtcagaatttataggcctctttaacagggaagagacaaatgacaatattcaaattgttcttgcaatatttgagaatattggcaacaatatcaaaaaagaaacagtgttctctgatgatgatttcaatattgagccgcttatttctgcattccacaaagttgagaaatttgctaaggaactgcaaggcaaaacagacaatcaaaatgaccctgaaggggaccaagaaaattagtaatggttaattgctggcctcagattgtccttatgttcctgagttatgatccttgagtaatgctttgattttaatagttggttctgtgttgcaacatatatctttagtgctgacactaactttgtccaactctgtctgtaagctggagcatttttctgatgccagctgaatattagagctgaaaacacatttgttgatatttgtcttgtccacattgtgatgttcagtatttgagcttatagtgaactgagcaatcataaataagccacccttctgattgtcgttctactgtatatatatatatatttgagtgttgtttgtgtttcaataaagtcctatgttaaagttggcag

SEQ ID NO: 12674 - protein, 1395 aa, Homo sapiens; identical to SEQ ID NO: 2189

SEQ ID NO: 12675 - DNA, 5177 bp, Homo sapiens
cgtgtcctgggtgctgtcccttcccacagactccaggttgatgtcaaagtctgtctgcgcggtaggtctggcgtattctgacaggacacagtgagcatctgtagaggagaggcttgaaataaaggaggagcacgaatattccctggatttctggaggcctgctttaaggctggccagttctgcaagaaaggcaaggaggaggagactggctcacacctctggaggacccccttctgtcagctgtggggcttgacactacttgaacaagaaaaggagggggaaactgcaccacataagtgaagatccacctccagtggctgctctgctggtggtggggttgctgctgacaaccaccctcaacgggtctgcacccatccaggaaatctctgtcttcctcaagcttggttgtgcctgttctacactctatctgtattattgaattactgactgagactgtgtttgggaaggaggctgagtgactactggactggatattgactctaactcttgtttccaagcttatatcctcaatcacctaaagatcagagtgtgaagaaacaaacctgtgacagatctgtggttgaggtttagactgggggaggagtatagtactggactttctttgtaacttgtaccatgactggggcagagattgagtctggtgcccaggtcaagcctgaaaagaagcctggggaagaggttgtaggtggggctgagatagagaatgatgtccctctggtggtcagacccaaggttaggacccaggcccagataatgcctggggcaaggcccaagaataagtccaaggttatgcctggagcaagcaccaaagttgagacaagtgcagtgggtggggcacgccctaagagtaaggccaaggcaatacctgtttcacgatttaaggaagaagcccagatgtgggctcagcccaggtttggtgctgaaagattgtctaagacagagagaaactcccagaccaatatcatagcctctccacttgtcagtactgattctgtcttggttgctaaaacaaagtacctgtctgaggatagagaactggttaatacagacactgagagctttcctagaaggaaggcccattaccaagcaggattccagccttcttttaggtcaaaggaggagaccaatatggggtcctggtgctgtcctaggcctacatccaaacaagaagcctctcctaattctgatttcaaatgggtagacaaatctgtgagttccttgttctggagtggagatgaggtcactgcaaaatttcatcctgggaatagggtaaaagacagtaacagatccatgcacatggccaatcaagaggctaataccatgtctaggtcccaaactaaccaggagctctatattgcatctagttctggttctgaggatgagtctgttaagacaccctggttctgggccagagataaaaccaatacctggtctgggcccagggaagatcccaatagcaggtccaggtttaggtctaagaaagaagtctatgttgaatcaagttctggatctgagcatgaagaccatttggagtcctggtttggggctggaaaggaggccaaattcaggtccaaaatgagagctgggaaggaggccaataacagggccaggcacagggccaagcgagaagcttgcattgatttcatgcctgggtctatagatgtaattaaaaaagagtcctgtttctggcctgaagaaaatgctaataccttttcaaggcccatgatcaagaaagaggccagggccagagcaatgacaaaggaagaggccaaaaccaaggcccgagccagggccaagcaagaagccaggtcagaggaggaagccctcattgggacctggttctgggctacagacgagtccagcatggcagatgaagccagcatagagtccagtctacaagtggaggatgagtccataattgggagttggttctggactgaagaagaggccagtatggggactggggctagcagtaaatccagaccaaggactgatggggagcgtattggtgattccttatttggggctagggaaaagaccagtatgaaaactggggctgaggccacctctgaatctatactagcagctgatgatgaacaggtcattattggttcctggttctgggctggtgaagaggtcaaccaagaggctgaggaagagaccatttttgggtcgtggttctgggtcattgatgcggccagtgtggaatctggtgttggggtcagctgtgagtccaggacaaggtctgaggaagaagaggtcattggtccctggttttggtctggagaacaagttgatatagaggctggaatcggagaagaggccaggccaggagctgaagaagagacaatattcgggtcctggttttgggctgaaaaccagacctatatggattgtagggctgaaactagctgtgacaccatgcaaggggctgaggaggaggagcccattattgggtcctggttttggaccagagtagaagcttgtgtggagggtgatgtcaacagcaagtctagcctggaggacaaggaagaggccatgataccatgttttggagccaaagaagaggtcagtatgaagcatgggactggtgtcagatgcagatttatggcaggggctgaggagaccaataataagtcttgcttctgggcagaaaaagaaccctgtatgtatcctgccggtggaggaagttggaagtctaggccagaggaggaagaggacattgtcaattcgtggttctggtccagaaaatacacaaagccagaggccattatagggtcctggttatgggctacagaagagagtaatatagatgggactggagaaaaggccaagttactgactgaagaggagaccataatcaattcctggttctggaaagaagatgaagccatttcagaggctactgacagagaagagtccaggccagaagctgaggagggggacattattggttcttggttctgggctggagaagaggacagactagagccagctgctgagactagagaagaagacaggctagcagctgagaaagaaggtattgttgggtcctggtttggggccagagaagagaccattagaagagaggctgggtcttgcagcaaatccagtcctaaagctgaagaggaagaagtcattattgggtcctggttctgggaagaagaggccagtccggaggcagtggcaggagtcggctttgagtcaaagcctgggactgaggaggaagaaatcactgttgggtcctggttctggcctgaagaagaagccagtatacaggctggatctcaggcagtagaggaaatggagtcagagactgaagaggaaaccatttttgggtcctggttctgggatggaaaagaagtcagtgaagaagcaggaccatgctgtgtatccaagccagaggatgatgaagagatgattgttgagtcctggttctggtctagagacaaagccattaaggaaactggaactgtggccacctgtgagtccaagccagaaaatgaggaaggggccattgttgggtcttggtttgaggctgaagatgaggtagataacaggactgacaatggaagcaactgtgggtccaggacattagctgatgaagatgaggccatagtggggtcctggttctgggcaggagatgaggcccattttgaatcaaatcctagccccgtgttcagggccatttgcaggtccacgtgttcagttgaacaggagcctgatccttcacgcaggcctcagagttgggaggaggtcactgttcagttcaagcctggtccatggggtagggtcggcttcccatctataagcccctttagatttccgaaagaggcagcatctttattctgtgaaatgtttgggggcaaacccaggaacatggtacttagcccagaaggggaagatcaggaatctttgcttcagcctgatcagcctagtcctgagttcccatttcagtatgatccttcctacaggtcagtccaggaaattcgagagcatcttagggccaaggagagtacagagcctgagagttcatcctgtaactgcatacaatgtgagctgaaaattggttctgaagagtttgaagaactccttttattaatggaaaaaattcgggatccttttattcatgaaatatctaaaatcgcaatgggtatgagaagtgcttctcaatttacccgagatttcattcgagattcaggtgttgtctcacttattgaaaccttgcttaattatccgtcctcccgagttagaacaagttttttggaaaatatgattcgcatggccccaccttatccgaatctaaacataattcagacatacatatgtaaagtgtgtgaggaaacccttgcttatagcgtggattccccggaacagctgtctggaataaggatgattagacatctcactactactactgactatcacacactggttgccaattatatgtctgggtttctctccttattagctacaggcaatgccaaaacaaggtttcatgttttgaaaatgctactgaatttgtctgaaaatcttttcatgacaaaagaactactcagtgctgaagcagtgtcagaatttataggcctctttaacagggaagagacaaatgacaatattcaaattgttcttgcaatatttgagaatattggcaacaatatcaaaaaagaaacagtgttctctgatgatgatttcaatattgagccgcttatttctgcattccacaaagttgagaaatttgctaaggaactgcaaggcaaaacagacaatcaaaatgaccctgaaggggaccaagaaaattagtaatggttaattgctggcctcagattgtccttatgttcctgagttatgatccttgagtaatgctttgattttaatagttggttctgtgttgcaacatatatctttagtgctgacactaactttgtccaactctgtctgtaagctggagcatttttctgatgccagctgaatattagagctgaaaacacatttgttgatatttgtcttgtccacattgtgatgttcagtatttgagcttatagtgaactgagcaatcataaataagccacccttctgattgtcgttctactgtatatatatatatatttgagtgttgtttgtgtttcaataaagtcctatgttaaagttggcag

SEQ ID NO: 12676 - protein, 1395 aa, Homo sapiens; identical to SEQ ID NO: 2189

SEQ ID NO: 12677 - DNA, 5099 bp, Homo sapiens
gtgctgtcccttcccacagactccaggttgatgtcaaagtctgtctgcgcggtaggtctggcgtattctgacaggacacagtgagcatctgtagaggagaggcttgaaataaaggaggagcacgaatattccctggatttctggaggacccccttctgtcagctgtggggcttgacactacttgaacaagaaaaggagggggaaactgcaccacataagtgaagatccacctccagtggctgctctgctggtggtggggttgctgctgacaaccaccctcaacgggtctgcacccatccaggaaatctctgtcttcctcaagcttggttgtgcctgttctacactctatctgtattattgaattactgactgagactgtgtttgggaaggaggctgagtgactactggactggatattgactctaactcttgtttccaagcttatatcctcaatcacctaaagatcagagtgtgaagaaacaaacctgtgacagatctgtggttgaggtttagactgggggaggagtatagtactggactttctttgtaacttgtaccatgactggggcagagattgagtctggtgcccaggtcaagcctgaaaagaagcctggggaagaggttgtaggtggggctgagatagagaatgatgtccctctggtggtcagacccaaggttaggacccaggcccagataatgcctggggcaaggcccaagaataagtccaaggttatgcctggagcaagcaccaaagttgagacaagtgcagtgggtggggcacgccctaagagtaaggccaaggcaatacctgtttcacgatttaaggaagaagcccagatgtgggctcagcccaggtttggtgctgaaagattgtctaagacagagagaaactcccagaccaatatcatagcctctccacttgtcagtactgattctgtcttggttgctaaaacaaagtacctgtctgaggatagagaactggttaatacagacactgagagctttcctagaaggaaggcccattaccaagcaggattccagccttcttttaggtcaaaggaggagaccaatatggggtcctggtgctgtcctaggcctacatccaaacaagaagcctctcctaattctgatttcaaatgggtagacaaatctgtgagttccttgttctggagtggagatgaggtcactgcaaaatttcatcctgggaatagggtaaaagacagtaacagatccatgcacatggccaatcaagaggctaataccatgtctaggtcccaaactaaccaggagctctatattgcatctagttctggttctgaggatgagtctgttaagacaccctggttctgggccagagataaaaccaatacctggtctgggcccagggaagatcccaatagcaggtccaggtttaggtctaagaaagaagtctatgttgaatcaagttctggatctgagcatgaagaccatttggagtcctggtttggggctggaaaggaggccaaattcaggtccaaaatgagagctgggaaggaggccaataacagggccaggcacagggccaagcgagaagcttgcattgatttcatgcctgggtctatagatgtaattaaaaaagagtcctgtttctggcctgaagaaaatgctaataccttttcaaggcccatgatcaagaaagaggccagggccagagcaatgacaaaggaagaggccaaaaccaaggcccgagccagggccaagcaagaagccaggtcagaggaggaagccctcattgggacctggttctgggctacagacgagtccagcatggcagatgaagccagcatagagtccagtctacaagtggaggatgagtccataattgggagttggttctggactgaagaagaggccagtatggggactggggctagcagtaaatccagaccaaggactgatggggagcgtattggtgattccttatttggggctagggaaaagaccagtatgaaaactggggctgaggccacctctgaatctatactagcagctgatgatgaacaggtcattattggttcctggttctgggctggtgaagaggtcaaccaagaggctgaggaagagaccatttttgggtcgtggttctgggtcattgatgcggccagtgtggaatctggtgttggggtcagctgtgagtccaggacaaggtctgaggaagaagaggtcattggtccctggttttggtctggagaacaagttgatatagaggctggaatcggagaagaggccaggccaggagctgaagaagagacaatattcgggtcctggttttgggctgaaaaccagacctatatggattgtagggctgaaactagctgtgacaccatgcaaggggctgaggaggaggagcccattattgggtcctggttttggaccagagtagaagcttgtgtggagggtgatgtcaacagcaagtctagcctggaggacaaggaagaggccatgataccatgttttggagccaaagaagaggtcagtatgaagcatgggactggtgtcagatgcagatttatggcaggggctgaggagaccaataataagtcttgcttctgggcagaaaaagaaccctgtatgtatcctgccggtggaggaagttggaagtctaggccagaggaggaagaggacattgtcaattcgtggttctggtccagaaaatacacaaagccagaggccattatagggtcctggttatgggctacagaagagagtaatatagatgggactggagaaaaggccaagttactgactgaagaggagaccataatcaattcctggttctggaaagaagatgaagccatttcagaggctactgacagagaagagtccaggccagaagctgaggagggggacattattggttcttggttctgggctggagaagaggacagactagagccagctgctgagactagagaagaagacaggctagcagctgagaaagaaggtattgttgggtcctggtttggggccagagaagagaccattagaagagaggctgggtcttgcagcaaatccagtcctaaagctgaagaggaagaagtcattattgggtcctggttctgggaagaagaggccagtccggaggcagtggcaggagtcggctttgagtcaaagcctgggactgaggaggaagaaatcactgttgggtcctggttctggcctgaagaagaagccagtatacaggctggatctcaggcagtagaggaaatggagtcagagactgaagaggaaaccatttttgggtcctggttctgggatggaaaagaagtcagtgaagaagcaggaccatgctgtgtatccaagccagaggatgatgaagagatgattgttgagtcctggttctggtctagagacaaagccattaaggaaactggaactgtggccacctgtgagtccaagccagaaaatgaggaaggggccattgttgggtcttggtttgaggctgaagatgaggtagataacaggactgacaatggaagcaactgtgggtccaggacattagctgatgaagatgaggccatagtggggtcctggttctgggcaggagatgaggcccattttgaatcaaatcctagccccgtgttcagggccatttgcaggtccacgtgttcagttgaacaggagcctgatccttcacgcaggcctcagagttgggaggaggtcactgttcagttcaagcctggtccatggggtagggtcggcttcccatctataagcccctttagatttccgaaagaggcagcatctttattctgtgaaatgtttgggggcaaacccaggaacatggtacttagcccagaaggggaagatcaggaatctttgcttcagcctgatcagcctagtcctgagttcccatttcagtatgatccttcctacaggtcagtccaggaaattcgagagcatcttagggccaaggagagtacagagcctgagagttcatcctgtaactgcatacaatgtgagctgaaaattggttctgaagagtttgaagaactccttttattaatggaaaaaattcgggatccttttattcatgaaatatctaaaatcgcaatgggtatgagaagtgcttctcaatttacccgagatttcattcgagattcaggtgttgtctcacttattgaaaccttgcttaattatccgtcctcccgagttagaacaagttttttggaaaatatgattcgcatggccccaccttatccgaatctaaacataattcagacatacatatgtaaagtgtgtgaggaaacccttgcttatagcgtggattccccggaacagctgtctggaataaggatgattagacatctcactactactactgactatcacacactggttgccaattatatgtctgggtttctctccttattagctacaggcaatgccaaaacaaggtttcatgttttgaaaatgctactgaatttgtctgaaaatcttttcatgacaaaagaactactcagtgctgaagcagtgtcagaatttataggcctctttaacagggaagagacaaatgacaatattcaaattgttcttgcaatatttgagaatattggcaacaatatcaaaaaagaaacagtgttctctgatgatgatttcaatattgagccgcttatttctgcattccacaaagttgagaaatttgctaaggaactgcaaggcaaaacagacaatcaaaatgaccctgaaggggaccaagaaaattagtaatggttaattgctggcctcagattgtccttatgttcctgagttatgatccttgagtaatgctttgattttaatagttggttctgtgttgcaacatatatctttagtgctgacactaactttgtccaactctgtctgtaagctggagcatttttctgatgccagctgaatattagagctgaaaacacatttgttgatatttgtcttgtccacattgtgatgttcagtatttgagcttatagtgaactgagcaatcataaataagccacccttctgattgtcgttctactgtatatatatatatatttgagtgttgtttgtgtttcaataaagtcctatgttaaagttggcag

SEQ ID NO: 12678 - protein, 1395 aa, Homo sapiens; identical to SEQ ID NO: 2189

SEQ ID NO: 12679 - DNA, 5328 bp, Homo sapiens
ggccagttctgcaagaaaggcaaggaggaggagactggctcacacctctggaggttggtgagaagggggagggggcaattcaggggacagttggagaaagagagcatggcaggtggctttgagaccagtgggtgcagacccacttctactctgctggatttgcacagtgccagcatcctttttatttcttgcaggggacatgagataggtgtaggttgtgttgtgactcagaaagacctgagagcagggaccaggacacaggaaaccatagatacattgaacccttgaatgggaagacagatatttgtcacaggagccagagtgcttgcctatctaccattctccattctctcctgtatgtttacttgtctgtaggacccccttctgtcagctgtggggcttgacactacttgaacaagaaaaggagggggaaactgcaccacataagtgaagatccacctccagtggctgctctgctggtggtggggttgctgctgacaaccaccctcaacgggtctgcacccatccaggaaatctctgtcttcctcaagcttggttgtgcctgttctacactctatctgtattattgaattactgactgagactgtgtttgggaaggaggctgagtgactactggactggatattgactctaactcttgtttccaagcttatatcctcaatcacctaaagatcagagtgtgaagaaacaaacctgtgacagatctgtggttgaggtttagactgggggaggagtatagtactggactttctttgtaacttgtaccatgactggggcagagattgagtctggtgcccaggtcaagcctgaaaagaagcctggggaagaggttgtaggtggggctgagatagagaatgatgtccctctggtggtcagacccaaggttaggacccaggcccagataatgcctggggcaaggcccaagaataagtccaaggttatgcctggagcaagcaccaaagttgagacaagtgcagtgggtggggcacgccctaagagtaaggccaaggcaatacctgtttcacgatttaaggaagaagcccagatgtgggctcagcccaggtttggtgctgaaagattgtctaagacagagagaaactcccagaccaatatcatagcctctccacttgtcagtactgattctgtcttggttgctaaaacaaagtacctgtctgaggatagagaactggttaatacagacactgagagctttcctagaaggaaggcccattaccaagcaggattccagccttcttttaggtcaaaggaggagaccaatatggggtcctggtgctgtcctaggcctacatccaaacaagaagcctctcctaattctgatttcaaatgggtagacaaatctgtgagttccttgttctggagtggagatgaggtcactgcaaaatttcatcctgggaatagggtaaaagacagtaacagatccatgcacatggccaatcaagaggctaataccatgtctaggtcccaaactaaccaggagctctatattgcatctagttctggttctgaggatgagtctgttaagacaccctggttctgggccagagataaaaccaatacctggtctgggcccagggaagatcccaatagcaggtccaggtttaggtctaagaaagaagtctatgttgaatcaagttctggatctgagcatgaagaccatttggagtcctggtttggggctggaaaggaggccaaattcaggtccaaaatgagagctgggaaggaggccaataacagggccaggcacagggccaagcgagaagcttgcattgatttcatgcctgggtctatagatgtaattaaaaaagagtcctgtttctggcctgaagaaaatgctaataccttttcaaggcccatgatcaagaaagaggccagggccagagcaatgacaaaggaagaggccaaaaccaaggcccgagccagggccaagcaagaagccaggtcagaggaggaagccctcattgggacctggttctgggctacagacgagtccagcatggcagatgaagccagcatagagtccagtctacaagtggaggatgagtccataattgggagttggttctggactgaagaagaggccagtatggggactggggctagcagtaaatccagaccaaggactgatggggagcgtattggtgattccttatttggggctagggaaaagaccagtatgaaaactggggctgaggccacctctgaatctatactagcagctgatgatgaacaggtcattattggttcctggttctgggctggtgaagaggtcaaccaagaggctgaggaagagaccatttttgggtcgtggttctgggtcattgatgcggccagtgtggaatctggtgttggggtcagctgtgagtccaggacaaggtctgaggaagaagaggtcattggtccctggttttggtctggagaacaagttgatatagaggctggaatcggagaagaggccaggccaggagctgaagaagagacaatattcgggtcctggttttgggctgaaaaccagacctatatggattgtagggctgaaactagctgtgacaccatgcaaggggctgaggaggaggagcccattattgggtcctggttttggaccagagtagaagcttgtgtggagggtgatgtcaacagcaagtctagcctggaggacaaggaagaggccatgataccatgttttggagccaaagaagaggtcagtatgaagcatgggactggtgtcagatgcagatttatggcaggggctgaggagaccaataataagtcttgcttctgggcagaaaaagaaccctgtatgtatcctgccggtggaggaagttggaagtctaggccagaggaggaagaggacattgtcaattcgtggttctggtccagaaaatacacaaagccagaggccattatagggtcctggttatgggctacagaagagagtaatatagatgggactggagaaaaggccaagttactgactgaagaggagaccataatcaattcctggttctggaaagaagatgaagccatttcagaggctactgacagagaagagtccaggccagaagctgaggagggggacattattggttcttggttctgggctggagaagaggacagactagagccagctgctgagactagagaagaagacaggctagcagctgagaaagaaggtattgttgggtcctggtttggggccagagaagagaccattagaagagaggctgggtcttgcagcaaatccagtcctaaagctgaagaggaagaagtcattattgggtcctggttctgggaagaagaggccagtccggaggcagtggcaggagtcggctttgagtcaaagcctgggactgaggaggaagaaatcactgttgggtcctggttctggcctgaagaagaagccagtatacaggctggatctcaggcagtagaggaaatggagtcagagactgaagaggaaaccatttttgggtcctggttctgggatggaaaagaagtcagtgaagaagcaggaccatgctgtgtatccaagccagaggatgatgaagagatgattgttgagtcctggttctggtctagagacaaagccattaaggaaactggaactgtggccacctgtgagtccaagccagaaaatgaggaaggggccattgttgggtcttggtttgaggctgaagatgaggtagataacaggactgacaatggaagcaactgtgggtccaggacattagctgatgaagatgaggccatagtggggtcctggttctgggcaggagatgaggcccattttgaatcaaatcctagccccgtgttcagggccatttgcaggtccacgtgttcagttgaacaggagcctgatccttcacgcaggcctcagagttgggaggaggtcactgttcagttcaagcctggtccatggggtagggtcggcttcccatctataagcccctttagatttccgaaagaggcagcatctttattctgtgaaatgtttgggggcaaacccaggaacatggtacttagcccagaaggggaagatcaggaatctttgcttcagcctgatcagcctagtcctgagttcccatttcagtatgatccttcctacaggtcagtccaggaaattcgagagcatcttagggccaaggagagtacagagcctgagagttcatcctgtaactgcatacaatgtgagctgaaaattggttctgaagagtttgaagaactccttttattaatggaaaaaattcgggatccttttattcatgaaatatctaaaatcgcaatgggtatgagaagtgcttctcaatttacccgagatttcattcgagattcaggtgttgtctcacttattgaaaccttgcttaattatccgtcctcccgagttagaacaagttttttggaaaatatgattcgcatggccccaccttatccgaatctaaacataattcagacatacatatgtaaagtgtgtgaggaaacccttgcttatagcgtggattccccggaacagctgtctggaataaggatgattagacatctcactactactactgactatcacacactggttgccaattatatgtctgggtttctctccttattagctacaggcaatgccaaaacaaggtttcatgttttgaaaatgctactgaatttgtctgaaaatcttttcatgacaaaagaactactcagtgctgaagcagtgtcagaatttataggcctctttaacagggaagagacaaatgacaatattcaaattgttcttgcaatatttgagaatattggcaacaatatcaaaaaagaaacagtgttctctgatgatgatttcaatattgagccgcttatttctgcattccacaaagttgagaaatttgctaaggaactgcaaggcaaaacagacaatcaaaatgaccctgaaggggaccaagaaaattagtaatggttaattgctggcctcagattgtccttatgttcctgagttatgatccttgagtaatgctttgattttaatagttggttctgtgttgcaacatatatctttagtgctgacactaactttgtccaactctgtctgtaagctggagcatttttctgatgccagctgaatattagagctgaaaacacatttgttgatatttgtcttgtccacattgtgatgttcagtatttgagcttatagtgaactgagcaatcataaataagccacccttctgattgtcgttctactgtatatatatatatatttgagtgttgtttgtgtttcaataaagtcctatgttaaagttggcag

SEQ ID NO: 12680 - protein, 1395 aa, Homo sapiens; identical to SEQ ID NO: 2189

SEQ ID NO: 12681 - DNA, 5585 bp, Homo sapiens
acatcagtctcactgcatatgtctctgcatgggatgacataattggaagagactcaaagccccatttcattctctctccctagatccacctccagtggctgctctgctggtggtggggttgctgctgacaaccaccctcaacgggtctgcacccatccaggaaatctctgtcttcctcaagcttggttgtgcctgttctacactctatctgtattattgaattactgactgagactgtgtttgggaaggaggctgagtgactactggactggatattgactctaactcttgtttccaagcttatatcctcaatcacctaaagatcagagtgtgaagaaacaaacctgtgacagatctgtggttgaggtttagactgggggaggagtatagtactggactttctttgtaacttgtaccatgactggggcagagattgagtctggtgcccaggtcaagcctgaaaagaagcctggggaagaggttgtaggtggggctgagatagagaatgatgtccctctggtggtcagacccaaggttaggacccaggcccagataatgcctggggcaaggcccaagaataagtccaaggttatgcctggagcaagcaccaaagttgagacaagtgcagtgggtggggcacgccctaagagtaaggccaaggcaatacctgtttcacgatttaaggaagaagcccagatgtgggctcagcccaggtttggtgctgaaagattgtctaagacagagagaaactcccagaccaatatcatagcctctccacttgtcagtactgattctgtcttggttgctaaaacaaagtacctgtctgaggatagagaactggttaatacagacactgagagctttcctagaaggaaggcccattaccaagcaggattccagccttcttttaggtcaaaggaggagaccaatatggggtcctggtgctgtcctaggcctacatccaaacaagaagcctctcctaattctgatttcaaatgggtagacaaatctgtgagttccttgttctggagtggagatgaggtcactgcaaaatttcatcctgggaatagggtaaaagacagtaacagatccatgcacatggccaatcaagaggctaataccatgtctaggtcccaaactaaccaggagctctatattgcatctagttctggttctgaggatgagtctgttaagacaccctggttctgggccagagataaaaccaatacctggtctgggcccagggaagatcccaatagcaggtccaggtttaggtctaagaaagaagtctatgttgaatcaagttctggatctgagcatgaagaccatttggagtcctggtttggggctggaaaggaggccaaattcaggtccaaaatgagagctgggaaggaggccaataacagggccaggcacagggccaagcgagaagcttgcattgatttcatgcctgggtctatagatgtaattaaaaaagagtcctgtttctggcctgaagaaaatgctaataccttttcaaggcccatgatcaagaaagaggccagggccagagcaatgacaaaggaagaggccaaaaccaaggcccgagccagggccaagcaagaagccaggtcagaggaggaagccctcattgggacctggttctgggctacagacgagtccagcatggcagatgaagccagcatagagtccagtctacaagtggaggatgagtccataattgggagttggttctggactgaagaagaggccagtatggggactggggctagcagtaaatccagaccaaggactgatggggagcgtattggtgattccttatttggggctagggaaaagaccagtatgaaaactggggctgaggccacctctgaatctatactagcagctgatgatgaacaggtcattattggttcctggttctgggctggtgaagaggtcaaccaagaggctgaggaagagaccatttttgggtcgtggttctgggtcattgatgcggccagtgtggaatctggtgttggggtcagctgtgagtccaggacaaggtctgaggaagaagaggtcattggtccctggttttggtctggagaacaagttgatatagaggctggaatcggagaagaggccaggccaggagctgaagaagagacaatattcgggtcctggttttgggctgaaaaccagacctatatggattgtagggctgaaactagctgtgacaccatgcaaggggctgaggaggaggagcccattattgggtcctggttttggaccagagtagaagcttgtgtggagggtgatgtcaacagcaagtctagcctggaggacaaggaagaggccatgataccatgttttggagccaaagaagaggtcagtatgaagcatgggactggtgtcagatgcagatttatggcaggggctgaggagaccaataataagtcttgcttctgggcagaaaaagaaccctgtatgtatcctgccggtggaggaagttggaagtctaggccagaggaggaagaggacattgtcaattcgtggttctggtccagaaaatacacaaagccagaggccattatagggtcctggttatgggctacagaagagagtaatatagatgggactggagaaaaggccaagttactgactgaagaggagaccataatcaattcctggttctggaaagaagatgaagccatttcagaggctactgacagagaagagtccaggccagaagctgaggagggggacattattggttcttggttctgggctggagaagaggacagactagagccagctgctgagactagagaagaagacaggctagcagctgagaaagaaggtattgttgggtcctggtttggggccagagaagagaccattagaagagaggctgggtcttgcagcaaatccagtcctaaagctgaagaggaagaagtcattattgggtcctggttctgggaagaagaggccagtccggaggcagtggcaggagtcggctttgagtcaaagcctgggactgaggaggaagaaatcactgttgggtcctggttctggcctgaagaagaagccagtatacaggctggatctcaggcagtagaggaaatggagtcagagactgaagaggaaaccatttttgggtcctggttctgggatggaaaagaagtcagtgaagaagcaggaccatgctgtgtatccaagccagaggatgatgaagagatgattgttgagtcctggttctggtctagagacaaagccattaaggaaactggaactgtggccacctgtgagtccaagccagaaaatgaggaaggggccattgttgggtcttggtttgaggctgaagatgaggtagataacaggactgacaatggaagcaactgtgggtccaggacattagctgatgaagatgaggccatagtggggtcctggttctgggcaggagatgaggcccattttgaatcaaatcctagccccgtgttcagggccatttgcaggtccacgtgttcagttgaacaggagcctgatccttcacgcaggcctcagagttgggaggaggtcactgttcagttcaagcctggtccatggggtagggtcggcttcccatctataagcccctttagatttccgaaagaggcagcatctttattctgtgaaatgtttgggggcaaacccaggaacatggtacttagcccagaaggggaagatcaggaatctttgcttcagcctgatcagcctagtcctgagttcccatttcagtatgatccttcctacaggtcagtccaggaaattcgagagcatcttagggccaaggagagtacagagcctgagagttcatcctgtaactgcatacaatgtgagctgaaaattggttctgaagagtttgaagaactccttttattaatggaaaaaattcgggatccttttattcatgaaatatctaaaatcgcaatgggtatgagaagtgcttctcaatttacccgagatttcattcgagattcaggtgttgtctcacttattgaaaccttgcttaattatccgtcctcccgagttagaacaagttttttggaaaatatgattcgcatggccccaccttatccgaatctaaacataattcagacatacatatgtaaagtgtgtgaggaaacccttgcttatagcgtggattccccggaacagctgtctggaataaggatgattagacatctcactactactactgactatcacacactggttgccaattatatgtctgggtttctctccttattagctacaggcaatgccaaaacaaggtttcatgttttgaaaatgctactgaatttgtctgaaaatcttttcatgacaaaagaactactcagtgctgaagcagtgtcagaatttataggcctctttaacagggaagagacaaatgacaatattcaaattgttcttgcaatatttgagaatattggcaacaatatcaaaaaagaaacagtgttctctgatgatgatttcaatattgagccgcttatttctgcattccacaaagttgagaaatttgctaaggaactgcaaggcaaaacagacaatcaaaatgaccctgaaggggaccaagaaaattagtaatggttaattgctggcctcagattgtccttatgttcctgagttatgatccttgagtaatgctttgattttaatagttggttctgtgttgcaacatatatctttagtgctgacactaactttgtccaactctgtctgtaagctggagcatttttctgatgccagctgaatattagagctgaaaacacatttgttgatatttgtcttgtccacattgtgatgttcagtatttgagcttatagtgaactgagcaatcataaataagccacccttctgattgtcgttctactgtatatatatatatatttgagtgttgtttgtgtttcaataaagtcctatgttaaagttggcagaaatcacccttcttcttgaaattaaaatacagacccaatgataacacatgaacacacatagagataattaatatatgaataatatgttcctttcaaaagtttttttctcagctttaaacgcaaaaattaccaggggctgctatgtagggcatacttcagagaaaaagtagctacttcggttggactctgaagtttgggaaagatattggtggtgtaaaaaaaaaaaaaagcatggagttaggaaaaattttcctatgggagtgaggtatcctgtttgcctagagtgagtgagaggaatatattgagcaacatagaggatgacataagttttaaagagctgaggatttgcattttacagctcaaagtacaactgctgcttccatactacctaaagggcaaaagaataagacaggaaagcatagggatttgattgagtcaggaagacaatttaatcatgatggtaccatggtaagtgttaaggcaacatcatacagccattaaacatgatgatgtatagggttttaggaaaagccctgacatttttgatatttcatataatagagaacactggtgtcatacatgggaagtatgatcccatttgaaaaataaatgtgaataaattgacca

SEQ ID NO: 12682 - protein, 1395 aa, Homo sapiens; identical to SEQ ID NO: 2189

SEQ ID NO: 12683 - DNA, 578 bp, Homo sapiens
atgtgaccaggctctgggttgagccggcctagaggagtgttttcttacacccagaaagtacaggaaaggcagacgacaactgtgctccgcagagcgggaggtggggggaacggcggaatattaaggagctcaagaagcagagactctacctgccctaggcgttcgtgaagagaagcagctgttgctattggaggaggcctactttaaggctggccaattctgcaagaaaggcaaggaggaggagactggctcacagctctggaggacccccttctgtcagctgtggggcttgacaccacttgaacaagaaaaggagggggaaactgcaccacatcagtgaagccgagtggtcctccagagcaaaggccagccttccttccagctgtctggccaaggagcttcaggatcttctagcaagcaccccagaggcagaagactgtcatccatggtacaggactgcggcgaacaagctgactgcgcagtcacgtggggctgacggtgggtcatgtgaccaggctctgcattaggcctgccgagaggagtgttttcttgcatccagaaaagacctgagaggcgga

SEQ ID NO: 12684 - protein, 77 aa, Homo sapiens
HHLNKKRRGKLHHISEAEWSSRAKASLPSSCLAKELQDLLASTPEAEDCHPWYRTAANKLTAQSRGADGGSCDQALH

SEQ ID NO: 12685 - DNA, 3495 bp, Homo sapiens
cttacacccagaaagtacaggaaaggcagacgacaactgtgctccgcagagcgggaggtggggggaacggcggaatattaaggagctcaagaagcagagactctacctgccctaggcgttcgtgaagagaagcagctgttgctattggaggaggcctactttaaggctggccaattctgcaagaaaggcaaggaggaggagactggctcacagctctggaggacccccttctgtcagctgtggggcttgacaccacttgaacaagaaaaggagggggaaactgcaccacatcagtgaagatccacctccagtggctgctctgctggtggtggagttgctgctgacaaccaccctcaacgggtctgcacccatccaggaaatatctgtcttcctttagcttggttgtacctgttctcactctatctgtattattgaattattgactgagactgtgtttgggaaggaggctgagtgactactggactggatattgactctaactcttattcccaagcttatatccttaatcacctaaagatcagagtgtgaagaaacaaacctgtgacagatctgtggttgaggtttagactacgggaggagtatattacctgactttctttgtaacttgtaccatgactggggcagagattgagcctagtgcccaggccaagcctgaaaagaaggctggggaagaggttatcgctgggcctgagagagagaatgatgtccctctggtggtcagacccaaggttaggacccaggcaactactggggcaaggcccaaaactgagaccaagtctgtgcctgcggcaaggcccaaaactgaggcccaagcaatgtctggggcaaggcccaaaactgaggtccaagtaatgggtggtgcaagacccaaaacggaggctcaaggaatcacaggggccaggcccaaaaccgatgccagggcagtaggtggcgctcgttctaaaactgatgccaaggcaatccctggagcaaggcccaaggatgaggcccaggcatgggcccagagtgaatttgggactgaagcagtgtcacaggcagaaggagtgtcccagactaatgccgttgcttggccactggccactgctgagtctggatcagttactaaatctaagggcctgtctatggatagagaactagtcaatgtggatgctgaaacctttcctggcacccagggtcagaaaggaatccagccctggtttggaccaggggaggagactaatatggggtcttggtgctattccaggcccagggccagagaggaggcctctaatgagtctgggttctggtcagcagatgagacctctacagcgtcttctttctggactggagaagagacaagtgtcagatcatggcccagggaagagtccaataccaggtccaggcacagggctaaacatcagactaatcccaggtccaggcccagatccaagcaagaagcctatgttgattcctggtctggatctgaggatgaggccagcaacccattctccttctgggttggagaaaataccaataacttgttcaggcccagagtcagggaggaggcaaatatcaggtccaagctcaggacaaatagagaagattgttttgaatctgagtctgaagatgagttctataagcagtcctgggttttgcctggagaagaggccaatagtagattcaggcacagagacaaagaagatcctaatactgccttgaaactcagggcccagaaagatgttgacagtgatagggtcaaacaagaacccaggtttgaggaggaagtcattattgggtcctggttctgggcagaaaaagaggccagtttggagggtggagcttcagcaatctgtgaatctgagccaggaactgaggagggggccattggcggatccgcgtactgggctgaggaaaagtccagtttgggggctgtggccagagaagaggccaagccggagtctgaagaagaggccatatttgggtcctggttctgggacagagatgaggcctgctttgacctaaatccctgtcctgtgtacaaggtcagtgataggttcagagatgcagctgaggagcttaatgcatcctccaggccccaaacctgggacgaggtcactgttgaattcaaacctggtctttttcatggggttggcttccgatccacaagcccctttggaattcccgaagaggcttctgaaatgcttgaggcaaagcccaagaacctggaacttagcccagaaggagaagagcaggaatctttgcttcagcctgatcagcctagtcctgagttcacatttcagtatgatccttcctaccggtcagtccgggaaattcgagagcatcttagggccagggagagtgcagagtctgagagttggtcctgcagctgcatacaatgtgagctgaaaattggttctgaagagtttgaagaattccttttattaatggacaaaattcgggatccttttattcatgaaatatctaaaattgcaatgggtatgagaagtgcttctcaatttacccgagatttcattcgagattcaggtgttgtctcacttattgaaaccttgcttaattatccatcctctagagttaggacaagttttttggaaaatatgattcacatggctccaccttatccaaatctaaacatgattgagacattcatatgtcaagtgtgtgaggaaacccttgcacatagtgtggattcccttgagcagctgactggaataaggatgcttagacacctcactatgactattgactatcacacactgattgccaactatatgtccgggtttctctccttattaaccacagccaatgcgagaacgaagtttcacgttctgaaaatgctattgaatttgtctgaaaatcctgctgtggcaaaaaaactattcagtgccaaagctctttcaatatttgtgggtctctttaacatagaagagacaaatgataatattcaaattgttattaaaatgtttcagaatatcagtaacattataaaaagtggaaagatgtccttaattgatgatgatttcagtcttgagccgcttatttctgcatttcgtgaatttgaggagttagctaagcaactacaagcccaaatagacaaccaaaatgatcctgaggtgggacaacaaagttaatatgattaaccacctgccgctgatcagccttatgttcccaaagagccctgagtagtgctttggtgttcacagtctgtttttttgttgtaacttatattttttaatgctgatgttaactttgtcaaactcttgttttgagctggatcattttgtggatgccaaatgaatatcaaaactgaaaacacatttgttgatatttgtcttgctgtccagattgcggtatttttcagtattaagttttcaatgaactgtgtcacctaagtaagctaccctgctattcgttgtttaaatatatggttctctatttgagtctgtgttttcaataaagttctatgttaaaattggc

SEQ ID NO: 12686 - protein, 838 aa, Homo sapiens; identical to SEQ ID NO: 2191

SEQ ID NO: 12687 - DNA, 878 bp, Homo sapiens
gctgttctctccagcgcggctcttcccgacctcgcgatcctgtcccctgcccgggcccccagccgcccgctggtcccatatattacagcagcgacagaaatatggtagtggtcgccacgttagggtccgtgggggcctcctgaggcagcctggtgccaacccgcacgcccaggctggggctcatcctggccctgcccacctcggggtcggaactacggtgggcctgggatgggggcgtcaagcactttcgcgccgtatccctccgccccccttcccgacaccctcgcggcgagcggttcttgccgcatcctgcgcagcccctgcctactttggtgcagaggcgtggggggcgggacgcgtctttcccgttcggatcgcggggaaagcagtggctccaagtgagccagaggagagctgaggagaggagggggaggccgacgacctgggccctgggcctctgaaggtctggcgtattctgacaggacacagtgagcgtctgtagaggagaggcttgaaataaaggagcacgaatattgcctggatttctggagaatatgcggcgcccttcccccattttatgctgcgcagagcaaggggatgtggcgcacctagtggtgaatcctcagaattggagaagggagtaatgggaagaatatgacgtcaagagaaggagttgttatctctggaaccttgaagcagggcccaaataaaacgagaatattccaccagcaaaaccccgaatgttgaaagacagataccaataatatggggactcttatccttggcgttggcctgtctaccaagtgctcttctgccaccactcatatcctgactgtcttactttttcatgtgtttgtccataggcctactttaaggct

SEQ ID NO: 12688 - protein, 57 aa, Homo sapiens
MGASSTFAPYPSAPLPDTLAASGSCRILRSPCLLWCRGVGGGTRLSRSDRGESSGSK

SEQ ID NO: 12689 - DNA, 3757 bp, Homo sapiens
gctgttctctccagcgcggctcttcccgacctcgcgatcctgtcccctgcccgggcccccagccgcccgctggtcccatatattacagcagcgacagaaatatggtagtggtcgccacgttagggtccgtgggggcctcctgaggcagcctggtgccaacccgcacgcccaggctggggctcatcctggccctgcccacctcggggtcggaactacggtgggcctgggatgggggcgtcaagcactttcgcgccgtatccctccgccccccttcccgacaccctcgcggcgagcggttcttgccgcatcctgcgcagcccctgcctactttggtgcagaggcgtggggggcgggacgcgtctttcccgttcggatcgcggggaaagcagtggctccaagtgagccagaggagagctgaggagaggagggggaggccgacgacctgggccctgggcctctgaaggtctggcgtattctgacaggacacagtgagcgtctgtagaggagaggcttgaaataaaggagcacgaatattgcctggatttctggaggcctactttaaggctggccaattctgcaagaaaggcaaggaggagttgctgctgacaaccaccctcaacgggtctgcacccatccaggaaatatctgtcttcctttagcttggttgtacctgttctcactctatctgtattattgaattattgactgagactgtgtttgggaaggaggctgagtgactactggactggatattgactctaactcttattcccaagcttatatccttaatcacctaaagatcagagtgtgaagaaacaaacctgtgacagatctgtggttgaggtttagactacgggaggagtatattacctgactttctttgtaacttgtaccatgactggggcagagattgagcctagtgcccaggccaagcctgaaaagaaggctggggaagaggttatcgctgggcctgagagagagaatgatgtccctctggtggtcagacccaaggttaggacccaggcaactactggggcaaggcccaaaactgagaccaagtctgtgcctgcggcaaggcccaaaactgaggcccaagcaatgtctggggcaaggcccaaaactgaggtccaagtaatgggtggtgcaagacccaaaacggaggctcaaggaatcacaggggccaggcccaaaaccgatgccagggcagtaggtggcgctcgttctaaaactgatgccaaggcaatccctggagcaaggcccaaggatgaggcccaggcatgggcccagagtgaatttgggactgaagcagtgtcacaggcagaaggagtgtcccagactaatgccgttgcttggccactggccactgctgagtctggatcagttactaaatctaagggcctgtctatggatagagaactagtcaatgtggatgctgaaacctttcctggcacccagggtcagaaaggaatccagccctggtttggaccaggggaggagactaatatggggtcttggtgctattccaggcccagggccagagaggaggcctctaatgagtctgggttctggtcagcagatgagacctctacagcgtcttctttctggactggagaagagacaagtgtcagatcatggcccagggaagagtccaataccaggtccaggcacagggctaaacatcagactaatcccaggtccaggcccagatccaagcaagaagcctatgttgattcctggtctggatctgaggatgaggccagcaacccattctccttctgggttggagaaaataccaataacttgttcaggcccagagtcagggaggaggcaaatatcaggtccaagctcaggacaaatagagaagattgttttgaatctgagtctgaagatgagttctataagcagtcctgggttttgcctggagaagaggccaatagtagattcaggcacagagacaaagaagatcctaatactgccttgaaactcagggcccagaaagatgttgacagtgatagggtcaaacaagaacccaggtttgaggaggaagtcattattgggtcctggttctgggcagaaaaagaggccagtttggagggtggagcttcagcaatctgtgaatctgagccaggaactgaggagggggccattggcggatccgcgtactgggctgaggaaaagtccagtttgggggctgtggccagagaagaggccaagccggagtctgaagaagaggccatatttgggtcctggttctgggacagagatgaggcctgctttgacctaaatccctgtcctgtgtacaaggtcagtgataggttcagagatgcagctgaggagcttaatgcatcctccaggccccaaacctgggacgaggtcactgttgaattcaaacctggtctttttcatggggttggcttccgatccacaagcccctttggaattcccgaagaggcttctgaaatgcttgaggcaaagcccaagaacctggaacttagcccagaaggagaagagcaggaatctttgcttcagcctgatcagcctagtcctgagttcacatttcagtatgatccttcctaccggtcagtccgggaaattcgagagcatcttagggccagggagagtgcagagtctgagagttggtcctgcagctgcatacaatgtgagctgaaaattggttctgaagagtttgaagaattccttttattaatggacaaaattcgggatccttttattcatgaaatatctaaaattgcaatgggtatgagaagtgcttctcaatttacccgagatttcattcgagattcaggtgttgtctcacttattgaaaccttgcttaattatccatcctctagagttaggacaagttttttggaaaatatgattcacatggctccaccttatccaaatctaaacatgattgagacattcatatgtcaagtgtgtgaggaaacccttgcacatagtgtggattcccttgagcagctgactggaataaggatgcttagacacctcactatgactattgactatcacacactgattgccaactatatgtccgggtttctctccttattaaccacagccaatgcgagaacgaagtttcacgttctgaaaatgctattgaatttgtctgaaaatcctgctgtggcaaaaaaactattcagtgccaaagctctttcaatatttgtgggtctctttaacatagaagagacaaatgataatattcaaattgttattaaaatgtttcagaatatcagtaacattataaaaagtggaaagatgtccttaattgatgatgatttcagtcttgagccgcttatttctgcatttcgtgaatttgaggagttagctaagcaactacaagcccaaatagacaaccaaaatgatcctgaggtgggacaacaaagttaatatgattaaccacctgccgctgatcagccttatgttcccaaagagccctgagtagtgctttggtgttcacagtctgtttttttgttgtaacttatattttttaatgctgatgttaactttgtcaaactcttgttttgagctggatcattttgtggatgccaaatgaatatcaaaactgaaaacacatttgttgatatttgtcttgctgtccagattgcggtatttttcagtattaagttttcaatgaactgtgtcacctaagtaagctaccctgctattcgttgtttaaatatatggttctctatttgagtctgtgttttcaataaagttctatgttaaaattggc

SEQ ID NO: 12690 - protein, 838 aa, Homo sapiens; identical to SEQ ID NO: 2191

SEQ ID NO: 12691 - DNA, 3893 bp, Homo sapiens
gctgttctctccagcgcggctcttcccgacctcgcgatcctgtcccctgcccgggcccccagccgcccgctggtcccatatattacagcagcgacagaaatatggtagtggtcgccacgttagggtccgtgggggcctcctgaggcagcctggtgccaacccgcacgcccaggctggggctcatcctggccctgcccacctcggggtcggaactacggtgggcctgggatgggggcgtcaagcactttcgcgccgtatccctccgccccccttcccgacaccctcgcggcgagcggttcttgccgcatcctgcgcagcccctgcctactttggtgcagaggcgtggggggcgggacgcgtctttcccgttcggatcgcggggaaagcagtggctccaagtgagccagaggagagctgaggagaggagggggaggccgacgacctgggccctgggcctctgaaggtctggcgtattctgacaggacacagtgagcgtctgtagaggagaggcttgaaataaaggagcacgaatattgcctggatttctggaggcctactttaaggctggccaattctgcaagaaaggcaaggaggaggagactggctcacagctctggaggacccccttctgtcagctgtggggcttgacaccacttgaacaagaaaaggagggggaaactgcaccacatcagtgaagatccacctccagtggctgctctgctggtggtggagttgctgctgacaaccaccctcaacgggtctgcacccatccaggaaatatctgtcttcctttagcttggttgtacctgttctcactctatctgtattattgaattattgactgagactgtgtttgggaaggaggctgagtgactactggactggatattgactctaactcttattcccaagcttatatccttaatcacctaaagatcagagtgtgaagaaacaaacctgtgacagatctgtggttgaggtttagactacgggaggagtatattacctgactttctttgtaacttgtaccatgactggggcagagattgagcctagtgcccaggccaagcctgaaaagaaggctggggaagaggttatcgctgggcctgagagagagaatgatgtccctctggtggtcagacccaaggttaggacccaggcaactactggggcaaggcccaaaactgagaccaagtctgtgcctgcggcaaggcccaaaactgaggcccaagcaatgtctggggcaaggcccaaaactgaggtccaagtaatgggtggtgcaagacccaaaacggaggctcaaggaatcacaggggccaggcccaaaaccgatgccagggcagtaggtggcgctcgttctaaaactgatgccaaggcaatccctggagcaaggcccaaggatgaggcccaggcatgggcccagagtgaatttgggactgaagcagtgtcacaggcagaaggagtgtcccagactaatgccgttgcttggccactggccactgctgagtctggatcagttactaaatctaagggcctgtctatggatagagaactagtcaatgtggatgctgaaacctttcctggcacccagggtcagaaaggaatccagccctggtttggaccaggggaggagactaatatggggtcttggtgctattccaggcccagggccagagaggaggcctctaatgagtctgggttctggtcagcagatgagacctctacagcgtcttctttctggactggagaagagacaagtgtcagatcatggcccagggaagagtccaataccaggtccaggcacagggctaaacatcagactaatcccaggtccaggcccagatccaagcaagaagcctatgttgattcctggtctggatctgaggatgaggccagcaacccattctccttctgggttggagaaaataccaataacttgttcaggcccagagtcagggaggaggcaaatatcaggtccaagctcaggacaaatagagaagattgttttgaatctgagtctgaagatgagttctataagcagtcctgggttttgcctggagaagaggccaatagtagattcaggcacagagacaaagaagatcctaatactgccttgaaactcagggcccagaaagatgttgacagtgatagggtcaaacaagaacccaggtttgaggaggaagtcattattgggtcctggttctgggcagaaaaagaggccagtttggagggtggagcttcagcaatctgtgaatctgagccaggaactgaggagggggccattggcggatccgcgtactgggctgaggaaaagtccagtttgggggctgtggccagagaagaggccaagccggagtctgaagaagaggccatatttgggtcctggttctgggacagagatgaggcctgctttgacctaaatccctgtcctgtgtacaaggtcagtgataggttcagagatgcagctgaggagcttaatgcatcctccaggccccaaacctgggacgaggtcactgttgaattcaaacctggtctttttcatggggttggcttccgatccacaagcccctttggaattcccgaagaggcttctgaaatgcttgaggcaaagcccaagaacctggaacttagcccagaaggagaagagcaggaatctttgcttcagcctgatcagcctagtcctgagttcacatttcagtatgatccttcctaccggtcagtccgggaaattcgagagcatcttagggccagggagagtgcagagtctgagagttggtcctgcagctgcatacaatgtgagctgaaaattggttctgaagagtttgaagaattccttttattaatggacaaaattcgggatccttttattcatgaaatatctaaaattgcaatgggtatgagaagtgcttctcaatttacccgagatttcattcgagattcaggtgttgtctcacttattgaaaccttgcttaattatccatcctctagagttaggacaagttttttggaaaatatgattcacatggctccaccttatccaaatctaaacatgattgagacattcatatgtcaagtgtgtgaggaaacccttgcacatagtgtggattcccttgagcagctgactggaataaggatgcttagacacctcactatgactattgactatcacacactgattgccaactatatgtccgggtttctctccttattaaccacagccaatgcgagaacgaagtttcacgttctgaaaatgctattgaatttgtctgaaaatcctgctgtggcaaaaaaactattcagtgccaaagctctttcaatatttgtgggtctctttaacatagaagagacaaatgataatattcaaattgttattaaaatgtttcagaatatcagtaacattataaaaagtggaaagatgtccttaattgatgatgatttcagtcttgagccgcttatttctgcatttcgtgaatttgaggagttagctaagcaactacaagcccaaatagacaaccaaaatgatcctgaggtgggacaacaaagttaatatgattaaccacctgccgctgatcagccttatgttcccaaagagccctgagtagtgctttggtgttcacagtctgtttttttgttgtaacttatattttttaatgctgatgttaactttgtcaaactcttgttttgagctggatcattttgtggatgccaaatgaatatcaaaactgaaaacacatttgttgatatttgtcttgctgtccagattgcggtatttttcagtattaagttttcaatgaactgtgtcacctaagtaagctaccctgctattcgttgtttaaatatatggttctctatttgagtctgtgttttcaataaagttctatgttaaaattggc

SEQ ID NO: 12692 - protein, 838 aa, Homo sapiens; identical to SEQ ID NO: 2191
